United States Patent Application Publication US 2015/0315605 A1 - sequence listing, part 4

SEQ ID NO: 5165 - DNA, 920 bp, Zea Mays
gtcatgtttgcaaaattctctgtgatgatgtgaacgaaggtctgaaaaaatcacagaactcactcgaacgacggtgccgccgcttgcctcgccggaccatggccgctgtgccgtcggggttcctcctcatcactggcccgccggagaggtgagagagggcggagaaaggatagggttcgaggttgtcacgctcgacggtagaactggaccactttcctcatgcaaggtttccagcccggagtctgttagatggcctaccgtcgggaaatacaaagtagacgtagcatccttggaatcattagcagtacctgagctgcaggttaaggaagaaacagatctcttcatcattgacgaagtgggtaaaatggagctgttcagttcagcatttttccctgcggtaatgagagttattgaatccaatataccagtgttggccaccatacccattcctaggcagggccgggacattccaggagttgcgaggttgcggaatcatcctggagcagctgttttcaccttagacactggtaacagagatacgatgagagatactatatgcagtcagctaaggagtttgttgcagaggtgatctgctaacctccctgtgtctatgtagccactgctttttttgacataagataacaagcaaacgatcaagagtagaagttttctctcagaacctcgagtatctgttttcaagtttagctctgaatggatgataagcatgtcgttcagtttgttcttagttccgtatgtggttattcaatcatgtatttgcattcggtgggggcaaggttttattgccacaataactctcgcttgtatggatgcggttagcatgtagtgactctacaacaggtatcacatgatttgcacaactaatttgctaataggccattattgcctgaatcctacgggcc

SEQ ID NO: 5166 - DNA, 2148 bp, Zea Mays
ccacgaaccaaacatggagaaaaacgccgaactttacagtcaagtagcgcactttggcttgtgggcagctgtgcccctatcacggtatccatacactcccggcatcccttccatccgcgacccgccgcgtccgtacaccggaccatgctctccacacccgccgcaggctggcgcttccgccggggaggtctgccctggaggcttcatacgtgctcctgcctggcgtcgccgctgtcttccagcggcggcgagcctgaaaaggcgaggcctttgctcgcggagagatatatttcggatggcagttctaagctgcaacttcgtttggagaagcatgaatctccagtgaacggtgtggaagatgagaatgcagattctttgatcccacaggctattttggactttgtgcttccagctgggtttccagggtctgtttcagcggactacctggactacatgttgttgcagttcccaacaaatgtgacaggttggatctgtcatgtattggttacatcaagtcttttgaagattggtacaggctgtaggtgttgggtcctttacaggaacttctgcagctgcatctgctgctgctatcagatgggtatcaaaggatggcattggggcctttggacgtcttctcattggtggacgctttggagcacttttcgatgatgacccaaagaagtggaggatgtatgcagatttcattggaagtgctggaagcatatttgagcttagcactacattatatccaggttactttctcccacttgcatcattagggaaccttgcaaaggccatagcaagaggatttaaagatccttcatttcgcgttatccaaaatcactttgcagaatctggaaatcttggagaggttgctgcaaaggaggaagtatgggaagtaggagctcagcttttaggcctttcaatcggtgtactcattatggtatatatgtacagttcattatgttttatatgttgtttatatctaaccgcctttttgtatggcaaccttattgatcagttataatatcgcactgatggagacagatgccatcatttttatatccatttacagttgctgtttttattctaggataagacaggtgtaaagtcatcatacttaactcttgttttaacttggctgagtgttcgtcttctacatctttggttgcgctatcagtccatatcagttctcaagttccgcacaataaacctaaaacgtggccggattcttgtgaaatcacatgttgcacaacatactgttcctggttatgttgcttgcaatgaggaagaaaacattttaacatgggaaagatacttgcgtccacaagtttctttcggtgtgcccatggaaagaatgcttggtggtgacaaatccagtgacatggtgaatagattactgaagttatacaagaacgagaagtacatcctcttcttcgagcagtttggatcaagggagccgacatttctagttactttcaaggaatcagcaacaagtatgtcagtcctaaggagcctgtggcaagcacattggcttcacaagaatcagctaaggcaggacgaggttttcccatggttagaagaaagcatagtcgcattggagaatggattcactgacttcctcgagcaattggggagtgctggctgggaccaggacctgatcattttgaaagtcccaaaagagcccgtcttggtgttggaacatctagaagaccaagaggtgtaagatgccacggctggtctgttgctaacctagaggacaatgtagagtcttcttttctattgcgtgatcatgacctgctgaatcaattgcaactgagcatcgcgaaggagccgagttcccatgtggcagatgcttagtgatctaacaagaatagaaactgtctggcatgtgacatgatgtttatgctttaaggagtgtttggtttatagggattaatttttagtcccttcattttatatgattttagtctctaaattatcaaatacgtagtttctgtatttcataatttagaaactaaaatagaataaaatagaatgactaaaaatagaaaccaaacactcacttagtctttacactcaatattatgattataatgcatcacctgctgtcaattgagttgatgcccaaagggcaaaggcactcgc

SEQ ID NO: 5167 - DNA, 2701 bp, Zea Mays
gtctctctagtactggatcagtccctcttccttttccctctcctcagtccctgtctgctgctgctagacagcacaaactgcggtccggtgcgctctcctcggcggtggagttggagctgcagtgcaggggaagaaccgaagaagcgagctagagccgcaagaatgataggcgccaaggccaacgccgccggcccgtgcccggagtatgcggaggtcgaccccaccggccgttcagcgacgttcttggcaagggcgcgtccaagattgtgtaccgggcgttcgacgagtaccaggggatggaggtggcgtggaaccaggtgaagctgcacgacttcctgcagagccccgaggacctggagcggctctactgcgagatccaccttctcaagacgctcaagcaccgcaacatcatgaagttctacacctcctgggtcgacgtctcccgccgcaacatcaacttcatcaccgagatgttcacctccggcaccctccgccagtaccggcagaggcaccggagggtgaacatatgggcggtgaagcactggtgcaggcaaatcctcagcggcctgctgtacctgcatagccacaatccgcccatcatccaccgggacctcaagtgtgacaacatcttcgtgaacggcaaccagggagaggtcaagattggcgacctcggtctcgccgccatcctccgcaagtcccacgccgtccactgcgtacaccggagttcatggcgccggaggtgtacgaggaggagtacaacgagctggtggacatctactcgtttggaatgtgcgtgctcgagatggtaacgtttgagtacccgtacagcgagtgtacacaccctgtgcagatctacaagaaagtgatctctggtactaagccagaatctctgtacaaggtgaaagatccaatggtgaggcacttcgtcgagaagtgcctagcaacggcatctcaaagactgtcagcaagagaactgcttgaggatcccttcctacaaagtgatgacgtggttgcttctttggatggtggaaattaccatgtgccggccaattatatacctcagccttcatatttagggcatacctacagcaatggctccatgatgagtaatggattctcagaaagcattgatgaagatgctctcagtgaagactgcgaggatgatgacatgaaaggccaagatggcattgacctgttcaacgagaatgaaggtgagcttcttggcaatgtggatataacaatcaaagggagaaagagtgaggatggaggcatattccttagattgcggatttctgatgatgatggacgggtacgcaacatctattttccttttgacgttgaggctgataccgcactaagtgttgctactgaaatggtagccgaactcgatataactgaccatgaagttactcggattgctgacatgattgatggtgaggtcagtgcactggtaccagattggaggcctggtccgggcatagaggaggctcctgacacttcatactgccacgattgtggatccatcgtgtcatcgtgtggttcactttacgcctacatgtcatcaggccgtcgaggttgccaatgtgcagaggtacatgggcggtttgaggagatcacgttcgaagctgatggagagcagtgtgatttgcaggaatctgcaggcagctctgatgatggaggtggcccaacagagcactatgtcaaaggcaaggagtccactcatgtgaatggccttctacagatgggtagaagagatctttctaatcagctttgcttcagttcattccaagagcaatcatgttcatctaaccattatgagaacgaaactaaccatcacacaaatgggttcgacatgaagcatgaggtaaagattgccaagtacaaagcacggaaaatggcacagttaaagagggctatccatccatctcttgacttcgacaatgcaaatggagtaaataggatgaagccttcactgaacaagctgcaatctttccatattggaaagaaccacagtttccgggtaccgaccggtgaccgaagcccgggtaaagtaagtacggattaccattctaatttgaacagccaattatcgcatagcaggcaccccgatccaggagcccaaagggcctggcattgtgaggtcaatgcagctgggagctctgattgtatgtttacagcaaggcgctactatgccggagctcagttgccaccaaatctcccgcgaacaaaatctgtacccctacatgctgtcgacgtctgaaatgctcttgccctgtaaagtttatagtgtacatctgttttggttctttctgtacccattatgaaacgtagttgctgagagcaggagactgaatgtgacgaggttgcatgtggattacggctgagctgtttgtaaatttccatcttgtgaattcagagaggttagattgttcgagtccaatccacatcatttgcctcactggggcaaccagttttatcctctttactataggcaagagccgatttccgagatgcaaaattgctgttaatcaggcagaaacaaggcatgggactctatccttgcgttggtactagatgccacctacctctcctagttccagttgaatatacatcaaatctgcattgccagcctatgcatttgcattgccaatgccaactgctgcatggacgctgcactaatcaattgacgcttccatgactc

SEQ ID NO: 5168 - DNA, 2474 bp, Zea Mays
atgatgaatttagaggacgctgagagcgtgtgtgagaaggtgtgcgtggtcgaagcggatttgactcgattttgtttataacaacatcaggcaggcagctacctcgtgataatcaaagcttaattaatcccgagcgaaaattatgatgcgcacatggctgccccgccggacgagagatgattattacaagtaagcacgaggaaagggaagagaagaagaagagggctcgtctcgtcttgcaggccggaggctgcgtcgctgccccgccggcgccgccgtatgccagttctttgtcagtcccttcggcaggtcttcgtgggtccttctccttcgccggcgacgagcacccaccaaggacagcgggtacagcgctagttattgcttcaccttccttatctttgctgcagcaactggaggccgaggcttttacaaggagctggggaagaatgggcagaagctgctatcgaatctgaagctttgcttggcacaccagcactggagagatgtataagaaccaactccaggagcttgctcagaggagctgcttcaatctgccgtcctattcctgcatccgggagggaccagatcatgcaccccggtttaaggctacagttaatttcaacggggagatgttcgagagcccagtgttttgttccactctgcggcaggcggagcatgcggcagctgaggtagcactcaatgagttatcaaagagggggccttcgtcgacgctggctgccaaagttctggatgaaaccgggatatacaagaatcttcttcaagaaactgctcatcgagctggtctaaaactccccatctatactactattagatctgggccaggtcatacgcctgtgttcgcatgcacagtggagttggcaggaaaggcatttactggcaatcctggcaagaccaagaagcaagctcaaaagaatgctgcaatggctgcctggtctgaattgaagaaactgcccagggtaggtgagccgtcatcctcatcttgtccacctgatcaggatgatgaagtgcaggaacaggtcgtagttactcggactcttgcaagcttgaaccaggcaaatagtggcaaggtgccacatcagaaggaaaaacagcaaagcaataaccgcccatcatcacggagatgttatcctaaaccaaatacaccattctaccgaccatttatgcaaaatcaggcttatcctagcgttccaccagatcaagctatgtaccatctgtggcatcggatgcaagtgacagccaacgcctcgctttccagtggtaccagctatgggcaatacaagtttttgcccaccagcagctatgctccccatgtaccctccttcacctcaagggcaattctccaatccggctaaccaggatgctctaggccttcttccatgttttcctgatgcttctcctgccatgctacggcacttctcaccttaccctgtctcctatgtgccaagaagtcctctgccggttactgttcacaatgttcatgagagaaggcatgaccatactgaaacagttgagcttcctgatgctgtggtgttctcccaatgcacgaccctagattcctttaggacatcagaatgtggcggtccaccactcaaggttcaagaaccaaccaaaaatcggaaagaaggctgtattgggtcccctgagaaagaacttgacactcttgccgtctcaagctctaccgcacaagcgtcgtcgcaaaagttggaagcaaatgaaggtaagcaaacagtgcaggcaggtttgaagcagacccatgaacagcagctgatgtcatcctcgtcttgtgttagttcttcagttgtggcacagagctcgcattacgctagctccatccagcatgatgagtctatacatagaaggaatcctcctcatactagttcgcctgcattgcctgatgtgtggtcttcccgctcgcaagctctgcccagatttggatcaccaagttgggtgttccagcagcgaccttggttggctgcacccgtcacagttcgaaccgctgttcctgtctgctcagccaggccaaacgtggtgaattctaccactggaataagacctgctgcccagagccatgatggagagagagatctgaacagcgccgcagcagcgagttctggattcaataaactccaaatttgagctgcggttttggttctgctgagcttttcatctcagttttgtttgcttcttggcttgaggtttattttttagttagatataccagataggctcttaggttttcattttacatttaccagatgtccagttccttctgaagataaatggacgagaactgtaatataaaaaatgcagaggcctttctcatgcgatttgaattcagtttcagtatgcaatcgatgtagttccagcagtgtatggtacaaccgcctggctgctgagctttcggcagctgtagtcacagccaatgcaatcgagcgcagagacatagcttttac

SEQ ID NO: 5169 - DNA, 801 bp, Zea Mays
ctgaagcagataagccgtacgccgtccccttgcacagcaaacatccatggcgactgcccgcttgccctctcgctccttcctgtccccggctcagcaatcctatccacggcttcccgcctccgtccgcctctgcctctctcatcacgagcaacctcccaccggccccaagcggcaccgacgcgccgccacttcgcatcctgccttttctgcagccgcgcggggtcgtgccaagaagattcccatcgcggacaccgatgagcccgccgccggagtccgcgtcaccgatcgcggcatctcttaccgcctcgatggcgcgccatttgagtttcagtatagctacactgaggccccacgcgcacgccccgtagcgctccgtgaggccccgttcatgccgttcgggcccgaggccacgccacgcccctggacgggaaggaagccgctgccaaagagccgcaaggagcttccggagtttgactcgttcgtgctgccagcaccggggaagaagggggtgaagcccgtgcagtcaccgggtccgttcctcgccggtatggagccgagataccaatcggtgtccagggaggacatactcggggagcccctaaccaaggaagaggtctccgaactcgtgaaagggagcctcaaatccaaacggcaactcaatatgggcagggatggtttgacacacaatatgttggagaacattcattcacattggaagaggaaaagagtttgcaagataaagtgcaaaggtgtctgtacaatagatatggataatatctgccatcagctagaggaaaaaga

SEQ ID NO: 5170 - DNA, 2584 bp, Zea Mays
ctcgatgtatttccacacttccgacctgcgcctcaccaacggctcgagggcaccgccgaccctcggaagaccagccgttgttcatcatggatagaggaggcgtggcgggggcgcatgcgtccgcggtgggtgcgcctagagcctgcagccaccgtagcgaaatctccaatcttgatgttgcgcggggcgaagattgcctctgccgtcgttagggtcaagcaccgagtcgccggctgctgccccctctccctatcgtcgcgccatccatttcctcgccgttgacgacgacgagcgagactagggaccggccttcgacgaagtggcggctactgctcgatctagcgagggtggctggcatcgagctggggcggcggccatgagccatctcttcgacaacaggtgagaatgaatcttacagttcaaccatatatcctcttccggacaatgtaaatatcaactccagtagatcgatcagtcggtgtcctagccatggcatcagaatagcaatggacagctgcgacagaaactcaactagcagaatcacagggaaggatattaagcaggcgattatgttcagtgcctctttgaacaagctcacattaaaccaagatgaggccaccgaatacacaaatttgatcctagaagaacttcagacaggtcaaggagtcctccagatgaatgtcatgagcaagggcctgtcaagggatctccaaccaacctgcgggccaataccagtgccaatgaaatgcagccgacagcgacatatacttactgcaaccgtagtcttcttccaagctcactggaggcgtatatttgtggttttcttgtggctcatggcatgtgctgcactcttcacatggaagttcatgcagtacagacagcggttggctttcgaggtaatggggtactgcctgtcgacagccaagggggctgcagagacgctcaagctcaacatggccattgtgctcctacctgtttgccgcaacacggtcacttggctcaggagaagccgtgttatcaactcggtcatcccatttaatgacaatattaacttccacaagcttgttgcagcgggaattgtgatcggtgtaatccttcatggaggcatccacctggcatgcgacttcccaaggatcacaaggacagataaggccttctttggacgcacaattgccgctgactttgggtaccaccagccatcctacctggagatagtggtatcaaccgaggggacaactggtatagcaatggtggtactaatgtttgtcgcattcttgcttgctagtagtccttcgagaagaaatccaggaatgctgccacctctcgtcagacagttagctgggttcaatgccttctggtactcgcaccatgtgttcatcgctgtctatgtgctcctcattgtgcattccatgttcctattcctagcaaaggatgtagcagagaagacgacgtggatgtatgtcgcaattcctgtggtgatctacattggagaacggatgttcaggatggtcagatctatggtgttcgatgtcaagatcctcaatgccacagtttatccagggatggtacttgcactcaaggtgacaaagcctccaggttttcggtatcaaagtggaatgtatgtatttgtccaatgtccagaagtatcaaagtttgaatggcacccattttcccttacatctgctccagacgatgatcacttgagcatccatataagatctcttggtgattggagctaccaaatgtatgatgtcttccaacagatgctactttccagcaactccagcatgcctaaaatattctttgatggtccctacggtgcagcgtcacaggatcactcaaagggcatggcaacttaaattatcactctgaccgactgaagaaggcctacttttattgggtgacaagagagcaaggatcctttgagtggttcagggatatcatgaaagaggtttcggttctagacagcaagcagggtgtgatagaaatgtataactacctgacaagtgtctaccaagaaggtgataagcggtcgatgctaataagtgcgattcaagcacttcattttgcacgccatggcattgatatcatctcaaaaactcctgttcatacgcacttttcgaggccaaactggcctagagtgctacatggccttgcaagaaggcatatcggggagaggataggggttttctactgtggtccggacgatttgggaaggcagctggagaagctctgccacaaagtgaacacaaaaacattcacgcgatttgtgttccacaaggagcatttctaataatagagactagcatagatcaactccttaggaacaaacctgtcaagtatgatctcaaagctgccaagcacttcatttttttcgcatcactccttcctatcttttgctttagtatctctgtcttcatttaaccattataaagctgatcttacttgaggagctttgtatctaactagaaaaaaacagcgccctatcgggcgcttagacgatttcttgaatgtgatctttgtgatttttttttcttttcagctttcagtgtgcaccctaatactcagaacaagtctactatta

SEQ ID NO: 5171 - DNA, 5096 bp, Zea Mays
gaccatgcgcggccctcgccgcgccgggcgccgacgtcggcctcctcagaaggctactaccgacagggcggcggcgcgtacgaccgctcctaccctgacgacccgccgcctgtctacacgccgtcgcgctcggaccgatactggccggaggacgacggcgggcaatacaagggtttcggtcggtatggcggcggtggccgcagggacggccgtgacatgaggggttcgtaccggaggtccccatacaggggtggctacggaagcgacttctcccgaaaccatccagagcagccccctcccccaccacccagaaggtctccgttgaggtcagtcgctgttccgatctgctatgactcaccgggcaatagagttgacaggggggatagggacaacctcccacgggtgacaccatggcggagaagggaaagcagatctgagccagcagacgctgttggacttctctctgttggccaaaccacccggctctctgcctcagggaaggaggcttcagctcagcctctgtccgtgtctggtcctcatgggaccgaggacgaggcaccaaggaagaaggcacgccttggatgggggcaaggtttggccaagtatgagaagcagaaggtccaagggcctgtggatcctgctgaagctgttgctgatggaagtccagctgatggcgaactgaagaccacctctcctgtgcctgtgcctgtgcaccctgtgcctgtgcctgtgccttatgttgcacctgcacctcctgctgcaccagtgcttgcgcctgcgccagcaccttctgctgctcctgcacttttgtctgcccctatgcaatgctcatctccagttaccgggccaccatattgttcctcagcacctgaagataaatcttgtgaaatgatgccaaatgcggtcactaactctactaaagatgtcttggaggctgatgacacaactttcaataatgaatttctgatcaagttagatcagctcggtgatgatcctgttatttcccttggaaacatgcttgttgaacttatccagcacgaggattcttgttctggggattcaaatggcccgaccagtacatataagctgctcctactgaaggaaagcatttccaaggagattgaaaagactgaactcgagattgattcattggaaggcgaacttaaatctgtgaatactgaggctgcaactactcttgaaggttctcccacaggggtgacacatacagaaaatctttcaccctctagtgggacatccaaggttcctggaagtgtggagatctgtgatacatctgatatgataaaagaaccaggggagctcattggttctcctaaggtacctgtggtgcagtatgatgatgtcaaaagtgctgatatgatggaaattgaaacagctccagttcataatgcaaaaacagttccttcagaagctggtgctatatctcctgtagtcgctgagggtaaggcctgtgcagctgctgatcttagctcattgaaagcttctgaagaagctgggtctcaaaatgatattgacaatggcaggctggaaacttcttcacgccaagctaatgctgattccatgaaaatagaaattagtgatgacctaccagtgaagaaatggacataccatgatcataagtctgatttgctcagttctgtcacatctgcaaatagtgctatagccaaagaaattaatgaagtgctatttaaatcattgcctgctgatacacctcgccttgatttgtttgcatcaagtcatcttctgagccaaaggaagagcgatttgattgtcaaagaaaggcttggagtatgtaaaaccaggctgaggttgaaagagcagatgcttacaatgaagttcaaggcatattgtcacttgtggaaagatgtccaactattttctgcaaataaacagcgttcaaagtctaataagcgcactgatcagagcaaccgaacatcacaaattggatctcagaggcaacgctcctctaaccgctcgcgattaaccatgcctgctggtaatttaagtacattctcaactccagaaatgtcagatgttgcaatgaggttgttttcagagttcaaaattaagcggtgcagaaattacttgaaaatgcctgcactgattattgatgagaaagagaaggagtggttgaagcttatgaacaagaatggtctagttgaggatcctgttttagttgagaaggaacgggtgatgataaatccgtggactcaagaagaaaagaaaatttttatggagttgcttgctaaatttggcaaggatttctccaaaatcgccagtttcattacacataaatctactgcagactgtgtggagttctactataagcatcataaatcagatagcttccgagaagtgaagaaactattggaccttcgtcaacagcaacccaccagcaattttcttggagcgaaatctggacataaatggaatcctgagtcaaatgctgcttctcttgatatgcttggggtagcatcagtagtagcagcccatggccttgaatatgcaaaacaagtggagaaaatttctgcgaaatccctcatccggactgcatatgggcccaatgtgacttccgtggctaataaatcttctgataaggagtgcattgaccatgtgcctttgcacgagagagaatctgtagcagctgatgtactagcaggcatatgtggcactctctctcctgatggaatgggctcatgcattactagttctgctgatcctggacagaagattagcatgaaaagagtggagcatgtcttgtcccaagaaaatgacaaaaccgttgaggaggaagacacactctctgatcaagagtgtgaagttgacccagttgattggaatgacgacgagaagtcaattttcattgaggctatgaataactacggaaaggattttgctcggatctcgtcatgtgtgaagagcaagtcatatgaacaatgcaaagtgttctttagtaaggctcggaaatcactcggtttggatttgatccatcaaggggcagccgatgttagtatgccagctagtgataccaatggagggaagagtgatactgatgaggcctgcgctgtggaaatggattcagctatctgtagcacacagtcatgttcaaagattgcgatggatgtttgtcctactgaaggagccattggagggcctaactctgttataatctctaagcaggcagaagcatatatatcaaatgggtgcaatgctgatgttaaaattgaggaagatgagaaggtagctgataaaaattgcagcattgttgatgctaagaggtccagtgatgctactcacgaagctggtcctattgacatcaattgcccaggaagcacagataagctgcaaggaactgatgatgtcgttgacctagtaaacatgcatagtaatagtggcatcagctcttcagctaagcatgcagtggccattcactcggaaatgagatccactttacattctgtagaggtccttcaaacagacaaaggtgaaggtactggtactgatttgtcctgggtggaagaatgttcacaccatgctctggataacacaccaatgaaaaatggaaattctggtgccccggctttcttggcttcagatagtggtatcaaggacaatgttcgcatctcaaacataactgctgcttccaccgttagtcctgcattcacttcaagttatcagcattctgtacctggagatatgcccctgccaaaaccaaagccacttgttaccccgcttaccccaaaggatttaatgcctgtgcagttcagttcagtgcttcctgaccccactgcaattcgtttcgagggcatagcctcaataactacgcccaacttcgaggacactggcaacagagtcagtggtgctctaggggctaaagagatgagcaagtacccagcttttagagacccatctgaatggcaggtccagcagcttgtgccttcaaaacaattccgatggcattcaatggcccagagaccacgaaggaggactggaaggctctttgaggccttgctctcgcaatacaagctccgagggtgatgagcaacaaaagcggcctggtgatgtcaagttgtttggacagattctcagccatcagtcaaccctgcagagttctggcttgtcttgcaatggtaacaagagcaagcctccctcaccaaagatcgacacatctgtgagatccatgaacaatccaatggaccgtgtggtttgttcttccaggcctggcaccactccacatctgggtctggaggaaagattggcaaggtgctatggtcatctggatggtagcacggcacagcccgagccactgctcgtgatggcaaagcgccagcggtccttggccggcgtacagttttactcggctaagaacggcacgcttggtgtgttaccagattaccaacaaccttcgacgcagccacagcaatcagatcccaagcgtgtggaaaggttgtctgatccgcagaagaggaacgtgctggaactcatctcgggtttccagcagcccggcagagtcgcccgtttcgggggtgctggcatcctcgtaagcggcaacgtctcggaccctgtggctgctgctctcaaggctcagtatggtcccggttctaagattatgggcagcgacgtggatccttggacggacataggaagcaggtagcgccgtagcagctctactgcttctgttgctccttgtaccatatatttagttttggtgtaacttgaatgaaatcatcagaatatgagatgtggggggtggggagtgaatggctttcctgcccatactatctgtaggcttttggccagtagcagtcgggtttcgctgtttactggcattaacatttttactctttcttctgcagctccatacccttttggtatagcttgacatgccagcagtggcacagtgccgtaggttccctagaggtgaactagatgtttgtcagcatggtttgattttgccagcctatgcagaaaacctcacttggtctttgtaatgtggtaatgccatgtatcagtatcctagtctgatggagttttggttgagacagttctcattgcccgctggttcatcttctgtttct

SEQ ID NO: 5172 - DNA, 2402 bp, Zea Mays
atctctctctctctctgtctcccaccacctatcttccctccccatgtgggcggcctcgagctctgcttaggtctcacagctgtgctctcgttggttgggtgatccgccccttgtcggctcctttcaactcgagagctccgggacagcgagatctgcgctgtcgccgccttacctttcttacgagctcgcgtgcaggcaccttcagagatggattttttcacagagtatggcgaaggcagcaggtacaagatagaagaggtcataggcaaaggcagctacggcgtggtttgctctgccgtggacactcatactggcgaaaaggtcgctataaagaagataaacgacatcttcgagcatgtgtctgatgcgacgcggatactccgggagatcaagctgcttaggctcctgcggcatccggatattgtggaaataaagcatatcttgctccctccgtcgaggagggagttcagggatatatatgttgtctttgaactcatggagtctgatctgcaccaagttataaaggctaacgatgacttgaccccagagcattaccagtttttcttgtatcaattgcttcgaggattgaaatacatacatacagcttattgcagcaaatgtatttcatcgagatctcaaaccaaaaaatattctggcaaatgctgattgtaagctcaaaatatgtgactttggcttagcaagagtagctttcaatgatactccaaccgccatcttttggacggtggtaccgagcaccagagttgtgtggatctttcttctccaagtatacaccggcgatagatatatggagtattggctgtatatttgcagaattgttaactggaaaacctcttttcccggggaaaaatgtggtacatcaacttgatataattacagatctccttggaacaccttctcccgaagcaatatcaaggattcgtaatgaaaaggccaggcgctacttgagcagtatgaggcgaaaaaagcctataccgtttacgcaaaagttcccaaatgcagatccacttgcactatgtttgttagagcgaatgctcgcttttgagccaaaagacaggccaagtgctgaagaggctcttgctgatccttatttcaagaatatagccagtgtggatagagagccttctgcacaggctgtcacaaagcttgaatttgaattcgagaggcggagagttacaaaggaagacataagggagcttatatatagggaaattcttgagtatcatccaaagatgctgagggagtttcttgagggaactgagtcaagtggtttcatgtacccaagtgcagtagatcattttaaaaagcagtttgcataccttgaagaacattatgccaagggatctacaggaactccacctgagaggcaacataattcattgccgcggccgtctgttgtctattccgacaaccgatcacaaaccacagccaacatcaccgaggatctttccaagtgtatgctcagagaaaatacacagaagacacatccatattctgcttctgttgcaagtaaatttccaccacatgttcctcaaggtgatgttgcaaggcctggtaaagcagttggttcggtgatgcagtacagcccatgtccagcgcctgctgccgagcgatatgagcaacgaagaatcgctaggcacccagcagttgccccaaacaatatcccttctggaagctcataccccagaagaagccagacctgcaagagtgagacaggtgatgccgaaagccatatggatgcgaaccaagctcggcagccaaagccatatgcagcgaacaaactacctgctaccgttgatagtcgtggtggtcactggtaggatttctgcggtgcaccagaaagccattccaaaccgtttcttaacatgttatcagtatcgattacttctgctgagtgctacattattctgacaaatccagaaatgtagttctgtacagatttgtgttctttttccggatacctgaataccgaaagactgtacaactgtagtttctgattcctactccttgtcgctattcaatcgctaaaggatctgtccctggtggagaagaaccggcagattcaatgcaatgttcttgactgacgtcatggattttgttcttcaacctggtagctctgaagacgaattgaatagctgctagtttctgctaatcatctacagtcaggtgcagagtgttctgggagctagttctgaatatcactgtcacgctgtaatctgcacgtttctgagctcctaacttctaagcatgccactaccgtatccctttgtaatttaatcagctgtaccatccagtactctgtttacatttgtagaaacgctctgcaaagaagctattatgtgggagtttctttgctattattataaatgttctgttgttataaa

SEQ ID NO: 5173 - DNA, 2416 bp, Zea Mays
atctctctctctctctgtctcccaccacctatcttccctccccatgtgggcggcctcgagctctgcttaggtctcacagctgtgctctcgttggttgggtgatccgccccttgtcggctcctttcaactcgagagctccgggacagcgagatctgcgctgtcgccgccttacctttcttacgagctcgcgtgcaggcaggcactgagcagcaccttcagagatggattttttcacagagtatggcgaaggcagcaggtacaagatagaagaggtcataggcaaaggcagctacggcgtggtttgctctgccgtggacactcatactggcgaaaaggtcgctataaagaagataaacgacatcttcgagcatgtgtctgatgcgacgcggatactccgggagatcaagctgcttaggctcctgcggcatccggatattgtggaaataaagcatatcttgctccctccgtcgaggagggagttcagggatatatatgttgtctttgaactcatggagtctgatctgcaccaagttataaaggctaacgatgacttgaccccagagcattaccagtttttcttgtatcaattgcttcgaggattgaaatacatacatacagcttattgcagcaaatgtatttcatcgagatctcaaaccaaaaaatattctggcaaatgctgattgtaagctcaaaatatgtgactttggcttagcaagagtagctttcaatgatactccaaccgccatcttttggacggtggtaccgagcaccagagttgtgtggatctttcttctccaagtatacaccggcgatagatatatggagtattggctgtatatttgcagaattgttaactggaaaacctcttttcccggggaaaaatgtggtacatcaacttgatataattacagatctccttggaacaccttctcccgaagcaatatcaaggattcgtaatgaaaaggccaggcgctacttgagcagtatgaggcgaaaaaagcctataccgtttacgcaaaagttcccaaatgcagatccacttgcactatgtttgttagagcgaatgctcgcttttgagccaaaagacaggccaagtgctgaagaggctcttgctgatccttatttcaagaatatagccagtgtggatagagagccttctgcacaggctgtcacaaagcttgaatttgaattcgagaggcggagagttacaaaggaagacataagggagcttatatatagggaaattcttgagtatcatccaaagatgctgagggagtttcttgagggaactgagtcaagtggtttcatgtacccaagtgcagtagatcattttaaaaagcagtttgcataccttgaagaacattatgccaagggatctacaggaactccacctgagaggcaacataattcattgccgcggccgtctgttgtctattccgacaaccgatcacaaaccacagccaacatcaccgaggatctttccaagtgtatgctcagagaaaatacacagaagacacatccatattctgcttctgttgcaagtaaatttccaccacatgttcctcaaggtgatgttgcaaggcctggtaaagcagttggttcggtgatgcagtacagcccatgtccagcgcctgctgccgagcgatatgagcaacgaagaatcgctaggcacccagcagttgccccaaacaatatcccttctggaagctcataccccagaagaagccagacctgcaagagtgagacaggtgatgccgaaagccatatggatgcgaaccaagctcggcagccaaagccatatgcagcgaacaaactacctgctaccgttgatagtcgtggtggtcactggtaggatttctgcggtgcaccagaaagccattccaaaccgtttcttaacatgttatcagtatcgattacttctgctgagtgctacattattctgacaaatccagaaatgtagttctgtacagatttgtgttctttttccggatacctgaataccgaaagactgtacaactgtagtttctgattcctactccttgtcgctattcaatcgctaaaggatctgtccctggtggagaagaaccggcagattcaatgcaatgttcttgactgacgtcatggattttgttcttcaacctggtagctctgaagacgaattgaatagctgctagtttctgctaatcatctacagtcaggtgcagagtgttctgggagctagttctgaatatcactgtcacgctgtaatctgcacgtttctgagctcctaacttctaagcatgccactaccgtatccctttgtaatttaatcagctgtaccatccagtactctgtttacatttgtagaaacgctctgcaaagaagctattatgtgggagtttctttgctattattataaatgttctgttgttataaa

SEQ ID NO: 5174 - DNA, 2433 bp, Zea Mays
atctctctctctctctgtctcccaccacctatcttccctccccatgtgggcggcctcgagctctgcttaggtctcacagctgtgctctcgttggttgggtgatccgccccttgtcggctcctttcaactcgagagctccgggacagcgagatctgcgctgtcgccgccttacctttcttacgagctcgcgtgcaggcaggcactgagcagcaccttcagagatggattttttcacagagtatggcgaaggcagcaggtacaagatagaagaggtcataggcaaaggcagctacggcgtggtttgctctgccgtggacactcatactggcgaaaaggtcgctataaagaagataaacgacatcttcgagcatgtgtctgatgcgacgcggatactccgggagatcaagctgcttaggctcctgcggcatccggatattgtggaaataaagcatatcttgctccctccgtcgaggagggagttcagggatatatatgttgtctttgaactcatggagtctgatctgcaccaagttataaaggctaacgatgacttgaccccagagcattaccagtttttcttgtatcaattgcttcgaggattgaaatacatacatacagcttattgcagcaaatgtatttcatcgagatctcaaaccaaaaaatattctggcaaatgctgattgtaagctcaaaatatgtgactttggcttagcaagagtagctttcaatgatactccaaccgccatcttttggacggattatgttgcaactaggtggtaccgagcaccagagttgtgtggatctttcttctccaagtatacaccggcgatagatatatggagtattggctgtatatttgcagaattgttaactggaaaacctcttttcccggggaaaaatgtggtacatcaacttgatataattacagatctccttggaacaccttctcccgaagcaatatcaaggattcgtaatgaaaaggccaggcgctacttgagcagtatgaggcgaaaaaagcctataccgtttacgcaaaagttcccaaatgcagatccacttgcactatgtttgttagagcgaatgctcgcttttgagccaaaagacaggccaagtgctgaagaggctcttgctgatccttatttcaagaatatagccagtgtggatagagagccttctgcacaggctgtcacaaagcttgaatttgaattcgagaggcggagagttacaaaggaagacataagggagcttatatatagggaaattcttgagtatcatccaaagatgctgagggagtttcttgagggaactgagtcaagtggtttcatgtacccaagtgcagtagatcattttaaaaagcagtttgcataccttgaagaacattatgccaagggatctacaggaactccacctgagaggcaacataattcattgccgcggccgtctgttgtctattccgacaaccgatcacaaaccacagccaacatcaccgaggatctttccaagtgtatgctcagagaaaatacacagaagacacatccatattctgcttctgttgcaagtaaatttccaccacatgttcctcaaggtgatgttgcaaggcctggtaaagcagttggttcggtgatgcagtacagcccatgtccagcgcctgctgccgagcgatatgagcaacgaagaatcgctaggcacccagcagttgccccaaacaatatcccttctggaagctcataccccagaagaagccagacctgcaagagtgagacaggtgatgccgaaagccatatggatgcgaaccaagctcggcagccaaagccatatgcagcgaacaaactacctgctaccgttgatagtcgtggtggtcactggtaggatttctgcggtgcaccagaaagccattccaaaccgtttcttaacatgttatcagtatcgattacttctgctgagtgctacattattctgacaaatccagaaatgtagttctgtacagatttgtgttctttttccggatacctgaataccgaaagactgtacaactgtagtttctgattcctactccttgtcgctattcaatcgctaaaggatctgtccctggtggagaagaaccggcagattcaatgcaatgttcttgactgacgtcatggattttgttcttcaacctggtagctctgaagacgaattgaatagctgctagtttctgctaatcatctacagtcaggtgcagagtgttctgggagctagttctgaatatcactgtcacgctgtaatctgcacgtttctgagctcctaacttctaagcatgccactaccgtatccctttgtaatttaatcagctgtaccatccagtactctgtttacatttgtagaaacgctctgcaaagaagctattatgtgggagtttctttgctattattataaatgttctgttgttataaa

SEQ ID NO: 5175 - DNA, 2574 bp, Zea Mays
atctctctctctctctgtctcccaccacctatcttccctccccatgtgggcggcctcgagctctgcttaggtctcacagctgtgctctcgttggttgggtgatccgccccttgtcggctcctttcaactcgagagctccgggacagcgagatctgcgctgtcgccgccttacctttcttacgagctcgcgtgcaggcaggcactgagcagtgagctcccccccgtcttcctcagcctcgtttcccctctcgttgctggatctggctcgcaagatccaatctttcgtgccccctttttccaaagatcctcgcttgggtggttcttcctggagattgctgggaggatgcagcacgaccagaagaagaaggcaccttcagagatggattttttcacagagtatggcgaaggcagcaggtacaagatagaagaggtcataggcaaaggcagctacggcgtggtttgctctgccgtggacactcatactggcgaaaaggtcgctataaagaagataaacgacatcttcgagcatgtgtctgatgcgacgcggatactccgggagatcaagctgcttaggctcctgcggcatccggatattgtggaaataaagcatatcttgctccctccgtcgaggagggagttcagggatatatatgttgtctttgaactcatggagtctgatctgcaccaagttataaaggctaacgatgacttgaccccagagcattaccagtttttcttgtatcaattgcttcgaggattgaaatacatacatacagcttattgcagcaaatgtatttcatcgagatctcaaaccaaaaaatattctggcaaatgctgattgtaagctcaaaatatgtgactttggcttagcaagagtagctttcaatgatactccaaccgccatcttttggacggtggtaccgagcaccagagttgtgtggatctttcttctccaagtatacaccggcgatagatatatggagtattggctgtatatttgcagaattgttaactggaaaacctcttttcccggggaaaaatgtggtacatcaacttgatataattacagatctccttggaacaccttctcccgaagcaatatcaaggattcgtaatgaaaaggccaggcgctacttgagcagtatgaggcgaaaaaagcctataccgtttacgcaaaagttcccaaatgcagatccacttgcactatgtttgttagagcgaatgctcgcttttgagccaaaagacaggccaagtgctgaagaggctcttgctgatccttatttcaagaatatagccagtgtggatagagagccttctgcacaggctgtcacaaagcttgaatttgaattcgagaggcggagagttacaaaggaagacataagggagcttatatatagggaaattcttgagtatcatccaaagatgctgagggagtttcttgagggaactgagtcaagtggtttcatgtacccaagtgcagtagatcattttaaaaagcagtttgcataccttgaagaacattatgccaagggatctacaggaactccacctgagaggcaacataattcattgccgcggccgtctgttgtctattccgacaaccgatcacaaaccacagccaacatcaccgaggatctttccaagtgtatgctcagagaaaatacacagaagacacatccatattctgcttctgttgcaagtaaatttccaccacatgttcctcaaggtgatgttgcaaggcctggtaaagcagttggttcggtgatgcagtacagcccatgtccagcgcctgctgccgagcgatatgagcaacgaagaatcgctaggcacccagcagttgccccaaacaatatcccttctggaagctcataccccagaagaagccagacctgcaagagtgagacaggtgatgccgaaagccatatggatgcgaaccaagctcggcagccaaagccatatgcagcgaacaaactacctgctaccgttgatagtcgtggtggtcactggtaggatttctgcggtgcaccagaaagccattccaaaccgtttcttaacatgttatcagtatcgattacttctgctgagtgctacattattctgacaaatccagaaatgtagttctgtacagatttgtgttctttttccggatacctgaataccgaaagactgtacaactgtagtttctgattcctactccttgtcgctattcaatcgctaaaggatctgtccctggtggagaagaaccggcagattcaatgcaatgttcttgactgacgtcatggattttgttcttcaacctggtagctctgaagacgaattgaatagctgctagtttctgctaatcatctacagtcaggtgcagagtgttctgggagctagttctgaatatcactgtcacgctgtaatctgcacgtttctgagctcctaacttctaagcatgccactaccgtatccctttgtaatttaatcagctgtaccatccagtactctgtttacatttgtagaaacgctctgcaaagaagctattatgtgggagtttctttgctattattataaatgttctgttgttataaa

SEQ ID NO: 5176 - DNA, 2582 bp, Zea Mays
gtccacgtcgccgcccaccccctcccctcaaatctgaaatccaatcgactcattaaccccggagctcggcagagagagagcatcggcacggcgcggtggttgattaaccagaaccagaagccagcacgtgcgcgccggggctggtccgccgcctgggtctgcgtacatatgcgtctgtctgagcgggcgccgcgaaggaaactgacggggggctttgcttggcgtataaagcgtctcgcgagcgcctaccggcagccatagctggtgagtagtagtagtatactggaggaggaggaggaggaggagagggagaagacgaagcgaagccagggcaaggtcgtcggagccggagagggaggaaggtggagaacctctacctgcgtcacgtgacaactgtctcctgacccacaggagcggcggactccctctgctcgccgcgcgcggcctgttccggttcggtcggcggccgacggccggcggcggaggcagcaggaagctactgtaccaaccggcccaagagaattgcgggtccagaggcagtgatggcggggcgctacgattgacgtgctacgattatgggcatccaagggaacaaggcggcgacgcacgagcacgacttcctctcgctgtacgccgccgccgccgccaaggacgctcctctcctgctacacgactccaaggcgccgcctccttctcaaggtaatttcctcttgaagacgcacgacttcctgcagccgttggatcagaagccgggagcgccgccggagccgtcgccgctgcccgcttccgccgcggagagcaggcaccagccgcagcagcaggtcgtcgtcgcgaaccagcacgcgctgcccctgcccggcggcgtcggcaccttcagcatcagccccgcgcccgtgtccgtcgcgctgccggcggccgtcgtcaagtcggagccgccgttcgtgctctggggccagcctgccgcgacgctccatccgggcgcgcgagggcaccagcagcagtgggcgctccccttcgccggcgccgggcaggtcaggctgccgccgcagcaggcgcctccggatagaaagggccggggcggcgccggtggcggcgtcatggagtctggctccagatccagcggcggggcggggttcgacgacgacgacggcctcacgacgcgccgcgaggtctcctcttcgctccaagatttgacagtaagggtggaccggaagggtgggagctgcagcgatggtggtacggatcagcggccaaacacaccgcggtcaaaacactcggccacagagcagcgcagacgcagcaagatcaatgataggtttcagatacttagggagctgttgccacacagtgatcaaaagagagacaaagcaacatttctcttggaggttattgaatatatacggtttttgcaagagaaggtgcaaaaatatgaggcaacatttccagaatggaaccaagaaaatgcaaagatgcttccatggagtaaaggccaaatctcaggagattccccgcctgacccttcacatttcatgagaaatggatcctcccctggatctaatttcactgggaaacttgatgataatcacaacatagtgacatctgcagctgcatcaggggcacaggatcaggtagaaaccgaccacatggctagcggatgctacagatcagcagaaactacggcgaattttacaaataatgctatgtctcagtcccaacctcaatggactggtccgtcccctgtggatgactctgcagtgaacagtgagacgcttaacaaccagcagttggtgattgatgaaggaacaatcagagtgtccagtaactattcccaagagttgcttaactcgttgactcatgcccttcaaagctcaggtgtagatttgtcccaagccaacatctctgtgcagatcaacatgggaaagcgtgccgccaagagacccgctgctggtgtatccagcaactccaaggaaccagctgatccggcatctagcaacgaattagggcatcagttgacgctgtcgggtgccggtgccgactgcctctctcacgcaacaaagcggcataaacggagcaacagctgatggccgctctccctcacctcgctccccgaccgacggacggacggatgacggattggtgacattcttcttttccctcccagccaacggggaggctcgtggattggctggctggctgtacattgtgtgctgtgcttggtgacaagctgagacctccggcgtattctttgattcgatcacccccgcgcccgccatcccattgtttacgtagagaagaggaaccgtggagcttttcatcgcggattgtgaagccgctcttgtacacaggcttccattcaatgtgagaagcttccccctccttgacacatctccgtgttgtagacctgtagccacctgtaagatatgtgatgatgcccaacaatcaactctgccagaccactggctagtcgagttgttgggttactttatgtacggtgttctgttatgctgggagtgtaattgccccgccgtctcagtgaactgttcgtcagttgtgtgcttgtttgtccaacggtttactatgtg

SEQ ID NO: 5177 - DNA, 761 bp, Zea Mays
ccacacacctagcccaaattgtccccgaggtccgcaccaccgaagccccgagaaaccctaggcactaggaccaggagggcgcgccgtgcagccatggcgaagaaccggaacaagaagaacagggccaagagcggcggcctcgccaccatggacacctctgagggcggccccgccacatccactgccgcagacgtcccacaaccaatggatacgtccgagggaaagcagccatcgtcaccaccgcggcgctcggttcgatcaacaagtaagctaaaaggaaggtgctggaagcaaggatcagagtgctagctgttggcgtaacatcacccagctgatggagagattttagtttgctagctagatgaatctttagactttgcatgtaatagaactaaaagatcacttcagaattcagaaaacatgtatgctattatttttatatgttcatcacacaaattgtgttccaaaacaatatatgttggaattcaaagtcaaagattgatctctttcttttagtaatcaaatttcatatattctgagctacatattattcaagttgtcctgcaatgtgcatcataatcagtttattatttgtttcattagcatatatttatatacatgatttttttaaacttcacatagggaataacatcagacaatctgtcggtatatagacttttagcgacacataagctgttggcacaagaatatgtcggcaaagatttgtccgacggcaaagatatgtctgtcggcaataacat

SEQ ID NO: 5178 - DNA, 1824 bp, Zea Mays
ctcccccgctccctctcctccacctccggccctccgccattcccattcacaaagcacgctccgctttccttttgtttatttactcttcctccctccgcatcctcctcgcgtcgcattcccccgtttccgcccatgcgtgtccgcctcctcgcatccgccgtcgtctcgcacctcccccgcgccccaatctggtccgggcggagttagggatgaggacacaaggggaggggcatgtggaggaggccacggggttcgaggtgggcatcgtggtgcccaggctctcccgcgccgccgcggcgggggccaccgacaactgcgtggcgcgtctggtgcgggagctcgagggcgccgggctgctcgtcgagcgcgtccgcggcgtctccgctgagttcatcaagccgcaccaatggggaccctggggagagctgctgctgagatgcatatgaagaagctaacctacatcgggatggagcttcagtttcaatcggaccaggttgcagcattcgttaggcagacagacggttccctgttcagctggagagaacgctattcctgcttccgctacttgatatatggcattgtgaacaagacaaactctgaagtagtccttaaatttgatgataaggagttccattggaagcaaagtgagtccttattaacaaggctggaagctgaaggagttgtaaagctagtattccctttgcatgatgaaattaaaaggaagcaactcctgagaaattgggcgcttaattggcttgacttcacatggcagcctatcgatgagatttactcctattttggaacaaagattgcaacatactttgcgttcctaggaatgtatgcgcgatggcttttcttcccagctgtttttggactggcaactcaactcatagattttggatcattgcagtggttggttcttcctggtttctttatctttgttatttcttgggctgtcctctttctgcaattttggaaacggaagaattcagcacttcttgcaagatggggtattcattgttcactatctgaatacaaaaacctggacaacgtcagcttcttgagtgattctcttactgttgaggaaaaggagtttggtgttgtgtctgtggttgtggagaaaagaaagtttcaaaggaacgaatggttcggtgtcctccttagaataaggaacaatgctatcattgtgctggctatcatttgtcttcagctgccatttgagttggcctatgctcatctatatgaaattgcagaaactgaggttatgaggtatttgttaactgcagtatatcttgttgcaattcaatattacaccagaattggtggcaaggtgtctgttaatttgataaagtatgaaaacaaccaaggagaagagtctagttccgctagtttagtttataaggcctttggcctttactttatgcagtcatatattgggttattttaccatgcttctttgcatcgtgatatactggccctccggcgagtcctcatccagcgtctcattgtgtaccaggtattagaaaatctaattgagaattccattccttacctcaagtacagttacaaaaagtacatagctgttcacaagaaaaagcgtgggaaagaatcgacagtgggtaggtcagtccggttatcaacaagagtggagaaagagtatttaaaaccctcttatactgcaagcattggagcagaactcgaagatggtttatttgatgactttctggagctgactcttcagtttggaatgatcatgatgtttgcctgtgcatttccattgattttctgctttgcagctctggtttgtgctctttcaaaaaatca

SEQ ID NO: 5179 - DNA, 1847 bp, Zea Mays
gaacgcggacaccggtcctcatcacagtccgttcctcccccgctccctctcctccacctccggccctccgccattcccattcacaaagcacgctccgctttccttttgtttatttactcttcctccctccgcatcctcctcgcgtcgcattcccccgtttccgcccatgcgtgtccgcctcctcgcatccgccgtcgtctcgcacctcccccgcgccccaatctggtccgggcggagttagggatgaggacacaaggggaggggcatgtggaggaggccacggggttcgaggtgggcatcgtggtgcccaggctctcccgcgccgccgcggcgggggccaccgacaactgcgtggcgcgtctggtgcgggagctcgagggcgccgggctgctcgtcgagcgcgtccgcggcgtctccgctgagttcatcaagctagccgcaccaatggggaccctggggagagctgctgctgagatgcatatgaagaagctaacctacatcgggatggagcttcagtttcaatcggaccaggttgcagcattcgttaggcagacagacggttccctgttcagctggagagaacgctattcctgcttccgctacttgatatatggcattgtgaacaagacaaactctgaagtagtccttaaatttgatgataaggagttccattggaagcaaagtgagtccttattaacaaggctggaagctgaaggagttgtaaagctagtattccctttgcatgatgaaattaaaaggaagcaactcctgagaaattgggcgcttaattggcttgacttcacatggcagcctatcgatgagatttactcctattttggaacaaagattgcaacatactttgcgttcctaggaatgtatgcgcgatggcttttcttcccagctgtttttggactggcaactcaactcatagattttggatcattgcagtggttggttcttcctggtttctttatctttgttatttcttgggctgtcctctttctgcaattttggaaacggaagaattcagcacttcttgcaagatggggtattcattgttcactatctgaatacaaaaacctggacaacgtcagcttcttgagtgattctcttactgttgaggaaaaggagtttggtgttgtgtctgtggttgtggagaaaagaaagtttcaaaggaacgaatggttcggtgtcctccttagaataaggaacaatgctatcattgtgctggctatcatttgtcttcagctgccatttgagttggcctatgctcatctatatgaaattgcagaaactgaggttatgaggtatttgttaactgcagtatatcttgttgcaattcaatattacaccagaattggtggcaaggtgtctgttaatttgataaagtatgaaaacaaccaaggagaagagtctagttccgctagtttagtttataaggcctttggcctttactttatgcagtcatatattgggttattttaccatgcttctttgcatcgtgatatactggccctccggcgagtcctcatccagcgtctcattgtgtaccaggtattagaaaatctaattgagaattccattccttacctcaagtacagttacaaaaacaagaaaaagcgtgggaaagaatcgacagtgggtaggtcagtccggttatcaacaagagtggagaaagagtatttaaaaccctcttatactgcaagcattggagcagaactcgaagatggtttatttgatgactttctggagctgactcttcagtttggaatgatcatgatgtttgcctgtgcatttccattgattttctgctttgcagctctggtttgtgctctttcaaaaaatca

SEQ ID NO: 5180 - DNA, 1904 bp, Zea Mays
gacaccggtcctcatcacagtccgttcctcccccgctccctctcctccacctccggccctccgccattcccattcacaaagcacgctccgctttccttttgtttatttactcttcctccctccgcatcctcctcgcgtcgcattcccccgtttccgcccatgcgtgtccgcctcctcgcatccgccgtcgtctcgcacctcccccgcgccccaatctggtccgggcggagttagggatgaggacacaaggggaggggcatgtggaggaggccacggggttcgaggtgggcatcgtggtgcccaggctctcccgcgccgccgcggcgggggccaccgacaactgcgtggcgcgtctggtgcgggagctcgagggcgccgggctgctcgtcgagcgcgtccgcggcgtctccgctgagttcatcaagctagccgcaccaatggggaccctggggagagctgctgctgagatgcatatgaagaagctaacctacatcggtagctggactgctgtatctacggagcatttgaattttgaaatgtggttggtggtgggtgacgtgtttcatgttgctcctaatttcggtctcagggatggagcttcagtttcaatcggaccaggttgcagcattcgttaggcagacagacggttccctgttcagctggagagaacgctattcctgcttccgctacttgatatatggcattgagttccattggaagcaaagtgagtccttattaacaaggctggaagctgaaggagttgtaaagctagtattccctttgcatgatgaaattaaaaggaagcaactcctgagaaattgggcgcttaattggcttgacttcacatggcagcctatcgatgagatttactcctattttggaacaaagattgcaacatactttgcgttcctaggaatgtatgcgcgatggcttttcttcccagctgtttttggactggcaactcaactcatagattttggatcattgcagtggttggttcttcctggtttctttatctttgttatttcttgggctgtcctctttctgcaattttggaaacggaagaattcagcacttcttgcaagatggggtattcattgttcactatctgaatacaaaaacctggacaacgtcagcttcttgagtgattctcttactgttgaggaaaaggagtttggtgttgtgtctgtggttgtggagaaaagaaagtttcaaaggaacgaatggttcggtgtcctccttagaataaggaacaatgctatcattgtgctggctatcatttgtcttcagctgccatttgagttggcctatgctcatctatatgaaattgcagaaactgaggttatgaggtatttgttaactgcagtatatcttgttgcaattcaatattacaccagaattggtggcaaggtgtctgttaatttgataaagtatgaaaacaaccaaggagaagagtctagttccgctagtttagtttataaggcctttggcctttactttatgcagtcatatattgggttattttaccatgcttctttgcatcgtgatatactggccctccggcgagtcctcatccagcgtctcattgtgtaccaggtattagaaaatctaattgagaattccattccttacctcaagtacagttacaaaaagtacatagctgttcacaagaaaaagcgtgggaaagaatcgacagtgggtaggtcagtccggttatcaacaagagtggagaaagagtatttaaaaccctcttatactgcaagcattggagcagaactcgaagatggtttatttgatgactttctggagctgactcttcagtttggaatgatcatgatgtttgcctgtgcatttccattgattttctgctttgcagctctggtttgtgctctttcaaaaaatca

SEQ ID NO: 5181 - DNA, 1117 bp, Zea Mays
cttctgggatagatttggagtccatgtcatgcttcccagcaggatcaaggtcgttgtcgtctccaggtccatcaaatgcgacaaggtcgagcgcacgcaattcagctccgaagtcatctcctttcaacagatccatttagtacctttttctgagttaaactacttcaaacattgctgaagactacaaccagttgttgtaattgaagcgggtcaagacatagcatttgcaaagatttagttcattctcatcactctgcaatattcgggttctctactatgtgtaatctcatatcaagattaatgagtatcgtgatcgtataattttgaatcctatcaacccatatggcaaggcaaagaaaaatgacagtggacatcattctagattttacaaaatcaaaggagcaaccagacatggctgtcatgatctaagatacttcaacgtgattggatcgaacccaaacatatgactaggagaagctccaaggccactttgtcaagggtctctgcaatgcacctactggtgcatgatttactggaggttgtgcgcatgaatgtgccacacattggtatgggggttggagttgaagcaggtgattttcaccaacattggtttgcgaactggagttgaagcaggggagagcagtccaaggcaaatttgccatgttggagcagtcacaggagccaaggggctgcagtcacaggtcctgctagccaggatggagcaatcataggacctcctagcagtccaaggaaaatttgcgaggtggagtagttgcaacttttgaaacccacgtgataacatgctcaagcgttcgtatgataaaaaagatggcacataatcaaaagaagatctcatgttctgcgtttgtgaacctgtttgtattttttgaacttgttttgtgaacctctatttgtaaacctgtaaaatctgaggttgtgaatagatttgggtaacttcatacaagtggtggaggcctggtggtaatcctggatgcatataaagcgaggcatgcaatatccatagcactcgtttgacagaaggcaacaccatcaaccttgtcctccacctttaaactagcatgagcaccatccttcttcacatttatattcatgtccc

SEQ ID NO: 5182 - DNA, 4909 bp, Zea Mays
cgctccctccccatgaaacccccttcccccaatctacccctctctgtgcccccgacatccacgctgcctcagcccgccgtccagcgccctctctgcgcctccctccccacaccgcctcagcccgccgttcgccacgctccccacgctgcctccccccgtcgcccctccctcccgcgcggaactccgccatgctccccacgtcgcctccccccatcgcccaccagccgtcgcccaccagcccacactatctcacgccatggatggtggcaacagtccccgcccccgtacctcacacgcatcaggctgggctggccgatcccgccgccgcaaacgccgcgcccagccccgatgtcagcgcggcccgcccgccaacgcactttcggcctccccccgcccctcccttcgcccgcccacccgcaacctccgcgccatccgcaacctccgcccgcttctcacgccaccgacccgacctccgcgccatccgcaaccgtcgtgcgtcttatcccttctctaccgcgcactccgtgtggaacaacctccgcgtaggaagcctcctcccttccccatccccattccccaccacgcgcttcggggacggcgagctccgggcgggagcgaccgccgggcgcttctgctgctggtgcggaggaggaggagcggcgagggtggttcggcgcaggctccacggcggcggtgcccgagccgagttcgactggctggcgctctactgcaacctcacacgcggcgatgggccggacggtaacaatggcaagctggtcctggaggagctgctgtcgtgcgccgccacccaattttgttttccccaaatcctgagctgtgaagagaagaagaagacaaggacgcggcgagtacgatgacgagcgccgcacagcaagtcagcgaggagcacgatgacgcgatgaggaccacgagctgccgaggaagtcaaggacgacgacggcgcagagacccgcgagttgagacatcttcttcgccggcgtgaaccgcaaggctgagacatcttcttcgccgggttcggccacgccgacaccaccgacccgatgtacctatcctagccgtgtttgcaggcctctcaaattgaaccgattgcttcaagggtgccatacatgattgtgttaaccatgagagggattggcctggcactggttcattctacgggaacctcgacttcggtggagaatgtggtgtccctgtccaaactgtgttctacactccaactgaaaaccgtgcaaagttctggtacgcaacagattacgacatgtttagccttctgcattgctcacatggaagaggacttgagacccgggaccgagcagtacagattcatcgagcaatgccacattggcctcatgaagtttcacaatcacagtggtttttacaaggatttcagttcatggttgtacatagtttttttagttttttttttgaaaaatgaggcattttctttttaccggcggcggaggcgatggcaacaagcccttccctattcgaatctctgtgaccacagagcctacctcgctgagctcatcaccgagatcactggtgggatcaatgagctcgccgacgtagcacagttcttttgatgagagtggttcaactctattttgcttggttcagtggagatggtagcatggtgaaggataatgcctacgtgcgcagcaattttcatttttcttttagtttcttggagtcgtggaaatctcgctattcacaaggatttcatggcggcgttgttaatttgggggttgggcagaggctttaccttttgcgtcagacagtgctctctcacagcaattgtccttttgcctacctgtatcattctgtcatactatctgcaattcagctatgcacagaactatcaaaagcaagcaaagatgctctagagtacctgaggaaggctactttgtgctctataaggattgccaggaaagtgccagatttggcagagaacttcatgggcctggatgcatcattgttaaaggagaaacaccatgggtccttatatctgcaattcagctatgcacagaactatgcaaagcaagcaaagatgctctagagtacctgaggaagaaactgattgtgtggtagaggacccaaatacgtttgaagacgacacgcaggacgattttgtgcaagttgcaaatacattgatcccttaggggttgagatggaaactgccacaagggagggaggacgtgagtcagctgcacgtgccgacatacacatcacttcctgcctcgctgtccttgatcgagacaaaatcagaagagctgtatctatatgtactccataccttgacgtatgcaggggctagatccataccccggcctatctgccctgtgaggaatgtatacttctgcaagtttgaatactttgacaccttgtgaggagcactctttgaaggtggagaaggtgttgttccaagggaagccagactaccaaaatgttatggttttttagcttctcaatagccggcgacagtgcatacgacctgccccgcgctggggctgtgtctgccttctcctccttcgatgccatgacactgtaaagtgaagccttcgagctaggcgcggaggccagggagatgctatgcgcccacatctaccacgccgccttcatattgctcaagctcgcgctccgcaactcctgccccatctgccgccatgagatgcccaccgatgctgccctgcgggctgccgccagcgtcggcgttgccgaacgcgccgccggggaggaacaagcgtgggatgcgccccacgcgcgcgactttcacctgcctcccaatttgatccgtgagttcaccaggaccaggcttctatgcttacatattcagtgctgttcgctcgtgctgtatctgtggccgcgtgagcaggaaatcaccatattagagcttacaaccttcgcatcaactgaagagtttgacactcatgatccaaaggagaacactttgctactcccttacttgaggaaaaggtcaaaaatcattgagatagttgcagcgcgtgatatagtctttgctctatcacagttaggagtatgtgctgcttttagtagcggtacgttcgccgaggacaagacaaaaccggatgctggtttccctctttttgactcaccatgtcaacatggcaatttcaggacccaacgtctctgcgagagaccttgggttcccttatccgaaggcaggcaccgctaagcctacagacgtggtggtgaagttctacgtcctctacgagaagtggcggaggggcgagctcctgggttcttcgtcagttgcgcggtacttgaaaagcatcactcattcgaacggtacgattattcatccttctggatcggagcgttctcttcatgcgtctgttgacgctctaagttcttgctacgtggacaaacagggcaacaagaatttccgggtgtgggtggacagactggtcacatcgccgatcggtacaagcaactggttggtgaggtttgataactgggagatggaaggtggcgttcggtactgctgccgcactactcttctgctgaataacaaggttccaaaagaactagaagtacagattggttgaacttcaaacaaatacaaagagctatgcatacaagtggtggaggcctggtggtaaattgtttatcaagatcgctagagcagttaaatttactcctattatcttctgggatagatttgggatcaaggtcgttgtcgtctccaggtccatcaaatgcgacaaggtcgagcgcacgcaattcagctccgaagtcatctcctttcaacagaaagatgcaagtaacaccaagtcacttgcctttgatggttgatacatttcactgtatatcattgcacgacagatccatttagtacctttttctgagttaaactacttcaaacattgctgaagactacaaccagcctacagttgttgtaattgaagcgggtcaagacatagcatttgcaaagatttagttcattctcatcactctgcaatattcgggttctctactatgtgtaatctcatatcaagattaatgagtatcgtgatcgtataattttgaatcctatcaacccatatggcaaggcaaagaaaaatgacagtggacatcattctagattttacaaaatcaaaggagcaaccagacatggctgtcatgatctaagatacttcaacgtgattggatcgaacccaaacatatgactaggagaagctccaaggccactttgtcaagggtctctgcaatgcacctactggtgcatgatttactggaggttgtgcgcatgaatgtgccacacattggtatgggggttggagttgaagcaggagacatgattgttattcctatcatgtgcacactgcctcctcgctgtcatttgtcgtcactctcgtagtcctgataccggagcatggttgccaggggagagcagtccaaggcaaatttgccatgttggagcagtcacaggagccaaggggctgcagtcacaggtcctgctagccaggatggagcaatcataggacctcctagcagtccaaggaaaatttgcgaggtggagtagttgcaacttttgaaacccacgtgataacatgctcaagcgttcgtatgataaaaaagatggcacataatcaaaagaagatctcatgttctgcgtttgtgaacctgtttgtattttttgaacttgttttgtgaacctctatttgtaaacctgtaaaatctgaggttgtgaatagatttgggtaacttcatacaagtggtggaggcctggtggtaatcctggatgcatataaagcgaggcatgcaatatccatagcactcgtttgacagaaggcaacaccatcaaccttgtcctccacctttaaactagcatgagcaccatccttcttcacatttatattcatgtccc

SEQ ID NO: 5183 - DNA, 5257 bp, Zea Mays
cgctccctccccatgaaacccccttcccccaatctacccctctctgtgcccccgacatccacgctgcctcagcccgccgtccagcgccctctctgcgcctccctccccacaccgcctcagcccgccgttcgccacgctccccacgctgcctccccccgtcgcccctccctcccgcgcggaactccgccatgctccccacgtcgcctccccccatcgcccaccagccgtcgcccaccagcccacactatctcacgccatggatggtggcaacagtccccgcccccgtacctcacacgcatcaggctgggctggccgatcccgccgccgcaaacgccgcgcccagccccgatgtcagcgcggcccgcccgccaacgcactttcggcctccccccgcccctcccttcgcccgcccacccgcaacctccgcgccatccgcaacctccgcccgcttctcacgccaccgacccgacctccgcgccatccgcaaccgtcgtgcgtcttatcccttctctaccgcgcactccgtgtggaacaacctccgcgtaggaagcctcctcccttccccatccccattccccaccacgcgcttcggggacggcgagctccgggcgggagcgaccgccgggcgcttctgctgctggtgcggaggaggaggagcggcgagggtggttcggcgcaggctccacggcggcggtgcccgagccgagttcgactggctggcgctctactgcaacctcacacgcggcgatgggccggacggtaacaatggcaagctggtcctggaggagctgctgtcgtgcgccgccacccaattttgttttccccaaatcctgagctgtgaagagaagaagaagacaaggacgcggcgagtacgatgacgagcgccgcacagcaagtcagcgaggagcacgatgacgcgatgaggaccacgagctgccgaggaagtcaaggacgacgacggcgcagagacccgcgagttgagacatcttcttcgccggcgtgaaccgcaaggctgagacatcttcttcgccgggttcggccacgccgacaccaccgacccgatttgcgcacacatgctagggcaaacttttttctcatgctgaatcagcgctgctggataaacaaattgcgaccgaaaagagtgggcccaactgcgtttgtgagcagttctggtgctctgaattggcctaattaatgatcaagtggtcgtgttgtacctatcctagccgtgtttgcaggcctctcaaattgaaccgattgcttcaagggtgccatacatgattgtgttaaccatgagagggattggcctggcactggttcattctacgggaacctcgacttcggtggagaatgtggtgtccctgtccaaactgtgttctacactccaactgaaaaccgtgcaaagttctggtacgcaacagattacgacatgtttagccttctgcattgctcacatggaagaggacttgagacccgggaccgagcagtacagattcatcgagcaatgccacattggcctcatgaagtttcacaatcacagtggtttttacaaggatttcagttcatggttgtacatagtttttttagttttttttttgaaaaatgaggcattttctttttaccggcggcggaggcgatggcaacaagcccttccctattcgaatctctgtgaccacagagcctacctcgctgagctcatcaccgagatcactggtgggatcaatgagctcgccgacgtagcacagttcttttgatgagagtggttcaactctattttgcttggttcagtggagatggtagcatggtgaaggataatgcctacgtgcgcagcaattttcatttttcttttagtttcttggagtcgtggaaatctcgctattcacaaggatttcatggcggcgttgttaatttgggggttgggcagaggctttaccttttgcgtcagacagtgctctctcacagcaattgtccttttgcctacctgtatcattctgtcatactatctgcaattcagctatgcacagaactatcaaaagcaagcaaagatgctctagagtacctgaggaaggtaagggcatctatttcttaccacaaggcccaaaccaatataagctactttgtgctctataaggattgccaggaaagtgccagatttggcagagaacttcatgggcctggatgcatcattgttaaaggagaaacaccatgggtccttatatctgcaattcagctatgcacagaactatgcaaagcaagcaaagatgctctagagtacctgaggaaggtaagggcatctatttcttaccacaaggccccaacaaatataagtatagaactacagagctaggataaaactgttgattgttacagccctgggcaaggattgatgcttgctagcttcaagattaggaccctaccacttgatgagaacagatagtgctatactgctatgtacatctacatttctccagttatacataatcagatcttgcttctagccaactggtacctgtttcaataatatcctcgttaatctagctccttcattttcatttgggggttaccacatcgccatggcagttgcaaatacattgatcccttaggggttgagatggaaactgccacaagggagggaggacgtgagtcagctgcacgtgccgacatacacatcacttcctgcctcgctgtccttgatcgagacaaaatcagaagagctgtatctatatgtactccataccttgacgtatgcaggggctagatccataccccggcctatctgccctgtgaggaatgtatacttctgcaagtttgaatactttgacaccttgtgaggagcactctttgaaggtggagaaggtgttgttccaagggaagccagactaccaaaatgttatggttttttagcttctcaatagccggcgacagtgcatacgacctgccccgcgctggggctgtgtctgccttctcctccttcgatgccatgacactgtaaagtgaagccttcgagctaggcgcggaggccagggagatgctatgcgcccacatctaccacgccgccttcatattgctcaagctcgcgctccgcaactcctgccccatctgccgccatgagatgcccaccgatgctgccctgcgggctgccgccagcgtcggcgttgccgaacgcgccgccggggaggaacaagcgtgggatgcgccccacgcgcgcgactttcacctgcctcccaatttgatccgtgagttcaccaggaccagaacttcttcgatgatttgttggaccatccctgctgatacaaacacaatcattttgtggcaggaaatcaccatattagagcttacaaccttcgcatcaactgaagagtttgacactcatgatccaaaggagaacactttgctactcccttacttgaggaaaaggtcaaaaatcattgagatagttgcagcgcgtgatatagtctttgctctatcacagttaggagtatgtgctgcttttagtagcggtacgttcgccgaggacaagacaaaaccggatgctggtttccctctttttgactcaccatgtcaacatggcaatttcaggacccaacgtctctgcgagagaccttgggttcccttatccgaaggcaggcaccgctaagcctacagacgtggtggtgaagttctacgtcctctacgagaagtggcggaggggcgagctcctgggttcttcgtcagttgcgcggtacttgaaaagcatcactcattcgaacggtacgattattcatccttctggatcggagcgttctcttcatgcgtctgttgacgctctaagttcttgctacgtggacaaacagggcaacaagaatttccgggtgtgggtggacagactggtcacatcgccgatcggtacaagcaactggttggtgaggtttgataactgggagatggaaggtggcgttcggtactgctgccgcactactcttctgctgaataacaaggttccaaaagaactagaagtacagattggttgaacttcaaacaaatacaaagagctatgcatacaagtggtggaggcctggtggatcaaggtcgttgtcgtctccaggtccatcaaatgcgacaaggtcgagcgcacgcaattcagctccgaagtcatctcctttcaacaaaagatgcaagtaacaccaagtcacttgcctttgatggttgatacatttcactgtatatcattgcacgacagatccatttagtacctttttctgagttaaactacttcaaacattgctgaagactacaaccagttgttgtaattgaagcgggtcaagacatagcatttgcaaagatttagttcattctcatcactctgcaatattcgggttctctactatgtgtaatctcatatcaagattaatgagtatcgtgatcgtataattttgaatcctatcaacccatatggcaaggcaaagaaaaatgacagtggacatcattctagattttacaaaatcaaaggagcaaccagacatggctgtcatgatctaagatacttcaacgtgattggatcgaacccaaacatatgactaggagaagctccaaggccactttgtcaagggtctctgcaatgcacctactggtgcatgatttactggaggttgtgcgcatgaatgtgccacacattggtatgggggttggagttgaagcaggagacatgattgttattcctatcatgtgcacactgcctcctcgctgtcatttgtcgtcactctcgtagtcctgataccggagcatggttgccaggggagagcagtccaaggcaaatttgccatgttggagcagtcacaggagccaaggggctgcagtcacaggtcctgctagccaggatggagcaatcataggacctcctagcagtccaaggaaaatttgcgaggtggagtagttgcaacttttgaaacccacgtgataacatgctcaagcgttcgtatgataaaaaagatggcacataatcaaaagaagatctcatgttctgcgtttgtgaacctgtttgtattttttgaacttgttttgtgaacctctatttgtaaacctgtaaaatctgaggttgtgaatagatttgggtaacttcatacaagtggtggaggcctggtggtaatcctggatgcatataaagcgaggcatgcaatatccatagcactcgtttgacagaaggcaacaccatcaaccttgtcctccacctttaaactagcatgagcaccatccttcttcacatttatattcatgtccc

SEQ ID NO: 5184 - DNA, 5427 bp, Zea Mays
cgctccctccccatgaaacccccttcccccaatctacccctctctgtgcccccgacatccacgctgcctcagcccgccgtccagcgccctctctgcgcctccctccccacaccgcctcagcccgccgttcgccacgctccccacgctgcctccccccgtcgcccctccctcccgcgcggaactccgccatgctccccacgtcgcctccccccatcgcccaccagccgtcgcccaccagcccacactatctcacgccatggatggtggcaacagtccccgcccccgtacctcacacgcatcaggctgggctggccgatcccgccgccgcaaacgccgcgcccagccccgatgtcagcgcggcccgcccgccaacgcactttcggcctccccccgcccctcccttcgcccgcccacccgcaacctccgcgccatccgcaacctccgcccgcttctcacgccaccgacccgacctccgcgccatccgcaaccgtcgtgcgtcttatcccttctctaccgcgcactccgtgtggaacaacctccgcgtaggaagcctcctcccttccccatccccattccccaccacgcgcttcggggacggcgagctccgggcgggagcgaccgccgggcgcttctgctgctggtgcggaggaggaggagcggcgagggtggttcggcgcaggctccacggcggcggtgcccgagccgagttcgactggctggcgctctactgcaacctcacacgcggcgatgggccggacggtaacaatggcaagctggtcctggaggagctgctgtcgtgcgccgccacccaattttgttttccccaaatcctgagctgtgaagagaagaagaagacaaggacgcggcgagtacgatgacgagcgccgcacagcaagtcagcgaggagcacgatgacgcgatgaggaccacgagctgccgaggaagtcaaggacgacgacggcgcagagacccgcgagttgagacatcttcttcgccggcgtgaaccgcaaggctgagacatcttcttcgccgggttcggccacgccgacaccaccgacccgatgtacctatcctagccgtgtttgcaggcctctcaaattgaaccgattgcttcaagggtgccatacatgattgtgttaaccatgagagggattggcctggcactggttcattctacgggaacctcgacttcggtggagaatgtggtgtccctgtccaaactgtgttctacactccaactgaaaaccgtgcaaagttctggtacgcaacagattacgacatgtttagccttctgcattgctcacatggaagaggacttgagacccgggaccgagcagtacagattcatcgagcaatgccacattggcctcatgaagtttcacaatcacagtggtttttacaaggatttcagttcatggttgtacatagtttttttagttttttttttgaaaaatgaggcattttctttttaccggcggcggaggcgatggcaacaagcccttccctattcgaatctctgtgaccacagagcctacctcgctgagctcatcaccgagatcactggtgggatcaatgagctcgccgacgtagcacagttcttttgatgagagtggttcaactctattttgcttggttcagtggagatggtagcatggtgaaggataatgcctacgtgcgcagcaattttcatttttcttttagtttcttggagtcgtggaaatctcgctattcacaaggatttcatggcggcgttgttaatttgggggttgggcagaggctttaccttttgcgtcagacagtgctctctcacagcaattgtccttttgcctacctgtatcattctgtcatactatctgcaattcagctatgcacagaactatcaaaagcaagcaaagatgctctagagtacctgaggaaggctactttgtgctctataaggattgccaggaaagtgccagatttggcagagaacttcatgggcctggatgcatcattgttaaaggagaaacaccatgggtccttatatctgcaattcagctatgcacagaactatgcaaagcaagcaaagatgctctagagtacctgaggaagagctaggataaaactgttgattgttacagccctgggcaaggattgatgcttgctagcttcaagattaggaccctaccacttgatgagaacagatagtgctatactgctatgtacatctacatttctccagttatacataatcagatcttgcttctagccaactgttgcaaatacattgatcccttaggggttgagatggaaactgccacaagggagggaggacgtgagtcagctgcacgtgccgacatacacatcacttcctgcctcgctgtccttgatcgagacaaaatcagaagagctgtatctatatgtactccataccttgacgtatgcaggggctagatccataccccggcctatctgccctgtgaggaatgtatacttctgcaagtttgaatactttgacaccttgtgaggagcactctttgaaggtggagaaggtgttgttccaagggaagccagactaccaaaatgttatggttttttagcttctcaatagccggcgacagtgcatacgacctgccccgcgctggggctgtgtctgccttctcctccttcgatgccatgacactgtaaagtgaagccttcgagctaggcgcggaggccagggagatgctatgcgcccacatctaccacgccgccttcatattgctcaagctcgcgctccgcaactcctgccccatctgccgccatgagatgcccaccgatgctgccctgcgggctgccgccagcgtcggcgttgccgaacgcgccgccggggaggaacaagcgtgggatgcgccccacgcgcgcgactttcacctgcctcccaatttgatccgtgagttcaccaggaccagaacttcttcgatgatttgttggaccatccctgctgatacaaacacaatcattttgtggcaggaaatcaccatattagagcttacaaccttcgcatcaactgtttgtgcagcaatgagtttatcttaagttatgtttttttggtaatatcggttgactgcacttaagttctaataaagcatctttgatgtcacttgtaggaagagtttgacactcatgatccaaaggagaacactttgctactcccttacttgaggaaaaggtcaaaaatcattgagatagttgcagcgcgtgatatagtctttgctctatcacagttaggagtatgtgctgcttttagtagcggtacgttcgccgaggacaagacaaaaccggatgctggtttccctctttttgactcaccatgtcaacatggcaatttcaggacccaacgtctctgcgagagaccttgggttcccttatccgaaggcaggcaccgctaagcctacagacgtggtggtgaagttctacgtcctctacgagaagtggcggaggggcgagctcctgggttcttcgtcagttgcgcggtacttgaaaagcatcactggcaacaagaatttccgggtgtgggtggacagactggtcacatcgccgatcggtacaagcaactggttggtgaggtttgataactgggagatggaaggtggcgttcggtactgctgccgcactactcttctgctgaataacaaggttccaaaagaactagaagtacagattggttgaacttcaaacaaatacaaagagctatgcatacaagtggtggaggcctggtggatcaaggtcgttgtcgtctccaggtccatcaaatgcgacaaggtcgagcgcacgcaattcagctccgaagtcatctcctttcaacagaaagatgcaagtaacaccaagtcacttgcctttgatggttgatacatttcactgtatatcattgcacgacagatccatttagtacctttttctgagttaaactacttcaaacattgctgaagactacaaccagcctacagttgttgtaattgaagcgggtcaagacatagcatttgcaaagatttagttcattctcatcactctgcaatattcgggtatctcacataaagtttttattgcagttctatttccttttctcatgctgtgcatctttcttatttttgttcaaacaatataatgataagttcatttacttattactgtgattgtttggagcagcacacatgttattataagtcaaattttaagtcaaattattctcgacacgtgattcggttcatggcctatagtaaaaaggatagtttacagtaataacatgtgtgctgctccaaacattatgaggatagtaagtcagttcatttttagtttagaattggctctctcttatttttggtcaaattctagaatgatcagatgctcgacaatacttattattgtgattgtttgctcattttcagttcatggcctgtcttattttttcccctacaagtcatctacgacagtttgccagtagcactaaatcttttaactgtggttctctactatgtgtaatctcatatcaagattaatgagtatcgtgatcgtataattttgaatcctatcaacccatatggcaaggcaaagaaaaatgacagtggacatcattctagattttacaaaatcaaaggagcaaccagacatggctgtcatgatctaagatacttcaacgtgattggatcgaacccaaacatatgactaggagaagctccaaggccactttgtcaagggtctctgcaatgcacctactggtgcatgatttactggaggttgtgcgcatgaatgtgccacacattggtatgggggttggagttgaagcaggtgattttcaccaacattggtttgcgaactggagttgaagcaggagacatgattgttattcctatcatgtgcacactgcctcctcgctgtcatttgtcgtcactctcgtagtcctgataccggagcatggttgccaggggagagcagtccaaggcaaatttgccatgttggagcagtcacaggagccaaggggctgcagtcacaggtcctgctagccaggatggagcaatcataggacctcctagcagtccaaggaaaatttgcgaggtggagtagttgcaacttttgaaacccacgtgataacatgctcaagcgttcgtatgataaaaaagatggcacataatcaaaagaagatctcatgttctgcgtttgtgaacctgtttgtattttttgaacttgttttgtgaacctctatttgtaaacctgtaaaatctgaggttgtgaatagatttgggtaacttcatacaagtggtggaggcctggtggtaatcctggatgcatataaagcgaggcatgcaatatccatagcactcgtttgacagaaggcaacaccatcaaccttgtcctccacctttaaactagcatgagcaccatccttcttcacatttatattcatgtccc

SEQ ID NO: 5185 - DNA, 696 bp, Zea Mays
tacaagaagttgaaggagagggcaggcgagtttgtggcatgaggcctagtgaggacaggagagagcaaggtcaaaatcgtaggcggtgacgacgtgctcgtcagcgacataagagaccccgagagcatagctctggcaattgagggcatcgacgcgctcatcatcctcaccagcgcggtcccgaagatgtgtggaagcgcaaggcagaacagtatctagcggactctggtcttctgcacacaattataagagctggcagtttacaagataaagatggtggcttgcgagagttgattgttgggaaggatgatgagatcctgaaaacagaaacaagaactattgccagggccgatgttgcagaagtttgcatacaggccttgctatttgaacaggcaaagtttaaggcatttgatctgtcatcaaaaccagaaggtgaagggacgccaactacagactttaggacacgttttgcacaagttaatagtcgcttctaaagagataatattgttcttgccaacaaattgagggtattcttttataaattgatatgaaatctgtattaaggttagtttcctgtttactaagttcctaaaacattacctttgttccatgtagaaatgtagcatccttttttacctcttgctctctctttggctattttttggctttatttcctgtcatagacagtggattctg

SEQ ID NO: 5186 - DNA, 1340 bp, Zea Mays
aaccccgcgctccacttacgtgactcgcgcgcgacacgcgagcaggaggttgagacgaagacccgccgccaccggggatggcccaagcgccgccgcgacctagggagcgaggatgaggagctcgaggaggtgcgccgcatgcagaggattcctgcaaggaggagaacatggaggtggtgcccgtagtagtaggggaaccgatcaagagcactggcgaggggaagaaatagaagaagcactatgcttccttggagtaccacgtcaacagcttggagctggtgagcccatggcttgttcctcctgcccttccctcccctcccctccctgctcccccgactctgcgcggatctggtactatctagcccatagagccgtgttggacaacacaaccacgaccacaaggcatcgctgtggagcagtcggagccatttgtgatgcccccctcccgcttgcattgaccacagaggcacaccggagcatccggcgaggacctgcacgcttgaaaccgacgacgaggccatgctggggaattgcatattgtgtcaagggtggtccagaaaaagagctaaaagcaatgcagtacttggagagaagagagtgtgagtatgaccagaagatatccattgatttctacaaggaaggagatcccttgaaaccagctgtgatgggcgtcttagtgttcgtttccactccagatccaattggcaacaagtactatcttggccctgctcctttgcagaatatggcaaggccacgaagatgattcgatcatagagcttgcaaacaaggtgaggaaggtgctcaacagaacaaaggagaccaaaatcactgggcgcgtgaactcttctactacctcaagggtaagcaggtggactatggcgaggagcacagcaaggcttgcggccacaacaggtttgggagaatatatcacacaggtcactatcctgtttgttatgagcacaacccagtgcattttgtggggcactctgctggcgcgcaggttgtgagggtgctgcatcagatgcttgccgacaagagggatggttcatgtgagctggagtacaggattagagcacccaaattaggaattagtcatgcctatcatcccgcttgagacgaaggatgagcttgggctgcttcatccagcattcaaggctgtgaagacttccacatgataattagaaatctggtgacaacagaagtttgggttggggtcatgggatggatatctttgttgtaatgtgaggtgttaggagaattatgttatgcttatttattggcataagttatgtcttacacgtacaaatgagttaatggatgaactcaagttattggttcaa

SEQ ID NO: 5187 - DNA, 2305 bp, Zea Mays
aaccccgcgctccacttacgtgactcgcgcgcgacacgcgagcaggaggttgagacgaagacccgccgccaccggggatggcccaagcgccgccgcgacctagggagcgaggatgaggagctcgaggaggtgcgccgcatgcagaggattcctgcaaggaggagaacatggaggtggtgcccgtagtagtaggggaaccgatcaagagcactggcgaggggaagaaatagaagaagcactatgcttccttggagtaccacgtcaacagcttggagctggtgagcccatggcttgttcctcctgcccttccctcccctcccctccctgctcccccgactctgcgcggatctggtactatctagcccatagagccgtgttggacaacacaaccacgaccacaaggcatcgctgtggagcagtcggagccatttgtgatgcccccctcccgcttgcattgaccacagaggcacaccggagcatccggcgaggacctgcacgcttgaaaccgacgacgaggccatgctggggaattgcatattgtgtcaagggtggtccagaaaaagagctaaaagcaatgcagtacttggagagaagagagtgtgagtatgaccagaagatatccattgatttctacaaggaaggagatcccttgaaaccagctgtgatgggcgtcttagtgttcgtttccactccagatccaattggcaacaagtactatcttggccctgctcctttgcagaatatggcaaggccacgaagatgattcgatcatagagcttgcaaacaaggtgaggaaggtgctcaacagaacaaaggagaccaaaatcactgggcgcgtgaactcttctactacctcaagggtaagcaggtggactatggcgaggagcacagcaaggcttgcggccacaacaggtttgggagaatatatcacacaggtcactatcctgtttgttatgagcacaacccagtgcattttgtggggcactctgctggcgcgcaggttgtgagggtgctgcatcagatgcttgccgacaaggagaccgtggaggtggttctggagggagcatctttataagggctgcatcgataagctagatgtgatgatgagaaatcacttcgtatgtctcaaatgagcttggcgaagagatttggctaatccagatcttttgttgcctccactctgatggaatatggttttggatcctgaaggagaaagcgggtcctaagggaggaagcagagcaattggagctcgaactggagatgcatagagagttaagggagtagatgctgcaactcttgtggcctacgctcgagctgaagccagattagtgatgaggggggcagttgtccttgctgctaagcatgcaaaaacaatggtcgggaagccattgttgtatggaataggtaccctgttggtcatgtcgctgaggacactgtatggagtgggttgtgtttttggcgcacggtggttcctctacatgacaagcgtatctccatcgctgcaaattgagtttgtaagtggtccgaaacaactaggtagctactagctattgagtatttaggagtcaatgcttaatgatatttacttaatgcttaattgcttatcgaagtaagaaccctgttttttgtattgacatggtggtgctctttaggagagaagccaggggtaaaaaacaattagttctgcagattttattttatttcgatcagttgtgagagtttcttacaattggatgacattgctttgtagaaagaaaatacaaggtattttttagtaggaaagagttgcattttctgtgctcatatacagctttgccgttcgttttctaaaatgttgaaaaggatcatgtcattggtgtaacactcctgtttgtcttaattgaagaagtggtaccaacgagatgtcatttcctatcataattttatctgatgcatatgttgtagtagagctctcagcaattgattcctctcataaattggtggctagagctcgtgtggccctctcatcggatttggtgtctgagccctcgctagatctcgcaccctcatcgaagccctcattggattcgacaccctcactggaggttgcaccgcaatgggatctaggaaccgtagacagcctcgaccacccacgtggattgttgcctctgtggatgagacgcagcgccaaggggccagaggaaactacgtgatgaacctcacatcacagctcatgtcatggttctgagacaacccgtggccgccggcgcgccaccgccgggacgtgagttcgtcggagcgtcagcgagtcgctacaacccaggt

SEQ ID NO: 5188 - DNA, 2287 bp, Zea Mays
caacacgcttcctcagcgccatacgcacacacaggggacagaggtcctctcgctgccatttctctaatcgcatgcacatcacgttctcgcgtggaggatatgtcttgccttgcattcgccattgcggattgcaggcagagggaggcagctgaggattaattcaggctgcctctggctgctcgtctgctcgctcgcctgtccgcttcaaaattgacgcccgtgacctttggtaaaagcgagagctttcttcttagcattatccgctgggaaataaagagagtgcgggagacagttggaggccgttcggttgctggatcgtttgacaagggttgctgattctgcaaggtgcgactcgaattttcttgcgcagcctagctagctaggcgagggcggccaatgggttcctgcgtgtcgtcgacgaggcaccggcggcggccgaggaagctgtcggtcgcggcgaggaagatccggcggaaggtgtgcacggcgatcgccgacgcgcccatcatctgcggcgcggcgagctgcctcgcccggcacggggtcgtccacgtggaggcgccggactccagcgtcaccctgcacctcaccaagctgcagtggcagcgcagccagacggacgccgggaacgtgatttgcgaggaagcatggtacgattctgtcagcatcctggagtcaccggactccgacgacgatctcgacaacgatttcgctagcgtcagcggagaccctctccctgatgtcaccggcggctcaaatgcacaacagtgcaaggacgcggcgtgcttcttggacaccatgcagctcctcaggagcattgcaaacgcggaagcctgtgaccgaagggaacagcctgacaagagcgatgactcgaacggcgaggagtgctgcagtagcagcacactgaaggagcttcaggccgcaatgtcgccgcggccgttcccggcgtcgattccgagcaacaaggtccagccgatgccgatcgctggtgccagcccgcaccagcagcagcagaagaagaaaacggccgtggtcaggctctcgttcaggacaaggtcatacgagggcgacgagatgaccgaaacgatgccgttcagtggctggattattacttcgctgacaagtcctgcaatcccaggtggttctgcgaattacttgtaccgcccaagggcaggtttcacggtgccgtgttgttccacgggcgagaagctgtcggaaggttgctggtcggttcttgagccatcgacgttcagggtccgaggggagagcttcttcaaagacaagaggaaatacccggccccagactgctccccttacacccccattggagcagacatgttcgcctacacgagaaagattcatcacattgcgcagcacctctcgcttccgtctctcaagacacacgaagcctttcctaccctcctcattgtgaacattcagctgcccacataccctgctacagtgtttggcgacaacgacggcgacgggataagcctagttctgtatttcaagttatctgacagttttgacaaggagatctctcctcaattgcaggacagcatcaagaggcttatgaatgatgagatggaaaaggtgaagggatttgcagtagacagcattgtgccctacacagagaggctgaaaatcctggctggtctggcaaaccctgaagacctgcagctgagcacggcagagaggaagctcgtgcagacttacaatcagaagcctgtgctatctcgcccacaacacaaattctacaagggcccaaattactttgagatcgatctcgatgtgcatcggttcagcttcatatcgcggaaagggctcgagacattacgggagcggctcaggcatggcgttcttgatcttggtctaactattcaggcacaaaaggctgaggagctgccagagcatgtcttgtgctgcatgaggctgaacaagatcgacttcgccgacaacgggcatataccgacgctgataactgcagctgacgagtaaatctgtcgtgttactgtagggcactaactttcaggaaaaagcaaaagagactagagtgtggttcgtagatgttcttgagatgctgttgtatagagcggcagatagttgtaggaactaactcaagtttgagatgctgttgtatagagcggcaaatacttgttgatcgttgctccaaaagaggaggggggaaaaagacattgcagcaggctgcattctgaactctgaagaagtgaagatgtatatgcatgcctgtgttttcttttcttttttttgaaacggaatacatgtc

SEQ ID NO: 5189 - DNA, 2296 bp, Zea Mays
caacacgcttcctcagcgccatacgcacacacaggggacagaggtcctctcgctgccatttctctaatcgcatgcacatcacgttctcgcgtggaggatatgtcttgccttgcattcgccattgcggattgcaggcagagggaggcagctgaggattaattcaggctgcctctggctgctcgtctgctcgctcgcctgtccgcttcaaaattgacgcccgtgacctttggtaaaagcgagagctttcttcttagcattatccgctgggaaataaagagagtgcgggagacagttggaggccgttcggttgctggatcgtttgacaaggttcttgaaggttgctgattctgcaaggtgcgactcgaattttcttgcgcagcctagctagctaggcgagggcggccaatgggttcctgcgtgtcgtcgacgaggcaccggcggcggccgaggaagctgtcggtcgcggcgaggaagatccggcggaaggtgtgcacggcgatcgccgacgcgcccatcatctgcggcgcggcgagctgcctcgcccggcacggggtcgtccacgtggaggcgccggactccagcgtcaccctgcacctcaccaagctgcagtggcagcgcagccagacggacgccgggaacgtgatttgcgaggaagcatggtacgattctgtcagcatcctggagtcaccggactccgacgacgatctcgacaacgatttcgctagcgtcagcggagaccctctccctgatgtcaccggcggctcaaatgcacaacagtgcaaggacgcggcgtgcttcttggacaccatgcagctcctcaggagcattgcaaacgcggaagcctgtgaccgaagggaacagcctgacaagagcgatgactcgaacggcgaggagtgctgcagtagcagcacactgaaggagcttcaggccgcaatgtcgccgcggccgttcccggcgtcgattccgagcaacaaggtccagccgatgccgatcgctggtgccagcccgcaccagcagcagcagaagaagaaaacggccgtggtcaggctctcgttcaggacaaggtcatacgagggcgacgagatgaccgaaacgatgccgttcagtggctggattattacttcgctgacaagtcctgcaatcccaggtggttctgcgaattacttgtaccgcccaagggcaggtttcacggtgccgtgttgttccacgggcgagaagctgtcggaaggttgctggtcggttcttgagccatcgacgttcagggtccgaggggagagcttcttcaaagacaagaggaaatacccggccccagactgctccccttacacccccattggagcagacatgttcgcctacacgagaaagattcatcacattgcgcagcacctctcgcttccgtctctcaagacacacgaagcctttcctaccctcctcattgtgaacattcagctgcccacataccctgctacagtgtttggcgacaacgacggcgacgggataagcctagttctgtatttcaagttatctgacagttttgacaaggagatctctcctcaattgcaggacagcatcaagaggcttatgaatgatgagatggaaaaggtgaagggatttgcagtagacagcattgtgccctacacagagaggctgaaaatcctggctggtctggcaaaccctgaagacctgcagctgagcacggcagagaggaagctcgtgcagacttacaatcagaagcctgtgctatctcgcccacaacacaaattctacaagggcccaaattactttgagatcgatctcgatgtgcatcggttcagcttcatatcgcggaaagggctcgagacattacgggagcggctcaggcatggcgttcttgatcttggtctaactattcaggcacaaaaggctgaggagctgccagagcatgtcttgtgctgcatgaggctgaacaagatcgacttcgccgacaacgggcatataccgacgctgataactgcagctgacgagtaaatctgtcgtgttactgtagggcactaactttcaggaaaaagcaaaagagactagagtgtggttcgtagatgttcttgagatgctgttgtatagagcggcagatagttgtaggaactaactcaagtttgagatgctgttgtatagagcggcaaatacttgttgatcgttgctccaaaagaggaggggggaaaaagacattgcagcaggctgcattctgaactctgaagaagtgaagatgtatatgcatgcctgtgttttcttttcttttttttgaaacggaatacatgtc

SEQ ID NO: 5190 - DNA, 2418 bp, Zea Mays
cttttttgcccatggccggagtccctgactccctgctgcggctggggcaagcggctagggttctgccggttcttcaaacgcgcgtgacattgacctgtaccatctcccgcttctttatcctactcccaccctctccgatgatttacatgccgcgcctttgcggggcaggaaagcagacggatcaacacgcttcctcagcgccatacgcacacacaggggacagaggtcctctcgctgccatttctctaatcgcatgcacatcacgttctcgcgtggaggatatgtcttgccttgcattcgccattgcggattgcaggcagagggaggcagctgaggattaattcaggctgcctctggctgctcgtctgctcgctcgcctgtccgcttcaaaattgacgcccgtgacctttggtaaaagcgagagctttcttcttagcattatccgctgggaaataaagagagtgcgggagacagttggaggccgttcggttgctggatcgtttgacaagggttgctgattctgcaaggtgcgactcgaattttcttgcgcagcctagctagctaggcgagggcggccaatgggttcctgcgtgtcgtcgacgaggcaccggcggcggccgaggaagctgtcggtcgcggcgaggaagatccggcggaaggtgtgcacggcgatcgccgacgcgcccatcatctgcggcgcggcgagctgcctcgcccggcacggggtcgtccacgtggaggcgccggactccagcgtcaccctgcacctcaccaagctgcagtggcagcgcagccagacggacgccgggaacgtgatttgcgaggaagcatggtacgattctgtcagcatcctggagtcaccggactccgacgacgatctcgacaacgatttcgctagcgtcagcggagaccctctccctgatgtcaccggcggctcaaatgcacaacagtgcaaggacgcggcgtgcttcttggacaccatgcagctcctcaggagcattgcaaacgcggaagcctgtgaccgaagggaacagcctgacaagagcgatgactcgaacggcgaggagtgctgcagtagcagcacactgaaggagcttcaggccgcaatgtcgccgcggccgttcccggcgtcgattccgagcaacaaggtccagccgatgccgatcgctggtgccagcccgcaccagcagcagcagaagaagaaaacggccgtggtcaggctctcgttcaggacaaggtcatacgagggcgacgagatgaccgaaacgagtggttctgcgaattacttgtaccgcccaagggcaggtttcacggtgccgtgttgttccacgggcgagaagctgtcggaaggttgctggtcggttcttgagccatcgacgttcagggtccgaggggagagcttcttcaaagacaagaggaaatacccggccccagactgctccccttacacccccattggagcagacatgttcgcctacacgagaaagattcatcacattgcgcagcacctctcgcttccgtctctcaagacacacgaagcctttcctaccctcctcattgtgaacattcagctgcccacataccctgctacagtgtttggcgacaacgacggcgacgggataagcctagttctgtatttcaagttatctgacagttttgacaaggagatctctcctcaattgcaggacagcatcaagaggcttatgaatgatgagatggaaaaggtgaagggatttgcagtagacagcattgtgccctacacagagaggctgaaaatcctggctggtctggcaaaccctgaagacctgcagctgagcacggcagagaggaagctcgtgcagacttacaatcagaagcctgtgctatctcgcccacaacacaaattctacaagggcccaaattactttgagatcgatctcgatgtgcatcggttcagcttcatatcgcggaaagggctcgagacattacgggagcggctcaggcatggcgttcttgatcttggtctaactattcaggcacaaaaggctgaggagctgccagagcatgtcttgtgctgcatgaggctgaacaagatcgacttcgccgacaacgggcatataccgacgctgataactgcagctgacgagtaaatctgtcgtgttactgtagggcactaactttcaggaaaaagcaaaagagactagagtgtggttcgtagatgttcttgagatgctgttgtatagagcggcagatagttgtaggaactaactcaagtttgagatgctgttgtatagagcggcaaatacttgttgatcgttgctccaaaagaggaggggggaaaaagacattgcagcaggctgcattctgaactctgaagaagtgaagatgtatatgcatgcctgtgttttcttttcttttttttgaaacggaatacatgtc

SEQ ID NO: 5191 - DNA, 1250 bp, Zea Mays
actctgatatttatctcaccctcactttggtctcatctaaacaccgtaaaattgtgatgcccccttctatccattcttatgatcaaaccaaacataccactatagccgtcgccaatacccgataagactcggcaaatcagctggacacatagcacatctatcccgcttccgtctcccgctccagtcgccatggcggaagccctcgtgggcctccgcgtcgctgccctcgccgtcccgcagcctaggagccaccgcagacggcttcttcccgctgcgcgcctcgctgcgttccggcgcgaccggctgagcaccgcccgcgcggccgtcgcagggccaccggaggtggacgaggacgattccatgagtatcgacaacttgcatcgtttcttcgacctcaacgtcggaaagtgggacgggtcattctaccaattcgacgcgcacgggagggttcttcaggagattagcacgcggctgtccgtgagcacgtacggggaggacaacctcatcagcctccttcaatcgttgtacattaagcaagcatcctctgcaatatcaatcgtggacgaagaggattctgaacctgaatgggtggaatacaagatcaaagagacgaacatattcactgtggacaaatatcagcagatagggttctttcctgaagaaaaggcatttgctctgaggtatcagactgctggaatgctggagactgttcttcgggttggcacgcttggagaagatgatactggtgaagaatctcccaaaaacctgaagataccttctcgcaagccatctatcgtatgtgaaaattgtctttactcccttgaaggcaatggtcgaatgagggctttccacataatggatccaaagggagtgcttgacacacttcttatttttcatgagaagaggcagggatctgaattggcacaatcatttaaacactattcagtttgtaccaagagtgccagcagtgataggataagtacagtacttggaagatgggagggtcattctgtgactaagaggagtggggtgtatggagcaacacttgctgaagcagatacagctgttgttctcaaaatgggctctaatggccaattgattcaggccaactgctggaaagggcctccgaacctgaatagggatttcaagaaccgaagtggcgccaaaggacgacgcatatcatacatgcaaccggtctggtcaagccgatgccttttttattttttttttctttgtacgggtgggagtca

SEQ ID NO: 5192 - DNA, 1801 bp, Zea Mays
actctgatatttatctcaccctcactttggtctcatctaaacaccgtaaaattgtgatgcccccttctatccattcttatgatcaaaccaaacataccactatagccgtcgccaatacccgataagactcggcaaatcagctggacacatagcacatctatcccgcttccgtctcccgctccagtcgccatggcggaagccctcgtgggcctccgcgtcgctgccctcgccgtcccgcagcctaggagccaccgcagacggcttcttcccgctgcgcgcctcgctgcgttccggcgcgaccggctgagcaccgcccgcgcggccgtcgcagggccaccggaggtggacgaggacgattccatgagtatcgacaacttgcatcgtttcttcgacctcaacgtcggaaagtgggacgggtcattctaccaattcgacgcgcacgggagggttcttcaggagattagcacgcggctgtccgtgagcacgtacggggaggacaacctcatcagcctccttcaatcgttgtacattaagcaagcatcctctgcaatatcaatcgtggacgaagaggattctgaacctgaatgggtggaatacaagatcaaagagacgaacatattcactgtggacaaatatcagcagatagggttctttcctgaagaaaaggcatttgctctgaggtatcagactgctggaatgctggagactgttcttcgggttggcacgcttggagaagatgatactggtgaagaatctcccaaaaacctgaagataccttctcgcaagccatctatcgtatgtgaaaattgtctttactcccttgaaggcaatggtcgaatgagggctttccacataatggatccaaagggagtgcttgacacacttcttatttttcatgagaagaggcagggatctgaattggcacaatcatttaaacactattcagtttgtaccaagagtgccagcagtgataggataagtacagtacttggaagatgggagggtcattctgtgactaagaggagtggggtgtatggagcaacacttgctgaagcagatacagctgttgttctcaaaatgggctctaatggccaattgattcaggctgtgttggcgatcagagcggaggtccgtcgccggaaggcttggtaaaggtttcgcctgcctagtgcccgtgttttttcccttcgcattgaaggtttttccacgatactttatcaactaaaatcggaaccggtacaacaacaacggtcaactggacaggatcagcaaatgaaaacttgcttcagtttgatggaggatatgaaataacattgctacctggtgggatgtacatgggatatccatcagacattagcaaatctatttcccaattagattcttttcatttagagttttgttggatggaatcacctggaaagaggcagcggcttgtccgaacttacgatgcagctggtttggctgtttcatcgacctatttttttgaaaccaaagtttgagtcatagcttctacaaaatgtattgcaacggttttgtaagtcatacagtaatctcactatttgtgtccttcggtgcatgatatttgagtatatattgtcagatctttctatatccaaaacccagaaattcatgaaccaaacgtgtattcttgttttgctcattatgttgcattcctctcgatgatgataatagaggaacaacggaaaattagcatactactcacaagggaaaattagcatactactcaagcatatcactgagcatctcatgtgcataaattaaaaaatatctaaatttgaac

SEQ ID NO: 5193 - DNA, 1236 bp, Zea Mays
agatggcgtcagccacgacattcaaagatcaacatgcagggaagttgagaaggcaaaatatatttacattgctggatttttccttacggtatccccggattctattcaacttgttgctgagcatgccgctgcaactaacaaggtgtttatgatgaacctttctgctccctttatatgcgaggttttccgtgatgcccaagagaaagctcttccgtacgtggattacatctttggaaatgaaactgaggcgaggacctttgctaaagttcgcggttgggagaccgagaatgttgaggagatcgctttgaagatctcccaattaccgaaggcttcaggaacacacaagaagattactgttatcactcaaggttgcgatccggtagttgtggccgatgatggaaaggtgaaaactttccctgtgatcctcttgcctaaggagaagcttgttgacaccaatggtgcaggtgatgcgttcgttggtggcttcctgtcccagttggtacaagagaagaacatcgatgagtgtgtcagagctgcctgttacgccgccaatgttgtcatccaacgttctggctgcacttaccctgagaagcctgacttcaactagagccatttcagaatttagaatctattggcatctggtctgtataattagtcgggttcgccttggtctgtttgcggcacattctagtgccaccgtacaggtcaaatgttcatgcgtgtaaggcgtgtcatggcactctacaaaagtgcattcgtgcgtcacctcttgcaagggaaaccagctggttgtaagttcagccatgggcacactcttgaggccacaatatgtgccagaaatggcagtgtaccccggcctgccccggcactcggatgcgtgcatgcctctcccggttacggactctttacagttgcatctaaaacaattcaaagcaccttgcggtgcatccttgaaaagttggggcacaatatggttatggaccacactggagctaattgctagcttgctctacagcctataccctataattcagcctacacccataatggttttttgaacatctcgagctgaattacggaacacagaggcggtcaaatacaacgagggcgggccggtaccgcggtcagctgcacagtgccgggctccactcgcgctgggcgtcgacatggcagaggacagcgaggaacatgtcctcgtcgcaggggaggcacagcctggtgtcggcggcggcgaag

SEQ ID NO: 5194 - DNA, 1564 bp, Zea Mays
ccctcctcgacatctccgctgtcgtcgacgagggcttcctcgccaagtatgacgaattggctagcaagagcaatgttgaatacattgctggaggagccactcaaaactctatcagggttgcccaatggatgcttcaaattcctggtgcatcaagttacattggttgcatcgggaaggataagtttggtgaggagatgaaaaaaaatgcacaagctgctggtattaatgcccattatcatgaggatgagaatgctccaacgggcacatgtgctgtttgtgttgttggtggagaaaggtcacttattgctaacttgtctgcggcaaactgctataagtctgaacatctgaagaaacctgagaattgggcacttgttgagaaggcaaaatatatttacattgctggatttttccttacggtatccccggattctattcaacttgttgctgagcatgccgctgcaactaacaaggtgtttatgatgaacctttctgctccctttatatgcgaggttttccgtgatgcccaagagaaagctcttccgtacgtggattacatctttggaaatgaaactgaggcgaggacctttgctaaagttcgcggttgggagaccgagaatgttgaggagatcgctttgaagatctcccaattaccgaaggcttcaggaacacacaagaagattactgttatcactcaaggttgcgatccggtagttgtggccgatgatggaaaggtgaaaactttccctgtgatcctcttgcctaaggagaagcttgttgacaccaatggtgcaggtgatgcgttcgttggtggcttcctgtcccagttggtacaagagaagaacatcgatgagtgtgtcagagctgcctgttacgccgccaatgttgtcatccaacgttctggctgcacttaccctgagaagcctgacttcaactagagccatttcagaatttagaatctattggcatctggtctgtataattagtcgggttcgccttggtctgtttgcggcacattctagtgccaccgtacaggtcaaatgttcatgcgtgtaaggcgtgtcatggcactctacaaaagtgcattcgtgcgtcacctcttgcaagggaaaccagctggttgtaagttcagccatgggcacactcttgaggccacaatatgtgccagaaatggcagtgtaccccggcctgccccggcactcggatgcgtgcatgcctctcccggttacggactctttacagttgcatctaaaacaattcaaagcaccttgcggtgcatccttgaaaagttggggcacaatatggttatggaccacactggagctaattgctagcttgctctacagcctataccctataattcagcctacacccataatggttttttgaacatctcgagctgaattacggaacacagaggcggtcaaatacaacgagggcgggccggtaccgcggtcagctgcacagtgccgggctccactcgcgctgggcgtcgacatggcagaggacagcgaggaacatgtcctcgtcgcaggggaggcacagcctggtgtcggcggcggcgaag

SEQ ID NO: 5195 - DNA, 1601 bp, Zea Mays
tgcgcgcgtcggggcacgggcagcgggagcggcggcgggctgcggcggagaaacctagctccgtataccatgttgtttttctggtatgacgaattggctagcaagagcaatgttgaatacattgctggaggagccactcaaaactctatcagggttgcccaatggatgcttcaaattcctggtgcatcaagttacattggttgcatcgggaaggataagtttggtgaggagatgaaaaaaaatgcacaagctgctggtattaatgcccattatcatgaggatgagaatgctccaacgggcacatgtgctgtttgtgttgttggtggagaaaggtcacttattgctaacttgtctgcggcaaactgctataagtctgaacatctgaagaaacctgagaattgggcacttgttgagaaggcaaaatatatttacattgctggatttttccttacggtatccccggattctattcaacttgttgctgagcatgccgctgcaactaacaaggtgtttatgatgaacctttctgctccctttatatgcgaggttttccgtgatgcccaagagaaagctcttccgtacgtggattacatctttggaaatgaaactgaggcgaggacctttgctaaagttcgcggttgggagaccgagaatgttgaggagatcgctttgaagatctcccaattaccgaaggcttcaggaacacacaagaagattactgttatcactcaaggttgcgatccggtagttgtggccgatgatggaaaggtgaaaactttccctgtgatcctcttgcctaaggagaagcttgttgacaccaatggtgcaggtgatgcgttcgttggtggcttcctgtcccagttggtacaagagaagaacatcgatgagtgtgtcagagctgcctgttacgccgccaatgttgtcatccaacgttctggctgcacttaccctgagaagcctgacttcaactagagccatttcagaatttagaatctattggcatctggtctgtataattagtcgggttcgccttggtctgtttgcggcacattctagtgccaccgtacaggtcaaatgttcatgcgtgtaaggcgtgtcatggcactctacaaaagtgcattcgtgcgtcacctcttgcaagggaaaccagctggttgtaagttcagccatgggcacactcttgaggccacaatatgtgccagaaatggcagtgtaccccggcctgccccggcactcggatgcgtgcatgcctctcccggttacggactctttacagttgcatctaaaacaattcaaagcaccttgcggtgcatccttgaaaagttggggcacaatatggttatggaccacactggagctaattgctagcttgctctacagcctataccctataattcagcctacacccataatggttttttgaacatctcgagctgaattacggaacacagaggcggtcaaatacaacgagggcgggccggtaccgcggtcagctgcacagtgccgggctccactcgcgctgggcgtcgacatggcagaggacagcgaggaacatgtcctcgtcgcaggggaggcacagcctggtgtcggcggcggcgaag

SEQ ID NO: 5196 - DNA, 1790 bp, Zea Mays
cagttgggagagcatcaccaattcacctctctgttgtatccaacggtgctcaaatgggtatgatgtgaagccgggcaatgccattcttgcagaggacaagcatttgccaatgtaagtctcgttgcccctttagctcccattgcggtttgaaatgttggttatcgatactagcttgtcctgaacggagaatgggaaacaaattcttgatgttgtcacattaagcacccatgagacggggagaaacgtagtggactcctaatttttatggccaggtatgacgaattggctagcaagagcaatgttgaatacattgctggaggagccactcaaaactctatcagggttgcccaatggatgcttcaaattcctggtgcatcaagttacattggttgcatcgggaaggataagtttggtgaggagatgaaaaaaaatgcacaagctgctggtattaatgcccattatcatgaggatgagaatgctccaacgggcacatgtgctgtttgtgttgttggtggagaaaggtcacttattgctaacttgtctgcggcaaactgctataagtctgaacatctgaagaaacctgagaattgggcacttgttgagaaggcaaaatatatttacattgctggatttttccttacggtatccccggattctattcaacttgttgctgagcatgccgctgcaactaacaaggtgtttatgatgaacctttctgctccctttatatgcgaggttttccgtgatgcccaagagaaagctcttccgtacgtggattacatctttggaaatgaaactgaggcgaggacctttgctaaagttcgcggttgggagaccgagaatgttgaggagatcgctttgaagatctcccaattaccgaaggcttcaggaacacacaagaagattactgttatcactcaaggttgcgatccggtagttgtggccgatgatggaaaggtgaaaactttccctgtgatcctcttgcctaaggagaagcttgttgacaccaatggtgcaggtgatgcgttcgttggtggcttcctgtcccagttggtacaagagaagaacatcgatgagtgtgtcagagctgcctgttacgccgccaatgttgtcatccaacgttctggctgcacttaccctgagaagcctgacttcaactagagccatttcagaatttagaatctattggcatctggtctgtataattagtcgggttcgccttggtctgtttgcggcacattctagtgccaccgtacaggtcaaatgttcatgcgtgtaaggcgtgtcatggcactctacaaaagtgcattcgtgcgtcacctcttgcaagggaaaccagctggttgtaagttcagccatgggcacactcttgaggccacaatatgtgccagaaatggcagtgtaccccggcctgccccggcactcggatgcgtgcatgcctctcccggttacggactctttacagttgcatctaaaacaattcaaagcaccttgcggtgcatccttgaaaagttggggcacaatatggttatggaccacactggagctaattgctagcttgctctacagcctataccctataattcagcctacacccataatggttttttgaacatctcgagctgaattacggaacacagaggcggtcaaatacaacgagggcgggccggtaccgcggtcagctgcacagtgccgggctccactcgcgctgggcgtcgacatggcagaggacagcgaggaacatgtcctcgtcgcaggggaggcacagcctggtgtcggcggcggcgaag

SEQ ID NO: 5197 - DNA, 1964 bp, Zea Mays
cacgcggcgacgtcttaccggctgctcgcgcgtccgtggcggcgtggcgcaacgtgttgggtgggccggtgggcggtggcacgttagcctgccgctaggaaactccgggttctctgttctctctttccttccgactttcccactgccgtgacgattttcacagcgaattctccggccggcgccgccccgtccgtccgtccgtccgtccgttcattccgataccgaactcgccagtcgccacagcgatctctctcgctcgctccgccgacgcagcgctcggcttcagctcgagaggaggaaatggccagcagcggctacgaagggatcctcctgggaatggggaaccccctcctcgacatctccgctgtcgtcgacgagggcttcctcgccaagtatgatgtgaagccgggcaatgccattcttgcagaggacaagcatttgccaatgtatgacgaattggctagcaagagcaatgttgaatacattgctggaggagccactcaaaactctatcagggttgcccaatggatgcttcaaattcctggtgcatcaagttacattggttgcatcgggaaggataagtttggtgaggagatgaaaaaaaatgcacaagctgctggtattaatgcccattatcatgaggatgagaatgctccaacgggcacatgtgctgtttgtgttgttggtggagaaaggtcacttattgctaacttgtctgcggcaaactgctataagtctgaacatctgaagaaacctgagaattgggcacttgttgagaaggcaaaatatatttacattgctggatttttccttacggtatccccggattctattcaacttgttgctgagcatgccgctgcaactaacaaggtgtttatgatgaacctttctgctccctttatatgcgaggttttccgtgatgcccaagagaaagctcttccgtacgtggattacatctttggaaatgaaactgaggcgaggacctttgctaaagttcgcggttgggagaccgagaatgttgaggagatcgctttgaagatctcccaattaccgaaggcttcaggaacacacaagaagattactgttatcactcaaggttgcgatccggtagttgtggccgatgatggaaaggtgaaaactttccctgtgatcctcttgcctaaggagaagcttgttgacaccaatggtgcaggtgatgcgttcgttggtggcttcctgtcccagttggtacaagagaagaacatcgatgagtgtgtcagagctgcctgttacgccgccaatgttgtcatccaacgttctggctgcacttaccctgagaagcctgacttcaactagagccatttcagaatttagaatctattggcatctggtctgtataattagtcgggttcgccttggtctgtttgcggcacattctagtgccaccgtacaggtcaaatgttcatgcgtgtaaggcgtgtcatggcactctacaaaagtgcattcgtgcgtcacctcttgcaagggaaaccagctggttgtaagttcagccatgggcacactcttgaggccacaatatgtgccagaaatggcagtgtaccccggcctgccccggcactcggatgcgtgcatgcctctcccggttacggactctttacagttgcatctaaaacaattcaaagcaccttgcggtgcatccttgaaaagttggggcacaatatggttatggaccacactggagctaattgctagcttgctctacagcctataccctataattcagcctacacccataatggttttttgaacatctcgagctgaattacggaacacagaggcggtcaaatacaacgagggcgggccggtaccgcggtcagctgcacagtgccgggctccactcgcgctgggcgtcgacatggcagaggacagcgaggaacatgtcctcgtcgcaggggaggcacagcctggtgtcggcggcggcgaag

SEQ ID NO: 5198 - DNA, 1973 bp, Zea Mays
tccgggttctctgttctctctttccttccgactttcccactgccgtgacgattttcacagcgaattctccggccggcgccgccccgtccgtccgtccgtccgtccgttcattccgataccgaactcgccagtcgccacagcgatctctctcgctcgctccgccgacgcagcgctcggcttcagctcgagaggaggaaatggccagcagcggctacgaagggatcctcctgggaatggggaaccccctcctcgacatctccgctgtcgtcgacgagggcttcctcgccaatggtgtgatgcggactccagcatcaccaattcaccctctctgttgtatccaacggcagttgggagagcatcaccaattcacctctctgttgtatccaacggtgctcaaatgggtatgatgtgaagccgggcaatgccattcttgcagaggacaagcatttgccaatgtatgacgaattggctagcaagagcaatgttgaatacattgctggaggagccactcaaaactctatcagggttgcccaatggatgcttcaaattcctggtgcatcaagttacattggttgcatcgggaaggataagtttggtgaggagatgaaaaaaaatgcacaagctgctggtattaatgcccattatcatgaggatgagaatgctccaacgggcacatgtgctgtttgtgttgttggtggagaaaggtcacttattgctaacttgtctgcggcaaactgctataagtctgaacatctgaagaaacctgagaattgggcacttgttgagaaggcaaaatatatttacattgctggatttttccttacggtatccccggattctattcaacttgttgctgagcatgccgctgcaactaacaaggtgtttatgatgaacctttctgctccctttatatgcgaggttttccgtgatgcccaagagaaagctcttccgtacgtggattacatctttggaaatgaaactgaggcgaggacctttgctaaagttcgcggttgggagaccgagaatgttgaggagatcgctttgaagatctcccaattaccgaaggcttcaggaacacacaagaagattactgttatcactcaaggttgcgatccggtagttgtggccgatgatggaaaggtgaaaactttccctgtgatcctcttgcctaaggagaagcttgttgacaccaatggtgcaggtgatgcgttcgttggtggcttcctgtcccagttggtacaagagaagaacatcgatgagtgtgtcagagctgcctgttacgccgccaatgttgtcatccaacgttctggctgcacttaccctgagaagcctgacttcaactagagccatttcagaatttagaatctattggcatctggtctgtataattagtcgggttcgccttggtctgtttgcggcacattctagtgccaccgtacaggtcaaatgttcatgcgtgtaaggcgtgtcatggcactctacaaaagtgcattcgtgcgtcacctcttgcaagggaaaccagctggttgtaagttcagccatgggcacactcttgaggccacaatatgtgccagaaatggcagtgtaccccggcctgccccggcactcggatgcgtgcatgcctctcccggttacggactctttacagttgcatctaaaacaattcaaagcaccttgcggtgcatccttgaaaagttggggcacaatatggttatggaccacactggagctaattgctagcttgctctacagcctataccctataattcagcctacacccataatggttttttgaacatctcgagctgaattacggaacacagaggcggtcaaatacaacgagggcgggccggtaccgcggtcagctgcacagtgccgggctccactcgcgctgggcgtcgacatggcagaggacagcgaggaacatgtcctcgtcgcaggggaggcacagcctggtgtcggcggcggcgaag

SEQ ID NO: 5199 - DNA, 2020 bp, Zea Mays
cgggttctctgttctctctttccttccgactttcccactgccgtgacgattttcacagcgaattctccggccggcgccgccccgtccgtccgtccgtccgtccgttcattccgataccgaactcgccagtcgccacagcgatctctctcgctcgctccgccgacgcagcgctcggcttcagctcgagaggaggaaatggccagcagcggctacgaagggatcctcctgggaatggggaaccccctcctcgacatctccgctgtcgtcgacgagggcttcctcgccaagtatgatgtgaagccgggcaatgccattcttgcagaggacaagcatttgccaatgtaagtctcgttgcccctttagctcccattgcggtttgaaatgttggttatcgatactagcttgtcctgaacggagaatgggaaacaaattcttgatgttgtcacattaagcacccatgagacggggagaaacgtagtggactcctaatttttatggccaggtatgacgaattggctagcaagagcaatgttgaatacattgctggaggagccactcaaaactctatcagggttgcccaatggatgcttcaaattcctggtgcatcaagttacattggttgcatcgggaaggataagtttggtgaggagatgaaaaaaaatgcacaagctgctggtattaatgcccattatcatgaggatgagaatgctccaacgggcacatgtgctgtttgtgttgttggtggagaaaggtcacttattgctaacttgtctgcggcaaactgctataagtctgaacatctgaagaaacctgagaattgggcacttgttgagaaggcaaaatatatttacattgctggatttttccttacggtatccccggattctattcaacttgttgctgagcatgccgctgcaactaacaaggtgtttatgatgaacctttctgctccctttatatgcgaggttttccgtgatgcccaagagaaagctcttccgtacgtggattacatctttggaaatgaaactgaggcgaggacctttgctaaagttcgcggttgggagaccgagaatgttgaggagatcgctttgaagatctcccaattaccgaaggcttcaggaacacacaagaagattactgttatcactcaaggttgcgatccggtagttgtggccgatgatggaaaggtgaaaactttccctgtgatcctcttgcctaaggagaagcttgttgacaccaatggtgcaggtgatgcgttcgttggtggcttcctgtcccagttggtacaagagaagaacatcgatgagtgtgtcagagctgcctgttacgccgccaatgttgtcatccaacgttctggctgcacttaccctgagaagcctgacttcaactagagccatttcagaatttagaatctattggcatctggtctgtataattagtcgggttcgccttggtctgtttgcggcacattctagtgccaccgtacaggtcaaatgttcatgcgtgtaaggcgtgtcatggcactctacaaaagtgcattcgtgcgtcacctcttgcaagggaaaccagctggttgtaagttcagccatgggcacactcttgaggccacaatatgtgccagaaatggcagtgtaccccggcctgccccggcactcggatgcgtgcatgcctctcccggttacggactctttacagttgcatctaaaacaattcaaagcaccttgcggtgcatccttgaaaagttggggcacaatatggttatggaccacactggagctaattgctagcttgctctacagcctataccctataattcagcctacacccataatggttttttgaacatctcgagctgaattacggaacacagaggcggtcaaatacaacgagggcgggccggtaccgcggtcagctgcacagtgccgggctccactcgcgctgggcgtcgacatggcagaggacagcgaggaacatgtcctcgtcgcaggggaggcacagcctggtgtcggcggcggcgaag

SEQ ID NO: 5200 - DNA, 545 bp, Zea Mays
atcgtgaggatccccaggcacagcaaatcaagtgtttgacaaatgtgagcctgaaacagtatctcttgctaccaggctcagtactgtggatgtgacatatgacgtttgtggaatgtgcggtggaggcaactgttgcagctgaagttacacagggggaattctttggagcaatgactgcccacaccactagaagcaagaggaggattgtgctgtttgatagccaagtaggaggtgataaatgtcatggcattgaagttactcctagatggaatggtggacacgaatttgtactcactttaggtgacgctacgatttgtgtgaagctaagcactagtgtgaagtcgtagaaacattggccctttcgttcgttctcttgggagagttccagtggcgatgaagcttttcagttttcacagctcggatgtgagcaaatccatcagctcctgcactgcatggatcaaccgggtgtgtacagcagagcaagttcaatgaaggaaggatcttctgagttgccgagtggcgtgcgaaactcagcagaaccaagc

SEQ ID NO: 5201 - DNA, 1649 bp, Zea Mays
ctgctgcttatctcgtggccgatccgcgctcgccccgtccccgcatctcgccgccgcgccccggtcagtgtgcgcttgagacatcgcccacacgagacatcgtgtgtgatgcccgcccccaacccttccccggtgtgatgcccgccgttgacgtctcttctctcgcccccatcctcctcaacctcggcgccgcccctgcccctgtcctcgatggcaaggaaacttcccccgggcataaatctcactgctcacgcgccattagcgccatacccgctacctcctctggcatgccacacgccgccatccccctagcccatcgtgtgtcacgcgcccagatctcctatttttacgcccccacgcaacataggccatcccaccatggagcaagaaaccctagcgtagccaccaaccactgctgccccacatggcatcctgactgtggctgcatccatctcggcgcctcgcccaccacgttgcaccaccaccgccgctcctcctccccaccgcgctgtcgccctgagtaccaccgccaccgccaccgtgcatgtcgctagggccgcatctctcgatgttagggcccaaccgaacatcgtcgtcgcctccacctctgcgtctgggccaccgcaagagtttagggctcctccggggttcgagatcatgtccgaccagcagagcagcatcctcagcaccatgctcgacaaccccctccacctcggtactggcgtcttcgccctcggattcactaagacgatggcgcgtctgcggcaaggagcttcagattcactgccatcagaaacttgcagttattggccagatgaagggcgaaggccattatcagatcctcgtccacctttgggctattgctgacaagtggacgagtgtcgtacacctctccaattccccccttcaatgtggtcagtgttgaatcatctacgtcatacagtgagcaagggcatactgatgagggatgacatggatttttctcgttcgagcatcaggttttgtgcgttgattatggtgtgctcgttggtgagactgcgacgtcctcgttcaagtcagctgataatcgtgtcctccaagagcaactactacagaagaatgtggaaatcaacgatttataagaaaaagtttttcacgttgagcaataactctcagcaaaagtggatatatcctctgagaaggaagctgattgtgcacatcaggagactattgatttgaaatctaaacttcagtccaaggaagctaaaattgaaaagatgaaatatgagcatctggcgagggaggctgctttggtagaggatcttcttgaagaggagtacaagaaaaagtttgatgaggcaaacaaggaactatctcttgagaatgatctagcaagcatgtgggttcttgttgctaagttgaaaagaggggctttagacacatctgatttgaatgttgatgatcgaactaaagtgtaagggcgtagagatcgccacactgttgtctcataattggtgttaataaaaaataacatggtgctgcacggaatctctactttgtcttgtaagcaggattgttctgtcggtataatttgatttgtatgtataatgtcttcatgctttacttgcccttttatgaaatgtggcgaccggtcctcttgtctttctttt

SEQ ID NO: 5202 - DNA, 2319 bp, Zea Mays
cagattcattaacatgcctatcctaccactataaaggtacacaaagcttccgaagggaagaagctcttgagaagatactgcaatgatggctcctctgtctcctagactggtagtgcccgtagacgtgaagaagctgccgcgggagcaaaaggtccctctccacaaccgctggcacccggatatccctcctgttgctgatgtaaccgaaggggaattgttccgcgttgagatggtcgattggagtggagggcgggttagggatgataactctgcagatgatctgaaattcatggatttcacaattgctcattatcttagtgggcccctaagaatagttgattctgaaggggttccagcttcaccaggtgatcttctcgcggtagaaatctgcaaccttggcccacttcctggcgacgagtggggttacaccgcaatacttgaaagggagaatggaggtggattcttaactgaccacttccctagcgcaagaaaagccatctggtatttcgaaggaatttacgcatgctccccgcagataccaggtgttcgttttccaggattgactcatcctggtgttgtgggaactgcaccgtcacttgagctcctaaatatatggaatgaaagagagaaaagtttgtctgagacaagcctagagactattaaactgtgtgaagttctacaccagaggccccttgctcatttaccgacccctgaaaattgcttacttgggaaggtccaagaagggactgctgaatggcacataattgcaaacgaagcggccagaactattgctggaagggaaaatggcgggaattgcgacataaagaacctaagcagaggctccagaatttatctaccagtgtttgtcgaaggagcaaacctcagcactggtgacatgcacttctcccagggggacggcgagatttcgctgtgtggagcaattgaaatgagcgggttccttgagctcaagtgtgagatcataagaggtgggatgaaggaatacttgactccagttggtccaacaccactccatgtgagccccatctttgagataggtcctgtggagccacgtttctcggagtggttagtgtttgagggcatcagcgtagatgagtctgggaagcaacattttcttgacgcatctgtggcctacaagcgtgcagttctgaacgccattgagtacctttccaagttcgggtactctaaggagcaggtgtatcttttactatcatgctgcccatgcgagggtaggatatctggaatagtggactctcctaatgctgtaacaactcttgccatccctacagcgatatttgatcagtgtctgatatatgctgctggtacttcatgtgttatgtctgaagaaacaaaagttactgcctgcatatcgtgaactcatgagcaggccgtacaaacaaaccacacaattttgatgctgattaacgtgagctgggcaaggttcagggttcaccaagactagatttatatcaccctctccattttattgaaagtatcttatgtgagtaagcctggttcatttgatcagcggcatgcatcacctaactgtttcttgtgataatgtgatccggtcaatataaaagcgacccaaatattatagaatatacttttccgctgacagttactattaggcaaagtgtaagaacaacttgtatgaagaagtgacaatgaccagcggtcagcggagaagaaacatgttattattttcagcacaaggctataggcagattgaaattgcttacttcgatactaaaaaaaatatattgatctgtaccagtttgtttttgggcctttgggcattttgatcgtcgttcccttttaaaactaaaatgcataacatttcgatttccaacgtaggatataaagccaaaacgcgtgaaggggagaccacttggaggaccacagttgagaagacttccagatcttctaagctgctcaaatcatggacgccttcctgccacccaagacagaagtggtacaagcgcgccctagtatatggaaacagatgcagtatcaatcgacatgcaactgtgccaaggctataatcaagaatgcgtttgtctttttttttttattttcttcgtctaataaaaattacgataaagcttttgccgttctttagaaaaaaataatcaagaattatcctcgattcatcaggttgtcatcgtgaatgagagtgagccttttggttttataccagccaggctctttttaaatggtactgcataaattctcaaatatttatcgtccgctagtttatttttaaactaaaccgtaataaagaaaaaagaacggagggag

SEQ ID NO: 5203 - DNA, 2737 bp, Zea Mays
ctactcccatgttattgtaaggtagctcacaaaaatcaattgtttaagaaccacatgccctcacaacttcacttgttttctggagcatctgtttgactaaaacacataaaacgaaactgaaaaaatacaggagagcagtcccaaatagagccttacaaaattagtgtggcaaaatatccaacatatatcattcaagaaacgataatagagatgcctctttttttacaaaagtgacataattcacaaccatctctatcatgttctctatcgggacccactaacataattgcctctgaaaatatgttttcaaagatggctgggatttccaagccttttgaaaatatgcacccaaccactgaggttcaagtccttgacttgaagtcgagtgtgtatataccagcatgctgatatggcttgtcactcaaatttagctcatatcgtaatttagtatgtgtagtgaattaatacatagaggttgtacttgtaggaggacacaatccgatggacctgaattagcaccggtaaagaaccgatcaaatttttttatttagttccaactatagttgaaattgtcacagtttatctacatgtcttttagttctggcacttttgtcaatgttgttctaatgcactatgtgataatggagggacatctgattttttaagttcagaagctcggtgccaaaagcagacaccttcatttgttttcttgttcttcggtagtagttttgttctttggatttttgtcggctgtctgagctttgacgtgaggtttgcaaaccctttactttgtctgcaaaatgttaaggaaacaagcatgttaagaatccttctgattacaaatttaagctattttgcaaaatgttaaagcaacaagcatatttagaatccttctgatttcaaatttaagctattctgcaaaatgttaaggcaacaagcatatttagaatccttctgattacaaatttaagctattctgaatcaaatgacagcaaacgcagatctgctatgagaataaggaataaactaaaactggagctgtgatatcgacaacaataaaattgtttagtgttttaacaaacaatttatatataactaagagaaagggacatttgtatttgcggcagatttagctgtaagtctgtaacccatcccatcttcagggaaaatcagtctttcgttcttgtttctatatttttttttagaaatgtgattggatttgaaaaaagtcagaactaaaaatgtttttataattgggatcaaatttaaaagagcctagacttgaaatagaatcagaatatgtggatatatagaaacgagacatgatttaatattctcaattactcatatgtaaaggcacacggtaatttaggatcaaggtatcattggtttccctaacagagaccagtagctctaaaccccagaaaagaggaagcttagtttgtttttttactcttgattcagtcaggtggcatatactaaattgtagatttggttctaccatgagatacttgttttagtcagtatgttgattatttttaaagcaaaacactgaatattcacctcgcttaaatagctttatatctttgaagtaaaggggtcaagtgcatgcatgaagtagttgtagtcttcagaggaggaatgtcttctctatttatattgtctaagtgtcattctaattagtgtattgaagaccttttctcactggttgttacgtgcttgttctatcaaaaagatagatgcatcattatctggatccatgatctcgtcatgtttagtttacaggagatgtagtgtttagcaacttatcagttttaacaaaccatgagattgttgtgtttgttgtttgaaaagacgttgtaataaggttgccttcgccgtaacaaaaatttagactgggttgagcttttagattatcccacagcgcagccgttatcagttctggacgccttttggttacgtggccattcagaacacaaagtgcatgtctccctggattaaccgaacaatattttggagttagggattacagccttgaaggggattatacccccaaggggttcaagtgataggaggggattaacttaatccctccctggaacgtatccctctctggaatgaatccctgtgaaccgaacaagccctgagtggtatcttaacctcgggggttggggattttatacaggtgtatcttttactatcatgctgcccatgcgagggtaggatatctggaatagtggactctcctaatgctgtaacaactcttgccatccctacagcgatatttgatcaggatataaagccaaaacgcgtgaaggggagaccacttggaggaccacagttgagaagacttccagatcttctaagctgctcaaatcatggacgccttcctgccacccaagacagaagtggtacaagcgcgccctagtatatggaaacagatgcagtatcaatcgacatgcaactgtgccaaggctataatcaagaatgcgtttgtctttttttttttattttcttcgtctaataaaaattacgataaagcttttgccgttctttagaaaaaaataatcaagaattatcctcgattcatcaggttgtcatcgtgaatgagagtgagccttttggttttataccagccaggctctttttaaatggtactgcataaattctcaaatatttatcgtccgctagtttatttttaaactaaaccgtaataaagaaaaaagaacggagggag

SEQ ID NO: 5204 - DNA, 3058 bp, Zea Mays
gcaaaagagcaaactgccaagtgcaaagcgaaaccatcaaaccggtgccgatgctctgccggcgcccgtgccccggcgtgttcctccgcctcttcgccacttcctgccgccgcagctccctccacccctcgcagccgcacctccggacagctacagctctcccgacgctgcctgtggcgaagaaggtccccttcaatgtgtcggcgcacgggaggtcgtggagtgacccgtaccactggatgcgcgacacctccgacccggacctcgcggtcctcctcgccgctgagaacgcgtacgccgacgcgttcgtaggatcggcaggtggcggcggcctccgcgcgcacctcgccgcggagatgcgcgcccggctgcccgcttctactgccacaccgcctcagctctggggaccttggttgtattatcagtatgttccagagggaaaggagtaccctgttttatctaggaagctgaggccctctagtggtctggtaggaactctgcttgattacctttctggttctgagaaggagcaagtgttgcttgattggaacgaggttgcagaaaaaaatggttatgtccacattgggagttgtcgaatctctccagatcataggtttcttgcatatacagttgatacatctgggggtgaactattttcccttgaagtgaaagatctgctgtctgagcatgtcatctttagttcaccagacaagggagtagttagtttagcatggtctggcaacaatgaaagtttattttacactgtctgtgatgagactctacgtcctaaccaggttttctgtaaaaagttgcaatcggatgaagcagggtttctagttttcacggagaaagatgtaaactgttgtgtggatattacaagcacaaaagattttaagtatatgactgtcaattctaacactaggacatcatctgaggtttttgtaattgaatctgataatctaagagaaggattatggcctatacggaaacgtgttgacaaagttcagtactttttggagcaccacaacgggttcttttacattcttaccaatgctcctgtaaatgataccgaaacgacaactgaaggctactatctggccaggtgtagggctgaaaagtcactggtggatagatggcagattgtgacggtacctgactcggactgcaccattcaggatatggacatttttcatgataatttagttctctttcttcgaaagaatggtactcctcttttttgctccatcagtatgccaattgatgttgatgttcaggagccaaaggaacttgatgatctcaacccatggttttttcccataccgtcagagttatgcagcattgttgctggatccaacaatgatttcatgtcatctacttatcagctagttatttcatcacctgtgataccggacttaactgtggactatgatttgagaaaaaagactttcaccatccttcatcaagaggaagtaactaccatctctgcaaatctaggcggcctgggctttcaatccaatgtttcaagcatccaacaaaacatgcagcttgttaaaacctcacaaaattggagtgatctttccaagctattctcatgtgaaagggttgaagttatatcacatgatggtgtttcaatacctttagtgatcctgtattcatggggagcacattgtcatggagaatcacctgggatcttatacggttatggagcttatggagaggatttggacaaaagctggtgttctgagaggttaagcctcctctctcgaggttgggttcttgcatttgcagatgttaggggtggaggggatttatcatggcatatggcaggaaccaaagctaataaaatgcattcaattcaagattttgctgcatgcggcaggcatctcataaagcaaggctttgttcaccaaaatcgcctttgtgctataggctgtagtgctggtggtctgttggtgggtgccgtcattaatatgcttccagacttattttctgctgcagttctcaaggtcccctttcttgatatctgcaacacaatgttggatcctactttacctctcactgtcttggactatgaagaatttggtgaccctaatagcccagatgagtttgaggcgatcagcagttattctccttatgataacttagcacctgatgtgtgctatcctccagtcctggtgactgcctcgtttaatgatacaagggtaggagtttgggaagctgctaagtgggttgcaaaagtaagagatgtcgcgtgcccatcctgttcccagtcagttattctcaaaactaatatgcaaagtggccattttggtgagggtgggcgtttcacgcactgtgatgaaacagcctttgagtatgcatttctcatgaaggccttgggtttggatgacgtagctatgatgtagcgtactcatgcctgaggattttcacggaacagatttttttgtggctctggaagcaaaaactgagataattaccttttgtgatatgctcagggataagattgtatcctcataattattgattaaaagagctcgcaatggaaggtgatgcacccttgaggtgtgttctgtttggcattggcttttaatagtcaagctgtggatttctacatgcatattatcaacttatgctttcaaaaatagcacacttggatgctgctcatcaacagtgcaaaggtggcagatgagatccttattatggtgttcgatatggggcttttgaccaaaggataaatggttgatcatggatgttgattttgacttctacttcatacggcagcgtaatcgtaatcgtcctcggccggtcggccccttgctatgcccacacatactcctatgttcagtgcaacactacaaattaaatgatggcttgctagaacttattgagcacatttctccgagcttatcctaggcaccctttccttccttttttttcgaggatcctagtcaccgtctgtatgtatacttgtgcccactttgcttagtgcagcaatgcaaagtaaatgatgactgtttgaaacgtaccgagcacatttctctctgggctatcctatttt

SEQ ID NO: 5205 - DNA, 4232 bp, Zea Mays
gcaaaagagcaaactgccaagtgcaaagcgaaaccatcaaaccggtgccgatgctctgccggcgcccgtgccccggcgtgttcctccgcctcttcgccacttcctgccgccgcagctccctccacccctcgcagccgcacctccggacagctacagctctcccgacgctgcctgtggcgaagaaggtccccttcaatgtgtcggcgcacgggaggtcgtggagtgacccgtaccactggatgcgcgacacctccgacccggacctcgcggtcctcctcgccgctgagaacgcgtacgccgacgcgttcgtaggatcggcaggtggcggcggcctccgcgcgcacctcgccgcggagatgcgcgcccggctgcccgcttctactgccacaccgcctcagctctggggaccttggttgtattatcagtatgttccagagggaaaggagtaccctgttttatctaggaagctgaggccctctagtggtctggtaggaactctgcttgattacctttctggttctgagaaggagcaagtgttgcttgattggaacgaggttgcagaaaaaaatggttatgtccacattgggagttgtcgaatctctccagatcataggtttcttgcatatacagttgatacatctgggggtgaactattttcccttgaagtgaaagatctgctgtctgagcatgtcatctttagttcaccagacaagggagtagttagtttagcatggtctggcaacaatgaaagtttattttacactgtctgtgatgagactctacgtcctaaccaggttttctgtaaaaagttgcaatcggatgaagcagggtttctagttttcacggagaaagatgtaaactgttgtgtggatattacaagcacaaaagattttaagtatatgactgtcaattctaacactaggacatcatctgaggtttttgtaattgaatctgataatctaagagaaggattatggcctatacggaaacgtgttgacaaagttcagtactttttggagcaccacaacgggttcttttacattcttaccaatgctcctgtaaatgataccgaaacgacaactgaaggctactatctggccaggtgtagggctgaaaagtcactggtggatagatggcagattgtgacggtacctgactcggactgcaccattcaggatatggacatttttcatgataatttagttctctttcttcgaaagaatggtactcctcttttttgctccatcagtatgccaattgatgttgatgttcaggagccaaaggaacttgatgatctcaacccatggttttttcccataccgtcagagttatgcagcattgttgctggatccaacaatgatttcatgtcatctacttatcagctagttatttcatcacctgtggcggcctgggctttcaatccaatgtttcaagcatccaacaaaacatgcagcttgttaaaacctcacaaaattggagtgatctttccaagctattctcatgtgaaagggttgaagttatatcacatgatggtgtttcaatacctttagtgatcctgtattcatggggagcacattgtcatggagaatcacctgggatcttatacggttatggagcttatggagaggatttggacaaaagctggtgttctgagaggttaagcctcctctctcgaggttgggttcttgcatttgcagatgttaggggtggaggggatttatcatggcatatggcaggaaccaaagctaataaaatgcattcaattcaagattttgctgcatgcggcaggcatctcataaagcaaggctttgttcaccaaaatcgcctttgtgctataggctgtagtgctggtggtctgttggtgggtgccgtcattaatatgcttccagacttattttctgctgcagttctcaaggtcccctttcttgatatctgcaacacaatgttggatcctactttacctctcactgtcttggactatgaagaatttggtgaccctaatagcccagatgagtttgaggcgatcagcagttattctccttatgataacttagcacctgatgtgtgctatcctccagtcctggtgactgcctcgtttaatgatacaagggtaggagtttgggaagctgctaagtgggttgcaaaagtaagagatgtcgcgtgcccatcctgttcccagtcagttattctcaaaactaatatgcaaagtggccattttggtgagggtgggcgtttcacgcactgtgatgaaacagcctttgagtatgcatttctcatgaaggccttgggtttggatgacgtagctatgatgtagcgtactcatgcctgaggattttcacggaacagatttttttgtggctctggaagcaaaaactgagataattaccttttgtgatatgctcagggataagattgtatcctcataattattgattaaaagagctcgcaatggaaggtgatgcacccttgaggtgtgttctgtttggcattggcttttaatagtcaagctgtggatttctacatgcatattatcaacttatgctttcaaaaatagcacacttggatgctgctcatcaacagtgcaaaggtggcagatgagatccttattatggtgttcgatatggggcttttgaccaaaggataaatggttgatcatggatgttgattttgacttctacttcatacggcaggaatctacaggaacaacggctatctgatggtctcctgcaacggcgggcttaaccagatgcgagcagcaatttgtgacatggtaaccatcgcaaggtatctgaacgttactctcatcgtaccggagttggataaggcttcattttgggctgatcccagcgatttccaagacatatttgacgtggactacttcatagcgtcgctgagagacgaggtccggatcctgaagcagctgcctccgaggctcaagagaagagtggagatgggatccctccggtccctgccaccagtcagctggtccgacatcggctactaccgccgtcagattctgcctctggtaaagaagtacaaggtcgttcacctgaacaggacggatgcccggctcgcgaacaacggcctgcccgtggagatgcagagactgcggtgtcgcgtcaactacaatgccctgagatttacccctgaaatcgaggatctgggcagacgcctggttcgagctcttcgccggaacgggccctttgtggtccttcacttgcggtatgagatggacatgcttgccttctccggatgcacgcacggttgcagcagcatggaggctcaagagctcacgaagatgagatatgcctacccatggtggaaggagaaagtgatcgactcggacgccaagaggaaagacgggctgtgtccgttaacgccggaggagaccgcgctggtgctgcaggcgctcggcattgaccgcggctaccagatctacattgccgcaggcgaaatatacggcgggcagagaagaatggctgcgctcacctcggcttatcccaacgtggttagaaaggagacgctgttgccttgggaagtcggcctgttccagaaccactcctcccagatggctgcgctggactacatggtgtccctggagagcgatgtcttcatacccacctacgacggcaacatggccaaggtcgtagaaggccatcgcaggtacctggggtttcggaagacggtgctgctggaccggaggcgtatcgtcgagctcgtcgacgagtacaggaacggcacgttgcgctggaccgacttctcgtctgccgtcatggcgtcgcacaccagccgcatgggcgaaccgtccaggaggcagacggttcctgacagacccaaggaagaggactacttctacgcgaacccgcacgagtgcctgcaccagccggaagatgtctccgccttgtgatacccgcgctcccgcggtacaatacagtacagtggatgatgcgcgggctttcggagtccagaaccacatgtatatgtaatagactaatagcgcattcgacagcgttgcgttggcagagggtaaacgtaaacggacgaggagggcctcgcgttcggtccggttgaacgagcatgtgagttaggattcggtacacagattcatggaacggtggttcgccgattcttttttctgttcagaataagcagaccctttcgttgttgttcttgtgtacagcagacgaagtcgtgaagataataacaacagcagcagaatcgtcgtgaaaaag

SEQ ID NO: 5206 - DNA, 1077 bp, Zea Mays
tgagggacttgggtatcctatgacgaccacacctgcgccttcaaaagggtcgagatgcatgtaacctcaaactgcgccagtagcataccataccatagaagctgaagagaccaaggacaaggacgacctgccttgcatggcgcaatcggtgaaaatattgtgtaaggatggcttcaacttgtacgtcaccattcgtggcaataaggccgttcttgcccctgaagatcccgacgacgaaatgcaggaatggttcaaggactactccagggtaagcagtgtgacggatgacaacggtcaaagggtgttcgcgctggtaaacaaggagacgcaacaagccatggtaaacagaagggacgagcaggaggtaataattaatacagggtcgtcatacatgcatggtcgctgtcaggattattttctctaactcagggagtgtttgcttactagagactaatttttagtccctccattatattctactttagtctataaattgtaaaatacggaaactataactctatttttatttccgtatttgacaatttagtaactaaagtggaataaaataaagagactaaaaattagtccctaaaaccaaacaccccatcatttgcttctctgtgttacggatcgaccaggtgcaacttgttccatattacaaagatgacgaccgtgtggatatctccatgctttggacagagctcccagaggaccacggcgacggctttcaccaaattgcagcgctcaagaacacatatgaggccctggacgggctaggcggcaattgcaaagaggggacgatcgttgggatagatcctacgcattattcatatctcggaactgttaataagaatcagctgtggaagatcgttgataaagggaccgctaggcgcttgaccaaagagctaggactaggaggagcgcgtctaaaaaagttggctcccatttctttacgtaactaataaaacttcacaatataataaaatttatgctctgtgttgtgctaagtatttgctacttttaccgagtctatgccactaaaaataagggcctattttttgacggcatgttcatggc

SEQ ID NO: 5207 - DNA, 1637 bp, Zea Mays
tccacggcctcaaaacggcctacccgcatagctagggtttcttctctgccccctccggcaactcaggagagagcgcggctcctacccggcggcggtgaagccgcgacgatccaacggagcagaggcgccatggctgctcccgaagcgcccgcatgctacgtcgggatcgcgcggcagtccgccgccttccgccttatgaaacaaatgggatgggaagaaggtgaaggccttggcaaagacaagcaaggcataaagggtcatgttagggtgaaaaacaagcaggacacactaggtgttggtgtagatagccctcataacaaatgggtatacgataccacccaatttgacaacatattgaagaaactgaaagtgcaatcagctaatcctgttcaagaagaggttgcagctgtagaaagtgattcacctgacatcacacccaagaaagacaaatcagcaaaacatgaagttactaaagttactcgacctcaaggaagatacaagaaaagagagagggggaaaagtgtgaactcttattcagcaacagatcttcaaggcatactcgtacgcaaaaatgaagataattccaaagtggatcagaaacttgaaccgacatgcttggatgaacctgatcccatcatctgtttggatgcagtatcccaagctgatgatgtgaactggtgggggcacaagtttggatttttatcaggagggtttctaggagcaaaatcccgtaaaaataaatcttcacaaaaagatcttgctaatgtccgccagacatttgcagaggaagatcaagaaaatttgtacaatcttgttcaggataaagctacttctggaaagcagggtcttggcatcaaaggcctgccaatgaaagttgctggccaacgttggaagggaaacaaaacttcgtttgttgatagtgatgatgataattcagcccagtccgatgagtattcagaaatcgaagagaatggcgatgaggaagaacatatcagtgcttctgaatcaatagacacagataagaatgcagacaaagaattgcttgtggatgctagacccaaaaccaaggtcaagaaactttgcaaaagaatacttcgtcagtcaatgaaattgaaggatcttaaggtcgccgttgaggaacactcaaatgttgtattttccagcttctctggtagacgcgaagccctgttgtttttgaagaaaaagcttcaaggaagcaggaaattcaatgtggacggcaagaaagttcagctcgtgtcatgaaagccaagcaaataggaattctttacgttgttggtgtccagcactcgtatttgttgttgctcgaggttccaaacagatgtaggagcacattgagctatgtagtactagtactggtatagataaatagtcaaaacctatcgcagatgcggaggtaaaattttgcaaattttcgtgaggggcagagttcctaatttgtgtgcggcgcattcgatgtaaccgtggcttatttgttttgcatgagatgtgcaaactgcaatgctatgtattgctcgtaaattatgtctatggattcacataattggagtattaaggcatgtaaaatctaattaaacgaggggtctttagggggctaattataaaaaatcaagaggcaa

SEQ ID NO: 5208 - DNA, 2201 bp, Zea Mays
gaaaaaaactgtccctgcctctgtactcgagtgggcgcagtgaataccctctctcggtccctccaaccgcgctcgtcttatcctcaactcgtcacccacttcccgccatctgccgtccctgcactgcgcttataccctgcaggcaacagcagcgatggcggcgagggtaccggcggccgatctcaaccagcacctctcctcgccgttcatcgcacggcgctgccacggcccaggtgaagccgccctcgaggcgcctctcagcgtacgcatcaaatccagaacgccgcggcgacgcgcggaatccacgaccacgaggatcctctgcagaggcgcagccgggctctggaggagggaggaggagggagccgctgcggcgcggggccgtcagcgcgcgcctcccggtgccggaccacatacgccggccgccctacgtcggcacggccgccgtcccggaggtgtgccccgaccggcaggtgcacgacggcgagagcatcatgcggatgctggacgcctgcgagctcgccgctcgggtgctgcaccatgccggggcgatggtcaagccctcggtgacgacggacgagatcgacagggctgtgcaccagatgatcgttgacgccggcgcctacccctcccctctcggatacggcgggttccccaagagcgtgtgcacgtcggtgaacgagtgcacctgccacggcatccccgactcacgcgagctacaggatggcgacattatcaacatcgacgttactgtctacttaaacggataccatggggacacctcgaggacgtacctgtgcggagaagtcgacgacgcaactaagcagctcgtgaaggtcactgaagagtgcatgatgcgcggcatatcagcctgcaggcacggcgccagtttcaaggaaatcggccagagaataagtgagcacgcggagaagtacggatacggcatcgaccccttcgtggggcacggcgttgggaggatgttccactgcgagcccatcatatggcatacctcctcctggacggcagcaatcacatcaccatctcggccggcggcagcgccaggttgaggtccagccgcaggcccacgggcggcgccgcgtcgaacactacagacgacgacgacgaggacagcgacgatgacccagagtagctctgctgctcctcgctcttgggcggcaagaagtgcagcagcgccggcgtcacggcggccgccgccgccgggtccgcgaacagctggtacggctctgcggccgccgccgcagccggcagcgccaggctgaggtccagcgacggggccgccagcggcagggagcacgacgacgccgacgccgacgccgacgacgactcgtacaccacggcgctcccgctcccgctcgccgctggagcctccgccaacgcctccgccgtcggctccggggcggggtagttggtggcggcgccgggcccgcggagcttgcgcgcggcggcgtcgtacgcccgcgccgcctgctccggcgtgtcgaaggtgcccagccacacgcgcgccttccgcaccgggtcgcggatctccgccgcgtaccggccccacggccgcttccgcacgccgcgcagcctcggctgctccgccgccgccgccgccgacactggtctcttgggcgccatggacggaccgaccagcaacacaactgcctctgccttgcttgctttctctcgctgctgcttgtctgccgaggagcttcggaggatggatggacgggtgggaatgggaatgccgctgccgctggcgaggcgcgggaatatatatacacagacgggacaggaccaagggagggcggcggacggtgacaggcagggtgaggtggagtgtgggaggaggagagcagacgcacggaaggtgaggtctgatctgtctgtggaccgggcttgggcgtacgtgggggcagtgggggcccggggcgccgcccccaaccaagcgcgtttcggcggccgtttcttcgtttcttgtgcgtcggcgcgtgaggcgcgtgagctaccgtgtctgctccgccgctggttcgctcggatccgtctcgtggctcacgtgggacgcgcccgcgtacttcgttgcccgcccacgcccagccgtcggatccgtgattgatgcttcatgatccgtgctgtgctgttgtctgaaaggttgaggtcgccgcaggttcgtctccaagtccagtggcggatattta

SEQ ID NO: 5209 - DNA, 2891 bp, Zea Mays
cgccacggctcccagccccagaccgctgcatccgctgaacatgccgctgcctcagccgctgctcggcggcgcctcgcccgctccggcgcgagcggcctcatccttcctccacccccttctccacacgcgccaccgcgtctccactgcacctgccgctgcctcctccttcgtgcctgcatctcactcctcccacgcgaacgacgccatgctcctccgccgtgccgccgacgtggccgaccgttctgcgggactcacctccccgcacccgaacttcgggtgcgtcatcgcacggccccagcttaataccgacagcgctgattcctgggtggtcggcgaagggttcctctatgcgcaggggacgccctgcgccgagctcctcgcctcacaggaggccggtgagcacgcgcgcggcggcacggcatacctcaatctcgagcctggggactgctttggtgacaacacagccgtcggatccctcgtccaggcaggaattacaagagttgtggtgggtcttagacatcccttgaagcacttgagagggaaggcaattcaagcattacgaaatgaaggcattcaagttgatgttgtgggggaggatctgcagagtaaattgttcaaggaagctctgaagtcatgcctcactgtaaatgctccattgctttacagagctgcctttcatgtccctttttcggtcctgaagtatgctatgacagcagatggaaaaatagcagcaagtagtggacatgcttcttggataagtggcaaagcatcaagagggcgtgtatttgaattgcgtggcagaagtgacgctgttattgttggtggaaatacagtgcgttttgacgatcctcgattaactgcaaggcatgttaaaggacatgttccagtgcgtatagtgatgtcacagtctcttaaccttccagaggaagcaaatttatggaatcttaacgatgcctatacgattgttgcgactcagagaggtgctcggcgagattttcaaaggaagcttgctatgaagggtgttgaagtagtagagtttgacatgctgaatccaagagctgttatgtcatattgttatgatcgtggttatcttgctgtattatgggaatgtggtggaacactagctgcttctgctatatctgcgagtgttatccataaggtctatgcattctgggctccgaaaataattgggggattaaatgcacctacgccagttggtgaactggggatgagtcaaatgactcaggcaataaatttaattgatgtctcgtacgagcagattgacagggacatgctcatgagtggattcatcgaacccattcctgatctttcacctgttataccatccgtggaagaaataccttccattgatccagaagtatctccatatgaaacaaatattatttccttttacaagacttgggatatttttggggctttctcaaacttttctcctcattcaattcaaatgcctgatgaaaatggagattatttcacatggccaacagtggaacactattaccaggctcataagtttgttggtgttgacaatcctcaagcaagagacattgttcaagaaataaagctagcaaagagtcctgaagaggctgctagaataggaaggacccgacaaaaagggttccctgaactggtatgtccgattattgtatttaggcctgttcagtggtggtttagaacaggtttggatatttggccagcttcctaaaccaaacgttatgcttacggcttagatggtttgatttgctggtgtatgcgggttcaaaccggaggacggcaacatggcctgtcacaccgatgctgcagtccagggctcggacagggttggtgccctcagtctcttcagtgctcgctgcatctgctccacctgcaccatgcacgatgacgaggtcagctgcctccatgctgtcgtggccgcaggggcactggtgaacctgattccgctgttgtggaggtggtcagtggcaggcccagggagacaaccggcactgccatggcggtttggctggttcaaaccacggttttactcaacccgtaccgaagccacagattcggtttcaacaggctggttttacgagttgcactggtttgcaataaacggtaagaacagattgggagagtacaaaaatagatgtgatgtatagagctatcaaatgcaagttttcaacttatccccatctgactaatatgttgctgtcaactgctggctctgttctcgttgaggcatcgcctcacgatttattttggggcggtgggagggagggagaaggcctgaattacttgggtaggttgttgatgcagttgagatcagagattctggggacagtcccagcaagcgctgaagtaggggaggcagattgatcctgaagcgagcaaatcttgtttagcaggagtgttgattgcaagaccagacgttaaggtgtggctgggtcccgattgctacagtggatggtgctagtgaaacgaagcgcaaatgagattggttaaattatctgtatgcctgtgaagaacaaacataccatgggtcttgctcttttgtcgaacaatttcatctggccctcggggtataggaattatgaaatacaaaggaggaacaccaacagtcatgcatagaatgtggtagtcctggtagatgaatgtgtttgataaggtgataaggactaatacattggaccagaagtagaagacgtgcttgttcagtaatggttgtttagtaaaaaggagggcgaattatttaataaaattaaatgcatcattgcaccatgaagtcttttgcctttgtttcacttaggcccatcaacagggagagtaggtttttgggtacatgtttgatgcatctctaatctgtacctctgttttgtttctattcggtg

SEQ ID NO: 5210 - DNA, 3324 bp, Zea Mays
aaaacgccgccacggctcccagccccagaccgctgcatccgctgaacatgccgctgcctcagccgctgctcggcggcgcctcgcccgctccggcgcgagcggcctcatccttcctccacccccttctccacacgcgccaccgcgtctccactgcacctgccgctgcctcctccttcgtgcctgcatctcactcctcccacgcgaacgacgccatgctcctccgccgtgccgccgacgtggccgaccgttctgcgggactcacctccccgcacccgaacttcgggtgcgtcatcgcacggccccagcttaataccgacagcgctgattcctgggtggtcggcgaagggttcctctatgcgcaggggacgccctgcgccgagctcctcgcctcacaggaggccggtgagcacgcgcgcggcggcacggcatacctcaatctcgagcctggggactgctttggtgacaacacagccgtcggatccctcgtccaggcaggaattacaagagttgtggtgggtcttagacatcccttgaagcacttgagagggaaggcaattcaagcattacgaaatgaaggcattcaagttgatgttgtgggggaggatctgcagagtaaattgttcaaggaagctctgaagtcatgcctcactgtaaatgctccattgctttacagagctgcctttcatgtccctttttcggtcctgaagtatgctatgacagcagatggaaaaatagcagcaagtagtggacatgcttcttggataagtggcaaagcatcaagagggcgtgtatttgaattgcgtggcagaagtgacgctgttattgttggtggaaatacagtgcgttttgacgatcctcgattaactgcaaggcatgttaaaggacatgttccagtgcgtatagtgatgtcacagtctcttaaccttccagaggaagcaaatttatggaatcttaacgatgcctatacgattgttgcgactcagagaggtgctcggcgagattttcaaaggaagcttgctatgaagggtgttgaagtagtagagtttgacatgctgaatccaagagctgttatgtcatattgttatgatcgtggttatcttgctgtattatgggaatgtggtggaacactagctgcttctgctatatctgcgagtgttatccataaggtctatgcattctgggctccgaaaataattgggggattaaatgcacctacgccagttggtgaactggggatgagtcaaatgactcaggcaataaatttaattgatgtctcgtacgagcagattgacagggacatgctcatgagtggattcatcgaacccattcctgatctttcacctgttataccatccgtggaagaaataccttccattgatccagaagtatctccatatgaaacaaatattatttccttttacaagacttgggatatttttggggctttctcaaacttttctcctcattcaattcaaatgcctgatgaaaatggagattatttcacatggccaacagtggaacactattaccaggctcataagtttgttggtgttgacaatcctcaagcaagagacattgttcaagaaataaagctagcaaagagtcctgaagaggctgctagaataggaaggacccgacaaaaagggttccctgaactgatggtttgatttgctggtgtatgcgggttcaaaccggaggacggcaacatggcctgtcacaccgatgctgcagtccagggctcggacagggttggtgccctcagtctcttcagtgctcgctgcatctgctccacctgcaccatgcacgatgacgaggtcagctgcctccatgctgtcgtggccgcaggggcactggtgaacctgattccgctgttgtggaggtggtcagtggcaggcccagggagacaaccggcactgccatggcggtttggctggttcaaaccacggttttactcaacccgtaccgaagccacagattcggtttcaacaggctggttttacgagttgcactggtttgcaataaacggtgaacagccgtaattacattctatttttaactgattgtagtgggaagggatgaagggaccttgctttctggtacctaacaaagtatgatatcatccttctgatgaaagatattctagaagaggaatctatatatctagtataggctttgccacttccacttatcatttagtataaatacatgcttgaaagctacaatggtgcccacaagtccattatagtcccaccaaaatttattttataatatcaacgactgttgtagaatccgtactattttcctcaacctctcctctggttaactcagacacagcaacaacgggactgcaaccactaggtagcatgggtgcaaaatcattagcctgggacttccctttcagatactttctactgttcaaagttcatggtattatggattgcctgatgccaaacatctacgtgctttctatttacagggattagttgtagggtcttaactcaatgtattgctacaaatacctatttaaaatgatatgaaccatcaagtaatggtaagaacagattgggagagtacaaaaatagatgtgatgtatagagctatcaaatgcaagttttcaacttatccccatctgactaatatgttgctgtcaactgctggctctgttctcgttgaggcatcgcctcacgatttattttggggcggtgggagggagggagaaggcctgaattacttgggtaggttgttgatgcagttgagatcagagattctggggacagtcccagcaagcgctgaagtaggggaggcagattgatcctgaagcgagcaaatcttgtttagcaggagtgttgattgcaagaccagacgttaaggtgtggctgggtcccgattgctacagtggatggtgctagtgaaacgaagcgcaaatgagattggttaaattatctgtatgcctgtgaagaacaaacataccatgggtcttgctcttttgtcgaacaatttcatctggccctcggggtataggaattatgaaatacaaaggaggaacaccaacagtcatgcatagaatgtggtagtcctggtagatgaatgtgtttgataaggtgataaggactaatacattggaccagaagtagaagacgtgcttgttcagtaatggttgtttagtaaaaaggagggcgaattatttaataaaattaaatgcatcattgcaccatgaagtcttttgcctttgtttcacttaggcccatcaacagggagagtaggtttttgggtacatgtttgatgcatctctaatctgtacctctgttttgtttctattcggtg

SEQ ID NO: 5211 - DNA, 2154 bp, Zea Mays
atggccggcggcggcggcggctctctgtctagcccctccgcctccttcctttccagtcccaccccaacaccgccccctcgtctcctccgcaggtgtagcacgaagtctgcctcacgagatagccccatcctcagaccaaaaaagccgcctccactcttctgcgcggcggcagccactcccacccccgctcccgcggccgcgtccaagtcggctgggtcatggagggacctgtgcagtctcaacgcctgggtggtgcgagactaccgccgccttgtcgactccgtcggcgcgctcgagccggcgcttcggaggctctctgaggaacagttgaaggcgaagacggccgagttccgcagccgcctaacgcgcggggagacgctcgccgacgtccagatgcgtttgctgtggtacgtgaggcggctaggaggacgcttgggatgcggcatttcgacgtccagataattggcggtgctgtgctccatgacggctgcattgcagagatgaagacaggcgaggggaagacgcttgtttccacacttgcggcttatctaaatgcccttacagggaaaggggttcatgtggtgactgtaaatgattatttggcacagcgtgatgctgaatggatgggtcgtgttcatcgctttctcggtcttactgttggtctgattcaggcgggtatgaagtcagatgagagaagagctagctacagatgtgacattacatacactaacaactcggaacttggatttgactatcttcgtgacaacctatctcgaaacaaagaacaactagttatgagatggccaaggccattccattttgctattgtggacgaagtggactcagtacttatagatgagggaaggaatccattattaataagtggagaggataatagagatgcagttcggtatccaattgctgctaaagtcgcagaacttcttatggagggtgttcattacaccgttgaactaaagggcaataatatagatctgacagaggacggtgtagcacatgctgagattattcttgggacagatgatctatgggatgagaatgatccatgggcaaggtttgtgatgaatgctttgaaggcaaaagtgttctaccgaagggatgtccagtatattgtcagggatgggaaagctattataattaatgagttaaccggccgagttgaacccaagagaagatggtctgatggtatccaccaagcagtagaagcaaaagaaggcctaaaaatccagactcggtaattgtggctcaaatcacatatcagtcattgtttaagctttatcctaaactttctgggatgacaggaactgctaagacagagtgtcgagagttctgaatacttgtcagagctacttaaagttcacaagattccacacaatgtccttaatgcaaggccaaagtatgctgcaagagaagccgaaataattgcccaagctggaagaaaacatgctattacaatatctactaatatggctggcagaggaactgacattattttaggtggtaatccaaaaatgcttgcaaaagaaatagtagaagataacatacttccatttttgacccatgaacctcctaatattgacatggaaggggaatccacatcccacaagggtctctcaaatgtagaacttagtccatcatcagtaggtctgcttgccaaagctgcaatcatgtcaaaatatattcacaaaagcgagagaaatgaatggtctttgagtaaggcaaaatccactattgctgaatctatagaaatgggtcaaatgattgggatggagaaactgcaagagcgcatgactgaagagtctgagatgtaccctctttgtgatgcaataggacttgcttatctcagtgtcttaagggattgcgaagttcattgttcttttgaaggtgctgcagtgaagagattaggtgggcttcatgtagtaggaacctctttgcatgagtcacgccgaattgataaccaactgcgcggcagagcaggcagacagggtgatcctgggtcgacacggtttatggtgagcttacaagatgaaatattccagaaatttaatctggacactgaatgggccgtgaggctaatatcaaggataacgaatgatgaagacatagctatcgagagcaatgttgttgtgaaacagg

SEQ ID NO: 5212 - DNA, 2241 bp, Zea Mays
ctcatcccaactgaccgactaccatggccggcggcggcggcggctctctgtctagcccctccgcctccttcctttccagtcccaccccaacaccgccccctcgtctcctccgcaggtgtagcacgaagtctgcctcacgagatagccccatcctcagaccaaaaaagccgcctccactcttctgcgcggcggcagccactcccacccccgctcccgcggccgcgtccaagtcggctgggtcatggagggacctgtgcagtctcaacgcctgggtggtgcgagactaccgccgccttgtcgactccgtcggcgcgctcgagccggcgcttcggaggctctctgaggaacagttgaaggcgaagacggccgagttccgcagccgcctaacgcgcggggagacgctcgccgacgtccaggccgatgcgtttgctgtggtacgtgaggcggctaggaggacgcttgggatgcggcatttcgacgtccagagatgaagacaggcgaggggaagacgcttgtttccacacttgcggcttatctaaatgcccttacagggaaaggggttcatgtggtgactgtaaatgattatttggcacagcgtgatgctgaatggatgggtcgtgttcatcgctttctcggtcttactgttggtctgattcaggcgggtatgaagtcagatgagagaagagctagctacagatgtgacattacatacactaacaactcggaacttggatttgactatcttcgtgacaacctatctcgaaacaaagaacaactagttatgagatggccaaggccattccattttgctattgtggacgaagtggactcagtacttatagatgagggaaggaatccattattaataagtggagaggataatagagatgcagttcggtatccaattgctgctaaagtcgcagaacttcttatggagggtgttcattacaccgttgaactaaagggcaataatatagatctgacagaggacggtgtagcacatgctgagattattcttgggacagatgatctatgggatgagaatgatccatgggcaaggtttgtgatgaatgctttgaaggcaaaagtgttctaccgaagggatgtccagtatattgtcagggatgggaaagctattataattaatgagttaaccggccgagttgaacccaagagaagatggtctgatggtatccaccaagcagtagaagcaaaagaaggcctaaaaatccaggcagactcggtaattgtggctcaaatcacatatcagtcattgtttaagctttatcctaaactttctgggatgacaggaactgctaagacagaggaaaaggagttttcaaagatgttcaagatgcctgttattgaagtacctacgaatctgccaaatatacgggtggacttgcctatccaagcttttgcgtgtcgagagttctgaatacttgtcagagctacttaaagttcacaagattccacacaatgtccttaatgcaaggccaaagtatgctgcaagagaagccgaaataattgcccaagctggaagaaaacatgctattacaatatctactaatatggctggcagaggaactgacattattttaggtggtaatccaaaaatgcttgcaaaagaaatagtagaagataacatacttccatttttgacccatgaacctcctaatattgacatggaaggggaatccacatcccacaagggtctctcaaatgtagaacttagtccatcatcagtaggtctgcttgccaaagctgcaatcatgtcaaaatatattcacaaaagcgagagaaatgaatggtctttgagtaaggcaaaatccactattgctgaatctatagaaatgggtcaaatgattgggatggagaaactgcaagagcgcatgactgaagagtctgagatgtaccctctttgtgatgcaataggacttgcttatctcagtgtcttaagggattgcgaagttcattgttcttttgaaggtgctgcagtgaagagattaggtgggcttcatgtagtaggaacctctttgcatgagtcacgccgaattgataaccaactgcgcggcagagcaggcagacagggtgatcctgggtcgacacggtttatggtgagcttacaagatgaaatattccagaaatttaatctggacactgaatgggccgtgaggctaatatcaaggataacgaatgatgaagacatagctatcgagagcaatgttgttgtgaaacagg

SEQ ID NO: 5213 - DNA, 2363 bp, Zea Mays
ctcatcccaactgaccgactaccatggccggcggcggcggcggctctctgtctagcccctccgcctccttcctttccagtcccaccccaacaccgccccctcgtctcctccgcaggtgtagcacgaagtctgcctcacgagatagccccatcctcagaccaaaaaagccgcctccactcttctgcgcggcggcagccactcccacccccgctcccgcggccgcgtccaagtcggctgggtcatggagggacctgtgcagtctcaacgcctgggtggtgcgagactaccgccgccttgtcgactccgtcggcgcgctcgagccggcgcttcggaggctctctgaggaacagttgaaggcgaagacggccgagttccgcagccgcctaacgcgcggggagacgctcgccgacgtccagatgcgtttgctgtggtacgtgaggcggctaggaggacgcttgggatgcggcatttcgacgtccagataattggcggtgctgtgctccatgacggctgcattgcagagatgaagacaggcgaggggaagacgcttgtttccacacttgcggcttatctaaatgcccttacagggaaaggggttcatgtggtgactgtaaatgattatttggcacagcgtgatgctgaatggatgggtcgtgttcatcgctttctcggtcttactgttggtctgattcaggcgggtatgaagtcagatgagagaagagctagctacagatgtgacattacatacactaacaactcggaacttggatttgactatcttcgtgacaacctatctcgaaacaaagaacaactagttatgagatggccaaggccattccattttgctattgtggacgaagtggactcagtacttatagatgagggaaggaatccattattaataagtggagaggataatagagatgcagttcggtatccaattgctgctaaagtcgcagaacttcttatggagggtgttcattacaccgttgaactaaagggcaataatatagatctgacagaggacggtgtagcacatgctgagattattcttgggacagatgatctatgggatgagaatgatccatgggcaaggtttgtgatgaatgctttgaaggcaaaagtgttctaccgaagggatgtccagtatattgtcagggatgggaaagctattataattaatgagttaaccggccgagttgaacccaagagaagatggtctgatggtatccaccaagcagtagaagcaaaagaaggcctaaaaatccaggcagactcggtaattgtggctcaaatcacatatcagtcattgtttaagctttatcctaaactttctgggatgacaggaactgctaagacagaggaaaaggagttttcaaagatgttcaagatgcctgttattgaagtacctacgaatctgccaaatatacgggtggacttgcctatccaagcttttgcgactgcaagaggcaaatggcaatatgtacgggctgaagtagagtctatgttccaattaggtcgccctgttttagttggaactacaagtgtcgagagttctgaatacttgtcagagctacttaaagttcacaagattccacacaatgtccttaatgcaaggccaaagtatgctgcaagagaagccgaaataattgcccaagctggaagaaaacatgctattacaatatctactaatatggctggcagaggaactgacattattttaggtggtaatccaaaaatgcttgcaaaagaaatagtagaagataacatacttccatttttgacccatgaacctcctaatattgacatggaaggggaatccacatcccacaagggtctctcaaatgtagaacttagtccatcatcagtaggtctgcttgccaaagctgcaatcatgtcaaaatatattcacaaaagcgagagaaatgaatggtctttgagtaaggcaaaatccactattgctgaatctatagaaatgggtcaaatgattgggatggagaaactgcaagagcgcatgactgaagagtctgagatgtaccctctttgtgatgcaataggacttgcttatctcagtgtcttaagggattgcgaagttcattgttcttttgaaggtgctgcagtgaagagattaggtgggcttcatgtagtaggaacctctttgcatgagtcacgccgaattgataaccaactgcgcggcagagcaggcagacagggtgatcctgggtcgacacggtttatggtgagcttacaagatgaaatattccagaaatttaatctggacactgaatgggccgtgaggctaatatcaaggataacgaatgatgaagacatagctatcgagagcaatgttgttgtgaaacagg

SEQ ID NO: 5214 - DNA, 2638 bp, Zea Mays
aacacgaggagagactgcggcagcggagtgcagagagcggacgcaacgcaacaccgcccactctctgtcactgacgatcgaagtgaggagcgcactgaagccagccgccgatgagtcgcctcctctcgcggcagcaccttgccgccgtccgtcgatctgcaccctttgcgtgcgtgtccaggtggctgcacacgccgtcattcgcgacggtttctccgcaagaggtttcaggttccagcccagcggaagtgcagaattttgggcagctggacagcatctgctaactggaactggatagtcgatcccctgaacggtgataaattcatcaaagttgctgaggttcagggaacagaaataaagccattcgtggagagtttatctaaatgcccaaagcatggacttcacaacccacttaaagctccagagagctctaatgtgcaggtacctcatgtatggagatatatctgcaaaagctgcgcatatgctgggccaacctgcagtcttagatttctttgctaaacttatccagagggtatctcccaagagctaccaacaagctcttgcagaagttcaagtttctcaaaagtttttggaaaacttttgtggagaccaggtacgctttctggcaaggtcatttgctgtaccaggtaaccatcttggacaaagaagtaatggctaccgttggccatatggcccagttgcaattatcacaccattcaattttccgttggagatccccttactacaattgatgggagcactatacatgggaaataaaccagtactcaaggttgacagcaaggttagcattgtgatggaacaaatgattaggttgcttcatgattgtggattgccagcagaggatatggatttcataaattctgatggtgccgtaatgaacaagcttctgttagaggctaatccgaaaatgacccttttcactgggagttcacgggtagcagagaaattggctgctgatttgaaaggccgagttaaattggaggatgctggttttgattggaaaattcttggtccagatgttcaagaggttgattatgttgcatgggtttgcgatcaggatgcttatgcttgtagcggtcagaaatgctctgctcagtctgttctattcatgcacaagaattggtcttctagtggtctgcttgagaaaatgaagaaactttctgaaagaaggaagcttgaagatttaacaattggtccagtccttacagtaagtcaggggcggagccagcccttttttgggggtcagctgaccccggttactacagaagccatgatagagcacatgaacaaccttctcaaaataagaggatcaaaggttctgtttggtggtgaaccgttagcgaatcactcaattcccaaaatttatggtgccatgaagcctactgctgtatttgttcctctagaagaaattctaaaaagtgggaacttcgagcttgtgacaaaggagatatttggtccattccaggtagtcacagaatactctgaggatcagcttgagttggtcttagaagcctgcgaaaggatgaatgcgcatctgacagctgcagttgtctcaaacgacccgctattcctgcaggatgtacttgggagatccgttaacgggacaacctacgccggaattcgagcgaggaccacgggcgctccacagaaccactggtttggcccggccggtgatccgcgaggcgcagggatcgggactccggaagccatcaaacttgtctggtcctgccacagggaagtcatatatgacgtcgggcccgtgcccgagagctgggcgcttccttccgcgacctgattagctagacgaggatagactattccatgtcatcacgagaaataaaaggggaagataagcgaagccagcaggactggagcgaccgaccgagagcgagtggctgcatgcctaggcattcattctctgcacgcaactgcactttcaaccctggagaaaacataataaatgctcgttcccctgtacttgagatacatggtacttggaccggaacgtcggacaactcgtctgttcgcagctgcactgggttatcttcttaggccttatttgtttattatatattctaacaaattttatattaacacttagtttaaaatttgttagattatataatctaaatagattataattttaaacaaacaccgccttagataattatataatctagcttatagattatataagcaaatgttgatctgcttatggattattataatctaggtatctagattatataatccaactaataatcaatattgtttttttatctctttaacttattttaagctagattacataatctagagagtaaacaaacatgaccttaattctttggactgaaactttgtaactacctctctttgagttactgcagctcgccccgacaactgaggaatatttcaccatgtatgatgtgacactcaggtgtgccatttggttcacgaattgtaacgtaaatgacaacgataataattcacaatcaagtgacagcggaagtttaaatagattagcatagtttttagtatgatatctgattacagttagacttaaacaaacatgatttaacgttatatgttgtctatcccattacaattatgtgaacca

SEQ ID NO: 5215 - DNA, 1389 bp, Zea Mays
cttgttcctctcaactcccttccctccaccggctctgtcattctgtcctccattaccgccacctcctagtttctcgcgcctcgccgtcggcgagcggcgccaccgtcggcgtagagccaggcccgaggccattcctccctcgcagggaggcgtcgccgttgccccgccctctgggctagcgcggcgtggaggggacaactggagatccgcctgtctctgcttggattgctttttcctcctctcgccgagagttgctgaattgaagagggaattgcataagtcagaaagttctattggacagaactaccctactgctgcgtgaagacgatggagtggccaccaccgtcgacgtcaccatcgccgtcgctggtggtgcgcagccccaggcaaacagtcagcctgatccgcaaccggcgaccccatcgtgactgggccccctcatcgaggtctccctctttcgccgcccgtgaccatggccccaagccttcggaggtgtacggcttcgttggatccatcaccaccgtcattgccaccgccgtgtacctcgcctgggcatacacgcccgagcccgtcctccagtcactcggcatcacctactaccctagcaagtactgggcactggcggtgccatcgttcgtggttgtgaccgtggtgctgtccatgggcatctacatgggcctcaacttcgctgccactcctcctccgacttccttcagtactatcttcgatgaaaagagtagggagcacacagccttttcttctgcaactgaggatgagaggcccattgaacccatctcagacatcggtattgatcggatcaacagtcttatgtttggtgatagatgatttcccccggtggaatatgagtttaccatggagcgccggattggaaatagatgcaaacgcgaaggaagatttccatgtcagctgaactttgttgcctgcatatgctattgagaggcccgtcgaacccgttttcagacggtagtattgatcagatcaggaatcttatacttggcggtgatagacgattactcaaaaatggagtgtgagtttacaacagagtgccagattggaaggcgtgaagaaataatccacattgttaagtgaactttcatattaccttcaagcataaccgacaaaggaattcgatccttgagcttttcgtttcacgtgaagggacgccctgtaactggattttttttgtgttgtgtagtaatgtgatgtgtactgtggtaaactcactgcggctgtgcctaggtatttatttgtgttgtgtagtaatgtgatgtgcacagggctgttcctgacttttgaggggcccgggacaagattataaatagaggctccaacaccataaaaactattttttactattatatatatcaa

SEQ ID NO: 5216 - DNA, 2036 bp, Zea Mays
ctcccctccactcgtctctccgttcggccgtgtccagtctccagtccgcaacggaaggagaggaggcgtcgagggaaaatcgcgccaaccgggccgaacgaatcgtcggaaggccggggaggaggtctagaaggtgtgggaatggcgacggggcttgccttggcggcggcgcctcatgttgcttcggtcacgggatcggggacagtggaggagcaggcggcgggggtcggcatcttgcttcagatatcaatgctcgtgctctcgttcgtgctcgggcatatcctgcgccgccgaaagttctactacatccccgaggccagcggctcactcctgatcgaattgttcatgttttacttgactgcatcttacccagtccggattcagcttagcaccaaaaccattcttttcgaacttcgatgctatcataacatttgcaatcctgggaaccttcattgcctccattgttacaggtcttttagtctaccttggtggattactatacattgtctacaggctcccactggtggagtgtatgatgtttggtgctcttgtatcagcaactgatcctgtgacagttttgtctatatttcaggagcttggcactgatacaaatctatatgcactggtttttggagaatccgttttaaatgacgctgtagcgatatccttgtacaggtctatggcatctatgaggacgcaccattctggaaaaaactttttccttgtaattctgaggtttcttgaaaattttgttggatcaatgtcatcaggcattggtgttggactaatttccgctctcctcttcaagtatgcagcactgggcgttgagaaccttcacaatctggagagttgcttgtttgtgcttttcccatacttctcgtacatgctagcagaaggcattggtctatctggcattatttctattctcttcacgggtattgtgatgaagagatacacattctctaacttatcagatgattctcagcgttttacagctcgcttttttcaccttctttcttcactagcagaagctttcgtgttcatatacatgggatttgatattgcgatagaacgtcaaagctggtcacatattggattcatatttttctcaattatcttcatactagttgcaagggctgcaaatgtcttctcttgtgcatacatactgaatttggcacgacctccacattgccaaatacctaggcaatatcagcaggctctttggtatagtgggcttagaggagctatggcttttgccctcgctcttcagtctgttcatgatcttccggatggacatggcgagacaatttttactgctaccacatctattgttgttctaactgtactccttattggtggctcaactggaacaatgcttgaggccctacaggtagttggggacagcaaccgttattgccaactgtatgagctgcaggagagttctaatggcaacgacactggttacacgggacaaaattatgatgaaggagcatccacttcaagcaaattcagatctaaacttagagatctaaggagaagcacctcgtctttcgctttactggacagaaattaccttactcctattttcacttcgcaaaacggcgactgcaatgataacactacagaaagtcccaatgaagaattgacgatattcagaggacctggggatttggaggtacatgattgatgactgcagatatgaagtgcttatcttccatgaatctacacgatactccttgtaccttcctcggcgacccaaagtggaaagtgcaaccagacattcggccatagcattgccatattattaatctataaacattagttagctaggatagttcaacgtaagtctttgtacgtagaatataggtgtaatttatcagccttgaaattctgttctgatccgtttcagaaactttgtgcgtacggacgcatctgccttcttgtgcacctgcaacactcgtaggttccttgaaatgccttcttgtgcacctgcaacagtgcaggttcctccaaattgaactcgcccagatttccgg

SEQ ID NO: 5217 - DNA, 2261 bp, Zea Mays
ctcgtctctccgttcggccgtgtccagtctccagtccgcaacggaaggagaggaggcgtcgagggaaaatcgcgccaaccgggccgaacgaatcgtcggaaggccggggaggaggtctagaaggtgtgggaatggcgacggggcttgccttggcggcggcgcctcatgttgcttcggtcacgggatcggggacagtggaggagcaggcggcgggggtcggcatcttgcttcagatatcaatgctcgtgctctcgttcgtgctcgggcatatcctgcgccgccgaaagttctactacatccccgaggccagcggctcactcctgatcgggatgattgttggagggcttgctaacatatcaaacactcagaaaagcatcaggagatggtttaattttcgggaggacttcttccttctctttttactgcctccaattatattatatccttgattgtattctgcttttatttcttattggttcttgtagaattgttcatgttttacttgactgcatcttacccagtccggattcagcttagcaccaaaaccattcttttcgaacttcgatgctatcataacatttgcaatcctgggaaccttcattgcctccattgttacaggtcttttagtctaccttggtggattactatacattgtctacaggctcccactggtggagtgtatgatgtttggtgctcttgtatcagcaactgatcctgtgacagttttgtctatatttcaggagcttggcactgatacaaatctatatgcactggtttttggagaatccgttttaaatgacgctgtagcgatatccttgtacaggtctatggcatctatgaggacgcaccattctggaaaaaactttttccttgtaattctgaggtttcttgaaaattttgttggatcaatgtcatcaggcattggtgttggactaatttccgctctcctcttcaagtatgcagcactgggcgttgagaagtgagtaaaaagttggcacttgtagtttgtctgaaatattggagcccatcacatacacaactattttttcgaccattttcagccttcacaatctggagagttgcttgtttgtgcttttcccatacttctcgtacatgctagcagaaggcattggtctatctggcattatttctattctcttcacgggtgatgaagagatacacattctctaacttatcagatgattctcagcgttttacagctcgcttttttcaccttctttcttcactagcagaagctttcgtgttcatatacatgggatttgatattgcgatagaacgtcaaagctggtcacatattggattcatatttttctcaattatcttcatactagttgcaagggctgcaaatgtcttctcttgtgcatacatactgaatttggcacgacctccacattgccaaatacctaggcaatatcagcaggctctttggtatagtgggcttagaggagctatggcttttgccctcgctcttcagtctgttcatgatcttccggatggacatggcgagacaatttttactgctaccacatctattgttgttctaactgtactccttattggtggctcaactggaacaatgcttgaggccctacaggtagttggggacagcaaccgttattgccaactgtatgagctgcaggagagttctaatggcaacgacactggttacacgggacaaaattatgatgaaggagcatccacttcaagcaaattcagatctaaacttagagatctaaggagaagcacctcgtctttcgctttactggacagaaattaccttactcctattttcacttcgcaaaacggcgactgcaatgataacactacagaaagtcccaatgaagaattgacgatattcagaggacctggggatttggaggtacatgattgatgactgcagatatgaagtgcttatcttccatgaatctacacgatactccttgtaccttcctcggcgacccaaagtggaaagtgcaaccagacattcggccatagcattgccatattattaatctataaacattagttagctaggatagttcaacgtaagtctttgtacgtagaatataggtgtaatttatcagccttgaaattctgttctgatccgtttcagaaactttgtgcgtacggacgcatctgccttcttgtgcacctgcaacactcgtaggttccttgaaatgccttcttgtgcacctgcaacagtgcaggttcctccaaattgaactcgcccagatttccgg

SEQ ID NO: 5218 - DNA, 1486 bp, Zea Mays
ctcggagtagtcgttttgaggcatgtatcaagatgggatattcaggttgccatgcgatgtggttgtcccagcattgacagaaaggttgtaaactctgggaagcgattgcgggcttatgtaggacttgatgaaggagaggtttgcagccaatgcaatttaagaggaagttgtgatagggcatatgtgaaggctcggaaagaggacgttggaagaactgtggatgttatgcgcatccttttgacttacggtcttgatgttattaccggcaatgtagataatagagcatgcctgaacaaatctgtcaaggaatcaataaagatcctactaagcgaggttgttgaggtggattctaggggacctggttccagcactgtgaaagctgcacagcgcaaaggtcaatctgctgtacccatgaagcagggtgattggaattgtcccaaatgtgactttctgaactttgcaaagaatatcaaatgtttgcgctgcgatggagaattccaagagaggtatcagttgttgcatgaagaccgagagcatctgcctctcaaaaagggtgactggatatgcaaaaggtgagcctgcttatagctctagttatgataaatgtttactgcaagtgatgttctctctctctctctcatactgaccttatttcaggtgcaactttttgaattttgctaagaatacaagatgcttgcaatgtcatgagaaaccaacaaaccgtttactcaacccaggagaatgggagtgtgtctcgtgtaactatgtgaacttcaagaggaatgggttctgcttgaaatgtggctggaaaagaccaaagtctctaaacaatcaagatagtgtcaaattgtgtcatgatttagagcatagtaagaatccacgtatttcatttgttcaagatggtgtccagatgaaggggtggcaaagtctgcaaaagaagggttcaccatccgacacagatttggatttctggagtgcagacgacgaagagggtggtagcagggataatgatacgctgctgcgacagaaggactacagatttcttgagagttttcccattgtcggtggcaggactgctaattcccaagatcttcttgcaagggagaagtggaaggatgaaatgtccaggagaaataaaggccttcaaactacggaatcgcaagaaagcaatcggccttctagccactgccgtcttccaagaagcatggagctggttgactctgatgatgatattgcttcttggttttcgggtggggataataataataggaacctggataaggtataaccagatcttgtaagtggatgcagctcatcaataaaagttgcatcctttggaattattgaaattcaggcaaaaagaattattaaagctcactggagaactgtacaatttaatgtttcggaactttgtttatgggctgctcagagatgatatgattttttgcaaggggtttgtgcctgctctcatgcaattaagttttgg

SEQ ID NO: 5219 - DNA, 1566 bp, Zea Mays
ctctgctggggctatggtcttagctgcaacctaggcatgtatcaagatgggatattcaggttgccatgcgatgtggttgtcccagcattgacagaaaggttgtaaactctgggaagcgattgcgggcttatgtaggacttgatgaaggagaggtttgcagccaatgcaatttaagaggaagttgtgatagggcatatgtgaaggctcggaaagaggacgttggaagaactgtggatgttatgcgcatccttttgacttacggtcttgatgttattaccggcaatgtagataatagagcatgcctgaacaaatctgtcaaggaatcaataaagatcctactaagcgaggttgttgaggtggattctaggggacctggttccagcactgtgaaagctgcacagcgcaaaggtcaatctgctgtacccatgaagcagggtgattggaattgtcccaaatgtgactttctgaactttgcaaagaatatcaaatgtttgcgctgcgatggagaattccaagagaggtatcagttgttgcatgaagaccgagagcatctgcctctcaaaaagggtgactggatatgcaaaaggtgcaactttttgaattttgctaagaatacaagatgcttgcaatgtcatgagaaaccaacaaaccgtttactcaacccaggagaatgggagtgtgtctcgtgagtgcctatttctactacactattatatatctccttatttgttgaacatgttcatgaaggacaagcctggcacagtggtgacaagccttttcactgagtcggttattccttcctcagaccccacttgtgtggaagccgccagcactcggtgtaactatgtgaacttcaagaggaatgggttctgcttgaaatgtggctggaaaagaccaaagtctctaaacaatcaagatagtgtcaaattgtgtcatgatttagagcatagtaagaatccacgtatttcatttgttcaagatggtgtccagatgaaggggtggcaaagtctgcaaaagaagggttcaccatccgacacagatttggatttctggagtgcagacgacgaagagggtggtagcagggataatgatacgctgctgcgacagaaggactacagatttcttgagagttttcccattgtcggtggcaggactgctaattcccaagatcttcttgcaagggagaagtggaaggatgaaatgtccaggagaaataaaggccttcaaactacggaatcgcaagaaagcaatcggccttctagccactgccgtcttccaagaagcatggagctggttgactctgatgatgatattgcttcttggttttcgggtggggataataataataggaacctggataaggtataaccagatcttgtaagtggatgcagctcatcaataaaagttgcatcctttggaattattgaaattcaggcaaaaagaattattaaagctcactggagaactgtacaatttaatgtttcggaactttgtttatgggctgctcagagatgatatgattttttgcaaggggtttgtgcctgctctcatgcaattaagttttgg

SEQ ID NO: 5220 - DNA, 1599 bp, Zea Mays
ctaagttggagaaaaagggtagttgggtaacttgaaacctgcctgagtccacctgccggatgcaccgccgccttgccaccgcggccacagcgcccgcgctccggcggttctcgcaccacagcgcgcgtccccagcctgacccaaggcatgtatcaagatgggatattcaggttgccatgcgatgtggttgtcccagcattgacagaaaggttgtaaactctgggaagcgattgcgggcttatgtaggacttgatgaaggagaggtttgcagccaatgcaatttaagaggaagttgtgatagggcatatgtgaaggctcggaaagaggacgttggaagaactgtggatgttatgcgcatccttttgacttacggtcttgatgttattaccggcaatgtagataatagagcatgcctgaacaaatctgtcaaggaatcaataaagatcctactaagcgaggttgttgaggtggattctaggggacctggttccagcactgtgaaagctgcacagcgcaaaggtcaatctgctgtacccatgaagcagggtgattggaattgtcccaagtatgtttgaaaagttaatatgtgtctctatcgcctatcccccctggtcataatgccttgcattcattgtcagatgtgactttctgaactttgcaaagaatatcaaatgtttgcgctgcgatggagaattccaagagaggtatcagttgttgcatgaagaccgagagcatctgcctctcaaaaagggtgactggatatgcaaaaggtgcaactttttgaattttgctaagaatacaagatgcttgcaatgtcatgagaaaccaacaaaccgtttactcaacccaggagaatgggagtgtgtctcgtgtaactatgtgaacttcaagaggaatgggttctgcttgaaatgtggctggaaaagaccaaagtctctaaacaatcaagatagtgtcaaattgtgtcatgatttagagcatagtaagaatccacgtatttcatttgttcaagatggtgtccagatgaaggggtggcaaagtctgcaaaagaagggttcaccatccgacacagatttggatttctggagtgcagacgacgaagagggtggtagcagggataatgatacgctgctgcgacagaaggactacagatttcttgagagttttcccattgtcggtggcaggactgctaattcccaagatcttcttgcaagggagaagtggaaggatgaaatgtccaggagaaataaaggccttcaaactacggaatcgcaagaaagcaatcggccttctagccactgccgtcttccaagaagcatggagctggttgactctgatgatgatattgcttcttggttttcgggtggggataataataataggaacctggataaggtataaccagatcttgtaagtggatgcagctcatcaataaaagttgcatcctttggaattattgaaattcaggcaaaaagaattattaaagctcactggagaactgtacaatttaatgtttcggaactttgtttatgggctgctcagagatgatatgattttttgcaaggggtttgtgcctgctctcatgcaattaagttttgg

SEQ ID NO: 5221 - DNA, 1524 bp, Zea Mays
atgaagacggcggcggctatctgccttcactggagctgtgagaaggctatggtgcaaattgttcagcagataaatcatgatggagaggtcaatcgagctcgctatatgccccaaaattcatttgtaattgctactaagacagttagcgcagaagtatatgttttcgactatagcaagcacccatctaagcctccactagatggtgcatgcaaccctgatttacggctgaagggacataattctgaaggatatggcttatcatggagtatttttaaagagggacatttgttaagtgggtctgacgatgctcaaatttgcttgtgggacattaaagcaaatagtagaaacaaaagtcttgacgccttgcagatttttaagcatcatgatggtgttgttgaagatgttgcttggcacttgaggcatgagtacttatttgggtcagttggtgacgattatcatcttttgatttgggacctgcggtctccagcccctactaaacctgttcagtcagtggtggcgcaccagggtgaactgcctggcttttcacccgttcaacgaatgggttgttgcaactggttctactgacaagactgtcaaattatttgatcttaggaagattgatacttctctgcacacctttgactgtcacaaagaggaagtttttcaagttggatggagtccaaagaatgaaactatacttgcatcctgttgtctgggcagaaggctcatggtctgggatctaagcaggatcggccaagaacaaacaccagaggatgctgaagatggtcctccagagctcatgttcatccacggaggccataccagcaagatctctgatttctcctggaacccctgcgaggactgggtggttgctagcgtcgctgaagacaacatcctccagatatggcagatggctgagaacatctaccatgacgaagatgatctgccaattagcgatgagccggcaaaaacttcttgaagcaacacagcacaaaaggaatcttaacttctatcgactgttgggtgttcctagatcggaaccctgctcgccggagaatcttcatcgagtgagagttggctgtaggttgcttccgtggtcgtaactttatgcttgacgggttcgtcgtttcttcgaccgtctgtatgtgtattcggcgaacctttagcaatatacatatcccgattgactagatctgtacgtcgcagttgtgttttgtagtattgttttgcagccagtaggatcatgttcgtgatgtgatttgtaacgggaacaaaataatattcactccagcgtaggccaagcgatagtcacagctcaggtcgaccgatacgcaagcaggtggtgcgtctagggctgggcactttaaacccgaacccgaagacaaacctgaatttgcagtctattcgggtgtaggttctcgggttcggtccatattctttgctagttcgggtaccggattcggtttcggttcctaagccatgcaacccgaaaatacctaataacctgaattaattcattgtcac

SEQ ID NO: 5222 - DNA, 1707 bp, Zea Mays
acgtcgcggcggtggcgtgcaaggcacgcagggaggagagctgtggggaggggagggagagggagaagctattgctagtgggatgcggagccgctgacgtcggggtcaagcctccatgctaagcgcgaggggagcatgagcggaagatggggggagagtggaaggtggagcgtgctagatgaagacggcggcggctatctgccttcactggagctgtgagaaggctatggtgcaaattgttcagcagataaatcatgatggagaggtcaatcgagctcgctatatgccccaaaattcatttgtaattgctactaagacagttagcgcagaagtatatgttttcgactatagcaagcacccatctaagcctccactagatggtgcatgcaaccctgatttacggctgaagggacataattctgaaggatatggcttatcatggagtatttttaaagagggacatttgttaagtgggtctgacgatgctcaaatttgcttgtgggacattaaagcaaatagtagaaacaaaagtcttgacgccttgcagatttttaagcatcatgatggtgttgttgaagatgttgcttggcacttgaggcatgagtacttatttgggtcagttggtgacgattatcatcttttgatttgggacctgcggtctccagcccctactaaacctgttcagtcagtggtggcgcaccagggtgaggtgaactgcctggcttttcacccgttcaacgaatgggttgttgcaactggttctactgacaagactgtcaaattatttgatcttaggaagattgatacttctctgcacacctttgactgtcacaaagaggaagtttttcaagttggatggagtccaaagaatgaaactatacttgcatcctgttgtctgggcagaaggctcatggtctgggatctaagcaggatcggccaagaacaaacaccagaggatgctgaagatggtcctccagagctcatgttcatccacggaggccataccagcaagatctctgatttctcctggaacccctgcgaggactgggtggttgctagcgtcgctgaagacaacatcctccagatatggcagatggctgagaacatctaccatgacgaagatgatctgccaattagcgatgagccggcaaaaacttcttgaagcaacacagcacaaaaggaatcttaacttctatcgactgttgggtgttcctagatcggaaccctgctcgccggagaatcttcatcgagtgagagttggctgtaggttgcttccgtggtcgtaactttatgcttgacgggttcgtcgtttcttcgaccgtctgtatgtgtattcggcgaacctttagcaatatacatatcccgattgactagatctgtacgtcgcagttgtgttttgtagtattgttttgcagccagtaggatcatgttcgtgatgtgatttgtaacgggaacaaaataatattcactccagcgtaggccaagcgatagtcacagctcaggtcgaccgatacgcaagcaggtggtgcgtctagggctgggcactttaaacccgaacccgaagacaaacctgaatttgcagtctattcgggtgtaggttctcgggttcggtccatattctttgctagttcgggtaccggattcggtttcggttcctaagccatgcaacccgaaaatacctaataacctgaattaattcattgtcac

SEQ ID NO: 5223 - DNA, 1510 bp, Zea Mays
gcgcctcgccttttgaggagggagcgagcgagagagacggaaagagatacggtgcagggcgctgcgacctgcgactgcgaggagaaagggcggcgccagcttggacttgccggtgccgtcgcgcgcgagagagagaaggaagcgacaacctgcttgccggtgcggcagctctgggcagggcttacacatataataacaagggtggtcgatcagagagcgagggaggagctgaggacaggagggaacaaaagggcaagtttggttcgctccttgctagggcccggtgagctgagctccatatcatccagatccaggtaggtgaggtcgtgaggcgatccaagagatgggcggcggcggcaggaatggcactgtggtgaggcggtacatccggtccaaggagcccaggataaagtggagcgccgacctccaccgcagcttcgtacaggccatagactgcctcggcggccaacacaaggccacgccgaagctcatcctccagttcatggccaccagggggctcaccatatctcatgtcaagagccatctccagatgtacagagctgcgaggcttggcgcaggaaggagagggatgcaagcccagctgctgcaaaggaggcactcatgcactggtgatgagcaagaggagttcctgcgcccaccaccacctctgaaaagggcccggatggggtacgagagcatgcagggactgggaagccatggagtcagtgatgcgcggaccgcagccgctgccgggggcctgtactgcatcgatgattacatgcaagccatggcggccatgggctggagaataaaggaggagggactcaccagatggcagtggcagaggagggatgctgctgcgccttccgacctccaagccatgggatgtttggtgcaagaacctgacccctttaagatgcgccgaccagaagcacgccgtcttggttcagcgctgaggaatcagcaggacgactccagcgaagaggacggaaacggatgccccctcctctccagcagcagcttcagcaatgcagcgaacgacgacgagccgtctgatgagcagtgctccctctcgctgtcccttggcctggacacaaaaggcgcccgtgccatggcaacctcctcgccgagcggcgagagcagctgcatcctcacggcggcctcgcctgcgaggaggagctctagcgactgctgctgctccggccattcaggctgcttcgtcggcccgggcgttagcctggaactctccctgtccatctctggatcctacctagatcactccgattctgtacatcgacccggtccggccggctgctcgcgttggtgatcgccgcgcttgttttggatgttcctggcgtcatggccgtgttagaaagttacaagtagccaattccaagttggtagtaggataatgaccgtagaacatgttacttctagctaagctgctacggtactagtcagaaaacgtgtacaatgcgcactgttatatctatcacatttaatttagata

SEQ ID NO: 5224 - DNA, 2671 bp, Zea Mays
tagaaacttctcatagatctcctgttctactgctacacagtactcgcatctgctccgtcatgactcatgacaccgtagcttccttcctcgccgtcgccaaatgctgcaggccgcctccatgaggtgctagggttccctggccgacgccacgaccgtcgcacccggccgcctccgtccctgcgggccttcgccaccgccctcgccaaacgtcccgagctagggttcctcacagcttctcccaagcgccctccagtctcaccaacccttctgcggttctgcccttggcgccgcgcccatgagcctcaccgaggcgccgtccccgtccccgtcgtcgtcgagcgggagcgatgacttcgcggccttcctcgcctccgagctcgagctcacctccggtgctgactccgccttccctggtgacccctcctccgttttccccgccaccgacgacgagggcgaggacgaggatccggaggagctagaggttgaagccatagaacaaaacggtaccaaaaggcgtagagtagaggaacaatgccaagatcaaggaacatcagttaggcctgacaaaatccccactggcgcatctaaaattgttcaggttgaggcatgtccacatcctggacattttggtggactttgcattatctgtggcaagccacaagacgaggaagatgtttcaggagttgcttttggttacatccacaagggcttgaggctaggtacctcagaaattgacagactacgtggtgctgatttgaagaatctgttgcgtgaaagaaaattagtactcattttggacctggatcacacattgatcaactccaccaaactccaagacatttcttctgccgaaaaagatttgggtattcagtctgctgcttcaaaagcgccggcgtggccctggctgctgctcgctctgcagcgcgcctcacgtccctcgcgcgcctccgacggttatagggaagaccccacatgacacacacacacacacacacacacaaatgattatgtttttgtagctgtctatgtttcatgtcttttgacactgttgttgcttatccatgagtgtatataacatagctagtgaagcccttattttctaaatgcagatgatccaaatagaagcatcttcgcactagatttaatgccgatgctcacaaagttgagaccatttgtccgagaatttctgaaagaagcaagcaatatgtttgagatgtatatatacacgatgggtgacaaagcctatgcaattgaaattgcaaagcttcttgaccctagtaacatatattttccttcaaaagtgatttcaaactcagattgcactcagcgacatcagaaaggtcttgatgtgattcttggagctgaaagtgttgcagtgattcttgatgacactgagtatgtatggcagaagcataaagagaacctgattctgatggagagatatcatttctttgcttcaagctgccgccaatttggttttggtgttaggtctttgtcagaatcgttgcaagatgaaagggagagtgatggtgctttggctaccgttttagatgtcttgaagcgcatacacgctactttctttgacatggctgctgaaactgatctttcttcacgggatataagacaggtgatcaagacgttacggaaggaaatactgcaaggatgcaaaatagtcttcagtcgggtgttcccaaacaatacacgcccacaggagcagatggtctggaagatggccgagtatctgggtgccgtttgcgttaaagatgtggatcccagtgtcacccatgttgtaactgtggatctgggaacagagaaggcccgctggggtcttaacaacaagaagttcttggtccacccacgctggattgaagcagcaaatttccggtggcataggcaaccggaggaagattttcctgtcactgcccctaaggaaaagagcaaagagaaagatagtgataatgatgtggctggcaagaaggaaacgagcgaggataaagagaatactgcagctggcatgaaggaaacgaggaacgatgaaggaaatgtaaccggtaaagacaaagctgatgccaaagaaaacgttgtgaccacatctgctacgtgtcctgcagactcgtagtctgtgttgggctccaaaggtatctgacacattgtgtaggcgtgcaggtttggtatgggagatgaaaattcagcttttcttatccgttcgtgcaggctttagatctgtccataaaaaaaagacgttacatctgctccattgcaaattttgctgctgacctgaagctgattgggcctccggccatataacttacgctacgatgaaactataggagttgaagcaaactgatgtctttatgggacaatttttggtgaatccgtgcgactatgtgcgcagatgtacttaagtttgtgcctgcttcggtaggtactgccccctgatgtaagcattcgtgatcgctagtggaactacgttattctagttgaaaaaaaatgttccacacattaattcttgcactggaaaaggcataggcaaggtcgctatgatgttgccatacattgagtacgaagtgatatgttttccggcggagctgtaggggttttcgttatagtgatgaattgatgatgacaaaaataaattccgtcatttcttttatcgtcgaagaagcaggaa

SEQ ID NO: 5225 - DNA, 1152 bp, Zea Mays
ccacacgctagtctgtgctgtgcgggtgcccctcccgcgtcgcctccctccgcttcggcatttagcgctgccgcgagatatcgaggacgaaccggagacaggatggtcaccgtcgggcgccggcgcgggtttgtcaccttcgccgctgcggcgatcgctctgatgcagatcagttatctactgttcccgatcagtgcgcagcaatccaatggctcaagggttgtaccagcagaaggttactgttccatgtacggcatttgtgcacaacgaagtgacgggaaggtcttaaactgtgcaaatgcaaccaaagctgttaagccagacacattgttttcttcaaggatccaaagtttgtgcccaacaatcactggcgatgtctgttgtactgtagatcagtttgacacattacaccaacaagtccaacaggccgttccgtttcttgttggatgcccagcatgcttgaggaatttcttgaatctcttctgtgagatgtcttgttctccaaaccaaagcctcttcattaatgtgacttcagtaaagcagattaatagcactatgactgttgatggcatagattactatgtaactactaactacggtgaagagctatataactcatgcaaggatgttaagtttggcactctgaacacccgtgcaatggattttatcggtgctggtgctaaaacttacaaagattggttggcatttattgggcgacaagcaaaccttaatgagccagggtcaccttatttgataacatttggatcggattttagtgattcatctggtgtgaagcctctaaattctacaatttattcttgcggcgacccttctttgggttgttcatgtggtgattgcccttcttcttctgtttgcgcgggatccttgctgcctcagctgaatacagaaaccgcctgttcagttaaaatgggatctttaaaggccaaatgcttggacttctcactagtggttatttaccttgcactattatgcgcttttctgctatggggtttgttatacagaacacgaggaagaactgcttcccccttgcaagcaaagccattgaggaattcagataataagtcgaacatgaacaaaaatggcaagagccctcatgactcggttcagcatgctagcatggtggactataac

SEQ ID NO: 5226 - DNA, 1491 bp, Zea Mays
cagaaacaactcaaataataatgttcagttgacaacacaagtgcgcaaagatagcttgtcctcaaacctaagaaccatgatcgaggacaacgagttctttgatttttttgagaaaatgacagctaacaagttgatatatccaatcagccactgaagaacatacggtttgcaaaagttacagtggtaagaacggtgccacaacatccagacaatcaggttgccaacagctagataaagctgagatttgcaagttgactgttgtgttttaaccagtgactgagaagagttgcaaactgaataagaatgtacagttgacaaagcaagagcataagaaaataaggacgataagttcatctatccagtcaaacactgaagagcatacataattttgcaaaagttcaactgaaggcacaacactacagcacccaggcaggttgccaacagttaggcagagcagaaatatgcaagtttgaccatttgcaatccacaactgagaattacatacacaacatataagttgatggttttagcagagcagccttctcataatatttcttgtgcatgtagctgatgactgcctacctacccactgctatatcacaaccaaacgacaaggccgtgtgttttggcgtgtcccatgttaggttttgccaaaaccgaaatctagaaatccacagggataatatagtatacactccaggcggaatcatgttaggaaagaacatcggctgatgcgggatagtatagtatacactccaggctattcagataaatttccctaaccatttactgtgcaagacagggatcacaaattcttgacaaaaacagtggaagaagcataccgaggagtcgattgcggtgacggaggtccatttggagtagttgtcgtccgcaatgatgaagtggtagttagctgccataacatggttctgaagcacactgaccctactgcgcatgctgaagtaactgcaatttgagaggttgcaaaaagttcgggaaaatcaagctctctgactgcgaaatttacgtgtcctgcgagccatgcccaatgtgctttggtgcagttcatctctcccgaatcaagaagctggtttatggggccaaggcggaggctgccatcgccattgacctgcaatgcactactctcttatgatcatgtgtgtactgccacattctgatatgagtactcaactttaaattaatcaatctactgtaagtcacaacttttggataaaatttcttcctagatgaaccacttccagagttccagatacttactcttaccgagatgggactgggcagaagagagttatccatgttaatttctaacaaatgatgaacatgcttattatttgcttgctcattatttgcttcctcggagttttttatatgtggactgtacaatgaaaacacaacctatcatgatgccaggtccctcatggatgtgttcattctcttgtaatctacgcaattctgttaaagttagtcgaa

SEQ ID NO: 5227 - DNA, 2423 bp, Zea Mays
agctaacccaagctgtgtccattccggtaacaaatcgagtcacagttggtctgctccctaccgtcgccgtttccgcactttcctcgtcacacaagtccacctccaccgccgcacgccgccgctcctccgcatccgcgaccgcgacctcgaggtcgccctccctccgcgccagctgcaatggcggcctcgccggaccaattccgggggcatgcgcgcctcccgcacttcgcggccccgctccgctacgacctccgcctccgcccggacctcgccgcgtgcaccttcacgggcgccgcggccatcgccgttgtcgtgtccgcgcccacccgcttcctcgtcctcaacgctgccgagctggatgtcgatcgcgcctccatccgtttccaggatttggcgccgacagatgtggctcagttcgatgaggatgagatcatggtcatcagcttcgaccgggagctgcccttcggagagggcgtgctcaccatggacttcaccggcacgctcaacgatcagatgaggggattttacaggagcaaatatgtgtacaatggagagtcaagaaatatggcagttacacagtttgaagccgctgatgcacggaggtgctttccatgttgggatgatcctgcatttaaggccaagttcaagctaacactagaagttccatctgacctggtagcattgtccaacatgccagtggctaaggagactgtcagtggacttaccaagactatttattatgaggaatctccacttatgtcaacctatcttgtggctatagttgttggcatctttgattacatagagagttcaacatcagagggaactaaagttcgtgtttatactcaagttggcaagactaatcaaggaaagtttgcactagatgttgctgtaaagtcgctggatttatacaaagattattttgccactccttatccattacctaagttggacatgattgctatcccggatttttctgctggggccatggagaactatgggttagttacttaccgagatacagctttgctgtatgatgagctactatcatcagcatccaacaagcaacaggtagcaataactgttgcacatgagttggcgcaccaatggtttggcaatcttgtgactatggaatggtggactcacttgtggctaaatgagggttttgcttcctgggtaagctatttagcagtagaatctttatttcctgaatggaataactggacacaatttcttgatgagacgacctctggcctcagattggatgcacttgcagagtctcatcctatcgaggttgaggtaaaccatgctagtgaaattgatgcaatttttgattccataagctatgacaagggtgcatctgttattcgtatgctacaaagttaccttggtgcagagtgttttcaggaatctggggagcctgttaaggatttgatgactacatggactaagcaacaaggatatcctgttatttatgcaaaaatcaatggacatgatttggaacttgaacaggcacagtttctatctgatggatcgtctggtcctggaatgtggattgttcctgtaacagcatgctgtggctcatatgatgcacagaaaaagttcttattgaaagataaaatggataagataaatattaaagagttttctgactctcaaagtgctgatggggagaagaatcaaatcatttggatcaaattgaatattgatcaaactggattttatagagtgaagtatgatgatgaacttgcagctggacttgtaaatgcaatcaaagcaaagaagctctcattaatggataagattggtatcgtggaagattcatatgcgctctctgttgcttgcaagcaaacactgacgtcattgttgcgactgctgaatgcttataatgatgagtctgattacactgtactttcacatgtaacctctgtatgtttaagcatttctaaaataacagttgacgctactcctgacttgaacaaagatatcaaacagcttttgatcaaccttcttctcccagctgtcataaagttaggctgggaccccaaggatggtgagagtcatcttgatgtaatgcttagatcactgctcttgactgcgctggtcagacttggacataatgaaactataaatgaaggagttcggcgtttccacatcttctttgaagacggcaaaacttcccttcttccaccagatactagaaaggctgcatatcttgccgtgatgcgaactgttagcacctcaagcagatccggttttgatgctctccttaaaatctacagagaagcatctgaaccacaggagaaatcacgtgtcttaggctccctgtcttcatcaccggatcaggatattgttttggaggcattgaactttatgtttactgatgaggcatggcagatcttatgttcagggctggtacgcac

SEQ ID NO: 5228 - DNA, 1372 bp, Zea Mays
cgattctgctggtggcctgcttgatttttcttctgctggctagatctcttccatctcccactcatgaattgcttgatctggaaggggacggcttcgtctgtcaatttgagagcactgaccagagaggaaggggaagcagaggggcggagggaagagcagaccagcacatccggagagggaagcagagcagcgcacctggagaggagcggagggaagcagagcaggcacttgggtggaggcggaatagcagtggagaacgcgtgagagaagaagcggcgacactgaagggggtcgggatttggagtttaacaaagccacaccaggcagtccacgttgcatctcagtatggccaaacagcattcttgcatcacatcatctcaaagtacggtgcagattttgatgctttggacattgatgggaggagcgctttgcactgggctgcctacaaaggaaatgcagatacaatcagattactgctatttatggatgctaatcaagtaaggcaagacaaaaatggttgtacccctttacattgggctgccataagaggaaatttggaggtttgcacagttcttgtacatactggtactaaggaagagctcacactaaaggatagtggtgggttaactcctgtgcaactggcagcagaaaaaggtcatcgacatctttccaatgtcctttctaatgctacaaaagtaagctttgaagataagtttttccctggaaaatcaaggaaaattggatatgcccctttcttgtttgcttatcttgtcatctgcctcatcctgttcctaaactcaattgtatttgcacctaatttttctaggatcactgctactgctggtctttggtcttgggctgctgtatcacttttctttgcatcacaagtaatgttctacagagttagcagaaaaaatcctggctacatcaaggcaaattccaagcgaattgacccaaaggagccacttatggaaattgatcttaccaattcctctacttggacaggcaattggtctcagctatgccctacttgcaaggaagttggcaataggctattttctttgttgtccatctatctatctttgctactgtagcagtatggcaataggccacccagtaatggcttgcatcagccatgaccgacatgtagaatacttggggctgagatcagcccatgtactagtgtacttctgtagttggtgaacattcacccctacttgtatatacaccagggaataaaaaggagatagtagttcagttgctgcactagtttgtgtgtgcggtttctgtgctcaacacttttttatacctccagcctaaggtgttgtgtgcgcgtgagcgcgtgcgtgcaagggagaccaggaacaaacac

SEQ ID NO: 5229 - DNA, 2428 bp, Zea Mays
cgcctccagtggtagcgggagtgccgcgtcgtctttcgctcccaagtgcgacgggaaataaggcacctgtgttcctacttgcaagatctaaagaaggcttctgctgaagagatgcgcagaagtgtttatgcaaattatgctgcattcatcaaaacatcaaaggagatatcagaccttgaaggggagctactatcagttagaaatttgctaagtacacagtcagctttaattcatggtctgtctgaaggggttcagatagattcgttggccacagggcctgaaggttctgctgaacaagacatatccagtgttgaagatcaggagccatcagaaatatggaaatggtccacagatttccctgacatgcttgatgttctgctagccgaaagaagagtggatgaagcactggatgccttggatgaggcagaacggatcgctgctgatgccaaacaaaagggaactctatccacgactgacattctggctttaaagagggttatatctgaaaaccgtcagaagttggctgatcagctagctgaagctgcttgccagtcttctatttgtggtgttgagcttcgagctgcagcttctgctctcaagagacttggtgatggacctcgtgctcatagtttgttgctcagtgcacacaatcagagacttcagttaaacattcaaacaatacaaccatctagcacatcatatggcggggaatacactgcttctcttgcgcaacaattttttcctgttatagctcaggctctcagtgactcagttgaggtcttcagtgaaaaatcagcttacacatctgaactagttacttgggctactaagcaggcaatgtcattttcgcttcttgtaaagaggcatactttagcctcttgtgctgctggtggggggttaagaactgctgcagaatgtgttaagatagcgattggttattcagacttgctggaagctcgtggtctatcactttcgtcagttctgatgaagcaactcagaccctctgttgagcaagcattagattccaatttgaggagaattgaagagagtactgctgctttagctgcagctgatgactggatactcacctatcctccaactggtatacgtccactggctagatcatctggtaatctggcactccagccgaagctctcaagcagtgctcaccgtttcaattcaatggttcaggatttctttgaggatgttggaccactggttagcttacagctaggtggttccgcgatggatgggcttctgaaaatattcaactcgtatgtaaacttgctgataagtgctctaccagggtcagtggatgatgaagttaacttggaaggtttggggaataagattgttagaatggcagagacagaggaccagcagttagctttgttagctaatgcatctttactagctgaagagttgctaccgagagcagcgatgaagctgtactctatgaacccggtcagcaaagatagcttgcgtagaagaggtcctgaaaaccaaaatcgtgcggcagagcagcgggcatggaaaaggaagctgaaccgcatggtagagaaacttagagatagtttctgcagacagcatgctctagatcttatattcacagaagaaggtgacacccgtctgagcgcagagatgtacatcgatatggataatactgttgaagatcccgaatgggttccatctgcgattttccaggaattgtatgcgaaattgaataagatggcaagcgttgcggcagacatgtttgttggtagggaaaggtttgccacgctgcttatgatgagacttacggaggcagtcatgctttggctctcagacgaccagagcttttgggaagaggttgaagaaggaccaagggctctgggtccggttggacttcagcaggatccttccaagcgacgactggttcatcgacgttgcccaggagagtattagtaggatcggcggcgggagggcacgagtcgccaatggggacagggaggtgaacagccccacagcctccgtgtcagcgcagtccgtgtcgtcagttagatctctcggcagctcctagcgtgcacagtttctgtatcaatattactgtagggatttgtttggatgtgtttgtgctggtacatatgtgtgagtaattaattgtatgcctaggccaagaaaatccttgaagctggtcttgttcacctgttctgagactttgggccggtccacgcatcggcattccctacggtagtggtaggtattgatggaccaaatgtaccggctggtacagccacgggcacaacacgaatcggctatgctattgctagctacgacacggttatagttccgtgacaggtattgtctgctcttataaagctctagtttttttttttgtttgcacgtgatctcttttggaagaaaaaaaggttttatacttctttctaat

SEQ ID NO: 5230 - DNA, 2637 bp, Zea Mays
catcgatttctcttcaaaaaaaatacagaaaataaaatggttgttatattactagcacagcagcacatagtagtgtggaaagaaggacgacggaaagtagagaggagagagagaaaagtatgacaagaatgagaaagaaatcagacaacaaccttcttagcctcctccatatcctcctctccacttcttctccttcgccatgagttctatgctaggccagcaagaaccatagcgagagcaagcaacagctagtggcagcactcgagaacgagctaggggaggaagggagggtagagagaagatcgacagccctgctagtgtccaacaacccagaggcaagggcggctaccgaaagggaaaagattcccttgttcttgaccggcttctcagggacaaatctggaggcggcgatggcatccaattcatcagcggccgctgtggcagccatgtttggaattagggatgccgaccaccaagaccagatgaagccgctgcttgcgcagcagcaccagcaccagcaccagcaccagatgccacctgcgccgctgctcaacgccgcttcgtcgtcggcggggcccggccaggcggcaggggcaaccccgccggcagtgaagaagaagagaaacctaccagaccctgacgcggaggtgatcgcgctatcgcccaagacgctgctggcgacgaaccggttcgtgtgcgaggtgtgcaacaaggggttccagcgggagcagaacctgcagctgcaccggcgcgggcacaacctgccgtggaagctgaagcagaaggacccgtcgcaggcgcagcggcggcgcgtgtacctgtgcccggagccgacgtgcgcgcaccacgacccctcccgcgcgctcggcgacctgacggggatcaagaagcacttctgccgcaagcacggcgagaagaagtggaagtgcgacaagtgctccaagcgctacgccgtgcagtcggactggaaggcgcactccaaggtctgcggcacgcgcgagtaccgctgcgactgcggcacactcttctcgcggagggatagcttcatcacccacaggggctttctgcgacgccctcgcgcaggagagcgcccgggctgccgcccccaggcctcaccgccagccacctctacggcgccaccaacgcggccaacatggggctcagcctctcgcaggagtttggcgcaggcgacggcagcgggtcccacgggttcttgcagggcaagccgttccacagtctcatgcatctgccggatctccaaggcaacggcgccgggggtgcctcggcgtcgtcggctacgggtctcttcaaccttggctacatcgcaaacagtgcaaacagctcaggtacttccagccatggccatgcaagccagggacacctgacaagtgatcagttcagcgaaggaggtggcggcggcggctccgagtcatcggccgcgatgctttttagcggcggcgggaacttcgccggtggtgaccaccaagttgctcctggcgggatgtacaacaatgatccggccgtgatgctgccgcagatgtccgcgacggcgcttctgcagaaggcgtcccagatgggctccagcgcgagcgcgcacggcggcgtgtccgtgtttggggggctcgtgggctcgtcggcgccctccgctaggcacgcccgggcacccatgctcgaccagagccagatgcacctacagagcttgatgagctcgctggctgccggcggcatgttcggcggcgccaacagcggcagcatgattgacccgaggatgtatgacatgaaccaagatgtgaagtttagccagggccgtggtggcgctgagatgacgcgcgacttccttggcgtcggcggcgatggtgtcatgagaggcatgacagtggcgagagcgggggcaccaagacggtgccgatgacatgaactccttggaagccgagatgaagtcggcctcgtcgcccttcactggagacaggatgcaataagagttcccaataagagaaccttgtgtgctcgcatagtgagcgagtcctgtgcagcctgccatgcatgcacccatgggtgtactgaatccattacagcaggttgttatagcgtacactgcacaaggcatgggagtagtataaggttgctgcattccatgcaatgatgcaataaagggtaaagacaggtttgcacctaatccgaagacttgcatggtgagcaatgagtatcattcttgatttgctactaatccaaagaggctagatcaagtagaatcatgtgatctattatctattgctccatgcttggtggtttcgttcctgtgtcaaacatttgttttttctgaactatatgtaattggattaattatacctgaggagagatagtattaagcagtaatgctgtagctagctaggttagtagtactgggctactggctatatatattaggggacgatataagagttcatgcccctaaaacttcttctgtttgttgtttttccttctattgtgcttgtgcttaccgtgtactctttaatttggagcaaaaccatttttgttgcttattacaatgcatttaataaccacagcgtacccgtcgggatatatatgtgtagtactactgatatatttttttacagtatatggtttatttctttc

SEQ ID NO: 5231 - DNA, 1067 bp, Zea Mays
gatcgaaccgtttggctggtggggcgcgagcgcgaggtgacgacggcgacgcttcagttgagtgcgggtgtagtgctcctgcgacttcggcctgtccactttttagggggtgccgaggggcgtgggggtacggccgtccgcacaataatctgcgctgcgcggaagaagggaaggggaaaagcagttaagcttgagcgcgcgcgacagggtcaagtcgagggccggggaatcgccggagaatggaggtgggcagggctccgcgacgacgggtgtccccagcggcggcggcggcggctgtgccttcgctgcttctgttcgccgttctattcgcgtttcgggcactcgggtttggattcggcctgtccagcgtcagcgctgccctcatcaatggcgcccttggtagcaagtgcagacctcaaaatgcaacgtcatcgaagttggatatctacatagaggacatccagaaagggaaacatggaagcgattcagggtcatacgacgccgaaggaaggtttgttcctgacaagttcgaagagatattcgccaagcacgccaagactgtcccagacgccctgacgtcggacgagatcgaccagctgctgcaggcgaacagagagcccggggactacagcggatgggctggcgctgaagcggagtggaagaccctctacagcctcggcaaggacaaggacggcctcctccgcaaggacgtcgcgagaagcgtctacgacgggacactgttccacatgctcgcgcccaactggaaatctcccgacgaggaggaggaacaggaactaagcgtgatccgggagagctgaaccgagaggtacaagcaaagtctggttgagagataaggactctgggaccctctgaacatgctgtcaagcaacatgtactactagcggtgtgaacgggtggtgtgaacactcttttcatatcacatcataaaaaaaggtgtgaacagatatttcaatgtacattatcataaaataagataaattcataattcaaataaaaatattctgtgtcttaccaaaacaaacgagatacaaaacaactaaaagaaa

SEQ ID NO: 5232 - DNA, 764 bp, Zea Mays
agaaggtgctggacaagagaagtgctgctttggcttaccaagaaaagaggtgtctcatatcggtgattcagcagctagctctcgattttggggcaatcaagaggtgaaattgcgaagaacatgagtaccacaactgccaagggaaaaggagaacctcaaaatgcaaatgatgcaccactcgatgttcagcccttaacaatagcgtatccgggggaaccagtggtctgcacaccaagacccatcgtgtcgcatcctgcatataatggtggatggaaggttctccgccacatcaggccaaatggaagatctgatttcgtttgaaccattgacgacaatggtgcataacgaaagaaggcggcaacaattgatttacaccactccccttgcaacgaatttgaagttggtgagactccaagattatgttgaaactccaagagtagcaaggatgaaagccctttggtgagatattcgcaaaccaggatgaagtaggaatatgcaggacacaaacttaaccaagaggcactcgttataggcgaagtggagattggtctcaacatactttgtgcactgatgtttactaaattggtcaagaggtacatggcactcgcattttcatagtatacaacagtggctcaacggagcgtacaatgtagctcaaagagcaaatgatgaagccaacacgcctcagttataccagttgcaatagtatggtatcgtgtctaactactggagcgagatacagtgtgttgttcggaggaccagga

SEQ ID NO: 5233 - DNA, 400 bp, Zea Mays
tctctctctctctcgggcgctctcggtctcggccatggaggccgcaagcaatcaggagccggggagatgcggcggcgacgacgacgaggcgaagaggagggaggcagagcttgcgtcaagcaggctcctcgacccggggttcaagccctccaaactatcccaggaccggctcgacaagtttaaggaattacacaagaaacggttacagataactgaaaagccgaagtataaaagaaaaccgaaaggaaccactgagagaagtatcaaagtaaccagcaattataaattcactgataaggatgcatctgctgatagttctccaagagatgtgcatcatatgtcatcagttacaggaattcaaggggtttctgatggccttggcagataaggaaggagggcc

SEQ ID NO: 5234 - DNA, 849 bp, Zea Mays
tctctctctctctcgggcgctctcggtctcggccatggaggccgcaagcaatcaggagccggggagatgcggcggcgacgacgacgaggcgaagaggagggaggcagagcttgcgtcaagcaggctcctcgacccggggttcaagccctccaaactatcccaggaccggctcgacaagtttaaggaattacacaagaaacggttacagataactgaaaagccgaagtataaaagaaaaccgaaaggaaccactgagagaagtatcaaagtaaccagcaattataaattcactgataaggatgcatctgctgatagttctccaagagatgtgcatcatatgtcatcagttacaggaattcaaggggatcctgcatcaggcctgtcctcgaggaacaaaaggaaactacattgggggcttgacattaaagaacgatgggaaagaaaggcaaacatgtaaaaatatctgaagatccaacaacaaaagcatatccacaccgcactcatttgaaatttgaaagctgagggacaaaacaaagcggccgaccttttccacggatcatcatgttgctggtactgatggtgcaacacaggcccatgtgcacaatggaacatagttgttgctgatgatactagtgtatatagaagattatttctcatatgcttctcgcaacttgctggtgcggcttgtttacaagaatgaagcaggtgaaggcaaatcgtgcaataagttatcgacggaccgcatacagatctcgcccccaggatgtgcccatttttaaatcctcgagcgcctttggcctggtccatctgggaccttttgcgatggtttccgttcgtactatgctgtcc

SEQ ID NO: 5235 - DNA, 2120 bp, Zea Mays
atgttcagtcgccgtcgcggcgccgcgcgggagcccccagaaaagccgaggaggaggcagcgtacaccttctgcctcgctgcgccggcctcccaatcgatcgaggcggcgcagagcagaggaaaaccccgagccgcaaccctcctcaccgcacagcaactcgagttgaagctgaagaacaacctgaaatatcagaggcatatggagttacagcggttccatattttgttttctgcaaggaaggaaaaattgttgatactttggagggagtaaacccagccagcctggccaataaggttgcaaaagtagctgggcctgctagtgttgctgagtctgctgtacctgctagccttggagtcgctgctgggcctgctgtacttgaaaacatccaaaagatggcacagcaaaatggatcctctgctgctgaaagcacaaactctggcagtactcaagatgcattgaataagcgattggagcagcttgtcaattcccatcctgtgtttttatttatgaagggaaccccagaacaaccaaggtgtggtttcagccgtaaagtggtcaacattttgaagcaagaaggggtcgaatttgggagctttgacatccttacagataatgatgttcgtgaaggtatgaagaagttctccaactggcccacttttcctcaactgtactgcaaaggcgagctgcttggtggatgtgatattgttattgctatgcatgacagtggtgaattgaaggatgtttttgaggagcacaatattcccctcaaaccacagggtagcaaaaatgaagaagcaggtcagcccgagtctgcaactgagaagggtgctgcagttgctgaaccaatggggcttactgatgctcagaaatctcgtttggaaagccttattaattccagcccagtgatggtattcatcaaaggtacaccagaggaaccaaagtgtgggttcagtgggaagttggtccacatacttaagcaagagaatattcctttctcaagttttgacatcctttcagatgatgaggttagacaggggctgaaggtgctctcaaactggcccagttaccctcaactgtacataaaaggtgagctggttggcggctcagacatagtgatggagatgcacaagagtggtgagctgaagaaggttctgtctgagaaaggggttattccaaaggaaagcctggaggacagattgaagtccctggtttcctctgcaccggtgatgcttttcatgaagggcactcccgatgctcctcgctgcggcttcagttcgaaggttgtgaacgccttgaagaaggaaggggtcagctttgggtccttcgacatcttatctgacgaggaagttaggcaaggtttgaagacgtactccaactggcctaccttcccccagctctactacaaatcggagctgattgggggatgtgatatcgttcttgagatggagaagagcggagagctgaagtcgaccctgtcagagtagacacctagcattcttgcttcgctggcgtttttaccatattgcctgcattggatcactctactctggtattcatgccattgtattcatagatccacgttggtacttgtctgcagtgccacattgctagaattgtgacacatctgcagaaggaataacttacgcttgttcggtactgattgcattgttcttatatcaccagttctatttagcgggtggaagcttttttgttcgggtattgtcacgatttatagacggataaagtaaaatatttatagagtatatgtgtacgtgtaattgtgtatttaagtcatgccattgttcttgggaagtcacatgtggaaaattgactttcacaatgaacaagcttataaatctaattagaagtggttcgtacaacatttattcacaggaacggagataaggctggctcaaggctccagcaagggcagctaatagaactatgtgaagaaatttaattaaaaaaactaaatttaatagttatagcaaataattttataattgtgccaaaatggtacgtgtaggtctatatagtgtagcaacatatcataaaagtttggttaggaaaagaaaaaataaaaaaagtttggttgagaaaagaaaaaaaataaaaata

SEQ ID NO: 5236 - DNA, 1246 bp, Zea Mays
caccgctgagttgagtgaacactgacaagggggggttcgtcaagacccagaagaccaatgcgtacttcaagcgtttccaagtgaagttcaagagaaggcgtgctggtaagacagactacagggcaaggataaggttgattaaccaagacaagaacaagtacaatacacccaaataccgatttattgtgcgatttaccaacaaggacatcattgcacaaatcgtatctgcaagtatcacgggtgatattattcttgctgctgcatattcccgtgagctgccacgatacggtctagaagttggtctgaccaactatgctgcagcctactgcactggtcttcttttggctcgtcgtgttctcaagatccgtgatttggatcaggagtatgagggcaatgttgaggccactggtgaggacttctctgtcgagccagcggaagagaggaggcctttccgtgccctcttagatgtcggccttattaggactactactggaaaccgtgtctttggtgccctcaagggagctttggatggtggtctagatattcctcacagcgataagaggtttgctggcttcaagaaggatgataagcagctggatgctgatatccaccgcaagtacatctatggtctccatgttgctgagtatatgaagaatctggctgacgaggagcccgagaagtaccaggctcacttcagcgagtacatcaagaaggggattgaagccgatgacatggaagctctgtacaagaaggtccatgcggccatccgtgctgatcctagcatggccaagtcaacaaaggcgcaaccaaaggagcacaagaggtacaaccccaagaagttgacctatgagcagagaaaggccagactcgtggaaaggctcaacgccctcaattcctcgggtggtgtcgatgatgatgaggatgacgagtgaagtgctatcctatttggcgatcagaacttgcgcaatggcatttgttgttccctttactcctgtaacaggcatttttttgtttgagattagagctggatatatggggttcacgatgtgctgccggttgaccttgctctttttatccctggattttgtcagtctttgggctgaaacacaaattttggaatctcctcaattcccagggatgaatggacgtgtagctcacatgggacaagatccgcgtcacgtcttctactgaaaacaaaaaaaaaatctgtactctttgaatgaaacagagccacacagcaaccaga

SEQ ID NO: 5237 - DNA, 1387 bp, Zea Mays
aacacgcggaaacggactgaatgctaacacatttcctttgtgcttgcgttcttattcagttattctgtaatgttgatgacactgaacaacttaaaattcatggtgcatgttcttcgtggctcaaaaaacctccatgacagggcaacaaattttgggctcctaagttttagggggggttcgtcaagacccagaagaccaatgcgtacttcaagcgtttccaagtgaagttcaagagaaggcgtgctggtaagacagactacagggcaaggataaggttgattaaccaagacaagaacaagtacaatacacccaaataccgatttattgtgcgatttaccaacaaggacatcattgcacaaatcgtatctgcaagtatcacgggtgatattattcttgctgctgcatattcccgtgagctgccacgatacggtctagaagttggtctgaccaactatgctgcagcctactgcactggtcttcttttggctcgtcgtgttctcaagatccgtgatttggatcaggagtatgagggcaatgttgaggccactggtgaggacttctctgtcgagccagcggaagagaggaggcctttccgtgccctcttagatgtcggccttattaggactactactggaaaccgtgtctttggtgccctcaagggagctttggatggtggtctagatattcctcacagcgataagaggtttgctggcttcaagaaggatgataagcagctggatgctgatatccaccgcaagtacatctatggtctccatgttgctgagtatatgaagaatctggctgacgaggagcccgagaagtaccaggctcacttcagcgagtacatcaagaaggggattgaagccgatgacatggaagctctgtacaagaaggtccatgcggccatccgtgctgatcctagcatggccaagtcaacaaaggcgcaaccaaaggagcacaagaggtacaaccccaagaagttgacctatgagcagagaaaggccagactcgtggaaaggctcaacgccctcaattcctcgggtggtgtcgatgatgatgaggatgacgagtgaagtgctatcctatttggcgatcagaacttgcgcaatggcatttgttgttccctttactcctgtaacaggcatttttttgtttgagattagagctggatatatggggttcacgatgtgctgccggttgaccttgctctttttatccctggattttgtcagtctttgggctgaaacacaaattttggaatctcctcaattcccagggatgaatggacgtgtagctcacatgggacaagatccgcgtcacgtcttctactgaaaacaaaaaaaaaatctgtactctttgaatgaaacagagccacacagcaaccaga

SEQ ID NO: 5238 - DNA, 1344 bp, Zea Mays
gggagacgtgcccaactacccctgagcaagtgccaccctgcaaatggctggacaacaagaaccaatcggtcgactattccatcagtacaaccagcagtcgtagatagacgccttgaaacaaaagactacccgagagggccagacaatgaaaagcagaaacgatcgcgcacgcacggcagcaggatcggcacacgaaaaacgcagttgcatcgtggcatgcatttggaaatatcgtaatcaaaataaaccagccgccgccctcgtgcgggcctgcgcttgccttggcctcgtcaaaagcaaggccgccccactctaggctcacctgattccttccgccttgtcagcgcagcgatccagacccacccgagccaacaacccatggccgccgcgacgccgcgtctcctgctcgcggtcgcgggcctcaccctcgccgtcctcgccgccgcggtctcgccgtctctggcggcggggccgccggtgctgcaggacccggcggagctcctgcgccttgccaaggagccggccttcgcggactggatggtcggggtgcggcggcggatccacgagaacccggagctgggatacgaggagttccagaccagcgagctcgtgcgccgggagctccacgccatggggatcccctacaggcaccccttcgccgtcaccggcgtggtagcaacagtcggcaccggcggtccgcccttcgttgctctgcgggcggacatggacgcgctgcccttgcaggaaagtgtggagtgggaacacaagagcaaagtccctgggaagatgcatggatgtggacatgatgcacatgttgctatgctgttgggatctgctaagattcttcaggagcatcgtgatgagttgaagggtacagtagttcttgtcttccaaccagctgaggaaggtggcggtggggccaagaaaatgatagaagacagagctgtggaaaacatagatgccatttttgggcttcatatagctgactctgtgcctattggtgtgctggcatccaggccagggcctattatggctgggagtggattctttgaggccgtaataagtggaaagggaggacatgctgcacttcctcatcacactatagatccgatattggctgcctcaaatgttattgtgagccttcagcaacttgtttctcgagaagctgatcccttggactcacaggttgtgacagttggaaagtttcaaggaggtggagccttcaatgtgatccctgattcggtaactataggtggcaccttccgagcctttctgaaagagagttttaatcaattgaagcagcggattgaagagtgtggactgtcgtgcagaggagactgcgag

SEQ ID NO: 5239 - DNA, 1996 bp, Zea Mays
taaagcctgaacagagacgaacgaagaggctactggattcttctctcttctctttctctgagtcgcagcttcggcagctggcggtctggtctacggtctaccactaccactctaccagagaggggatcgatcacacaaacacacccatggcgggctgcgcggcggcgcgcatgttcgcgtacaacgccagcctctgcgcctgcgatccggggtactactactacctcagcagcaacggcaccgcgagctgcatcccgatgccgggcggcgggtggggcgactggcaggtgggctccgtgggcgcgccgaggaaccagagcctctacttcctggagccggtgctctcggtctacgccatccgccgcctcacccagtcccaggccgtgctcctcgaggcgaccctcgcgtcgctcctctgctggatcgccttctgcgccgcagccaggttcggcggccgggacccccgcggggagaagaggctgttccgggcccggtactgggtcagccgcctcgactgcctcttcgacaacagccactgggcgggggatcagcaagtactaaggaaaaggaaaaccgaattgggtggcacattctcagtcgctagcttgatcatcttcactggattattaactgtcctcttgtatcaagccatcaaaaggcgcagccttgagatgcatcgagtcaagccagcaaatgctccggacctgctgtctttcgtgaatgatctcgagttccacatctcaaccatctccagcatgtcctgcactcaagcggttgctcctttgacggtagcaatggggacaccagggttcatggacttcagggtggttcccctgtcaacactgttcacctacagttgcacaaacacgagccacgggccatccattacgctcaggtgcaatggatgccgggtccctccaagagatcactacgtgtcctggcaatttgttgacctgctggggcagccagcaactgctgttggtttccagttcaacctgaccgcaaggcaacatggcaacaatcagcacatgagctttgtgagtggtacaatgaactctgacggttatactgatgatgtcaagttgaagacgttcagggggagggattccaatgttctaaagatccagctgtttcctcagatatacaacaatcttggtaacctgcggctcttgcagccactggttcaagacttcactcaaggatctatgttttctgatgtcagcagcttgaattcctccctgcagaaccctagggatggagtggtgaatactactctctacataagttatctctcagactacattgtggagatcagcaatgagagtgtagtaggcccagttagtgtactcgcaagtattggtggcctttatgccttcagtgtggcaatttgtctctgcctcatgtctcaatgtgaagcaaggataaagaagcttcgtgacgaggataccagaatgctgaaaattctgagcaaacgacgtgctcagcggaattgggataagctgcggaagtttgtcatgtatacctggggtctaagcaacctagacccatctgatagaacctgtcagcagcctgaaggatcagtgatggattctcggcatatgagaagagaagcaattagacaaggaatctaagacgctaacagtactcatagagttcctgatgaaatggggggaaattgacatagaaagagctgcgagcatccaagcagttcaatatagccttgatcaagacttttagacgcaaagttgacatagccacttcgactcattcagatcccttcctgatatccttcatagatggaccttttgaaattttcccctctgcatagtcgtgttggtccctgaagatttgtcaatgcaaagagcaaaaaaaaaaaagtacagaggcagcagattgtccatgtcggttgcacctgaagctgcagagatagacttctggcatgttcctgagccttcgtctcgttcctcttctggaggccagtttggaggcgccagtg

SEQ ID NO: 5240 - DNA, 2189 bp, Zea Mays
accagtactagcagtggcgcaaaaacttttttattacaacttcccggcaggacccgtttcgttcggtccaagtctccaacccctagcagcccacccacatacaattccgtttgcccgggtcctctcctcgcccgcgaccgccgtttgactcccggacccgacccactcccaccaatcggaggcaaagatcgcgtgaaatcccgggtctcgcgcgcccatttcagccggacgctgaccaagacaaccccggcgatccccacacccgcacacacaaagacgcagaccacacaacggctcggcaagcggcagcaagcccagaccagagcgaaaacccaccgttccagcacccgattttgaaccaccgcgacactcccaagtcccaaccaaatctacgacccctccgaccgaaacgagatctccgcctcccctcacggaaaggaaagaaacgctctccccccggggcaaagggaaccgtcgccgcgtcgcggaaaactgaagcggggcacaggaggaggagaggccgaggcagggagagggttccggcggcgatggagcggtacaacccctccgaggtgtacgagctcttcgtgcgccacatgaacaacccgagggtggtggtggacaacggcgcgtgcgcgacggcgacgctggtgcaggtgcacagcgcgaggaagcacggcgtgctgctcgacgcggtggcggccctgtccgaccacggcgtctgcgtccgcaaaggctacatctcctccgacgacggccgctggttcatggacgtcttccacgtcgtcgacgccgcgggcggcaaggtggccgacgccggcgccctgctggcgcgcctcgagtcctcgctctccgccgacgcattgccgccccgcccgccgcccgccgccgcgggggccgggacgcccaccctgctcgagctcgtcggcgccgaccgcccgggcctcctctccgaggtcttcgccgtgctgcacgacctccgctgcggcaccgtcgacgccagggcctggacgcacgccggccgcgtcgccgcgctcgtgttcgtgcgcgacgaggagaccggctcgccgatcgacgacgcggcgcgggtcaggcgcgtggagtccaggctccggcacgtcctccgcggcggcgcgctcggcgcgaggatggtccgggcagacgcctccgccgtcaacatggaccggaggctccaccagcttctcaacgaggacggggaggccgggagccgcgccgaccgggcggagtcggaggcggaggcgcccacgcccacagcggtcgccgtgcaggattgggtggagagggggtactcggtggtgacagtgagctgccgcgaccggcccaagctgctcttcgacgtcgtctgcaccttgacagacttggattacgtggtgtaccacggcacgttccacacagacgacgatcacgcccgccagggagtgaggctggagctgcgcatcaccgaccgccgcgggctgctcgcctacgtcacgcgtgtgttcagggagaacagcctctcggtcacgcacgccgagatcaccaccagggggcgacatggccatgaacgtgttccacgtcaccgacgtggccggccgacccgcggaccccaagaccatcgacgaggtgatccagaggatcggcacggagagcctccgggtggacgaggagcggtggccgcgcctgtgctcgacggagggcgacgctggccgcggcggcggcggtgcggggatcttctcgctcgggagccttgtcaagaagaacctggtcagtcttggcctcataagatcctgctcgtgaggacgcgatcaatggggggcatgtgctccatgggatccttgtgtaaatatgggatggtgcatgggttagtttgtaaatggagtaggggtttaaatcgccgtttctagttctaggtttaagttgccacgtgtacatagtagcaagtggagatggaaggttttaaaagttgctggtcggcaacagcaaggataatggacctctctggtgggtcgtgccatgtgtctatctaacttttacgtaagaaaaagtattatacatggatcgctgaaacagagtacttgtttcgcaagaccaaaaatggatcaacaatactatacttgacccattcacctcaaaaggtcaaatctgagatcacacaacggaatagtgcacggagtatgacggttggtttg

SEQ ID NO: 5241 - DNA, 2248 bp, Zea Mays
accagtactagcagtggcgcaaaaacttttttattacaacttcccggcaggacccgtttcgttcggtccaagtctccaacccctagcagcccacccacatacaattccgtttgcccgggtcctctcctcgcccgcgaccgccgtttgactcccggacccgacccactcccaccaatcggaggcaaagatcgcgtgaaatcccgggtctcgcgcgcccatttcagccggacgctgaccaagacaaccccggcgatccccacacccgcacacacaaagacgcagaccacacaacggctcggcaagcggcagcaagcccagaccagagcgaaaacccaccgttccagcacccgattttgaaccaccgcgacactcccaagtcccaaccaaatctacgacccctccgaccgaaacgagatctccgcctcccctcacggaaaggaaagaaacgctctccccccggggcaaagggaaccgtcgccgcgtcgcggaaaactgaagcggggcacaggaggaggagaggccgaggcagggagagggttccggcggcgatggagcggtacaacccctccgaggtgtacgagctcttcgtgcgccacatgaacaacccgaggtgcacagcgcgaggaagcacggcgtgctgctcgacgcggtggcggccctgtccgaccacggcgtctgcgtccgcaaaggctacatctcctccgacgacggccgctggttcatggacgtcttccacgtcgtcgacgccgcgggcggcaaggtggccgacgccggcgccctgctggcgcgcctcgagtcctcgctctccgccgacgcattgccgccccgcccgccgcccgccgccgcgggggccgggacgcccaccctgctcgagctcgtcggcgccgaccgcccgggcctcctctccgaggtcttcgccgtgctgcacgacctccgctgcggcaccgtcgacgccagggcctggacgcacgccggccgcgtcgccgcgctcgtgttcgtgcgcgacgaggagaccggctcgccgatcgacgacgcggcgcgggtcaggcgcgtggagtccaggctccggcacgtcctccgcggcggcgcgctcggcgcgaggatggtccgggcagacgcctccgccgtcaacatggaccggaggctccaccagcttctcaacgaggacggggaggccgggagccgcgccgaccgggcggagtcggaggcggaggcgcccacgcccacagcggtcgccgtgcaggattgggtggagagggggtactcggtggtgacagtgagctgccgcgaccggcccaagctgctcttcgacgtcgtctgcaccttgacagacttggattacgtggtgtaccacggcacgttccacacagacgacgatcacgcccgccaggagttctacatcaggcggttggacgagcggccaattagctcggcgaccgagaggcggcgcgtgatccaatgcttggaagcggccatcgagaggcgcgcatccgagggagtgaggctggagctgcgcatcaccgaccgccgcgggctgctcgcctacgtcacgcgtgtgttcagggagaacagcctctcggtcacgcacgccgagatcaccaccagggggcgacatggccatgaacgtgttccacgtcaccgacgtggccggccgacccgcggaccccaagaccatcgacgaggtgatccagaggatcggcacggagagcctccgggtggacgaggagcggtggccgcgcctgtgctcgacggagggcgacgctggccgcggcggcggcggtgcggggatcttctcgctcgggagccttgtcaagaagaacctggtcagtcttggcctcataagatcctgctcgtgaggacgcgatcaatggggggcatgtgctccatgggatccttgtgtaaatatgggatggtgcatgggttagtttgtaaatggagtaggggtttaaatcgccgtttctagttctaggtttaagttgccacgtgtacatagtagcaagtggagatggaaggttttaaaagttgctggtcggcaacagcaaggataatggacctctctggtgggtcgtgccatgtgtctatctaacttttacgtaagaaaaagtattatacatggatcgctgaaacagagtacttgtttcgcaagaccaaaaatggatcaacaatactatacttgacccattcacctcaaaaggtcaaatctgagatcacacaacggaatagtgcacggagtatgacggttggtttg

SEQ ID NO: 5242 - DNA, 1623 bp, Zea Mays
ctcgacacgaacccaacccagtcgaaccacctcgccagtgagcgcctccccccgtcctctttccctgctggccagaactccgaatgaaatcgctgctccaccagctttctttaccttcaggaagcgagccggtagcatcaagctagatcgcggagaagctcctcgtttcccccatcggcgctgctctggcggggagaagcgtcctctcacggcggccgggaagaccaatccgcgccgccagtccctgcggcggcttccgtgaggtggtcttggctcctggggcggcgtgttcgtggtggccggcgagatgagcagccacgcggttggaacaagcaacggcggatccggggatgcggccgccgggggcgcggccaggaggaacaccaggatgcccaaatgttgttgagattattgatcggtatgatgaggcatgtgtgccagttaacatgactgagaacaagcttgcttacatccagaatgagaccatatccaaagagtgcataaggaatcttacggttacaaaatatatgaagcagcctatttttgtgtattatgaacttgataacttctatcagaaccataggagatatgtaaagagccgaaatgatgcgcaactaagagatgctagtaaagctaaccagacatccgcttgtgaacctgagaagaccacagctaatgggcaaccaattgttccttgcggccttattgcttggagcttgtttaatgatacatataatttcactcgtggtaatgagaacttgacagtggacaagaaagacatctcctggaagagtgatagggagcataaatttggtaaagatgtctatccgagcaacttccagaatggtgcacttaaaggtggagcaacacttaacccaaagatcccgttgagtgagcaagaggacctcattgtttggatgcggaccgcagcacttccgacgttcagaaagttatatggcagactatactttgacctcaaggagaatgacacaataacagtgagattgaataacaactacaatacatatagctttggtggcaagaaaaagctggtcctctccactgcaacctggcttggggggaagaacgattttcttggctttgcataccttatagttggtgggctctgcattttcctggcatttgcattcaccttgctgtacttcgtaaaaccaaggaaactgggagaccacaactacttatcctggaacagacgctaggatgtttcggaacaccaagtgtccgtactactcgaaatgtagcttgtatgaaatgaaatgctctgaaccagaaatgtcgatgggcataagcaagcatggttcaggaaagaacttcatgtatattttttacgaaggggtctaggtggctacgttatttttgtttcttgtgttctttagtgtagcactgaacaggagaataccaattgatctctattagcttgcttcgtggtacaagcactctaaatggttgactgtgtggtgttgacgctttggctgccgaagaataccaattaatgatgttggttgactgtaatatcctcaagtgggaacagtaccaacttctgtataaattgattaccgtgtgatgtttgtttctccactaccattatagtacacgggtgcc

SEQ ID NO: 5243 - DNA, 2935 bp, Zea Mays
ctcgcattccgaaacccaccctccgcctcaagaagccaccgctccgacgagccgtgggtggcagaggacgcgcagagcaagcctcaccgctgcaggcgggcgcgcggacagcgtcccgccctccccatggagcccgacgccgccgggtgcgacgtgtccgcggacggcctcatcgccgagctgcttgacatgggcttcgagttcgacgccatcagcgcggcggtcggcgcggtcggcccgcgccgcgcagaggtgcttgaggtcctgctgggcgggtcggacgcccgagcggggcaggcgaggcggggagggggagtgccaggccgtcccgccttgtctacggcgcagccacggccggctggcaggggcatgaaattgagtaaccctagggggaggcttaggcagtccagcatcacggaccacgttgcctcagctactggtggcggaaaggaatctggtcgggaagcgaacatttcgtttccttgttcatcggctcctggtggtcccagggtaatgccagtggctgttgatttttgttccgaaccgggtccccaatctcagtctttggttgagaactcgacagtggagtccgaccaaatggacagaattagtgctgttctgcaaaagcattttgggttttcctgcctcaaagcattccaaaaggaagtcttggatgcttggtctgctcacagggattgtattgtcctagcagccacaggatcaggaaagtccctctgttttcagatcccagctctattaacaacaaaggttgtggtggtcatatcacccttgataagtctaatgcatgatcagtgcctgaagcttgcaaatcacggggtatccgcatgcttccttgggtcagggcaacctgatagccgtgttgaaggtaaagcgatggctggcatgtataagattgtttatgtttgccctgagacaatattaagattaatggaaccgttgaagaaacttgcagaaaagccagggattgcactttttgccattgatgaggtccattgtgtttctaaatggggccacgattttcgacctgactataggtctgctcttgtgtttgatatcctctgttaaaggagattatctgcgttgagagaaaatttcagttccagcaaattgaagttcttgaagcatgacattccgttgatggcattgacagctactgcaactattcccgtacgagaagacattactaagtccttgaaaatgtcaaaagatacagcgattgtgctaacctctttttttcggccaaatctccggttcagcgtaaagcacagcaaaacttctgcctcatcatatggaaaggacttccaagaactgataggggcatataaggcttcaagggaaggacagcaaattcttcatggaattgacactgactccgaaagcagttcatatgaatctctgaatgatagtgcatcagacgatgaagatgcaaatgttatttctgcaaaccacggggataagaatgttggaaaaacaaaaactagcatgactttggtagaagaaaacattgaaaatgagttggatttgtatcaaggagttgataattttgatgtttcatgtggagagttccttgaatgttcacagcctgagagctccaagtctcctgctcaatccaatcaaactagctcctcagattgtggtgttcaaggttctacaattgtttatgtacccacaaggaaacaaaccgttgaactagctaacttcctttgcaaatctggtctcagagctgcagcatataatgcaaagatgcctaaatcccatttgaggcaagttcatcagcagtttcactgcaacgacttagaggttgtggtggctaccatagcatttggcatgggaattgacaaatcaaatgtcaggcgaattattcactatggtttaccgcagagtttagaagcatattatcaagaagctggccgtgctggtagagatggaaagctgtcagattgcactctatattataattttttgagaacaccgacactccttcctaataaaagaagtgaggagcaggcaaaggctgcatatagaatgctacgtgattgttttcactattctctgaatacttcaacatgtagagccaaaatattagtgaagtactttggcgaagactttggtcctgatggatgtcgcatgtgtgacatctgtactaatggccctcctcaaatgcatgatttcaaggaagaagcgattgtgttcatgaatgtgctccagggtcgaagtcagagtaccccattacagctctggcaggagagggtttggcgaggcacctaattttagaatggttgtcagtcatataagggaaaagcttcctaggtttgctgcgactgacaagatatggtggcaaggtctttcccgtatattagagggcctgagatacgtagaggaagcagctgaaactcctcgtgtctccatgcagtaccctgaactgacggaggacggattaaagtttcttagtagctcacagtcggaggcacctctgtatgcatacccggacgcggcaatgctcttggcaatgaaggagccaaggcccttctctggtttctccgattggggcaggggctgggccgatcccgagactcgccggcagcgtctggcgggcaagaaggccgggagaagaaagcggaagtggcgctcccgggggcggcagcagcagccgggcggcttcaccacggcgagggagagactgactgcgatactggcaaagaagaaaaaaaggtgatgctgtgcaaggttggtggtagtaggattatattacatgtatcgtttgctgttatcgtcgaactttatatgagaatctgatagaagcaaagatttttttttgggccattgtgcttctatcgtatggtatgatgatgggttgggaaagaaaacagaagcccatgattgatgaggataacgagcgagcactgtgtcggct

SEQ ID NO: 5244 - DNA, 2964 bp, Zea Mays
ctcgcattccgaaacccaccctccgcctcaagaagccaccgctccgacgagccgtgggtggcagaggacgcgcagagcaagcctcaccgctgcaggcgggcgcgcggacagcgtcccgccctccccatggagcccgacgccgccgggtgcgacgtgtccgcggacggcctcatcgccgagctgcttgacatgggcttcgagttcgacgccatcagcgcggcggtcggcgcggtcggcccgcgccgcgcagaggtgcttgaggtcctgctgggcgggtcggacgcccgagcggggcaggcgaggcggggagggggagtgccaggccgtcccgccttgtctacggcgcagccacggccggctggcaggggcatgaaattgagtaaccctagggggaggcttaggcagtccagcatcacggaccacgttgcctcagctactggtggcggaaaggaatctggtcgggaagcgaacatttcgtttccttgttcatcggctcctggtggtcccagggtaatgccagtggctgttgatttttgttccgaaccgggtccccaatctcagtctttggttgagaactcgacagtggagtccgaccaaatggacagaattagtgctgttctgcaaaagcattttgggttttcctgcctcaaagcattccaaaaggaagtcttggatgcttggtctgctcacagggattgtattgtcctagcagccacaggatcaggaaagtccctctgttttcagatcccagctctattaacaacaaaggttgtggtggtcatatcacccttgataagtctaatgcatgatcagtgcctgaagcttgcaaatcacggggtatccgcatgcttccttgggtcagggcaacctgatagccgtgttgaaggtaaagcgatggctggcatgtataagattgtttatgtttgccctgagacaatattaagattaatggaaccgttgaagaaacttgcagaaaagccagggattgcactttttgccattgatgaggtccattgtgtttctaaatggggccacgattttcgacctgactataggtctgctcttgtgtttgatatcctctgttaaaggagattatctgcgttgagagaaaatttcagttccagcaaattgaagttcttgaagcatgacattccgttgatggcattgacagctactgcaactattcccgtacgagaagacattactaagtccttgaaaatgtcaaaagatacagcgattgtgctaacctctttttttcggccaaatctccggttcagcgtaaagcacagcaaaacttctgcctcatcatatggaaaggacttccaagaactgataggggcatataaggcttcaagggaaggacagcaaattcttcatggaattgacactgactccgaaagcagttcatatgaatctctgaatgatagtgcatcagacgatgaagatgcaaatgttatttctgcaaaccacggggataagaatgttggaaaaacaaaaactagcatgactttggtagaagaaaacattgaaaatgagttggatttgtatcaaggagttgataattttgatgtttcatgtggagagttccttgaatgttcacagcctgagagctccaagtctcctgctcaatccaatcaaactagctcctcagattgtggtgttcaaggttctacaattgtttatgtacccacaaggaaacaaaccgttgaactagctaacttcctttgcaaatctggtctcagagctgcagcatataatgcaaagatgcctaaatcccatttgaggcaagttcatcagcagtttcactgcaacgacttagaggttgtggtggctaccatagcatttggcatgggaattgacaaatcaaatgtcaggcgaattattcactatggtttaccgcagagtttagaagcatattatcaagaagctggccgtgctggtagagatggaaagctgtcagattgcactctatattataattttttgagaacaccgacactccttcctaataaaagaagtgaggagcaggcaaaggctgcatatagaatgctacgtgattgttttcactattctctgaatacttcaacatgtagagccaaaatattagtgaagtactttggcgaagactttggtcctgatggatgtcgcatgtgtgacatctgtactaatggccctcctcaaatgcatgatttcaaggaagaagcgattgtgttcatgaatgtgctccagggtcgaagtggcggtgaaactgatgagatgatttacagcagagtaccccattacagctctggcaggagagggtttggcgaggcacctaattttagaatggttgtcagtcatataagggaaaagcttcctaggtttgctgcgactgacaagatatggtggcaaggtctttcccgtatattagagggcctgagatacgtagaggaagcagctgaaactcctcgtgtctccatgcagtaccctgaactgacggaggacggattaaagtttcttagtagctcacagtcggaggcacctctgtatgcatacccggacgcggcaatgctcttggcaatgaaggagccaaggcccttctctggtttctccgattggggcaggggctgggccgatcccgagactcgccggcagcgtctggcgggcaagaaggccgggagaagaaagcggaagtggcgctcccgggggcggcagcagcagccgggcggcttcaccacggcgagggagagactgactgcgatactggcaaagaagaaaaaaaggtgatgctgtgcaaggttggtggtagtaggattatattacatgtatcgtttgctgttatcgtcgaactttatatgagaatctgatagaagcaaagatttttttttgggccattgtgcttctatcgtatggtatgatgatgggttgggaaagaaaacagaagcccatgattgatgaggataacgagcgagcactgtgtcggct

SEQ ID NO: 5245 - DNA, 1484 bp, Zea Mays
acgaaaaacaatctacggttgccaggtctgcgacgtcagtgccgacgaactcatggctcgcgagaggcccgtaaaaacatgatagccagatctgcgacgtcacggctgtcgccagtgatcgccattcgccaccctctccgttccattccaatccgttcagcggtcagcggaacatgatacgcctgcttgccgcgcttgcattgaggggagttcggggagcggccggtgcggaaggaatcgacacagaggaattcattctgcagttcagttcacatggctgctgaatcagagaacggcaactgcaaagcttgggcagcgagagatccttctggagttctctcaccacacagttttaaccgcagagcagtgcaaagcggcgatgtttcgctgaagatcatatactgtggagtctgttatgcagacgttgcttggacgcggaataagctcaatgattcaaaatatcctttggttcctgggcatgagatagctggagttgtaactcaggttggtgcagatgtcaaaggctttaaagtgggtgaccatgggggttactccactcacattgtagtccatgaaaggtattgcttcaaaatacccgatggctaccctttggcgaaggcagcacctcttctgtgtgctggaataaccgtgtatactccaatgatgcgacacaacatgaaccaacctggaaagtcacttggggtcattggtcttggtggtctgggtcacatggctgtgaaatttggtaaagcatttggtcttaaggtcacagttttcagtacaagtgaatcaaagagagatgaagccatcaacctccttggagcagataattttgttatatcatcagacacacagcaaatggagtccctgaagaactccctgcacttcataattgacactgcttccggtgaccatccatttgatccgtatttctctctccttaaggttggtggtgtgatgacattggtaggttttccaagtgagatcaaaatgcatcctgcaagccttatacttggtgcgcggaccttgtctggcagtgttgttggaggtataaaagacatccaagaaatggttaacttctgtgcagccaacaatatctatccggagattgagatcattaagatagattatatcaacgaggctctcgcgaggcttgttaatcgagatgtgaaataccgctttgtaatcgacatcgagaactccttcaagtagcgtgctagtgcacatgctctcgtctttctgttagtgttcaacagttcaagagctattacaaatgtgagtcatgccaaataaacttgatgtaaacaaccataattgaacagcaaggggaaacaggtatattgtgataatgaagtcgctctatgaatattcaactgcagtgttctctgacaaataatagcaactagtctgtctgcgatgtctaaatcagcaggtgtgctcttttacacgcaacagtgagtttgaactttgaatacactcctgcc

SEQ ID NO: 5246 - DNA, 1733 bp, Zea Mays
aggtaccggcaggccattggccacagcccgctttactcacgacgcgacgaaccgcgcactccttttaaagctccacgttgcggtgtcctcacgggtcacggcgaccgatgccgctgctgctgcgcggcgcctccctcctccgcctctgccagtgtaccagtgggctctcaagtgtgaaatttagttcaagagtaacggtactagtgaatctcaacgccatgagggacggaatgcgggccacatattcacgtagagctgcctctaagaacagtgaggtcaagaaagatgagcagccagtcacagagaaggaagatgctgctgaaactgatttggaggtggagcgagggaggagcagcagccctagccagctccaatcaatgactgtcaaggagctcagggagctcacgaggaggaggggtatttctgtgaaaggtaccaagaaagatttagtatcagcactgatgaattctatggccgtggaagcaaatggtgaagggggaaagtcatccgttgagctggttagccccttggaagtacctttgaaaagaaaaggtggtgcttctgttgtggttgaacaaaaactagaaagttctgagatcatttctgaaacacctaacaagaaaagtagaacaaaacaaaaatcaagcaagaacaccactcgtgaggaaatttcggtgactaatgtcaagctaagtaagactgttgtccagaaggaaacagttgccggattaagtcctgatgatgattcagagccttggactatactcgtgcataagaaaccacaagccagctggattccatacaaccctaggactatgaggcctccacctctaagcaaggatacacgggctctgaagattatgtcatggaatgtcaatggattgaaagcattgctcaaatcaagaggcttctctgtgcagcagttagcacagagggaggactttgatgtgctttgcctccaagaaacaaaaatgcaggagaaggatattgaagttattaaggacactttgcttgatggctacacaaatagtttctggacttgcagtgtgtcaaagcttggctattctggcactgcaataatttcaagagtcaaaccactgtcgatcaagtatgggcttggtatatcagaccatgatactgaagggagggttgtgactgtagagtttgatgacttctacctgttaactgcttatgtaccaaactctggtgatggtctaaaaagattgacttacagggtcacagagtgggatccatcccttggtaactacatgaaagaattagagaaatcgaagcctgtcatactaactggtgatcttaattgtgcgcatcaggagattgatatacatgaccctgctggaaatcgtagaagtgcaggcttcacaaacgaggaaagagaatcatttgggaccaattttttgtccaaagggtttgttgatacgtttcggaaacagcatcctaatgttgttgcctatagttactgggggtacaggcataatgcccggaagacaaacaaagaaaaagtgcatgattcatatattcttccggacatctctgccagtgatcacagtccccttggtctcgtgctgaagctgtaggctgtatcacacaggctatgccaaacattcagtctgaagcctgtgccatatttctcagacagcgatgtttattcctgatggtttctggtccgttcttacattttttcgtgcttggtctgccaatttcgtgcatgatct

SEQ ID NO: 5247 - DNA, 2094 bp, Zea Mays
tttcattcccaccttcttccttgcccccagcgtccagcgacggcggcggcgacgacgactcatcgcagcgggggaggacggatggccgcgtcgtgcggcactccgagtccggctaagcggccccgtcactctgacgtcgcctcctccggcggcgactctgattctgactctgacggggacctcgtcagtgacctcagggagatcgtgtgcctgctgcggcttatcaagggtggggccaacaaggacgggcagaagatctgtgagcaggtcattgccaggtgagatgcaaacctgtaggaatccgaatctccttgcgactgcaaacaattgggctcatcgcataggtattcgttaatgtcaatgttttgttgcatgatgctgatgacttacgattgcaccgaccattggcctgtatgattacattcgtcagtttttgttgcgtttacatattgctggtgaaatgttgtcctatctgccgtctgcagtcaatgcaattgtgctaccatttaggcttcaatgcagttttggcaagggaactcgtaatggcccgcgtttttttgtagtgaatggatggaattaagacaatatttttgataattgtgctgttctgtgtatggagctttatgtttcatggattaacctttggtgttttgttgatgttgctgtgccatatagcttgtggtctgaatttcttcctaaagtagtattactcttcttgcaatggaggtccggttcggccctcgtcccaataatatgatagttgtagtcgcataattgtaagagtgagtttatccatgtgacttgtcgaatttttctctgctgagtaggctaaatgcatggtctgatgaaatctggaggtcctattccttcatctgtatcactacagtttgttgttaattgtttcttaacctgtagtgtggcagcagatattcagactatgctagaagaaacccaactgaaatttgaggaggaaagacagaattcgttaaaagtactgtctaacacttccaaagagcagtgtgagagttcactgaacgaagagtacagcaagtttcaggaaacatatgatacgttctgtaaagaaaaggatgctcacatgcagactttcagagacctgttgtcaaaagttgaagttgaaaagaagaaattgcttgagaagtacgaacatcatatggaggaggagaccaacacattatcggaacttgacgaaacaatctcagagaaggtaacacatgcggaacattctgtcagaagggtgaaccaggatggcaagtcatttatcgtctttcgcaagtctactggcttgtttcttgattgtggatctgatgatgattttgaccttgatgagtggcgctgctaataataattcatataacagataaatggaagcccttagttctttcttggcctttcctcttttttttccccttacctggcggactttagtagcatacaattttattgttactatagtctagtagcgcattgtattagccttcttccagattagtttgttcgcaatcctgaatttggtatcgagctggctggatacgtacagatgtattctgttatttttccactttgaaagcagatattcaaaaggatcatcgatctgcaattattatagtttgctcaagaaactattattattcaatgacatcattgtaagaaacaaaattgatattgacgtctgtctgatcagcccattctaagggcatgtttgagcacgaatggtctatgcattttacaggaaattgttcattttttcaaacacacacacgcgcgcgcgcaagaacaggggaaaaaatctccattacaaaagtaggcctagacatatagtaatattcagtatctttagcacccaagctctcctttgttaaatgcttagtacagtagtccgaattccatccatacagcgccatcagctgattgttcaatgccgaaaaccagggagctacgtgtggtccaaactaggatatgttcacagctaaaagcatttaaaaaacagcctaaaagcatttaaaaaacactaacagccgaaaagtattaaaagcagactttaatcagatcgtaacatcatgttcacagctcaat

SEQ ID NO: 5248 - DNA, 644 bp, Zea Mays
gcggccgccgctgaggtctcctatattaggaggtgctctcgctcttggaaagagcaagaccatgccgggcgagctgacttcatgaaccggcgagcccccctcgacgatatcgacaaccttgttagtgtccgcccagtcgaaggaataggaaactgtgatgcgatcaactggcaatcaattgcatctatcaggtggagacgtggtggttctatatatgcctctatctacaaggatgtccccatgatggttagcctgtctggtcggtttcatctggagagaggcattgaagagcgcctaggcaaagagtttatggatagaataaacaaagaaggctacatcgatgtcacaagcaaatcagactttattcccaggttctttacaattcatggttcagctgacttgatcatacgagtggaagatgcgtacgagtttgcatggcttataccaaactacatgttgcatgtcatcgagggagcaaatcactgctacactgctcactgtagagaacattctgatgacgtagtagaagccatcacatccagtgagtgatatctcaaagtagtgcaaagggagagttaccaagttgatcaatttttttctagaaatttcactacagccggttatagctgccaatgaacgtgcat

SEQ ID NO: 5249 - DNA, 1541 bp, Zea Mays
caacattagaatttagaatgtgcttgagcatccatgtatcagtgaagcttggttcccctgtctgattgctagaactataactattttgggatggtgtttcttcaatattccttacaccttacatataagaccacctgtgaaggtaccattgtttaacatactgaagaagttcgatggtgagacagttacagaggttgtccgaccttccattgcccgaatgaggtaccgagtcactagactgccgaagtatctgatccttcatatgcgaaggtttaccaaaaataacttttttgtcgagaaaaaccctactctagttaattttcctgtgaagaacttggagttgaaggactacattccattacctaagccgaaagagaatcataagctacgttcaaagtatgacctcatagcaaacattgtccatgatggcaaacctggcgagggatgctacagagtatttgtacagcggaaatcagaagaggcctggtatgagatgcaggatctccatgttactgagacccttcctcaaatggttgctctctcagaaacctacatgcaaatatacgagcaacacgaatgagtaatggacagtggtcatcctatggtcagtctgtttgcttaacagagatcagaatatcacaaactaatccttatctttggagcagctttttttggggcagaattttgtagtatcttcacacatgtccagacttaatttcttgacaagcagagatcgagggaatgtacttgggtcatcaagtcaatgctatggaggctgaaacatcgtgaattgtttttagagctgctttgatagaggaacgatttcccacatatttcatgtttgtagtgcagcactgcagcctgtatctgttgtgaaccggtacgcttccaaccgttatcagcaaacttttgaagctcataaagtataattttttatgctacgtgctactcatttctgctttttttttgctacgctttaggtagagcagggttccagctgtatggtttagtattgcttttcgaagccttgagtttgtttctgtacaggaccggcaaatcacagtttcaaacaattgcggcagggtggttctggtccagttgtttcaaattagcttatccaccgatcaaattttgagcattaccaaagcaattaaagacgtattagttgactgacgaggaggcgggctcttctagaaccgagtcagcacttgcacttccagccctggcaaccttcacgacaagccaccaatgtttgtttgatccattgataatacacggcattaggatatcttaatcgttgtcacgatgatttggagcctctttggtagggcttcagctctagcttttttctgaaaaaagctagccctggcaaacagcttttcttaaaacggcttgctacgaaaatcgccaaaaaaatagagttgttttctatactacagagaagaaactataaatattagtttctatggctctagctctgacactaacactttaatacaggaaaataacttttgctttaagataaatcgtttctgacaaat

SEQ ID NO: 5250 - DNA, 2017 bp, Zea Mays
tacgcaatgggatttagcattgtttgactcctggccgggttctgtgggctctcgtccatcgtgcccgtcgtcgtctgcagagattcgaaacgaaagtgagagagcatcgcagaggaaaggaggcacccttcgctggctcgatcgccgctgtgttcacgcggaggaactagatcagcacgcgaaagccaacagcgcagtcgaggaggaagcgagcagtccaggtccaggatggcggcggccgtggcgtcgctgtacaggcgggtcctcccgtcgccgccggcggtggacttcgcttcgccggagggcaagcgcctattcgcggaggccctggcggcgggcaccatggagggtttcttccccctggtctccgtcttccagacgcagtcggagccggccttctgcggcctggcctcccttgccgtcgtgctcaacgcgctcgccatcgacccgggccgccgctggaaggggccctggcggtggttcgacgagtccatgctcgactgctgcgagcccctcgataaggtcaaggccgagggcatcaccttcggcaaggtcgcctgtctcgcgcactgctccggagccgacgtccaatccttccgcaccaaccgggttaccatccacgacctacggcggcatctcatccgatgcgtctcctcgcaggactgccatctgatcgcctcctaccacaggcggcctttcggacagactggaactggtcatttctccccaattggtggctaccatgccggacaggatatggtgctcatcttggatgtcgcccgtttcaaatatcctccgcattgggttccattgcaacttctttgggaagccatgaatacaactgatgactcaactggacttctcagagggttcatgcttatatcaagaaaggttgcagccccttcattgttgtacacagtgagttgcagagatgaaaactggaaacgcatgtcaaaatattgtgttgaagatttaccgagtcttctgaaggcagggaacctagacgatgttccagcgcttctgtcccgtttaattgagtctcttccagctgacgctgaatctttgatcaaatgggttgtcgaagtcaggagaaaagaggagggtggaccaagcttaaacaaagaggagaaagaaaggcttttcttgaaggaaaatgtactaaagcaagttcgtgataccaggctatttaccatagtccatgatttgcagtatgctaataaaccatgttataattgctcatcgtcgagcgaagatgattcccttactaggattgcagccgttgtgtgctgtcagggagctgcaatgctatcaggctccgtggtatgtgaaggcagtgaacaaggtgttgatatgcttttaccaatgtcttcacctggtgccagttcatgcaattcaaacttgaagagcaatgccgtcaaatatccatcaagcgtggatgttctaactgttcttctgctggctttacatcccaacacgtggttgggcatcaaagacgagaagctcaaagctgaatttcagactcttatttcaacagacagtctacctgatgatctgaaacgagagatattgcacctaaggcggcaactctactatctaaaggcctgtaaagaagaggaatgcgaagatgccgagcaaccatcgcctaagcagcagtgctgaagtggcagtgtgcccatgtcgttaattttacttgtaagaaattgatgtgaagggaaaagttaccagagggtatagactatgaaatggtcagaattatgatgatagtagtgtagtgatgattatcttgttgttcagttctggtgttgtttccttctacgagaggctattacaccctccttgctcaaggaggtgctgatgttctttttctagatgatgattaaaccatccatccttgctttgtgctaaaccttgtcatattctctttgcattgaataaatccctcgtatcgtatcctatcatctgtatctacgaatgtactgtgcgtgattcattcataactaaattgctctagaaacgg

SEQ ID NO: 5251 - DNA, 2088 bp, Zea Mays
attacaatgagttgccactagatatacgcgaagcctctcccacctcatctgcctcgcgtgcggcggcggcgactccacctggcttgcgtcctcccgttttccagccagcaagccagactcctcccctctccgaagactccgatcgtccggattcatccagatccgggcgttctgagtcctgccgaggctctagatcgcgtcgcgcacgatgccacgcgacctgtcgcggtcgcggtctccgccgcgccgacgttggcggtcgccgtctcccgcgcggtaccgcggccggagggggcgcagggaccgaagccccagtcccatccgtagcaggtccccctatcgctcctcgtataggtgaccacacctcccgttacacgcagaaatctggcgagtcttcgttttattttttgggggtttgtactgtaaaaaaaagaagtgaggcgatgctgaccgccttcattgaaattttgtactattgcttgcttgatggaaacggggcttggtgctcttatgattatttgatctatcaactgtttgttggtgttactgttagaggtagccagcgcggtagtatattgtgctatgtcatatctgcatgaactatggtttatgaatgtgcaaatttcataatacttcggagcgatcaagatttctgatttccaaaggaagaaaaatgcttcggattcttttgcattacagagttagaataaaaatacttcgatgcagcatggaatatatcagcagatgaagcttagatatagttatgccatgttttgcactacttgcctgtacagactaacaagagttgctttcgtaaaacgcatggaatctacaaagcttttactctgtgctgtattgctgtggaatgctccacccctgtaacagtgtctaaggtaactgcttttgcccatgttttagggcttcaggagctaatgaaggaggagccctttgccttccccaagaaggcacaagagccgttctccgtctcctaggaggcgcaagagtccgtctccatcacaaaagcgttacagaagaaagagaagtccgagtgtcactagctctccagtcgctgcatctcagagttcccaccttgggttggcagagaataagaatgttattgatacacaaaggctagaagaagaaaagaaaaggctttaccgaagggagctactgctatagttccacttgttatatttgatgatgcaattggtgatcatttatctactcttgatcagttttgataattcgtttttggatctggaacgaactagaggcgccaaaaggaagttgaactgagactattagagaaggagacggcaaaaagagttgaacaagctattaggaggaaggttgaggagagtctaaattgtgatgaaatcaaacatgaaatacatcgtcgaattgaggaaggacgaaagaggatacatgaggaggtagcaatccagattgagaaggaaaaggatgcagctttaaatgaagccaagctgaaagtggaacaagaaaaaaagaagcgggaggagctagagaaaaaacttgaagaagaacgaaagaaagctgaagaggcgttgatgaaagaagcgttggaacagcagcagaaagagctagagcggtaccaggagttggagaggcttcagaaagaaagagaggaggccatgaaacggaaaaaaatggaggaagagcagcagaggcaaaaccagatgaagctgctgggcaagaacaagtcgcggcctaagctgtcgtttgcttttgggatgaagtagcgttcgattcaccgaacgaaattagtgctttagtatactgtaaccgtgtagtgtagtacctctgtatgaaactgcccatttctaactctggcagacaaattgcgatgtcataaatgctcctgatctgcttcgtaagttgccggctcttggtggatgtggtttcatctgcttcttgctgttcagttggcgttgccttgcgagaagactgccagagaagaatccggttggtttgatcttgcatgtcaccaagatactatctccgtttgtgttgccccctagttcagcctgttcatatttgaactaaaacgtgataaataaaaaaaacgga

SEQ ID NO: 5252 - DNA, 4086 bp, Zea Mays
attacaatgagttgccactagatatacgcgaagcctctcccacctcatctgcctcgcgtgcggcggcggcgactccacctggcttgcgtcctcccgttttccagccagcaagccagactcctcccctctccgaagactccgatcgtccggattcatccagatccgggcgttctgagtcctgccgaggctctagatcgcgtcgcgcacgatgccacgcgacctgtcgcggtcgcggtctccgccgcgccgacgttggcggtcgccgtctcccgcgcggtaccgcggccggagggggcgcagggaccgaagccccagtcccatccgtagcaggtccccctatcgctcctcgtataggtgaccacacctcccgttacacgcagaaatctggcgagtcttcgttttattttttgggggtttgtactgtaaaaaaaagaagtgaggcgatgctgaccgccttcattgaaattttgtactattgcttgcttgatggaaacggggcttggtgctcttatgattatttgatctatcaactgtttgttggtgttactgttagaggtagccagcgcggtagtatattgtgctatgtcatatctgcatgaactatggtttatgaatgtgcaaatttcataatacttcggagcgatcaagatttctgatttccaaaggaagaaaaatgcttcggattcttttgcattacagagttagaataaaaatacttcgatgcagcatggaatatatcagcagatgaagcttagatatagttatgccatgttttgcactacttgcctgtacagactaacaagagttgctttcgtaaaacgcatggaatctacaaagcttttactctgtgctgtattgctgtggaatgctccacccctgtaacagtgtctaagaaggaggagccctttgccttccccaagaaggcacaagagccgttctccgtctcctaggaggcgcaagagtccgtctccatcacaaaagcgttacagaagaaagagaagtccgagtgtcactagctctccagtcgctgcatctcagagttcccaccttgggttggcagagaataagaatgttattgatacacaaaggctagaagaagaaaagaaaaggtgggaagtatctgcttttctatgcagtctacattatttcttctacaaacccagctattcactgttgcaccctttctgtaactcttccgtgatgctaacaatgaaattctactaatctagttgctgtttgcaccggaatatatcacaaggtcagctctatttgataatctgttgaccatctgttttcctgagtacatacgtgcaatattatttttggattttgcaagtactacaaacataaatatgacttgagcatctgactgccggatgtgaatcacgtaggttatatgagacaattgtggcttaaggtgcaagtgcaaattcagtaggagtttctgtattccttgaaatcgcgacgttagttgtagctacctggaaaaaatcacctgcgattaacacagggcaacatgacttcaatgtaaaaaaaaaggtttgggatttaacaaaaaaaattgtaattttgtgtccacaaatttaaattgtttctgagcaagaagtttttttgttttccatgtggtatctactaagaaatgtaatgcctttctactgtacattgaacacttttcaaaggtactctttgtagtttgttttggacttgaattgtagttctggtgaactaatatctgtgatgtaacatatgttccagaagttgtgattcaaaacatttatattcttgttggaaattagtctgaaacccaccattttaacagggaacatgcctcagtagaattgatgaaagaaataaaagaagggtatgtgtgaaatattaccagtatcatttcataaattttacagcagtttgtattaactattgtgcacgtcaccttggaaaccattaattttttttaaaaaaaaatcatgaatgcttcttgagatgtttggtgtagttgtcagagctgtcttactgagtcatcaggtcatgggttcgaagcaacttctccacatttatgtgggaaggctcgcctcggcttatcccttcacagacgctactcatgtgggagcctccagcagtaagtctgcccaatgctccttgagatgtgccatcagaagagtttttttccacataaacacaaagttacagaaaaaattatgcatgatttttattgactattttttgagcaaagagataagctattgccaggattaaaaaaactagaccaacataggaggaaccaggtggcattttattatcaagaagaaaatagccatgcaaattttccttgacgaggactagaacctaggtggcctgggctagccacagaaccacatgctctaccaattgcgatagatcagcttccttaacagtgagcatacggtcaggattgtctgagcatacaaccaggattatgtcatatatgttgattggaattatatattgtgattgcaactgtttgtttgttttttccatgtaggctatctattttgacacagatgttgtcctcagttgtgtttcaggactaaaagttttttagtaattgttcattattgagttagcactcatgtttttcgcttgatttgttgtgtgttggacttctctgtaatatcactatcatatgaactaggcagtagtatgatagatggaggatttctgagttagtttgacctctgcgctgtaatgttatctttagaaggtaaggaaaccgaaaaggctgaatttcaattatcaattatgtaccatgttgtcattgaaattcacttttttgtgctctaaatatgtaatgtagttattttagttcgtttctgatcgcagttttcctgcatacttgagaaaaaagaagcttgtttctgatcctttttttagtcatgccatgtggtatgagataacctgtcaggataaattatccaaaaatcattcctggttatgcagttccactaattagcagtaggtagtttattctataattgtattgaggcttgaattatgattttggttgggcatgtagtaagtagcatccaagaaatatggtttagttggaatatcttaatgcctcatgattagctctaaacctgccacaaattacttgacattcttctctacaggctttaccgaagggagctactgctatagttccacttgttatatttgatgatgcaattggtgatcatttatctactcttgatcagttttgataattcgtttttggatctggaacgaactagaggcgccaaaaggaagttgaactgagactattagagaaggagacggcaaaaagagttgaacaagctattaggaggaaggttgaggagagtctaaattgtgatgaaatcaaacatgaaatacatcgtcgaattgaggaaggacgaaagaggatacatgaggaggtagcaatccagattgagaaggaaaaggatgcagctttaaatgaagccaagctgaaagtggaacaagaaaaaaagaagcgggaggagctagagaaaaaacttgaagaagaacgaaagaaagctgaagaggcgttgatgaaagaagcgttggaacagcagcagaaagagctagagcggtaccaggagttggagaggcttcagaaagaaagagaggaggccatgaaacggaaaaaaatggaggaagagcagcagaggcaaaaccagatgaagctgctgggcaagaacaagtcgcggcctaagctgtcgtttgcttttgggatgaagtagcgttcgattcaccgaacgaaattagtgctttagtatactgtaaccgtgtagtgtagtacctctgtatgaaactgcccatttctaactctggcagacaaattgcgatgtcataaatgctcctgatctgcttcgtaagttgccggctcttggtggatgtggtttcatctgcttcttgctgttcagttggcgttgccttgcgagaagactgccagagaagaatccggttggtttgatcttgcatgtcaccaagatactatctccgtttgtgttgccccctagttcagcctgttcatatttgaactaaaacgtgataaataaaaaaaacgga

SEQ ID NO: 5253 - DNA, 1442 bp, Zea Mays
ccctccgtgtcgtcaacggcaaagccaaacccatcaaacccgccgtccaaaccagctgaccacagcagcagctctccatcggacggcagagagcagccgttcgccacttggattcaaacgccccgtcactctaaccgctgctgaaactaccaaattacccctagcccgctccctcagcttcctgctcccccctctgtcatggccaagacgaagcaagggaagcgggatgtcgacgcctataccatcaagggcaccaacaaggtggtccgagtgggggactgcgtgctgatgcggccagcggacacggacaacccgccgtacgtggcgcgggtggagcggatggagtcggacgggcgcggcagcgtgagggtgcgggtgcgctggtactaccgccccgaggaggccaagggcggccgacgcccgttccacggtgccaaggagctcttcctctccgaccacttcgacacgcagagcgcccacaccattgagggcaagtgcatcgttcactccttcaagagctacaccaagctcgacaacgttggtccggaggacttctactgccgatttgactacaaggccgccaccggtgcattcacccccgaccgtgtcgccgtatattgcaagtgtgagatgccgtacaacccggatgacctcatggtgcagtgtgaaggatgcaaggactggttccatccgtcttgtatgggaatgaccattgagcaagcaaaaaagatagatcattacatgtgctcggattgtgctaaagaaaatggtgcaaagagaccctcaaattcatactcagtttcaccaaactcagattctaagtcagtattgttttgattggaagtaccttgtgggcaacgtaaaacataccataaagatatgaagccttgccattgtaatcatgttgaaactacagctaatcagtgaagttctggtaaacatatgctatctgatcaacaagtggcctaatcatgtttgccgtagtgcgaggcctaaattttagccttttaacctcgattgaatcaaagaggcgcaagagataaatgctgcggcagaagcacccctggcaaaggagatgcggtatttatggtgtcagctcctcattactggtgcatatttgagatgttgatgtgtacactgcgagagaagagccaagccaattgtagggcaaaacctatttgacttatcattcttctgtgtattctgcctagacattagtgtgatgagtaggtgagttccccgttgcggcgtgtgcatgatcagctgctggaggcgggatgtcgggaaatgctagaattatgctgactcttgtcgatgtaagtgtatcgtgtgtgtgtgttaacatatgcactggctggaaacgttcccatgtgtgaatggaggatgctgatgatagcttgactgttgtttcatattcaaaatagacaataagaaaagaaaaa

SEQ ID NO: 5254 - DNA, 2314 bp, Zea Mays
ccctccgtgtcgtcaacggcaaagccaaacccatcaaacccgccgtccaaaccagctgaccacagcagcagctctccatcggacggcagagagcagccgttcgccacttggattcaaacgccccgtcactctaaccgctgctgaaactaccaaattacccctagcccgctccctcagcttcctgctcccccctctgtcatggccaagacgaagcaagggaagcgggatgtcgacgcctataccatcaagggcaccaacaaggtggtccgagtgggggactgcgtgctgatgcggccagcggacacggacaacccgccgtacgtggcgcgggtggagcggatggagtcggacgggcgcggcagcgtgagggtgcgggtgcgctggtactaccgccccgaggaggccaagggcggccgacgcccgttccacggtgccaaggagctcttcctctccgaccacttcgacacgcagagcgcccacaccattgagggcaagtgcatcgttcactccttcaagagctacaccaagctcgacaacgttggtccggaggacttctactgccgatttgactacaaggccgccaccggtgcattcacccccgaccgtgtcgccgtatattgcaagtgtgagatgccgtacaacccggatgacctcatggtgcagtgtgaaggatgcaaggactgtttccttttgactgcgaggcgaagtataattcatctggaatatctactttggtcaggattaggaccaaacaatgaatgatgaacatggggttccttagagccttatgctcctgtgtttgcttggtccttatgtaagatatatatggtattcactactgactagtattgcttacacagtctttgtagatatatttagtttcaagaactgtttaaacacatcatcaaggactggttttctgcaaaatctcgtagcatttatctgttttgttctgtttaattatacctgttgcacattggtttttcttgcttgacaagcagctagcttagttatatggacctgattgtggcacatgtgattctctctggagtactatcaaactaatatagaattggattagaatttagaacagtaggtgccatgcagtgtttttaggatttgcatgacctgacattttatttattttttctaagaagcttttaagatgtttgatctacatgaatatgattgcttacgagaacatttagacatcatgcagtatgctatctctggattttgtcacatgataaatgtatgtcatatgttctacataatgatcaaagggctgcatgatgtagttatgatggttgtccttttcgttggctttctgctgaaatgatttcttgagagctgatactcttttgccatttatatagaatatttgttattatttgtatccaatatcatcttattgttgctaaccattattacgggcctgtttggttttccacctaaagcgccacaatctgcctaaacttagtcgttggaattgagaactaaccttagacaaaaaaagttaggcaaattgtggcgccttaggcacgaagccaaacaggcctaaatcctctacatcctggtgccatggatatgagtcatatgacttgtacatataatcctgttttttctatattctatggaaaatgcttatttaacttgttaacaatgtaattttgtttctgttatttgtatgatgttattgttcttctttattaccatttttattagttatccaacttttaactcttgtaggttccatccgtcttgtatgggaatgaccattgagcaagcaaaaaagatagatcattacatgtgctcggattgtgctaaagaaaatggtgcaaagagaccctcaaattcatactcagtttcaccaaactcagattctaagattgaatcaaagaggcgcaagagataaatgctgcggcagaagcacccctggcaaaggagatgcggtatttatggtgtcagctcctcattactggtgcatatttgagatgttgatgtgtacactgcgagagaagagccaagccaattgtagggcaaaacctatttgacttatcattcttctgtgtattctgcctagacattagtgtgatgagtaggtgagttccccgttgcggcgtgtgcatgatcagctgctggaggcgggatgtcgggaaatgctagaattatgctgactcttgtcgatgtaagtgtatcgtgtgtgtgtgttaacatatgcactggctggaaacgttcccatgtgtgaatggaggatgctgatgatagcttgactgttgtttcatattcaaaatagacaataagaaaagaaaaa

SEQ ID NO: 5255 - DNA, 1665 bp, Zea Mays
cagaatcctgaagcgactattgtccctttcaattcccctcccctacctgaggccctgaagcctgggtagccgatccatccgaaattccgaaacccctgcggcatgggaatggaaatcgagaggccgccgcagccaccgcctgtcgctgctgccatggctgcggcggcagccatttccacggtgctcggcgacgacgaccttctgcgcgagatcctcgtacgcctcggcctccccaccagtctcctccgtgccgctctcgtctgccggcgctggctccgccacgcctccgatccggccttcctccgccgattccgtgacctcaacccgccccgtctcctcggcgtctacctctccacctcgtccggccccgccccgcgcctgcggttcctcccgattcgtccggtcccggagctcgccgccgccgcccgccgcgccggctccttcttcaacgccttcaagggatcctcggccgctgtctacgacagccgcggtggccgcctcctcgtcaccaccttcgatgaccgccacgactccacgcaccaggtctgccgcccgctgtctccgggcggggacaccaccgtggttccgccgcccccgccgccgccgccgatccagctcaacaacgacgaggagtgcctcatctaccactacggtgaattccttcgcgatgatggcgacggccgctcctacttctgcgtggtgatggggtttagtgagctgcagaccaccgtgtacttgtacgagttgcacaacatcaactgggttgtcaaagcctcggcggccgtgttgctcgctttattgccaccgaaaccaagggttatgctcttcgatagcgccaacttctacatgttgtccgcaaccaacaggattcttgtgtgtgattttccatcctcaagtatctcagtcatggagctccccaatggggtggagaacaagcccggtggttgcatcatgctttccaggggagatagttctggaatctttctgatctatgtcaaagagtttcagctacacatcttccaccataggatgggcatcaattatccaagcaactggtccctagtggattctgtttctttgcgtcaggtatgcgccaatcttgatatggcaaggtggccatctgtgaatggacctagtgctggtgttaaattgtgcgcagttggggacaatgcggagtttgtgctcttggagatatttggtactattgtattcttggatattacaagcaggcaagcagagaaggtgtatgagctgacaccagaggataaagagttggtcagtgtccgccccctgatgttgatatggcctcctgttttccctcagttgaaggatgcatattatgacaaaaaagagtgatgcaaagcttcagaggaaccagttcaaagctcaacctgcaggtccaaagatgagaatgagaagcataacaatatcactgaagaggcttcatgatgagcacaccctgttccgaggtggcgaggtgtagtaaaaacgagagagaataaagggaggctagttcatgtaaataactttgaataaaaaatagttgttaaactacttgtttagatcagatcatttgatgtaaataatgatttatcgaaacccgacggcactttctaattattcgtatgccaggcttttctttataatctataataagattttctt

SEQ ID NO: 5256 - DNA, 647 bp, Zea Mays
gtagtgtccgctaggtaattgagcgtcattggtgtcccataggccatagtatgaacaaatggtgctggaggatttgctgaagaaaggccacgcggaacctgctaagaagatcggggcaggagtcgaagcattcgagatacgcaaccacccggtgtggcaaagccgctgcttctttatccgcaggatcgatggatcctcggatgacttcagcttccgcaagtgtgtggacaacatactgcctctccctgaggacatgaaggtcggcaacggcaagaagtctggtggccaccacaagggtggcggtggcggcggcgggggtaggggaggaggccgtggccgaggcggctggcgtggtggccgtggccggggcaggaggggagggtaggatcttaattcttaacaggccctgcaattttgcccggttaataagacactggtggccgtggacacgaaggcgtttattatgtgactgtcctgaaagaccgatgcccaccttacaactgatccacgccgagtgcttgccgcgtgctgttcttaatttgtgccttatttttcttcttgtcagctgctcgtgtacgttgctttaggccatccggtctgttcgctgctggtctggaatgaaggatagataggattacacttgcaca

SEQ ID NO: 5257 - DNA, 2890 bp, Zea Mays
cctgtagtgatgtaagcattttgtaacaactcacataataaatttaagatttattttttatattttttataaatttactactaaaaataaaaatataaatttacgaagcagattatatatcctatttttcacaagaaaataaaaaaactaaaaaataatatataactatcagagtattagttttcatcttaccgacatgtgggccaccacatgaaccttatccccgccgcgcctccgctcccttaaaccccgcgacgggtcactggacggccaccagtccgtgctcccaaaatggcggcctccccagcggccgccgctaccttccttcaccatcacctcccctttcccagtcgccccaagacacttctcagaccacgcctccaccgcctcgccgcgtccatcaacccctcgtccaccgacgagacccccgccgcggacccaccggtcatcccctcgatcagcatcaagaacactgagcccgaggaggtcgcccgccgccgcagttgggtggagcacggatgggctccgtgggaggaaatcatgacgccggaggtcgcctttgcgcgccacagcctcaacgagggcgaggaggtgccgcttcagtcgccggagtccctcgaggctttccggatgctcacgccttcctaccggaagaaggtggaggctgagccaggatacctggagcgcctcttcgcgacgcgcgacacgcccgagcctctcgagacgacgtgggccggccggctcccgctgcggctcgtgccgccgcgggactggccgccgcctggctgggaggtggacccggacgagctggagttcataagggaggcgcacagggcggcctctgagaggctggacatggaggcggcggctgcggcaggggtgaccaacgtggagaagctggaggatgcgccacaggatctggcgctagagaggtacaaaatgttcctgaagcagtacaaggaatgggtggaggcaaaccgagataggttggagcaggagtcctaccagtttgatcaggattacttccctggcagacgaaaaagaggtaaggactacagtgaggatatgcgtgaacttccattctactatcccggacagatatgttacgggcaagtaacgactgttcacctctaccagggagcctttgtgaacattggttgtgtccatgaggggtgggtaccgataaaaggaaatgactggtactggatccgacatcacatcaagcctggcatgaaagtctacgtggagattctggccaaacgagacccttaccgcttccgcttcccacttgagatgcgatttgtatatcctaacattgatcacctaatatttaatagattcgacttcccaccaatatttcaccgtaaggaggatactaacctagagcagttgtggcgtgaagccggacggccacccattcctaggaaaaaacctttaaaagatatggaaaaggaacctttggtatcagaccatccttttgttgacacgctttgggaatggcataatgcagagcagatgattttagactacgaggaacaaaatccagataaattcaagaatacaacatatgagtccacagttgatgcaccctcaatcgatgaagaaaaaagagttgaatacaccgaaggatatttcaaagaaacactgctaaaaaagaaagttgtgaatattagcatcaaagaacttgatctggatgctgcccgtgctgaacgccagctgataaaaaggctgaaaaaggaagccgaggagagaggggaggaatacaaggttaggaagctccgacgaaacaaagaaatggatgagtatgatctgatgcaatggcgtcgttcatttgaagagagggaagcgcttatcagagacatctgctgccggaaagcgcttgatcttcctatcgaagagcccgggcgatacgacgtggacgagacagaggtgtacgggaaggattactatgacccagagaagccaatgtaccggtacgactactggggcgagcccaagaacacggagaagacgaagctggagcgggacgtggagcgccacaaccagcaggtggtcggcgacgcgaagaagtggtgcgagatgtcgtacgacgactacgtccgcaagaagctgcggttggaagcggctgaggcgagggaaaggcggaggaaggcggccgaggcgcaagaggacgagcaggagtacgatgacggcatggacctggacctgaagaagatgaccgatccacgcgccccgcacaaccggttttacatcacgaaatgaaaggtacaaggagaacagatgggatcccaagcggcttatcggctcgggtggcatgccgtcatcacattccgccacggttacagcactagcagtagcaattggattccaggatggctttagctgctccctctttgcaacagcaactatatttgcaagcgtggtaatgtatgatgcttctggtatcagactgcatgctggaaagcaagcagaggtattgaatcaaatagtttgtgaacttccttctgaacaccccttgtctgagacaagaccactgcgagaacttttaggccatacaccaactcaggtggttgctggtgcattgcttgggtgtacaatagccacagcaggacaattattcctttgaactacgaaggtgcggcagaaatgttgtagcatttgtatcgcagggacttgagaagaagtttctccagtgttctgctactttaggtattggtaagatttgcatgttggtgctgtagtgttgttgaatgttgtatgttctgatggaatgtggttatatgtcaaaaaggtgacgttcacaggattgctgtacagaacattgttcatggttatgattgatgaaatctaaaatgtgattgaaacagctgcagaactaagggagtgtttg

SEQ ID NO: 5258 - DNA, 1621 bp, Zea Mays
ctgtggtttggttgcaaggtctccagatcatgtcagcaattcagcatatatcgcaggctcgaatcaaaaagataatgcaagcagatgaggatgttggaaagattgcactagcagttcctgttttagtttcgaggtctcttgaattgtttttacaagatttaattgaccgtacttatgaaattactcttcaaagtggagcaaagacactgaattccttccacctgtgggattcatacctggttggtccctgactatgtccagctaatttgtactatataagtaaataaggcagctcactggccaggcagcccgaaatcagaagcctgggaacgctgcctgagcgaggcagcttctgtcatgagccaaccaaacagccccttaattcgaaaatggaagcaggttggttttagtaaccaatttggaagttgatatttttctttccactgtaagcgacttcagtgtagtttatggaagttgagctcatggacatttctagagaagatatttgtagaggttatgttatatatccttgaaactgaaactggtcagatagttgtcccatcctgctcatgtagatctagcatacgagcttgtctaatttatttggaattaagtttcatatttaaatgtgagttgtattgaggttaatttcgatggaccatgtttttttcttgttaaggcacttagctgatagtttcaatgcatgcgtcttggtattgtttgcatggcatatcagttttgagccattcatattaacattcatatgtctatcttctgacatctgacgttcaggaagcaatgtgtgaagaggtacagttcttttgatttcctaactgaagttgtcagcaaggtaccagatcttggtggcgctgattcctgtggagatgaaagaggattacctagaagaagaaagtcaaatggcagtgacccagagaatgatgaatcaagatctagtaaaatggccataagaaatgcaaacatcagccccagaggacgtgggaggggtcgaggcagaggacgaggtcggccaccaaccaagagaaaggaggttggttatgtacaatttgaagatgagagcagcatgtttgctgaacaaggtgagcccttgccaggagaggaaacagttcaagagatcaatggcaacgagaccatgcctcaaagcacgcaacctccagtagaggctccgccaacagcccttgcacaagctacaacaagttctaaggcggaagaagcgaacagtgatcatcagtcagattggcctatgccagatgccattggaagcatcggtgtcgtgccatctggttttggacatctgacagtgcaggttgaagatgaggactacgacaatgaggattagtcagggtcatcttctcattgtatgcactaacaggactgttctggtgttgtaaaatgtaaatatagtttgaaatagttgccgcagtttacctgtgattgtctgtcgttttatgcggttatgtagtcctgtgtaactttcgttctccaataattgcttggtagttgcttttttacatgattcaagtgttttgtgacatttaacacagtatttgagcagggattgcctattttaagtatttttgtcttatttcaccgcagtctttga

SEQ ID NO: 5259 - DNA, 2189 bp, Zea Mays
ctggcttccacggggtgacggcgggctcggactcagatcggctcctgtgctcgcccgcgcgcgcgcgcgtgcggaagctcgaatcaaaaagataatgcaagcagatgaggatgttggaaagattgcactagcagttcctgttttagtttcgaggtctcttgaattgtttttacaagatttaattgaccgtacttatgaaattactcttcaaagtggagcaaagacactgaattccttccacctgtgagttcaatatcagctgacattttgttttttttttcataaaataaaaaggtgatgtgatgtatcttttaaaataaatggatctctttgatgaatttcagctgtgactttatttagcatttgtagtgagggtaatctagatgcttacaatttgcaattgctatgattcgacgtttgaactttggtgtacaatatcccccctgcccaaaataggattttatccaggattcatcttatttgtgttgcttatgccatcaaaataagttggtggataagctgtactgaaacagaattcattaattataggtcatgcttcatataattactacacattcaattgccttttggttgtagattctttggtataaggtttactggttaaaagttgttatctaagttaacatccataatatctgtaggtgggattcatacctggttggtccctgactatgtccagctaatttgtactatataagtaaataaggtacttgagctagagccatctaatgtttttgcatcacctctggaggaagtgatgaacagatcgcttttttggcacaagtctcaacttgaaaataatcttttggggcatgtttggttcgataccttccaggcagctcactggccaggcagcccgaaatcagaagcctgggaacgctgcctgagcgaggcagcttctgtcatgagccaaccaaacagccccttaattcgaaaatggaagcaggttggttttagtaaccaatttggaagttgatatttttctttccactgtaagcgacttcagtgtagtttatggaagttgagctcatggacatttctagagaagatatttgtagaggttatgttatatatccttgaaactgaaactggtcagatagttgtcccatcctgctcatgtagatctagcatacgagcttgtctaatttatttggaattaagtttcatatttaaatgtgagttgtattgaggttaatttcgatggaccatgtttttttcttgttaaggcacttagctgatagtttcaatgcatgcgtcttggtattgtttgcatggcatatcagttttgagccattcatattaacattcatatgtctatcttctgacatctgacgttcaggaagcaatgtgtgaagaggtacagttcttttgatttcctaactgaagttgtcagcaaggtaccagatcttggtggcgctgattcctgtggagatgaaagaggattacctagaagaagaaagtcaaatggcagtgacccagagaatgatgaatcaagatctagtaaaatggccataagaaatgcaaacatcagccccagaggacgtgggaggggtcgaggcagaggacgaggtcggccaccaaccaagagaaaggaggttggttatgtacaatttgaagatgagagcagcatgtttgctgaacaaggtgagcccttgccaggagaggaaacagttcaagagatcaatggcaacgagaccatgcctcaaagcacgcaacctccagtagaggctccgccaacagcccttgcacaagctacaacaagttctaaggcggaagaagcgaacagtgatcatcagtcagattggcctatgccagatgccattggaagcatcggtgtcgtgccatctggttttggacatctgacagtgcaggttgaagatgaggactacgacaatgaggattagtcagggtcatcttctcattgtatgcactaacaggactgttctggtgttgtaaaatgtaaatatagtttgaaatagttgccgcagtttacctgtgattgtctgtcgttttatgcggttatgtagtcctgtgtaactttcgttctccaataattgcttggtagttgcttttttacatgattcaagtgttttgtgacatttaacacagtatttgagcagggattgcctattttaagtatttttgtcttatttcaccgcagtctttga

SEQ ID NO: 5260 - DNA, 2202 bp, Zea Mays
gccagcatttattccttgagattataacccctggtgtagcgctcaagcagggctgtttgcggatcacagtatttgttttatgccttcaggctcgaatcaaaaagataatgcaagcagatgaggatgttggaaagattgcactagcagttcctgttttagtttcgaggtctcttgaattgtttttacaagatttaattgaccgtacttatgaaattactcttcaaagtggagcaaagacactgaattccttccacctgtgagttcaatatcagctgacattttgttttttttttcataaaataaaaaggtgatgtgatgtatcttttaaaataaatggatctctttgatgaatttcagctgtgactttatttagcatttgtagtgagggtaatctagatgcttacaatttgcaattgctatgattcgacgtttgaactttggtgtacaatatcccccctgcccaaaataggattttatccaggattcatcttatttgtgttgcttatgccatcaaaataagttggtggataagctgtactgaaacagaattcattaattataggtcatgcttcatataattactacacattcaattgccttttggttgtagattctttggtataaggtttactggttaaaagttgttatctaagttaacatccataatatctgtaggtgggattcatacctggttggtccctgactatgtccagctaatttgtactatataagtaaataaggtacttgagctagagccatctaatgtttttgcatcacctctggaggaagtgatgaacagatcgcttttttggcacaagtctcaacttgaaaataatcttttggggcatgtttggttcgataccttccaggcagctcactggccaggcagcccgaaatcagaagcctgggaacgctgcctgagcgaggcagcttctgtcatgagccaaccaaacagccccttaattcgaaaatggaagcaggttggttttagtaaccaatttggaagttgatatttttctttccactgtaagcgacttcagtgtagtttatggaagttgagctcatggacatttctagagaagatatttgtagaggttatgttatatatccttgaaactgaaactggtcagatagttgtcccatcctgctcatgtagatctagcatacgagcttgtctaatttatttggaattaagtttcatatttaaatgtgagttgtattgaggttaatttcgatggaccatgtttttttcttgttaaggcacttagctgatagtttcaatgcatgcgtcttggtattgtttgcatggcatatcagttttgagccattcatattaacattcatatgtctatcttctgacatctgacgttcaggaagcaatgtgtgaagaggtacagttcttttgatttcctaactgaagttgtcagcaaggtaccagatcttggtggcgctgattcctgtggagatgaaagaggattacctagaagaagaaagtcaaatggcagtgacccagagaatgatgaatcaagatctagtaaaatggccataagaaatgcaaacatcagccccagaggacgtgggaggggtcgaggcagaggacgaggtcggccaccaaccaagagaaaggaggttggttatgtacaatttgaagatgagagcagcatgtttgctgaacaaggtgagcccttgccaggagaggaaacagttcaagagatcaatggcaacgagaccatgcctcaaagcacgcaacctccagtagaggctccgccaacagcccttgcacaagctacaacaagttctaaggcggaagaagcgaacagtgatcatcagtcagattggcctatgccagatgccattggaagcatcggtgtcgtgccatctggttttggacatctgacagtgcaggttgaagatgaggactacgacaatgaggattagtcagggtcatcttctcattgtatgcactaacaggactgttctggtgttgtaaaatgtaaatatagtttgaaatagttgccgcagtttacctgtgattgtctgtcgttttatgcggttatgtagtcctgtgtaactttcgttctccaataattgcttggtagttgcttttttacatgattcaagtgttttgtgacatttaacacagtatttgagcagggattgcctattttaagtatttttgtcttatttcaccgcagtctttga

SEQ ID NO: 5261 - DNA, 1511 bp, Zea Mays
ccgttcgattgttggggaataattatgagctacattgtttttctaatttatttaagttttgaccaacctgaaaaattacagggccattactggataaacgaatagggcctaaataatttggaccaatggctgaagcctaccacggtccacggcagctcttgttccgtgggcgcaagtcgaccgatcggcatattcgccagcagcgcaggcttccattttgatgcctccctccgtccccttccgctccaatcagcggccgagctgctcctctcgcccacgcccgagaccgagaggccgcgccggcgcacccaaataaacccgaggagtgcctacctggcctgggcgcctggttgagcggtaaacaaatccgtgggcgtcctgcggctgcgattagaatagagtagaattcatcagcgggtcgccgtcgccattggcgcggtgcgtgtgcgagcccgagccgtgcgaagcaggtgaggcgaggggacagacgggacacgggagcgaagcaaagcgaaggaaggagtttccagtgagcgcggatcgcggaggcggtttatatagccggagggcgcgcgctccggtccgctaacgtcctgcagggagggaagggcaggattaggcagggcagcgccgcgccggccggaccgcccgcccgcccgcccgtccacgagccacggactttcggccatgggggacgctggcgctgacgcctcctcctcgccgccgccgccgtccgggtccttctcctacttcgccgtcttccgcaactaccccctcgtcgccgccctgctcggcttcgccgtcgcccagtccatcaagttcttcgtcacacggtacaaggagaacagatgggatcccaagcggcttatcggctcgggtggcatgccgtcatcacattccgccacggttacagcactagcagtagcaattggattccaggatggctttagctgctccctctttgcaacagcaactatatttgcaagcgtggtaggctatcagttctccattccaacccatgttccttctgaagagcacaagaggtaatgtatgatgcttctggtatcagactgcatgctggaaagcaagcagaggtattgaatcaaatagtttgtgaacttccttctgaacaccccttgtctgagacaagaccactgcgagaacttttaggccatacaccaactcaggtggttgctggtgcattgcttgggtgtacaatagccacagcaggacaattattcctttgaactacgaaggtgcggcagaaatgttgtagcatttgtatcgcagggacttgagaagaagtttctccagtgttctgctactttaggtattggtaagatttgcatgttggtgctgtagtgttgttgaatgttgtatgttctgatggaatgtggttatatgtcaaaaaggtgacgttcacaggattgctgtacagaacattgttcatggttatgattgatgaaatctaaaatgtgattgaaacagctgcagaactaagggagtgtttg

SEQ ID NO: 5262 - DNA, 1615 bp, Zea Mays
ttggaccaatggctgaagcctaccacggtccacggcagctcttgttccgtgggcgcaagtcgaccgatcggcatattcgccagcagcgcaggcttccattttgatgcctccctccgtccccttccgctccaatcagcggccgagctgctcctctcgcccacgcccgagaccgagaggccgcgccggcgcacccaaataaacccgaggagtgcctacctggcctgggcgcctggttgagcggtaaacaaatccgtgggcgtcctgcggctgcgattagaatagagtagaattcatcagcgggtcgccgtcgccattggcgcggtgcgtgtgcgagcccgagccgtgcgaagcaggtgaggcgaggggacagacgggacacgggagcgaagcaaagcgaaggaaggagtttccagtgagcgcggatcgcggaggcggtttatatagccggagggcgcgcgctccggtccgctaacgtcctgcagggagggaagggcaggattaggcagggcagcgccgcgccggccggaccgcccgcccgcccgcccgtccacgagccacggactttcggccatgggggacgctggcgctgacgcctcctcctcgccgccgccgccgtccgggtccttctcctacttcgccgtcttccgcaactaccccctcgtcgccgccctgctcggcttcgccgtcgcccagtccatcaagttcttcgtcacacggtacaaggagaacagatgggatcccaagcggcttatcggctcgggtggcatgccgtcatcacattccgccacggttacagcactagcagtagcaattggattccaggatggctttagctgctccctctttgcaacagcaactatatttgcaagcgtggtaatgtatgatgcttctggtatcagactgcatgctggaaagcaagcagaggtattgaatcaaatagtttgtgaacttccttctgaacaccccttgtctgagacaagaccactgcgagaacttttaggccatacaccaactcaggtttgttcacatgtcctttttattgttttttcaagtgaatgcatttcattgttgttggcaaaacgaaagcgatgggttattggcatagacaccaagtgaacctcaaacgggccgaccccacatgcctctttttacttggcaacaatatgtagatatgcctatctactatcaacatcattcagcttcgtcagcaccactatcttctcgtggcacacatttatgaactacctttttttatgttttactaatttcttgggtgtcaaattgctcccaggtggttgctggtgcattgcttgggtgtacaatagccacagcaggacaattattcctttgaactacgaaggtgcggcagaaatgttgtagcatttgtatcgcagggacttgagaagaagtttctccagtgttctgctactttaggtattggtaagatttgcatgttggtgctgtagtgttgttgaatgttgtatgttctgatggaatgtggttatatgtcaaaaaggtgacgttcacaggattgctgtacagaacattgttcatggttatgattgatgaaatctaaaatgtgattgaaacagctgcagaactaagggagtgtttg

SEQ ID NO: 5263 - DNA, 5208 bp, Zea Mays
tgcctgtttggtttgttggtttggttccgctcagcggcgtcgctagttcgctgctggatccgctagtttaacttggcctcgttctccctgagccagaatccagaggctccgtccttcggctaggcgagatcacgtgtctgaatcaaccaaccaaaccctaacccttgcagaggctgcggatgaagccatccaccgccggcgacgcctctgcggcggcggcggcgtcctcttcggggccctctacctccgcgtcgacatccgcgtccacgtctaccgcggacgccacccactacatcgccaagcgggtgctccggggaagcgccgtgctccacgtcgccgagggctgcttccgctcgcccgactccgcggacgtcgtcctcgccaaggaaacttcactggagttggttgctgttggtgatgatggtgttttacagtcaatatgtgaacaagacatttttgggattataaaagatattggtgtattgcaatggcactctagacataatggtttaattccacagatagaatgcaaagatcttctggttgtcctttcagattctggaaagctttctcttctttacttttgttctgagatgcacaggttcttcgcaattgccaatattgagttatcgaaaccaggaaatctgaggcatcatctgggaagaattttagcgatagatcgagaatctaatttcgttgctgtcagttcatatgaggataagtttgcccttatacatgtttctgtttcccagagtggttctggcagcggtattatttctgagaagaaatatttttatccaccagaaaatgaagatgacgcaaggatcataacttcgtctaggaccagcatccgtggtacaatttggacaatgcgcttcatatctgtgccccaagatgaagaatactatccagttctggcaatgataattaacaggaaaggctctgatgtgaatgacttgtcgttatttggatatgactccagcagctgtgttatcaaccacctctctagttattcagaaattggacctttggtacttgacgtatcagaaattcctgaaacgtttggctttgcacttctgttgcgtgttggtgatgctttattgttggatcttagaaatccaacaaatgtctgctgtatccaaagagtcagcttgacgactaacctgattggagagccaatcactgttgaagatccctgtccaggattagatgttgatgatgatgtggctgcttgtgctttgctagaattgagagattctggtaataacataatgaaggatgatggttatatggacattgatggtgttgacagcagaagtaatgtgaaaccaaggatcgtttgctcgtggagctgggagccacctgaccctgtcaggcgaggatgtgcaaggcttctattttgtttggatgatggagaatttcatattttggaatttactttggatgttgaaggggcgaagctgtacacatttgaatatattgataggactttgccttgtagacctcttttttggatgaaaaacagaatgataatagggtttgtagagatgggggacggcatgatttttaaacttggtcaccgcaggttgcttcataaaagcactattcagaatgtagcaccaatattggatctagcaattgctgattaccatggtgagaaacaggaccagatgtttgcatgttgtggaatgtcccctgagggctctcttcgagttttaaggaatggtgtcaatgtggacagacttctgaaaactgaagctatttaccagggtgtcactggtttgtggactttgagaatgaaggcaactgatgcctaccattcttttcttgtgttgtcatttgtggaggaaaccagaatactgtcagtaggactaagttttaatgacatcagtgatgccgtgggattccagcctgatgtttgcactttagcatgtggtttggtggctgataatctgctagttcaaatttacagcaaaggtgttaaggtctgtttgcctacagtatacgctcaccctgaaggtgcccctttaacttctccaatttgcactgactggtatcctgctatcactatcagtgttggtgctgtaggacataatattgttgttgttgctacatctaatccttgttgcttatatgtccttggtgttagatcatcatcttcttaccagtacgagttgtatgcaacacatcatgtgcaattgcagtatgaagtatcatgcatatcaatcccacaagaggattgtatacatgataatgtatctttcagctgtggagagggtgatgacatttgtaagaacccccctcctaaagttaatgtttgcaagtttgctgttattggaactcatagaccttcagtggaaatcatctccttggaacctggagaagcattaagggtattaactattgggactgtatctgtgaataatgcacttggcgcacctatgagtggttgtatacctgaaaatgtcaggtttgttgcggctgagaggttttacattcttgcaggcttgagaaacggaatgctactcagatttgagtcagaaacacgtgattatctccctggttttctctacaaggactcttctattccttctgttaatacattccttcagttgatttcgatacggcgtattggaattactcctgtactgttagtgccaatacatgattcagctaatgctgacatcattgttctcagtgatagaccttggctattacatgcagcaagacatagcctggcatattcgtccatttcatttctttctgcttctcatgtcacacctgtttcatctgttgattgccccaatggtctactgtttgttgctgagagctgtttgcatttggttgaactggttcatgggaagcgattgaatgcacaaaagttttcaattggagggactccaaggaaagtgctataccataatgaaagcagaacactgttggtactgagaactgggctaaatggtgcatcgtcttcttcagatgttgtacaagtagatccacaaaatggggtattactttccagatataaatgtgaacctggcgaaacagcgaaatgcatgcaaattgcaaaaataggaaatgatcaagttttaattgttgggaccactaagtctgctggacggccgatgatgtcaaatggtgaagcagaaagcatcaagggacgcctgattgttttaagcttggaggccgttgaaagtcctcgtgagagcagttcgtttattccaacttttagttttaatccctcttcacattctggttctcctttccacgagattgttggatatacaactgaggaattttctagtaacagcatgtgcagcagtcctgatgagtttagctgcaaccagatccaagctgaacaaatgacagggcaattgagatcattgactcaatatatattgaatggcgcagttcttgctctgtgtccctatctagatcgttatgtgttggcagctgctggtaatatggcaaggttttcccctgacggatatgtttctataaaccccccgggatcttgcctatatctgtgtaccatacccactgcaaccaatcaatccagtatagatgatgttgcctatatttgtataccttgcccatcacaatcaattaatctactatatttcacgagtctgaaatggccagtgattcttctgctgccctcacatgcctttgcggctgcacatccctttcctacgtgtctccgtggcagcgccctttcccgcacgaagtcaacatttatgttggagaataaggatgttgtgtgtccttgccctcatgatctttggacattatcaaatgagatgcccagatttatggcttagcttcttaatgcaatagtaatataatatgcagctctcattgtgttcattgttcaattgcaaagaaggaacaagtctattttggccatcaaactatagcccagatttatgtatttggtttcacaaatgaaaatccccacagaataaaaaagtgtgctgttggtaggacacgatttacaataacttgcctgaagacatttgcatcacgaattgctgttggtgattgtcgtgatggtgttctcttctattcttataatgagagtcataggaagttggaattggtctattctgatcctgctcatagattggtgggtgatattgctcttttaaattgtgaaactgctgtggtatcagatcgacgtgggagcatatctgtattatcatgcaccagattggaagtttcagaaagtccacagaagaacttagccgtgaattgttcattttatatgggtgaaacagccatgagcattcagaaggctgcattcaggtatcggcttccaattgatgatgatactgacccggtgcttgagacagtttacaactgtatcgtggcaagtaccatgttggggagtctctttgttatgattccactttcaagtgaggagcatcagcttttgcaagatgtccaagaaaaactctcagtacacccattaactgcaccggtcctgggaaatgatcatgcagagttccgtcagcgtggtaccccttcggtagtgcctcccattcttgacggtgatatgcttgtgcaattcttggagctcaccggtgaacaacagcaagccatccttactcatgctttgccagggaaggggcaacataggcccctctcggttttccaggttttgcaaacattagagcgcgtccattacgctcttaactgaggctttcttcaatcacagttactacaaggtttggatattagagctggttgaccttcattgtttgagatgccgtcagagctgaggttttagtgaccttcgcaatctagacggccgattccaagtctgccatgatatttatcagaacgtttgattgatgatgcaactggagcttgatactgggaagtctcatggtggcgagtatcccgtggaggcaccagattcgtcgaacctcctgtgtatatacagtcggccgcttttggtagactgttgtatggcgcattctgcatagaaacgaatattctttccgtttgtttcaatagataatgtaatgtttcttacgtcagctggtcggatgctcaacgagaaataagggaaacaatgaattgcattggccgtcctgctctatcacatgccattactgattagtgatgaatgcatgcaccagctgccgcagtgatgatcttgccgcggcagctcctggtcagggacggcgcccacggggacgc

SEQ ID NO: 5264 - DNA, 2572 bp, Zea Mays
atggcaaacacaagcggaactcggcctcacacgggagcacaacagtggttgtccttgcgtgagaccatgacacgtgcaaatgcgacatacatagactgcgttcagggattgccactatggcgtgaaagtgcatcagttgtaaatgatgaactctttaagggttacagacaaaatggtggaggtagtggaggtggaaagacaaatgaatttgttgcaggttatgattttctaaatacaaatacgaatggtcttgaaatgaatatttggtacaactctacctataacaacaacactgcatacgtacctatttcattactacgagttccacgcttggttaatgcggcatcaaatgagtacattaaatttctcaaaggaagtggagtggaaatgtttctgcaatatgttaaagagatgcccaaagtaggaacaaagttgaaatttgacctctcttctcttcttggtgcactgttcttcacatggatcgttgaactactgtttccagtcatattaacatatctcgtgtatgagaagcaacagaagctgaaaattatgatgaagatgcatggtctgaaggatggtccttattggcttatctcatatgcttacttttttgctctctccgctacctacatgatattgtttgtgatttttggctcactgattggtctagatttctttaggaaaaatgcctatagcattcaatttgtcttctacttcatctacataaacttgcagatttcacttgcatttttggtatcttccttcttttcttctgtcaaaatagccacagttgttggttacatctatgtatttggctctggcttgttaggggaatttctccttcgcttttttgttgaggatactggttttccaaagggttgggtggtcgtaatggagatcattcctggattttcattgtaccgaggattatacgagtttggtcaatacgcatctgctggaaactcaatggggaccactgttctccccttggcattttatgtggatcaagtctcgccactggggggtggattcaggaaaaatccctttttcttcttgggctgctttaagaagagtcctctatcattgcggagatatagctttgggagacaaggatctaaagtagtcgttgaaatggacaatcctgatgctgttcaagaaagggaggtggttgaacaacttctgctggaacccattgcaaaccaagcgatcctctctgataacctcaaaaaggtttaccatggtaaagatggaaaccctgacaaacttgctgtccgagggttgtctcttgccataccaaaaggccagtgttttggaatgcttggtccgaatggagctgggaaaacatccttcatcagtatgatgattgggcttattccaccaacatctggcactgcctatgtacatggaatggatataaagaccaatatggatgcaatctatactaccatgggtgtatgcccacagcatgagaagagagcatgtaatgttttatgggagactgaagaatcttaagggcactgaattactgaaggctgttgatgactctctgaagagtgttaatctgtttcatggtggcgttggtgataagcaagtgggaaagtacagtgggggcatgaaacgaaggcttagtgttgccatttcattaatcggggatcccaaagtagttttcatggacgagccaagcaccggactagatccagcatcaagaaacaatctgtggtgtgtcgtgaaggaggcaaagaaaaaccgtgccatcattcttacaacgcactcgatggaggaggcggaagtactatgtgatagacttggtattttcgtcgatggtggtttccaatgccttggtaacccaaaagagctgaaagctagatatggcggcacctacgtactaacaatgacaacaccttcggagaatgagcaggaggtcgaacagcttgttcaccgcctatcaccgaatgcgagcaggatataccatatttcaggaacccagaaattcgagctgccaaagcaggaggtgaaggttgcagacgtattccatgccgtcgagagtgcgaaacgccggttcagcatctatgcttggggcctggtcgacaccaccttggaggatgtctttattaaggtcgccaagggagcacaagcattcagtgttgttgcgtaaatagtgtaatggagtctgtagatgtcaatatctttttagttgtggaatgtgtgatgtatagtcttgcctgaactttggttgtagtcttggtaaggttgaggttgtggtgtatattttagcgtagctaagttgtactctctctgttcataaatatatgtcaccgttgactttttaaaaaaactttgaccactcgtcttattcaaaaaaataataagttatcattttttatttgttttatcacttaagttactttgtgcttgacttaaatttttatattttaaataaatattttgaataagacgagtggtcaaagtttttgaaaaaaatcaacggtgtcatatatttgtgaacgaaggtagtatatattttgtaatttgaaagccacattgtccctaacaaatatagatatactttgtt

SEQ ID NO: 5265 - DNA, 3435 bp, Zea Mays
gaattggcgggaggcggggagccaacggctctatgctataaaatgcgatggagcacaagttttactatcgctatttgccactgaatcgactcgtcttctctgccgaacccggccagcaggcggcagcagcagcagctcgctcgccgatggacgcgccggcccccacgaggggccccgcgagcttcctcactcaggccaacgccctcctccgcaagaacctctgcttccagaagcggaacctgaagaccaacatcggcatcacgctcttcccggtgctcctctgcgtcattctcgtcgtgctccagggcgtcatcgaccgcgagctcgacaagcccaagtaccgctgcggctgcgtatgcgtcgacccgggcccggccgcggtcggggacgcgtgccgccggacggagtgcggcgtccagcactccaccctcgaccaggtcgggagctgcccgatccccaacccgaccccgtggccggcgctggtgcaggtgccgcggcccgagtcacgcgccgtcaggaccgccggccagccgttcgacggcttgcctgacccgacctgccgggacaccggctcctgccccgctgccgtcctcgtcaccggcagcaaccgctcgctagctcaaagtctttcggttggactatttcctgcttcgacttcctccttgaatttgacggattatctggatgcactatccaagatcgttgctggatcggacacgtggccgtggacaacagagttaatagagtcagcgtttatcccagggaataacttgtatctggtgcaacctcggtgtttgtccaacctaacgcagacagtttcatccaatgccggggccatacctcttcagctcaacatagactgcgttcagggattgccactatggcgtgaaagtgcatcagttgtaaatgatgaactctttaagggttacagacaaaatggtggaggtagtggaggtggaaagacaaatgaatttgttgcaggttatgattttctaaatacaaatacgaatggtcttgaaatgaatatttggtacaactctacctataacaacaacactgcatacgtacctatttcattactacgagttccacgcttggttaatgcggcatcaaatgagtacattaaatttctcaaaggaagtggagtggaaatgtttctgcaatatgttaaagagatgcccaaagtaggaacaaagttgaaatttgacctctcttctcttcttggtgcactgttcttcacatggatcgttgaactactgtttccagtcatattaacatatctcgtgtatgagaagcaacagaagctgaaaattatgatgaagatgcatggtctgaaggatggtccttattggcttatctcatatgcttacttttttgctctctccgctacctacatgatattgtttgtgatttttggctcactgattggtctagatttctttaggaaaaatgcctatagcattcaatttgtcttctacttcatctacataaacttgcagatttcacttgcatttttggtatcttccttcttttcttctgtcaaaatagccacagttgttggttacatctatgtatttggctctggcttgttaggggaatttctccttcgcttttttgttgaggatactggttttccaaagggttgggtggtcgtaatggagatcattcctggattttcattgtaccgaggattatacgagtttggtcaatacgcatctgctggaaactcaatggggaccactggtatgaaatggagtaatctagatgactctcttaatggaatgcgtgttgtcttgattattatggttgtggaatgggcaatagttctccccttggcattttatgtggatcaagtctcgccactggggggtggattcaggaaaaatccctttttcttcttgggctgctttaagaagagtcctctatcattgcggagatatagctttgggagacaaggatctaaagtagtcgttgaaatggacaatcctgatgctgttcaagaaagggaggtggttgaacaacttctgctggaacccattgcaaaccaagcgatcctctctgataacctcaaaaaggtttaccatggtaaagatggaaaccctgacaaacttgctgtccgagggttgtctcttgccataccaaaaggccagtgttttggaatgcttggtccgaatggagctgggaaaacatccttcatcaatgattgggcttattccaccaacatctggcactgcctatgtacatggaatggatataaagaccaatatggatgcaatctatactaccatgggtgtatgcccacagcatgacttactttgggaaacattaacaggaagagagcatgtaatgttttatgggagactgaagaatcttaagggcactgaattactgaaggctgttgatgactctctgaagagtgttaatctgtttcatggtggcgttggtgataagcaagtgggaaagtacagtgggggcatgaaacgaaggcttagtgttgccatttcattaatcggggatcccaaagtagttttcatggacgagccaagcaccggactagatccagcatcaagaaacaatctgtggtgtgtcgtgaaggaggcaaagaaaaaccgtgccatcattcttacaacgcactcgatggaggaggcggaagtactatgtgatagacttggtattttcgtcgatggtggtttccaatgccttggtaacccaaaagagctgaaagctagatatggcggcacctacgtactaacaatgacaacaccttcggagaatgagcaggaggtcgaacagcttgttcaccgcctatcaccgaatgcgagcaggatataccatatttcaggaacccagaaattcgagctgccaaagcaggaggtgaaggttgcagacgtattccatgccgtcgagagtgcgaaacgccggttcagcatctatgcttggggcctggtcgacaccaccttggaggatgtctttattaaggtcgccaagggagcacaagcattcagtgttgttgcgtaaatagtgtaatggagtctgtagatgtcaatatctttttagttgtggaatgtgtgatgtatagtcttgcctgaactttggttgtagtcttggtaaggttgaggttgtggtgtatattttagcgtagctaagttgtactctctctgttcataaatatatgtcaccgttgactttttaaaaaaactttgaccactcgtcttattcaaaaaaataataagttatcattttttatttgttttatcacttaagttactttgtgcttgacttaaatttttatattttaaataaatattttgaataagacgagtggtcaaagtttttgaaaaaaatcaacggtgtcatatatttgtgaacgaaggtagtatatattttgtaatttgaaagccacattgtccctaacaaatatagatatactttgtt

SEQ ID NO: 5266 - DNA, 5044 bp, Zea Mays
aggtagacgagtatcccaccatctctcttcctcttcttcctctgcagcaccccgcagaccagacgcaggcacaccgcaccgtgccccctccctgttcatcgcccgcaccccaacaacaaggaacaggccggagtccagccatccgaccttgaatccgcttgccctcctgcttgatcccaccgccacgcgccacctcaatcgcccactcctccctcaccctctagggttccctgccgctcccacaaatcacgcaatcggagacccccggtccgccctccaatgacgaccatgagcgatgatggcgaccgcacctgcccgctctgtgctgaggagatggacatcactgaccagcaactcaagccatgcaaatgcggctatgatatttgtgtttggtgctggcaccacatcatagacatggctgagaaggaggaaacagagggccgctgccctgcctgccgcacacgctatgacaaggataggatcgtcaagatggccgccacttgtgacaggacagtggcagataaaaatgcggagaagaagcaaaaggcccaaagggttaagccaaaggcagcaccaacagcaacaacaacatcaaccgtagaatctaagaagcatcttgctactgtcagggttatccagagaaatctggtgtacataattgggctacctgcgcatttatgcaatgagagcgtacttgagcgcagggagtactttggtcaatatgggaaagttttgaaggtttcagtttcccgtccgactgggcctccctctcagcaggcatcagcaaacagcagtattagtgtgtatattacttatgccaaagaagaagaagccatccagtgtattcaagctgtacacaattttgtcttggaagggaaagtgttaagggcatgctttggtactacgaagtattgccatgcatggctgagaaacatgattgtctctatttgcatgatgtaggcagtcaggaggatagttttactaaagatgagataatctcagcatatacgaggaccagagtcccccagatggcatctagtgtttcgcaaagacgtacaggcaacatgttgcctcctccaggagatgatttctcttacagtgcagtggtttcagccaagcataccttcaagaatgcaacacttaataccaccaaccagcccagaccttcacctccaaacagtagttctgggaggtccacacttccaccagctgcctcatggggacaacgtgatgtgaacgccaggacaacagctactggggtgacatcatcacaatctcatacaaaaccaaaatcagaatcacagagtaatccattttcaagttcttcagtaatttccagtacaaaaacaccctcttcatggaatgatgatacaagtacagcagcaaaaatgtctgaaggacagcaagtgtcagaaaaagagtccaaaaccttgcagctgtataagcctggtatttcaatggcaacacaagctacatcatcacttgagttatcactgaacatagacttctcgacaataccttcagcttggaatgacgatgagattgtagtatcagatgggatgtcaaaaggaagcgatgaaaatcaagttgcaaatgaaaatggcgagctaacccatccagcatctaagccactagtcttatctaagaaagacataacaatgaaatctaccagtaccagcaaaagtcctccaaatattgtatcaagtctagcaatatctaaatcagatgtaaatactagtgatggtgaccactcacttaccaatattagccttacttcaaatgctgtagtctgccaatctaatcatgttgctggggcgaaaatattggaggatattagatccagggacactgacatggagaagctatctgttcatatatcttcagtaaaattaggtggcaatgatgagattcagattatggcaggaaatcagcgaccagatgtaatgccatgcacatctgttgatgcgcccatgaatcagaatttcgacagagaccaatctcatctcaatcttaatgagcctttgttaccttcagaaaataaggatactgttctttcttgtcaatatagttctgataagcgtcttgattggagttcagagatgcaaaatggtagtgtgactccttcaaataatatagtagattctacgatgctcactggtaaacttcatagtatactactggatgtttcagagcaaccatcatatgcccgattccctagttcattggatacttcattgtgtaatgatacagaaagtaacactgcagcaacgattgacactacaatttcacatatgcagactgagttctcttcaattaataatatgtatgccttgttaaatggaggtcaagatggactcgggactgtaaatacacacggtaatgtttctgaacagcatcctggaatgggaaatcatcaatgtagagcaatgggttcagtaagaactgaagcaatgggttcagtaagaacagatagtataggaagttttgagaagaccataagcataaataaggatgagagcagaataatttctgatatgttatcatcagagtttaatccatgggatgattcatattcgactgctaacaattttgttaggatgcttagggaatctgaaaataatgatgtccacttcgctgtgccttcatggaaatcaggaaccgggaacaaagagtctagattttcatttgctagacaggataaccaagggaacttattggattcatctctcagaaactgtggtactggtaccgagcagaatttcagtttgctaccccagaattctcgaggaaatatctaccagaatggccttgcattccaatctttggagaacgatttttcgaacagcaactctcttggtgtattagatatgttaactactggtacatcgaggtctaaaatatctgcgcccccaggattttcagcaccagcaagagtcccccctcctggattttctactgcacttccatcccaggagtttccttctggaatttcgtctcatgatgggtctatagcccttcctagattcccttgggcattttcttctcaaatttcagcccaggaactgtctaagccccctagtagactgccttctccattttcttctggtttttcatctctggatgggcctaattcctcgtctaggtttccttctgcatttccttctggattttcatcacagaatggccctaacccttcatctggattccctttttcttctgggttttcatcacaggatgggtctaatcagtcgtatggctcaacaaacccagaaaatcttctccggaatactgttctgggtggcagtagtaatcattatcaatctcagtttggaaggcactcaagtgacatggagttcgatgatcctgctatattagctgtgggcaaagggctgatgcctggaattggcgattcagggctggagatgaaaaatactcctgcttttcaagcacagttgcaaccagcaagcagtgatccaagatttcacttacatatacagccaaatgtgcagtctcaccaaaacatgggattcgcagaccatatgcaggatggtttgaaccatatgaatgataatagatttttaggtcagaaccatggtcctctatccccttatgtgcagattccgcaacaacccagaaactcgcaggttacaaatggtcactgggatgggtggagtgattcgagacaagggaatagcactcctatgtcagacatgtcgaggatattatatccaagtgaagtgaacaagttgcacatgctgggttcaaatgatatctataacagagcctttggaatgtgatcatctcctgggataatgtgtgagtttgagctgacatgttctgacttgggggcgttctgtggaagtaactggttgcacaacacagtatacctgatgtggataatggtggttgtgcttatgagctggtacacgagtattttttgctattggaatttacaaaaacgaacctgagttttggttcagctatttgaaattaccaggttcgttctcttgtatgatctgtgaagcttgagtgaaaagaaagattatgtgccgagaacaaagcagctgaagttgaaatatattgagatatgtctataatgtagtgtggtgtggctcttgaacgtgagcgactaagaagatttggtgggcttgacttgatgatggcagtgttttcttgtgttggtacatgatgatggtgttggtcggtggctgcctggccagtacatgcgttttgccataataatacccatggtataataataataataataataataataataataataataataataataataataataataataataataataataataataataataataataataataataataataataataataataataataataataataataataataataataataataataataataataataataataataataataataataataataataataataataataataataataataataataataataataataataataataataataataatatactggttcctttgctagcattacttaatttgtttctcaaaaaaaatgtagtaaacacattaattactacatacaatggactcaaggtacgagtaggttgttctcatctcatctgagacccggctgcatgagcagctcgtcgaaagatgctcctccattctgctccacgctacctgaacccatcctgttgctgcaattggacacgagcacccgctccatggcaatggcgtcctggatctccttgagcacttccgagatgggaggcctctgggcgcccttgggcttcacacacattatggccacctccgcgatcttccacaccgactgcaggtcatagcagcctctgtccaacgactcatcaatgatggcgtggatgttcccgctctcgatgtgcgatcgggcctgcatttatttatttatttatttaacgcttttgcttcagcagaaccaacaggaatactcttctttcttacccacgcaacaatgttccggcagttgagcccaaagttgtcattcgagatgggttca

SEQ ID NO: 5267 - DNA, 1198 bp, Zea Mays
caaccagccgccgctcccttcttccatttcctggccgccaagcttctaacgtacgcagcctgctcgtcttccacctccggccaacttcctccctctaccgcgcttccctccccacaacagcagaccaccggcgctccctgttcttcttccccgtgggcgcgcccccttcatccaggcagcagacgacgcacgcacgccaggaacgcccgagctctccatctctaatccagcgctcaaggttccactccctctctcctccaagcgtgtggtgtcttccctgctcctccatggtgcccagatccggcgcgcgcccctgcaaatcttcactagcacaccgggctcctccctccttggtgctcggcctccatggatgcacatcacctcctcccatggacgccagcagcaggagctcctactcccagggcgcctctcccccatccatggcgtccgaccccctctcctttctcctccctgctcggagctctgctacggcacacgcaaatccctcccctttttgtgcagctcaccatccccagtagccgcaatgtctccctctgcacctgtccgattccatggaggacgacttccccatgggcaggaactcgacgccgcctccccaagtgcagccatggctgagctttcccttcccctgctcgggacaagcccctccctgctccatttttttctctctctgctctcggccgctagcaaccagggcattggcccctgctccctactacttctcctctcagcttcctctctgcagtagagagcgcaggaatatgctcggcgctttagcgcccagccttctgtaggagcagcgcactcctcttctgaagcacctcgctggcgccctcatcgtccatcgacaacatcccatggcgctgctgtccccatggtctccctgttgcgagagttgcctcgtcgcactcgtcgtcgggctcgaatcgggtgtgcgcattccatccgcgacagcgtcgacccccgcggcggccttgtactcgcgttgctccccgagccgagaccttgcacgcagcagcaagtcccggatcccctccgaatcgcgtgcttcgctggatctgtgcagccccagctgctacgacgtcaaatactggaccgagagatgacgatcgtgcaagtgatgtggtgccagccacaagatgcagtggatggacgacctgaagaatgatggacttat

SEQ ID NO: 5268 - DNA, 967 bp, Zea Mays
cgcgcgatgaaatgtcatgtctgtgttcaattatcatccgaggggagcgagtcgacggcaacaacagctcgaggagacgcgccaccgcccaccagctagcgcaccacgccaccacccccgcccccgatcaacgcagcagcagggacgcctataaatgcctaggtgcgtgcgggcatcgtctgacgccccggcgccttcctgctagcactacgccactaccagtcagggcaagactcgcagcccggacaaggtaaggcgacgtacggcggcgatggcgccggtggtcatgatgagcatgtgcgtcgtcgtgtcgctggtggcggtgcagctgcaggcgacgagcagcgacggcgccacggccgccacaccgtccgtggtgctgccgccggtgacggtgccccgtgtgcgcggccggttggaggccggtcgtaagctgcaggccgtcgacgccgtcgggatgggcatggactccgtggtgcgtcggacggtggtgctcaccacgatgcagacgagcaactcgccctccctgggctacggctcgctccgcccgaacaacgctgtgtgcgggtccagctgcgccggcagacctcctgtgtaaaggatgcggcgtggatttggacgaaagcaaatgggtgagcatgaagattaacacctcaaagaaatacattagaaaacttattgaagatctgtcaagatcatgcaggagtataaaacatgagacaatagaagcccaggaaggcaagaaaagaaatgagaagtcatgaagaaaacaggctgcacagagtgcagtggatgtgtccgatggcacatcggatagacatgcgtgtacagatgtgttcatgagcttttgtagcaaaggacatgctctacatcgtcctaatcaatctctagaccagcttcaataatctcaaagttgcttacttatatgtgatagtgaaagggaattaggcttgcacctagttcctaa

SEQ ID NO: 5269 - DNA, 1264 bp, Zea Mays
acaaagttcaccaaatccctgacttttatgtgtcgaagaaaggtaggctgtagtgcgacatctgctctgccacgtttctgctatggtggtgccgtggtggtgtgactaatcatcagagataagtagcaaaccgtcaaccaccagggagacgagccaggttgagaaggaaagcatcgcgagttcgccatacggatgggttccaaagcgcctttctgtctcacgctcctcttgctgctcgctgcggcctgtggacctgcagcacatgcccacgatgctgtcgagctcccgcatcatggcttagccttgaaggaacaaatttcttcaaccaagattcctgcccgtctcaagagtggcagcggactatgctcggcctgtgaaaacttcacgagcgaagccgtcacttatctcggcaaggaacagacacaggacaggatcatggagttccttcatgatgcttgctcccaatcattctcctttgaacagaagtgtgtcgagctgatggactcttatgcgactctcctgtttgccaagatcacggagatcagaccggaagcgttctgcaaacggtatggcctgtgcagggacacagctcttctctccggtgtgggaagtgacagcacgtgtgtgttctgccaccatctgctcgatgaaatcatgtccaaactgaaagatccagatgcggagtttgagataattcagattcttgtcaaggagtgcaataagatcgaaggtcacgtccagcaggttgagcagatagtggttgaaaggtctgaaggttggcattgtggatatttttgctatcatgcatggattcccagacaatgtgaggacgaaccagaagggcgagttctgggtggcgatccactgtcggagaactctacgcgttgatcatcagggacagcccgatggccagatgcttcacatcatggaggacgacaagggagaggtggtgagagttatcatcgaagtggagggtctgtctgatgccattcatcgctgtctttgacctcgtgaaggcgtcttagccacttcaatttgattggaaatattgttgttttaagatacgggtccatggttaatgttgtacgcttctctgagaagacctgtcattccaataatttggttctggagcaacctggagctgtatactgatctagcttcttttagtaacaaatgtaagttgctcacattttctttagattgtctatagaactttgaacaaccagctcgtcccttctaatttttatttggccagcaaacaaat

SEQ ID NO: 5270 - DNA, 1467 bp, Zea Mays
acaaagttcaccaaatccctgacttttatgtgtcgaagaaaggtaggctgtagtgcgacatctgctctgccacgtttctgctatggtggtgccgtggtggtgtgactaatcatcagagataagtagcaaaccgtcaaccaccagggagacgagccaggcaagtttattttcatctcgctatctccctgatattggtgtctagattgaagattatgcatcagcgacaagtaacgaccgcccggaaagagagccagaaaaaagggcaggaaatcgccaccgcccgcccctatttgagcagccgcttgttccttccgcgtcctcgctgctcctcaattcgattggctccgtgccgacctccaggttgagaaggaaagcatcgcgagttcgccatacggatgggttccaaagcgcctttctgtctcacgctcctcttgctgctcgctgcggcctgtggacctgcagcacatgcccacgatgctgtcgagctcccgcatcatggcttagccttgaaggaacaaatttcttcaaccaagattcctgcccgtctcaagagtggcagcggactatgctcggcctgtgaaaacttcacgagcgaagccgtcacttatctcggcaaggaacagacacaggacaggatcatggagttccttcatgatgcttgctcccaatcattctcctttgaacagaagtgtgtcgagctgatggactcttatgcgactctcctgtttgccaagatcacggagatcagaccggaagcgttctgcaaacggtatggcctgtgcagggacacagctcttctctccggtgtgggaagtgacagcacgtgtgtgttctgccaccatctgctcgatgaaatcatgtccaaactgaaagatccagatgcggagtttgagataattcagattcttgtcaaggagtgcaataagatcgaaggtcacgtccagcaggttgagcagatagtggttgaaaggtctgaaggttggcattgtggatatttttgctatcatgcatggattcccagacaatgtgaggacgaaccagaagggcgagttctgggtggcgatccactgtcggagaactctacgcgttgatcatcagggacagcccgatggccagatgcttcacatcatggaggacgacaagggagaggtggtgagagttatcatcgaagtggagggtctgtctgatgccattcatcgctgtctttgacctcgtgaaggcgtcttagccacttcaatttgattggaaatattgttgttttaagatacgggtccatggttaatgttgtacgcttctctgagaagacctgtcattccaataatttggttctggagcaacctggagctgtatactgatctagcttcttttagtaacaaatgtaagttgctcacattttctttagattgtctatagaactttgaacaaccagctcgtcccttctaatttttatttggccagcaaacaaat

SEQ ID NO: 5271 - DNA, 3761 bp, Zea Mays
gttgtgctgctactgctgtcctctgctgtgctgctactgctgtcctgcgcagtcaaaagactgcagctgcatgctgtcctgctgcaactgctgctgtcctgcagtagtcaaaaggttgctgctgctgcgcagtcaaaagactgctgctactgctgtcctgcgcagtcaaaaagactgctgcatgttgtcctgctgcaactgctgctgtcctgcagcagtcaaaactgcaactgctgctgaccacatgacttattccatcacgcggctccgctcatttattttgtttgacactgaagtaccatgctcttggatagatgatgttttatcacgtttcagactactgagggtcctatgcctaagatttgcaaatattgcagaagtgcctggcgtggtcacagaattgtataacttgcgctatattgatttttcatacacaaaagtgaagacaataccagcatcattcagaaaacttgtcaacctacaagttttggatctcagattcacctacgtagaggagttgccactggaaataactacgctaactaacttgcgtcatctacatgtgtttgcagtccatgattttcaacaaagatcattgaattgtttaggcgcaacaaaaattcctgttaacatttgtcatctaaagaatctgcaagctatacagatcgttttggccaacaaagatttggtttcacaacttgggaacttgaaattaatgagaagtttggctatagcggaagtgcggcaaagctacattgcagaattatggaagtccctgacaaagatgcctaacctgaataggttggctatttcaacatgcaacatggaggagattcttgattttaaaatgctaaagcccttatcaaatctggttttcttcaagcttgcaggaaagttggagtcaggcgtgcttcctttgatgttgtattattttgagaagttaacatggttacaattagactggtccggtctaaagaaggaccctatgagctccttatctcacatgtcgaaccttgttcatctgttcatgtgcgggtcatattgtggggaacagctaactttttgttcaggatggttccccaagctcaattatctgcaattatctaaaatggagaatctgaattggattgagatagaggatggaacaatgatgtgtctaaataatttgtacttagttgatttagggaatctaaaggctgtgccctatggcatcaagtacatcaggacactgcaccagatgcatctgacagatatgtcaaaggagtttctaggaagtctgcaaggaagcgcgagtcccgttgttcaacatatatgcaacatccatatttttgaatcctctgattctgaagcagtaaataaattcttctttgagccataccttgccaccaagttcggccctggtgcaactaagcatgcccctacttacctgggatcatctggcatctgacagtcggtgagaattcttcttcaatgaaccagccgcgcaatatgctgttcatcttggtgccggaacttgagacggaactgattgttcgtgttgtgcctcgtttatggcttttgaacctagctagtggcctgctatggacttcctccacacaggtgttgcttaatggatctccagggcagcatatatctcatcggcgtgggctcagacaagatgacccactttccccaatgttattcattttggtgatggacgttctgggctttcttattaccaaggctgagaatgaagggttgcttcggccccttgctacaagaactctccatcacagattctctatttatgttgatgatgtggttatatttatccaaccaacagtcggggatatcaggactgtactggacattcttcatatctttggggaggcttccaggttgcgaactaatatccagaaaagcaatgtatgcccaattagatgcggggaacaagacttgaccttactgcaaagcttgctgccttgtgagatctcacaatttccctgcaaatacttgggtctacttcttgccatcaagaaacttaccaaggaccaagtacaaacgattattgataaaattgccaaccaactatcggggtggaaatctgatttgatgactaaggctggatggaaggtccatgtgcagtttgtcctcacagggatggtcatatatctcgcaatggctgtggatttacctccttgggctctcaaagctattgacaagatccgccgaggctttctttggcgatggcgcaaagaagcgagggggggacactgtcttgttgcttggggaaaagtttgtcggccgcttgagcttggtgggctagggatttccaatctcattgatcttgcttgggcacttcgtatgcgttggttttggttagcaaaaactgatccgggacggccatgggcctcccttgctatacaagttcccagcaaggctaaagttttcttctcggtggctatgcaaactgaaattggtaatggagcctctactcttttttggtctgaccgttggttgatgggacacagggtcatggacattgccccaagattactccagaatgttcctaaaaggagggttaataagaggactgttttggatgctctcactaatcagacttggatttcagacatacaaggagctcttgctgttggggttatttctgaataccttgctctatgggatattgtcacctcggttcagcttagacgcgaagtgaatgacactcacttctttcgtctcgccgccaatgggaagtattcaacaaaggcagtctatgagggtttttttccttgggtcgacgatttttgaaccgtaccacataatttggaaaacccgggctcctccaaaggccaagttcttcatgtggctggtcgcgacggctttggacagctaacaggttggaaaagagaggcatggatcaccctacgagctgccctttgtcaggagcaggccatttgctgattgggtgtgtgttcgcccgagatttctggtttaaactactatctcaagttaatctccaaaacatggcctctcagcttgttgatgcatcttttatgggctggtggagatggctgggcaatcagatacatggagtcagtggcaggggaagcagtaaactccctggtaatttcaggagcttggacaatatggaaacgtcggaatagctgtgtcttcgacagaaacagacctaatgtggctcttgctgtcagaatggcgatcaagagcgagagaagcgggagctgactggggcaagaaaactatccttgctgactagtcacatcccgggtctgtaggaatttgtagttttgggtgctttattcatggatgagtatcagtatgtctgtatttggccccctgtgaggtggctgttttgtattatctctgtttttttcttcttaatggaatgaaacacaactctcctgcgttttttagaaaaaaaaaacaatttgcagccaccaacaatgctggattcaggaaacatccgccatctgtctgcatggcggctgaagcatgggtcttgcttgaagattccgtgtttgctgaaaacggccagcaggaaaacagtagacgtttggttgaacagggtgccactgccagagatttgagataggagagtggcagtggttttgcttgagctccgtgtcacctgaaatactttgttgtagcaaggcctgtaggagaatttctcattgtaccatcgctagacttggtcagtctgtactttatacggttagtcgcatgtaaactgtgagtttaccaaaaaagaattaccagac

SEQ ID NO: 5272 - DNA, 815 bp, Zea Mays
gttctcttgttcgttcatggacatgcaattcccaaacgggcaactgaggtacgtcgccggcgacggcttcacggcgcgtgctttcctgcccctccgtggcggggtcttgcaagcccacggaaagttcccgggggagaagaggctcagcttctctttcaaggaatggcggcagcgtcgtcccgatggttcagtggccggataagtcactctcggtgggggtcgtccaggcgttgtcttggaggagatccggcctgatgctgcagccagcaacacagatcagcatatgtcctacgatcggcgggcgccatcctggggtgtgcgtggagctgatccactcggcggacgacaacgtcggcgtagtctgcggctactcccacaccgcttcttcccctgcttccgcatacgcctccatatcgatcggaaggtcgaagctgaacggcggagcggcaaggtcagggttagcgttcagagtagacgctccactactccacggttttggccggccatggttctcggtccagatgaacagcggcatcgagttctgattccccactgtcttgccgttgccatgactgaacgaacgaacttactgtacagtagttgatgttgtgtataaagcttgacgacgactcactgatgccatgagtatacgcagtaaacgctacaacactatatgtttggtcgctggctaacttatcataatatgtctattttttattgagaaattagacattttctaaattaaatttcgaatataaattatagataacagtagcagactagtaagcagtacatagaacaacactgcgtcaaaa

SEQ ID NO: 5273 - DNA, 3463 bp, Zea Mays
ccggaaaagttgtagtagtgtctggtttctggtgaacacattaagatgcattattgtgaaaaaaataaacatctagatgaaaagaagtataattaggaagtgtggcttttctggatctaaatgggaaaaaaggaatatggttctttagaatttagttttcggtgaaactatcaattccatttggcatgcttgatctgatgtttacttaaatttcctatattcttattctcctgttttctaatattgccttttcatgatctggatcacaagatgctgcactgtcctcatggaagcctctcagccctcaaatgtttgtctttgcagatttatttgtttaggcaactctcatttagctgcccccttttcctgttaaggaaaaaagaagctttaagttcagtttctcctagaatctctcctcaaactgtgataccagctgatttactattatatctgtttattctcttctttggaatgctatggcaacaagtcaccaaagagaataaaggaacagaatgcagtgccgccaccacttcatcgtgtaggggtgctgtctagtgcagacatgtcaactcagttatgaaaagtctgtaggctctggattgaggcgttaaaaaaaatctttatagttttccataagtggtggagccaagtacagttctgtgcatccttctgttgcggtcaattgccatcatgcaggtttggcaccacgcaaaatagtggtacaagtggagtcaagtacgtcttggtgacaattttttgctcctggccaatgccatggtatttgattgaacctagctagggtagtggaacctcgtagttgttccaaccaatggtaagctcatataattgcaccattggtaggtaaatgtcaacatgtctctctctctctgcaaccttgactattagcaatatcaggtcagggctctctcttttttttctctctaataaacacacacacacacacacacacacactacccagaggactaaacacatcagcaccttttacaagttactataaaatggcctcaacctagactgaactccattgatttcactatcgtttttatctgctgatctcttgattttcatgtgacttttcagcgaagtagtgcaatattattcaggaaagatggttgccagctgccctagtttgaccggagagatcaaatatgaagtggctagcagttatttggttggtatggtgattagtgtatatgccaagcttttacagataggcaagaattgacagtagcaaattcttgactagctccgccacctacaggaaaatctagaagaataaaagaaagtcagagatggcgatgtttcttggttgctgtcattagctgccgcttgacacctcggcgacgaaaaaggagccgtccactcactgagccttttgtccccctggacatgcaggtgagtggcatgtaaccaacctgaatgacaggaggatcattgtggtggcaacgccaggaggcagttggatattcaagatcatgacatgaaagactttgggaaggggagagggcaatctccatggatcaaggtgtctgcacatgatccaagcgcacaactgctcaaagcacacaagagatcgtgttgtgtgttgtgtttttgggccgtaccaggaccagagcgggcccctatagctatagctatagcagcaatgagctgggtcgtactctctccacgacaacactgaaccgtccgtgtgcgttcctgttgccgtactgaaatccacagagaggatagctgggctctgatccgggatttatgtcaggcccattggggaggtcatgtgactcagcaggtcagtgcgtttccgctcaccagctaccattgcgagatcagtaggatgtgtcactctctctctgctgctcttttggattcttggcgaggtttcagattctctccagtacccacttgcattgcagctctgatggtcgccaggtaccaagagcacgcctctgcgtaatccactgtgctaataggcacctttgaattgatgcatgcatgatctatctgctgccagtttgctccatcggcaccagcagcaacagctcgtcacgtcacacatgactaggcatatgtattgcaacagccttgttcagttcaccgcagtgagatgtactgatcccccctcacagctgaaatcctgcacacagcaaggtccccaccccactcatcataaactcatgcggtgaaatgcaatgcgatcctccggccaccgccgccaaagctctgtggctccccaggtggccctcctctgacatctcccaggatcaagctcagggacggaaggtaccttgcgtacaaagaggatggagtacagagagacaaggccaggtacaagatcatcacagtgcacgcatttgatagcaccaaggacttcccctcgcctgtttctaaggagctcgtggaaggactgggaatttacctccttgcttatgacagagctggatatggggaaagtgaccccaatcccaaccggcatgtcaagagcgaggcgctagatatcgaggagcttgccgaccagctgggccttggccacaagttctatgtgctaggggcctcaatgggaggatactcggtttggggatgcctccagtatatacctcacaggcttgcaggagctgcgctggttgtgccaattatcaactactggtggccttcgttcccagctgaattatccaagcaggccttcaacagactgattgtgccagagcagagaactctttggattgcacacaacataccttccttgctttacctgtggatgacccagaggtggttcccttcttctgcagcagccatgcaccaccctgaaatatttagcaagcatgacatggaggttcttcagaagatgatggcaatgccaagaaccattgagaacaaatcaaggcagcaaggcatttatgaatcgatccaccgtgatttacttgtcgcttttggaacttgggagttcgatccaatgaatgtcaccaatccatttcctcaaaatgagggctctgtgcacatctggcaaggacgcgaagataggttggtgcttgttgagctgcagaggtacattgccaagaagcttccgtggatcaagtatcatgaagtcccagaaggtggacacatgttcgtgatggtagatggatggacagaccgaattctcaaggcactcttgttaggagaagagcccctagatgtgtgacagtagttccattttcaaaatgtcaaaaactgcagctgccagctgttattttacttaattttattcccaatttgtacacttgtattcctacaacaccaagactagtctaattcataatccgatagactttccatcatgtcaactcattacaacagcagtgataccattgtactcatcccatacgcatatgcctttggtccaaaattgatgtcaacccagaaagcacgtagtcaaaacattcaaattggagagaggggtgttt

SEQ ID NO: 5274 - DNA, 1534 bp, Zea Mays
atgtcatccgaggcggtgaaggtgacaatgctagaatcgatgttccgcagacggaagcgtgaggagcagtgggctgtcaagaagaagaaggccatgcccgagaagaagaagtccatcgagagacgcaagctcatattcagtcgtgcaaagcggtgtattccggggtcaatcggactacagtgctgttggaggaagggaaccggacaaatcaccccgtcgtctcgtcccgtagtcactcgcagagtcgcagtcgcagcccctgcgcccaccgggatcgtgatggagagctgggtccgcgcggtggtggaggccatccactcctctcgctcccagacagtcatctacctcgccggcggtgcatcccaggcgctcggttggctcctctccgtgcccggcgcttcgggcaccgtcctcgaggtcgtcgtgccctactctagggcctccatggcgcagctccttggcaagatgcccctgcaattcactagcaagcaggctgcagaggacatggcactggccgcatacaatcgagcactcaagctttctggaccaggtctgcaagttatgggtgttggatttactgggtcactggcgagctcacgtccaaaacatggtgaccacaggttttacgtgtcaacatggacacataattgtctcaggacatcacatgttaccttgtcgaagggtttacggagtagggaggaagaagacaaggtttcaagctactttttgcttaaggcaatagcagatacctgcagagtttctgcaaccattcagtcagacattcacaaatctgaaattccagaagaaatcatggaacaatttgatgaagatcaagaactccagcaagttattaatgggcaagtttgcatgaaagtatataattttgctgctccggcggaaagtaacttgaacagaaaaataattctgcctggttcgttcaaccccttgcacgatggtcaccttagattgctagaagctgcagtaagcatgtgtgatgatgggcttccattctttgagatatcagcaattaatgctgataaacctccactatctattgcagaaattaagaggcgtgttgagcaatttagaaaagcagggaagaatgtgattatatctaaccagccatacttctataagaaagcagaacttttcccaggaagcgcttttataattggtgcagacactgcagcaaggcttgttaaccctaagtactatggaggagattacaacagaatgctggagatacttctcgaatgtaagagcatagggactacttttcttgttggtggtcgaaagattgaaggagatttcaaggtccttgagaacttagacattccagaagagctgagagaaatgttcatttctattccggaggaaaagtttcgcatagatatttcatctactgaaataagaaagagccaagggctctgatgtatcaagtggtcgtattctacagcagatttgggatgattctccacgactatagaaggaggaatttcttcagatccttcccgcatgcaatgtcataaagagc

SEQ ID NO: 5275 - DNA, 2015 bp, Zea Mays
atgtcatccgaggcggtgaaggtgacaatgctagaatcgatgttccgcagacggaagcgtgaggagcagtgggctgtcaagaagaagaaggccatgcccgagaagaagaagtccatcgagagacgcaagctcatattcagtcgtgcaaagcggtgtattccggggtcaatcggactacagtgctgttggaggaagggaaccggacaaatcaccccgtcgtctcgtcccgtagtcactcgcagagtcgcagtcgcagcccctgcgcccaccgggatcgtgatggagagctgggtccgcgcggtggtggaggccatccactcctctcgctcccagacagtcatctacctcgccggcggtgcatcccaggcgctcggttggctcctctccgtgcccggcgcttcgggcaccgtcctcgaggtcgtcgtgccctactctagggcctccatggcgcagctccttggcaagatgcccctgcaattcactagcaagcaggctgcagaggacatggcactggccgcatacaatcgagcactcaagctttctggaccaggtctgcaagttatgggtgttggatttactgggtcactggcgagctcacgtccaaaacatggtgaccacaggttttacgtgtcaacatggacacataattgtctcaggacatcacatgttaccttgtcgaagggtttacggagtagggaggaagaagacaaggtttcaagctactttttgcttaaggcaatagcagatacctgcagagtttctgcaaccattcagtcagacattcacaaatctgaaattccagaagaaatcatggaacaatttgatgaagatcaagaactccagcaagttattaatgggcaagtttgcatgaaagtatataattttgctgctccggcggaaagtaacttgaacagaaaaataattctgcctggttcgttcaaccccttgcacgatggtcaccttagattgctagaagctgcagtaagaaattaagaggcgtgttgagcaatttagaaaagcagggaagaatgtgattatatctaaccagccatacttctataagaaagcagaacttttcccaggaagcgcttttataattggtgcagacactgcagcaaggcttgttaaccctaagtactatggaggagattacaacagaatgctggagatacttctcgaatgtaagagcatagggactacttttcttgttggtggtcgaaagattgaaggagatttcaaggtccttgagaacttagacattccagaagagctgagagaaatgttcatttctattccggaggaaaagtttcgcatagatatttcatctactgaaataagaaagagccaagggctctgatgtatcaagtggtcgtattctacagcagatttgggatgattctccacgactatagaaggtacatttggatgctagcagtcaagtctgaattctccaagcttacttttttcacatttgtggggttgtattcacgcattctattgcagattatgataggtccattcatgcatccttgcaaaggaactgttgatgtattctcagggagaatattttatttaacttttgtcttgactgggccccttggtattttgttcagcaaattggaatcaatcctcttgtagaacctcttgatgtcttcactaccccttgcggctaggtggtcaacctctgtctcatatctttggtacaacgctggcaaagtgtgggcgcagagaaatcctgtggatgaaatataagaattgttaaatgtatgtcataactgctttatatattgtcttgccttgttataaaagtcacaattttctgcgctactcaccaagatatagaagacttgtgaagctgtaagaacttacaacctctgacactattagcagtgacaagaccaccttagaatcagaaacagaacattgttagcgcaagactacaacatcgtagatttccaagaactctattagattgttgaatagcatcaaagtaatggcatagccgttcagtgctt

SEQ ID NO: 5276 - DNA, 1395 bp, Zea Mays
cacagatagatctgggtatcatgagcatgtgtatatatgtagtgcagtcaattaggcatcaataaaaataaataaagcatcaatagatggagggtgaggctgtccatatgttgcaatcaggccaccaccagtggaataaaggacagccaacattgcaagcgttcccagccactcaaaggctaaattcacgtttgcaccagatctcggaggaaacaaaaaagatggcccctaaattagtctttgttcttcctgttgtgctcctcgccttggcgctgcaggcgatcctccggccaccgccgccaaagctctgtggctccccaggtggccctcctctgacatctcccaggatcaagctcagggacggaaggtacctccttgcttatgacagagctggatatggggaaagtgaccccaatcccaaccggcatgtcaagagcgaggcgctagatatcgaggagcttgccgaccagctgggccttggccacaagttctatgtgctaggggcctcaatgggaggatactcggtttggggatgcctccagtatatacctcacaggcttgcaggagctgcgctggttgtgccaattatcaactactggtggccttcgttcccagctgaattatccaagcaggccttcaacagactgattgtgccagagcagagaactctttggattgcacacaacataccttccttgctttacctgtggatgacccagaggtggttcccttcttctgcagcagccatgcaccaccctgaaatatttagcaagcatgacatggaggttcttcagaagatgatggcaatgccaagaaccattgagaacaaatcaaggcagcaaggcatttatgaatcgatccaccgtgatttacttgtcgcttttggaacttgggagttcgatccaatgaatgtcaccaatccatttcctcaaaatgagggctctgtgcacatctggcaaggacgcgaagataggttggtgcttgttgagctgcagaggtacattgccaagaagcttccgtggatcaagtatcatgaagtcccagaaggtggacacatgttcgtgatggtagatggatggacagaccgaattctcaaggcactcttgttaggagaagagcccctagatgtgtgacagtagttccattttcaaaatgtcaaaaactgcagctgccagctgttattttacttaattttattcccaatttgtacacttgtattcctacaacaccaagactagtctaattcataatccgatagactttccatcatgtcaactcattacaacagcagtgataccattgtactcatcccatacgcatatgcctttggtccaaaattgatgtcaacccagaaagcacgtagtcaaaacattcaaattggagagaggggtgttt

SEQ ID NO: 5277 - DNA, 1716 bp, Zea Mays
ccagttcagcttaccttcttacccccttccttctgtgagctttggtgatgcgaaagtgattgaggaacgttggtgtttctggataattggagatgtactcaggccagcaatctgatcaaggtcctagtgcaaatagtggcagagaattctccgaggcaaattggaattcttacacaatgcatcaaaagatagcttatagtggacaacatgggtttggaccttacggcatgggcttagaagataggctggggttgtatcaatcttcatctggtacattaagtcatgacatccaaatgagtgatgagcatagcggaggtgtgaagaagaggaaaggagtggaggactgtgtcacattgttgcctaatgcaggtgatcaacaaacagaaggttcatctcagccagaaaggaattcaatggaggaggggaacagaaagatttcgcccaaaatacaaagcaaggaagattcttctgatggtgatggtactaaagaggactatgttcatatccgggcaaagcgaggtcaagccactaacagccacagcctcgcagaaagactgaggagaaaaaagataagtgagagaatgaagcttcttcaagatcttgttcctggatgcagtaagatcactggcaaggcagtcatgctcgatgagattatcaactatgtacagtcattgcaacgacaagtggagttcttgtcaatgaaactttcaactgttaaccctgaacttggctttgacattgagcagatcatatccaaacaaatgatgctttcacaagacagacatcttgctttctatggagtcgatccaggatcaagcagccttactgctccattcaaccaaggaatcgtgcagccagcaatgatgtgcaacatttctaatcctgccgatgttttgcacggaactattcatgacgtgtcaacaatgaaccagataccttccatgtgggaaggacttcagagcatgcctcagatgaacttcaaccctggtgtggcagctgatagcggcaccaacaactctggctccatgaagatcgaacagtgagctgctgtatagtagcttcgaaattgttgtgtgaatcactgaatcatcgtaaagcgctctcgagatgaagctttttttgtatagctggaggcctgaccatttatgctggattcctgcggttgctcccatactgtgcggcacattgtttatggtatggcatatggatcgtgtacagctggagctgaagaactgattccactgtaaatttctgttgtgctttggcctgcgaaaattgggatggaaacctagtagcatccatgaaattcaaggacagaagcttgttgggattgggacttgggaccacgtgctgaatactgatgggcctaaacgtactagacgagtactaatagaatcgtagttgtaggtaaaaaaatgcagagtttgaaaccagtggttttgtcagaaattccatggagtttgctatatttatttatgatatcaaaacagaaactgaatggccgctggcactgggctgcaagtctccaacctggttctttccttttcctttgttttttttctaaagatttatctgcaaacttcactgcaccggtgttatctttttttttctaattagagtttcgaggttgataaaatgggcagaattctattcagaaaagaagggattatgggatatttgaacgtactaaagctaataattatgtgctaagattag

SEQ ID NO: 5278 - DNA, 1727 bp, Zea Mays
aggagctcttttagcttcttaaggagcagctgcctagccatatcctaaaggagaccgcacttcttggtgattgaggaacgttggtgtttctggataattggagatgtactcaggccagcaatctgatcaaggtcctagtgcaaatagtggcagagaattctccgaggcaaattggaattcttacacaatgcatcaaaagatagcttatagtggacaacatgggtttggaccttacggcatgggcttagaagataggctggggttgtatcaatcttcatctggtacattaagtcatgacatccaaatgagtgatgagcatagcggaggtgtgaagaagaggaaaggagtggaggactgtgtcacattgttgcctaatgcaggtgatcaacaaacagaaggttcatctcagccagaaaggaattcaatggaggaggggaacagaaagatttcgcccaaaatacaaagcaaggaagattcttctgatggtgatggtactaaagaggactatgttcatatccgggcaaagcgaggtcaagccactaacagccacagcctcgcagaaagactgaggagaaaaaagataagtgagagaatgaagcttcttcaagatcttgttcctggatgcagtaagatcactggcaaggcagtcatgctcgatgagattatcaactatgtacagtcattgcaacgacaagtggagttcttgtcaatgaaactttcaactgttaaccctgaacttggctttgacattgagcagatcatatccaaacaaatgatgctttcacaagacagacatcttgctttctatggagtcgatccaggatcaagcagccttactgctccattcaaccaaggaatcgtgcagccagcaatgatgtgcaacatttctaatcctgccgatgttttgcacggaactattcatgacgtgtcaacaatgaaccagataccttccatgtgggaaggacttcagagcatgcctcagatgaacttcaaccctggtgtggcagctgatagcggcaccaacaactctggctccatgaagatcgaacagtgagctgctgtatagtagcttcgaaattgttgtgtgaatcactgaatcatcgtaaagcgctctcgagatgaagctttttttgtatagctggaggcctgaccatttatgctggattcctgcggttgctcccatactgtgcggcacattgtttatggtatggcatatggatcgtgtacagctggagctgaagaactgattccactgtaaatttctgttgtgctttggcctgcgaaaattgggatggaaacctagtagcatccatgaaattcaaggacagaagcttgttgggattgggacttgggaccacgtgctgaatactgatgggcctaaacgtactagacgagtactaatagaatcgtagttgtaggtaaaaaaatgcagagtttgaaaccagtggttttgtcagaaattccatggagtttgctatatttatttatgatatcaaaacagaaactgaatggccgctggcactgggctgcaagtctccaacctggttctttccttttcctttgttttttttctaaagatttatctgcaaacttcactgcaccggtgttatctttttttttctaattagagtttcgaggttgataaaatgggcagaattctattcagaaaagaagggattatgggatatttgaacgtactaaagctaataattatgtgctaagattag

SEQ ID NO: 5279 - DNA, 1882 bp, Zea Mays
  misc_feature (1881)..(1882): n is a, c, g, or t
caaacgcacacacccggaccccggtctgcgtttgtccctgcgggctgcggccctgcctcttctcgtctcccgttcccctcgccgcgtgagctctctctctctctctctctcctctgtggtgacgactgggcgcccgcacccctggcagccgccgccgcccagtccccgtcgggcccttcggcaggtcttcttcggccccttcgccggcgacgagccgcaccaggcgtacatgtgtacacccagcccaggcccttaactgcgcccgcccctgcgactggttttcctgctggtttctgtggatttggctgccggaggattggtgcagcctttaggatcacggtagattcgctgtgaaatccgaagggtgctcaggagctgcgtgatcgaccgcctgcaggtggggtgggcgcagaagggaggacaggtggagggtctggtgaattgttatagcaagaagaagaacaagaccggcagtggttcgaggaatcttgcagccagagcctggtcctccgagatggagggttctgatgagggtggagaagtcaacacgggcgacctcatcggcgggatcggcagggagttggccatttcatgcctgctccgtcttccccggtcttactattatgatgtggcatgtgttaatcgatctttctactcccttgtgaggtttggggagctttacaggttgaggcgtgaggctgggatcgtcgagcagatgatctactgctcatgcaatgttctcgagtgggaaggttttgatccgcgccgccaacggtgaaatgatgaacacaccaaggtgcttatttggctccgcaagcttcggtgagaaggctattgtagctggcggtattggccagaacggtacattggactctgctgagctttatgattctgagatgcagacatggaccactcttccaagcatgaatagggcacggcagatgtgctctggtttcttcatggatggcaagttctatgtcatcggtgggaaatctgagaggcacaatgagatccttagttgtgctgaggagtttgacttggagagcagcacctggcgcttgatcccagatatggcacagggtcttaatggtggaagtggtgctccacctcttgttgctgttgtgaataatgaactttatgctgctgactatgcaacgaaggaggttaggaaatatgacaaggaaaataatgcatggatcactcttggattgttacccgggaggtatacatcagttcatggctggggcattgctttccgtagttgtggagatatgctcattgtaattggtgcaatgagtgctggtggtagcggggtgattgaaatttgttcctgggtacccaataatggactgccagattggaagatcattggcacccgccgttccggaagctttgtgtacaattgtgctgtgatgagttgttgacataccagggctattacattatcaactgtacatcttgaccaaaaggaaggataaagaaggcaaattctgctgagtctgtttactccttgatgggtaacttctgcccacaggcattttaggctaagctgaaggtaagctatctactatctatgaaggcacaagttggatgatagcacattgtcttcatgagcttataagtgtggtgattagtcatgtatatgtttagcatataataggtgattgtgtaattcagtttgtgtaatggtccattcaaacgtaacaaaatcgataggaggatgaacagaagattgacgtctgtgttctgggcctgctctctgatgagggacacacatcgggcatgcatatgtgagcccttcagcggatatcatatgtttgtatggttttctgtcagctgaattgaacttaatagccattgcttttaagtctgactatttgnn

SEQ ID NO: 5280 - DNA, 2374 bp, Zea Mays
ggcgatcccatattccccttccgatcccatcccttccgcatcgtccccgaacgacgcagacggacgcaaggcacggcgccgacatctccccgtggcccgagggcccagacatgaaggccctgggcgcgcacgccgccgacctgctccgaggcccgcacctactccgcgccgccgtcttcgctttcgccgttgcgctcgccttcctcgttggctaccactggcccaacgcctccccgcgccttgtcttcttctcgtccgatgcctcctcgtcgtcgcccaggtcgtcctcccgctctccttccgtcgtgctctcccctaactctaacgtctccttcgacccatccctgatccctacccccagcaccccgcctgcttcttctactcccaatgcctggtccccgcccgcactaccaccgccgacatcggcgccgccgcctcccctcccccctcctccaccaccagcgcgcctcggcatcgtcggcgaggacggcgctatgcaggacgacttcgacatcggcaacgtcggcgccaacgacactgatctggccaccgacgagaccgcgccgcaggagcctagcgacgtgggcgccagcggtggaccacctagggtgcggattgagaggttcccggtctgccccgagagcatgagggagtacataccctgcctcgacaacgaggatgatatcaagcggctgccctcgacggagcgcggggagcggtttgagcggcactgccctgccaaggacaagggtctcagctgcctcgtgccggcgcccaacgggtacaaggcgcccatcccctggcctcggagcagagacgaggtctggtttagcaacgtgcctcacacaagattgattgatgacaaaggaggacagaattggatcaccaaggtcaaagataaattcagatttcctggaggcggaactcaattcattcatggagcaaatcaatacctagaccagatctcccagatggtaccaaatgttgcatttggatctcatactagagttgtcttggatgttggctgtggagtagcaagttttggtgcatatttactttcacgtgatgtcctgacattgtccatagctccaaaagatgttcatgaaaatcagattcagtttgctcttgaacgtggtgtgcctgcaatggcagcagcatttgcaacgcgccggttgttatatacaagccaagcgtttgatataatacattgctcacgctgccgaataaattggacccgtgatgatggtatcctgctcctggaggttaatagattgcttagagctggaggctactttgcttgggcagcccaacctgtttataagcatgaagaggcccaacaagaggcatggaaagagatggagaacctcactgcccgactttgctgggagtttgtgaagaaagagggatacatcgctatgtggaggaaacccttaaataactcttgctacattaaccgaggtcctgaaggaaaacctccactttgtgatgctgatgataacccggatgatgtctggtatgttggtctgaaagcatgtattagtcggcttccagagaatggcgaagcaccaactcctgttcaatggcctgcacgcttaatggagccaccaaagaggcttcaaggcgtcgaaatggatgcctactcatcaaagaatgagcttttcaaagcagaaacaaaattttgggacgacataattgacggttatatccgtatctttaagtggaggaagttcaaagtccggaatgtaatggacatgagggctggatttggagggtttgcagctgctttgatccgccagaaactggattggtgggtgatgaatgttgttcctattagtgagccaaatacactacctgtaatttttgatcgggggcttcttggagtagctcatgactggtgtaatatctctagcatcttgctggagatggaccggatactcagaccaggtggtaaagcatatattcgtgaccggaaagaagttatacaggagatcaaagaaataacgaatgccatggggtggcgtggtactatacgtgacactgccgaaggcgcgtacgccagtaggaaggttttgatgtgcgacaagcctatggcgcgttaggcgatcaggtgaagacaagcaggggtaattttaggtacttttgcaactgaaaagagctgctgtcgggactgacatttgtgctgtagatagggtaggtcaaggactaatttgtaactatttgattgatcatccatttgtaaaatgatgatctgtgtagtttctgacatgtgccaatttcttttgttgaaacattgtcatggaaaccctacaaaagtgggggaaatacgaagagaccgttttaaactaaacaatatcagagtaaaaattaataataa

SEQ ID NO: 5281 - DNA, 1443 bp, Zea Mays
cctgtctatacgttgcatgttcagttctgttaatttgcgtttattcatttggtattcgtattcaaaatcttcaaccaggtcaaatcatcatggatatagatttccgttggggtggtaatccaagcataatcctagctgttgatgctgtagttgcatcactgccaattcagctcaaggatcttcaggtctatactgtcatacgtgttatatttcaactgtctgaagacatcccttgcatttctgctgttgttgtggctctccttgctgatccagagccaaaaattcagtacaccctgaaggccattggaggaagcctaactgcagttcctggactttctgacatgattgatgacactgtcgattcaattgtttctgatatgctcttgtggccacacaggcatgttgttaaacttggtgtcaatgttgatacgagtgacttggagcttaaacctcagggaagactttctgttactgtggtaaaagcaacttctttgagaaataaggagatgatcggtaaatcagacccttatgtgaaactgtatgtgcggccaatgtttaaggtcaaaacaaaagtcatagatgatgacctgaatccggaatggaatgaaacatttgacttgattgtcgaagacaaagaaacccaatctgttatttttgaggtttacgacgaagacaaacttcagcaagacaagagactaggtgtggcaaaactagcagtaaacactcttgaatctgagattacccaagacgccactctgaagctgctacattcactggatccaattaaaaataaggacaccaaggataggggcacattacatcttaaggtaaagtaccacccctttacaaaggaagagcagctggaagccctagagatggaaaaacaagccatagaggagaggaagcgtctgaaggaggctgggataattggtagcacaatggatgctgttggttctggtgttggatttgtgggtactggcattggcgctggcctcggtttcgttggttcaggaattggtgctggcgcaggccttgttacctctggtattggtgctgtcagcagtggccttggtaaagccgggaagttcatgggcaggactgtgacagggcctttcagcatgtcccgcaagaacggcagcagctctactgctccccagcatgatcaaccttcggcgtagtctgatgtacagtgaaagacaattgtcatatttgtgacagggttgccattctactctgtatacgtgctatacctaggactatacgtagcacttcgtttttgtttctgccactgcctggtgcctggttatatgaaatatgttttcgtcgttgtattgaaacgaggatctttcaaagtaaagattgctgtaaattgcatcagctttcccgaactatatgaaatttgtgcagtctgttgaagtaaaaaaagaaaagaaaatccactga

SEQ ID NO: 5282 - DNA, 1733 bp, Zea Mays
gtgagttggttagggttgtgccgctgcgagcagactgtaataagcctcgccccgttctcgctacaccgtggagttggatcgttcaattcaggactaactcagggacgacctcaggaagctgtgcggtgataacttcccggagtggatatccttcccgcagtttgagcaggttaaatggttgaacaagcatctgagcaaactttggccttttgttgtagaagctgcaacagtagtggttaaggaatccgttgaaccactgctagatgattaccggcctccaggaataaaatctttgaagttcagcaaattttctcttggaaatgtgtcaccaaagatagaaggtattcgtattcaaaatcttcaaccaggtcaaatcatcatggatatagatttccgttggggtggtaatccaagcataatcctagctgttgatgctgtagttgcatcactgccaattcagctcaaggatcttcaggtctatactgtcatacgtgttatatttcaactgtctgaagacatcccttgcatttctgctgttgttgtggctctccttgctgatccagagccaaaaattcagtacaccctgaaggccattggaggaagcctaactgcagttcctggactttctgacatgattgatgacactgtcgattcaattgtttctgatatgctcttgtggccacacaggcatgttgttaaacttggtgtcaatgttgatacgagtgacttggagcttaaacctcagggaagactttctgttactgtggtaaaagcaacttctttgagaaataaggagatgatcggtaaatcagacccttatgtgaaactgtatgtgcggccaatgtttaaggtcaaaacaaaagtcatagatgatgacctgaatccggaatggaatgaaacatttgacttgattgtcgaagacaaagaaacccaatctgttatttttgaggtttacgacgaagacaaacttcagcaagacaagagactaggtgtggcaaaactagcagtaaacactcttgaatctgagattacccaagacgccactctgaagctgctacattcactggatccaattaaaaataaggacaccaaggataggggcacattacatcttaaggtaaagtaccacccctttacaaaggaagagcagctggaagccctagagatggaaaaacaagccatagaggagaggaagcgtctgaaggaggctgggataattggtagcacaatggatgctgttggttctggtgttggatttgtgggtactggcattggcgctggcctcggtttcgttggttcaggaattggtgctggcgcaggccttgttacctctggtattggtgctgtcagcagtggccttggtaaagccgggaagttcatgggcaggactgtgacagggcctttcagcatgtcccgcaagaacggcagcagctctactgctccccagcatgatcaaccttcggcgtagtctgatgtacagtgaaagacaattgtcatatttgtgacagggttgccattctactctgtatacgtgctatacctaggactatacgtagcacttcgtttttgtttctgccactgcctggtgcctggttatatgaaatatgttttcgtcgttgtattgaaacgaggatctttcaaagtaaagattgctgtaaattgcatcagctttcccgaactatatgaaatttgtgcagtctgttgaagtaaaaaaagaaaagaaaatccactga

SEQ ID NO: 5283 - DNA, 724 bp, Zea Mays
ggccttccagcacacgctagcggactctcggatgagagggggctgttcgccgattgggtagggggcaaatttgcggcgcgcgttggccagcgcgttggccagcccactgcgggatctgggcatccggcgacggcggcccgagcgacgcctctactgaagggaagccagggagggaggagcgacacagcgtctggcaaaagggcaatccggcggttggctggctcgccggcgcggcttcccctccgtagatcctaaaccctaaacgccatcgccaaagccttcgtcagccagtcctccaaggcacaggaaagttgagggaagcacgggtggtatttggagttttgtgcagataagaccaccacgcatccaatccatccctgtcttctcttcccacttcccagtccccaatcgcgttctcttccttggcgacatggcggccgccaccggctacagcgacgccccaaccgacgagcaactgctggcgtacgctgagctgcccaaacatggccgcgacatggcggaggtgttcgccgtgcgcatccccgccaccgtcggaggaaacctgccgccccgtggcagcatcgttttctacggcggccactgctgcagcgatttcatttacagctggagtccactggaagaggaagaagacacctcgaagcaaatctgcgacagccaggtctgtttaattaaatcgtacgagacgttgtgttaaatgtatcac

SEQ ID NO: 5284 - DNA, 1845 bp, Zea Mays
ggccttccagcacacgctagcggactctcggatgagagggggctgttcgccgattgggtagggggcaaatttgcggcgcgcgttggccagcgcgttggccagcccactgcgggatctgggcatccggcgacggcggcccgagcgacgcctctactgaagggaagccagggagggaggagcgacacagcgtctggcaaaagggcaatccggcggttggctggctcgccggcgcggcttcccctccgtagatcctaaaccctaaacgccatcgccaaagccttcgtcagccagtcctccaaggcacaggaaagttgagggaagcacgggtggtatttggagttttgtgcagataagaccaccacgcatccaatccatccctgtcttctcttcccacttcccagtccccaatcgcgttctcttccttggcgacatggcggccgccaccggctacagcgacgccccaaccgacgagcaactgctggcgtacgctgagctgcccaaacatggccgcgacatggcggaggtgttcgccgtgcgcatccccgccaccgtcggaggaaacctgccgccccgtggcagcatcgttttctacggcggccactgctgcagcgatttcatttacagctggagtccactggaagaggaagaagacacctcgaagcaaatctgcgacagccagggtaacctcgtgctaactgggccatcattggccacctcggcatacagtccaattgctttcttcctctacctccatgatggcagcccgcaagccggagaagccaccgaggacgacgaggacatcgggaggatactctgcgactgcatcggcgacgacttctccaactacaacagggccatagtcgagactgtccaaacgggctatggccccgctgaagtgatctatgccgtcctgagcaacggcgtccaaggccgggtcgccgtcaaacttgctcgcccgccggtgtccaaagctggagaagaagacgccaccaccattcttgggaggatcgttgctcgcagcaagctgttcgacgtcggctgcgtgctcttctacaaagagggtgacaatggagtgaacgtgcgaccgggggggctgattcagttggcgagggaagcgctcgccgtgccgctgcacatgccgctgacgattgagcttgacctgcatcgctgttccggcgatgaaattgttggaggggtccttgagttcaatcctgcgaccaacggccagcacacggaacgacttgttggagaaaatggcgctgaattggaagtggcaatttcatggtcgcagtacccttggatggactccaagcgccggctgcaggggcccttctcgctgcgcatcactaacgagtccggcgagacactggtggcttaccaggtcatcccggcaaactgggcgcccaacagctactaccgctccaacatccagtacgaggcttttggctctgctgctggacaggctactggctctgctgttggactggtcattagctctgctgctcgactgcacacgttaattaccaggatcattggcttgatctgtttggtattgttgtatcatttgcaagggattgaggtgccttagttttaattagcacttgacatgttgggtgtcctacgctgtgtgtctgctggaggcgtcgtcgatccagagtttcatcttttcgaaaaagttttgaacccaaataattttcctatgaatttcgttgattcctgcgtgacaggtagttgatgtagctctgtgggaaatgtacacttgtatttggtgctggatagctgggctgtcctgtcttgttctggctgttgtaggggctcacaactttcaactgttctagaaatctt

SEQ ID NO: 5285 - DNA, 4941 bp, Zea Mays
atttccatcccattcatctccgccagaggagggaggcgagccgcgtttttcatttcgaaatcaaaccacgacgatgccgcaggcgatggcggacgccgcgacgctctccgccctcgctctctttgcctcccgcctctcctgtcgcaggttcggggacgaggacctccgggtgctggaggccgcgctgtccgccggcgccgacgtccccgcgctgctcgccacgcgctcggcggcccggcgcctgctgcgatcgagcgcggcggaggcactcgcgttcaccgcggcgggtgcatcgctggatggtggggatgagagacggagcctcgccgtcgccgacttcttctcacgcgccttcgcgcttgtaggcgatgtcgagagctgccttgccatgagatacgaggcactgttgcttcgagacgctaaatactgcaacgaccttcacttgcaagtgtcccgtcaggagtggctaacttttgcaacggattgtcttgataatggcttctacaccattgcctccaaggcttttgcaaatgctcttgtgcacattcatccaagccacacagggcacttggactctgctaattccattgaggagaaggacaagatcattgaaataaaaggactccagaacttggccaagtcattatctgcacagcattgtgttcagataaagtctgctgaatacatggaaaggagagcttcaggtgttcacgagaagtataatttgcaatcaggaaaaccaaagttaacaggaagttcaatgttcaggctagggattaaaacgaggaacataaagaaattgcttcgtagccaggaaaggaacttgggggatttaaagcaatcttagcgttgcatcttccaaccgagaggaatgttgtaaaaagatcagttaggtgacaatttatgcaaatggagacatgaagtggagttatggatgggtctttgattcaacattaagacaaatacgttgaagagtagttgcatcctttggtagcatactcactgtgcaagtaagttgctatcttcaatgtctgcagactgtttttcatgtgttgaacaataataaaatagtaactccgcctgtccgccatgatcgacatatcgccttataataatatgaaactggaatttgttgctgactgttgaattgagtgttggagaacaatgcgggaatcactgtattttttagactactgcttcggaaatgacccaccattagggttgacaatgggctctaaattttacactataatatttaaggagggtcctatttctattcatttttgaagtaaattttatttagggtcctaacattaacattttgtgaagaaccatttggatcatgatccattatcgtctttctttaaaaaaacgaaaaaggggcaagtttatgttttttctgtggaaatgtgctattaggcacaaatgcacaggagaaacagttgtcacaactcacaaaatttgtcccgtttccgttaaacaaacacttggtggtttcctttttgatatatgctcttggaaacacctggaaatctagaaggtctgtagctggaagtaataagcattggctttatacctttgaacgtcagctacttaacatgtggcagtggaatattctgactatgatcccagagcacatgctacgggaaaattgttacttgcccaggtctatcctggtagagttgatcctggatcctccatctgagtctaaagtgctcagctggggatcacgttgtcgtgtttcaaaaaaaaaaggacacccgctgcttattccagcgaggagactttggatgctaatgtaaaagggtagatgtgggtggtcatagccatgtcggtgagcactcggtggccgttcgaattttgacttggaaagatctgaagacttttacacaggctgtgaaactaacactgtcggcagagcttaatgttgtagtggtaggggcctgggctgggcagggcagccgcagttgtacttgaatggcatggcatccgtccatattagggaccaatcaaacctcgggaaggtttgcttttgacagcagtcgcatgtgcactcacgcatggctgcaacctctgtttagaattcctgcctcctggtctggactatggaggtcacttgatcatgtggtgtcgtacgccattccgtctcatggatggattcatgcgttcggtgagaaaattagaaagccgatgctctgtaagagacagggagtcaattaaggcgtcttgtccgaaagatcaatcgtcgcagagaccttgttctgtacttctgttccgtttgattttccattttcatagtagcaggaaattagttaagattaatgcacgggtagagacgtcactgtaagctgatattgtacgtgcatgaatttgttctgtcatgtagattgggaacaagtgtgggtaaaatatagtgagattgttgtggagtcctcatccgactgctggtacatgtgtcacccctctatcttgtacacatgtcaccactactactgcatgctgcatgcatatggtcgatgtatgtaggtatagcatacttgtcttgtctcctgctacaactttagttcctagttaatacacgaatgcctgctaatatggtggacaacatatactccactgtccactgttgtgatgctaatgcatgcgacaaatccctaatcttgctgttgtcatggcctcatgcatggcatgggtagccagccactcctcctcacctactgcttacagtacatacgtgtcaactttctccttcatctttgctacactaatactctgtcgtcttctgctatgcaatgtttagtgaccctttaatttatgtgggttagattgaacctatcatgatgtggccgtgtctaatatttaaaattgaattggggtggagcaatgatccacagggagacagctgaccacgtgaatacaatgccaagagaacattacagaggcatcctttggattgacccccccgccgattccctgccctgttctaatttcataagaggtttagctagtcgcaatgcatgtgagccatttacatggaacatgggttttaatttttcatctctgacaatcaacaatgcagtagtcttgggttcttttttctttcttcttggcagagtttgaggtgtcaactctcaagtgatgcatacatgcacttcatattgccgactgctgcagcaagtggaaaacggaggtagaaattccatgccacaactgtactgattgggagacgtatagaatagtccatggaccctgaacgcgtacatatagactctctatgcatgtttagctttctttcttgtttctagttaattatttggagataaagactttctgctgcgaccaaccaacctcgttgatcgtggctgctaaatacacagacaaagaaaaaaaaacaagcatatacaagaaccattacacactgtactggtacagcactacacatccacaacaggcttgatgtgcctgtgatctagctggaagctaagggaaggtcactagctgatagatcagcatgacaataatagaaaactaagcaaaaatctatactctatcatgtttgtcctgacctggtactctgctagttattaatgcaaactatctgatctcgcccatctccacgccaatcatctccaagttccaacctatcgtcaacctgctttgttcctctctctagcctggcctgggtgtataaaagaggaggctctgcacccggcagtctccccccttccctttgcaaccatcctctctgcactctgctcgctctaaaaccttgtgaggaccagaacgctgcaggttacaccatggccggcagcggcagcggcagcccgccctgcgcatcgtgcaagctgctgcggcggcggtgcacgcaggagtgcgtgttcgcaccctacttccctcccgatgacccccacaagttcgccatcgtccataaggtcttcggagccagcaatgtcagcaagatgctgcagcagagagcggacgccgtgagcagcctggtgtacgaggccaacgcgcgcatgagggaccccgtgtacggctgcgtgggcgccatctcctacctccagcagcaggtctcccagctccaggtgcagctcgccctcgccaaggccgagatcctctgcgtccagatgcagcacgacgagtcagctgcagcttctgccgcgccagcaccggcaaagcaacaacaactctatcaccaccaccagcagcagcagacgatggagtgcgaggcttacggcagcctgctcgtgcagaatggtctgatgatgaacacgttgggcagcgctggtgcagctcatcagcagcagcagatgctgggtggcttcggctctgcggggaacactgcaatggcgctgcaggaggcgtgcctcaagaaagagaccctttgggcatgagtgggtacctccatttgtcgtcgacaagcaagacagaacaaaactagctgtccgccgctgtaattctatgaaaaaagatcatccgaaacaataatctctcagcatttctacttgaaaactaagaacaagaccattcaaaagaaatagaaactaagaaccaagacgaagctagctgagggatcttgatgtgaagtagagttttttgcacaacggctgctacagaagtttgagaggttcaccttttggtagagctgggatgagctgagagtcagctatttggacgagtttggattcacatggtgtgcacatcagtagaactgttttgttcgttgacaactggacactaataaataagcataataaaactcttaaaaatttcccaaaccgctggatcggagctgtgctattatatgtatatatgactgctgctacatccaatcggaagacctgacctaacagattcctaagctttctgcatgagacgtgtgtccttcatcatatcatatgggattatgggtcgcacaagcttggtctgacctggcttcac

SEQ ID NO: 5286 - DNA, 1797 bp, Zea Mays
gcatgccatccaagattgcacagattcagccatggaaaaactccagtcgtccacgatcgtcgtcaatgcagttaggtacagcagctagtacgtccaacacttaccgtatgtttagggtttagcaccttgtgaggtctctgtagaaactacgtacattggcgtacgcgtacgccccctctataaaacgcggcagagccgaagctaccaaaaccagctcttagcttgctttctagctagcttgtcgatctttaattttagcaatacaatgacgacgcgagcgtgcttgttggttgcgctcgccatggctctcgcgctgctcttacaggagcatgcagcaggtgcagaggctcacgaacagaagcagcaggtgcagaggctcctcaggcgcctcaacaagccacctgtcaaaacgattgagagcccagatggagacatcatagactgcgtgcacatcaccaagcagccggccttcgacaaccctcttctaaagaatcatacaatccagatgtggccttcatctcacccacgaggaggccagctgaatgaagactattccaacactgcatccagcatcacccaaacgtggcaccagaatggcagcaggtcgtgtcctgagaacaccatacccatccgtaggaccatggaggaggacgttcggagggccgactcacccaggagctatggcaagaaggagaggcggccgaaattcacccccgtcgatggcgctggacagccaacgactgtgaccagtggccaccagggtggcagtacgtactatggaaccgaggcgaccttcgatctttggcagcccgtcgttgagacggccagtgacttcagcttgacccagttctgggtcgtcagtggatcctaccaagccaatgacctcaacaccattgaagcaggatggcaggtttccccgaatatgtatggcgacaacagccctagacttttcatttactggactcgcgacgcgtatcagacgacgggatgctacgacctcaagtgctcgggtttcgtccaaacaaacaatgccatcaccttcggtgtcacccaactgtccccggtctccacctatggtggcccacagaacgacatcactattttagtttggaaggatccaaagacggggaactggtggttgcaagtgggaaaagatcttctgggctactggccgtcatccctcttcaccaacctggcgagcagtgcctccaacatccagtggggcggcgaggtatactcgcctgacgcgggccaaacatccacacagatgggcagtggacatctccccgaggaagggctcgggaaagccagttacatccggaacatccaagtggtcgatgcgtccaacactcttctgtcgccaagtggtggtctgggtctgttcgcttcacgacccaactgctataatgtgctcaatggtgctgctggtaacagctttggcacctacatctactatggggggccagggaggaaccctaactgccagtagtagtcaaattgaacgtttcctggagtgcaagcatagctctctctcctttacttaattacacgtgaagaagatataccataccggccccttacagcaactagaatgtgttatggcttactgatggcccaataggtatagttacagggcatatagttacacatgcaataatgcgctgcgagatctctgcgcgcaatggtcaattgtttccggacatacatcggaaagaagtgtcaagaacaagctttacaagcttgcgacaaatgtaatcatgcttcaccatatgtttggaatatagaatttattcgcag

SEQ ID NO: 5287 - DNA, 1687 bp, Zea Mays
gatcaaagttgcttctcgtcgaagtttcgctggatttcctctggattaaacaagcgagtcacgtggctcagttcgtgatcacgttatgatcctttcatatgtacctttccgaactgctcgcggagaggcacaagcttaccccgttcatcccagtgatcccacatagtgtacggttgctgaatcaagagttctccagcttatagctggcttggaggatctcaaggcagctcctctggactcattgtcaagaaaacaatgaagtacaattttgttggccgcatccttggtccaagaggaaattccttgaagcgggtggaggcaaatacggattgccgcgtgctaataagaggtcgtggcagcatcaaagatccagcacgggtaaacattcagattagtgcctcttaatcttatggacttggtagttagatgtactcagaaatttgaagaattggagattatgtattaaatattttccccgaaggatcttgatgtatgaaatatgaactatggacctatggacattcaaagcaagatcaaccctgataccctctggctaggaaaatatggatgttttatagtttgttcctgcacgtttcttttttcaaaatgttttctgttatgtacctttcactttgtgtcttggtatgaaagcccacactggctatctggtgattatttaaaaaaacactttctttctggaacttgccagagaggggccatccatcctttagatggcatagctacctttatgcatgtgtacatctagtgggttttctgtttactttgtgctatctatgggattggggttcacatacactattgtttttcaggaggaaatgatgcgagggaagccaggatatgagcatctgaatgaacctctccatatattggttgaggcagagctacctgttgacatcattgatgctcggctgatgcaagcccgcgagatccttcaagatctgctaaagcctgtggatgaatcccaggacttcttcaagaagcagcagctccgggagctcgcgatgcttaatggcaccctgcgtgaggaagggatgcagaggttcggttcagcgtcccctttccacaacagccttggaatgaagagagccaagacaagggggtgatgaagaaagtcgcaagcatcatgaagggagaacttaaatcatcatctattctgaggccaatcctgtgtacgaatggggggttgccttgctggctactggcccaatacggtctcgcgccaccagcatcgcggcgcgggcggccgtgcacgataaaacatatatctggagttgtgtctactgggggagttgagtttggttatgcgccatgggttgttacgctatatattgggctgtgcaggcttttgtagcaatgtggtttgtgtaaatgctcatttggagcgtttggaagctctcggcttgtatttctttcttatcgagatagtattcaaggacgctgtttgggatttgaagcaatgctctaaactgcgacaagcatggaggcttgatctgtttcattcgaatctcttgtttgacactatcaataaccagtgcatacaagtagtgaactggcgtcttaagttgcatcttcaattcggattctgctttgttgatgcaggataatctaaattaatgcatgtaatgcacttgaaattaatatatcttctttttccaaaaaaaaagaa

SEQ ID NO: 5288 - DNA, 2678 bp, Zea Mays
ggcggcgcggccatgagttggagccggaccggctcctctgaaaccggccgcatatctaggctcgcatgtgttgccgttggagatcgcggtcgcgacgagttcgggtcgggtacggacacatcgttattgattgcattacggggttgcaaggatcgctatatatataggttgcatttgggcgtgaggagaagaagatcgtggtctcgtggatatcagcaatggaccgcgatgaggagatgggccacggggaccggtccctgctattcgtcggcgacgaggacgacgacattggcacctacagggacggcggcttcatggaaacctcctccgacgagggatctttctccgacccgagcgacggcgaagcccgcggcgggcgccgcggcggtgacggcagcaagagcgcgtggccgcagagttacaggcagtcgatcgatatgctgagcgtggtgccgtcgccgacggtgagcatgctgatggcagcgagcccgaacctcaccagatttggcagctccttcctcaaggccgggagctccttcttcctccggaagggcgacgactcggtgctgccgctcgccaggccgctgctgccgccttcgctcccgcagctgtcgcagtcgtcgctgcggccgcagccacccatgaggcagtccacggacatcctcgcccagccgccgcggcctccggctgggcacgaggcccagttgcccgacaggccgtccagtgcgtgcctgagaccagattatatcgagcttcctccgcctgctagcaagtgcagcaggaaccaatcaatcatcaatgggttcaacgtgctgtgcggcgttgggatactcagcacatcttatggaatcaaggaagggggatggtcaagcctccttctgctccccttgttgggtggcagctcttgctacacaggcttgcttctaaagagatgcatagacagttcgcccaacattgggacatacccagacattgggttgttctttacttggagctttatgcaagctgtgtggagtacatcacgctgctaggagacagcatgtcatcagtgtttccctcagcacatttagcttttgccggcatcgacatgaatgcacacactctctttgcgatcacaacggcattggcaattctcccaacagtctgtctcaggaacctcagtctcctctcgtatctttctgctggcggtgtgatggcgacaattgcagtcatcgtctgcctattctgggttggcattggagaaggaatcgggtttcacttttccggtgctctagtgaacgtgacccaccttccagtggcgcttggcctgtatggattctgctactcgggacactcggttttcccaaacatatactcgtccatgaaggagcgctcgcagtttccgtttgtgctcctgttctgcttcacggtggtgacagtcgcctatgctggaatcgccgtctcagggtttctcatgtttggcgagtccaccatgtcacagttcaccctgaacttgccacagcagtacatcccatcgaaaattgccatctggatgacgattgtgaatccgtacacaaagtatgcattgacaatgactccggtcgccttgtctatagaggaagccctgccaaagaagatgcagaattacctggttggaatgtctgttaggacatgcctcgtcctctccactgttgtggtggctctgctttttccttatttcgggctggtgatggcattgcttggatctgtcttcacaatgcttgtggctctgatactcccatgcgcgtgctacctctccatcaagaagggcgcagtgccattgtgggagatcatcctgtgcatagtcatcataatgatcggcgccgtatgtgcaagcgtgggatcatacacctcagtcagccagatgattagcagcaccagatagcgcacgctagctgatgtttatctagctgctacagatccttccaaatgctttgacatagttggaactggcagctttcgtagctaagtttatttgttccttctttatggcagaaatttggtaagagagagtttagttgcgggaggacaggcgaaggttgttgtttcagacatccatgacaagagttgtttttcttttcgttagaaattttctgtgggcgtgtcttcggttgtcgtctgcacagggcaggagagaacaattcagaaagaaaagaaaaacgcagggactgcctaaatgctagtactagtagttagtgttaatccctccagcacaggagcatggtgacgcatcggcgcacgatgtagagcctggccctctgctccttcaccaggctcgccagccggccaggcaccgagcggccgggcggggcccgggacccccggctcttgagccccgccgcagggcagccagggctccccggcgtggacctccgcctccccttcttgctcttgtcgttcattattctctccgtctctctagactctgtactccctctccctttctcttgatctctgctaggatcgtggaacacagacggtggtggtggcagaccggcggagacggcagcagctctctgcccgcaggagttgtgttgttcggttggtttgttgttgcagatggaaaaagagtgaggcttgagtggcagcagctaccaggggtgaggcggtatttgtagccccagctcccagatggggatgggatggggtgacatgacaat

SEQ ID NO: 5289 - DNA, 3414 bp, Zea Mays
ccaaaggcatttcgcttctcctccgacaaatccatatccagaagatagcaccagtgcgtctcctcccaagctctcggatccaacccaatggaaggcgcggaggcgcttttccccggcgacggatgcggcggtgaccccatggacttctcgtggaccgctgacggggagaagcacccggacccggcggcttgcgccagccccggccgcgacgacgaggctacctcggcctcgaccccggttccttcgccgcaggagatggcggagtccatgattctcgtgcccgggccgcgcgtcgtcatgtctggactcaggctggctgattgccgttcagatgactgtgttctcttcattaatgctggtggtggtgcaatcgaaagctgtgatccctgtgtgaaggtttctggtgattcattctttgaaggaggggatgtgatagaaacaaatgagagcatagccgaaggtggtgattgtccatttatttatcactcagcaagatacggcagtttcagctacaagttcgacggtcttgcccccggagcttattttctagatctgcattttgctgaaattctatacacgtgtgggccaaaaggaattagcatgttcgatgtcctggtgcaggacgagaagatactgtctcagctcgatgtatatgctgtagttggagggaacagggcccttcaagtgcgtgatattagggttactgttgagatgaatggtgctgttatgatcaatttcaaaggagtaagaggaagtcccatggtttgtggtatctgtattcgcaaagcaccacttttatcagtgcaaactcttggtagagagagcgaccaactaagaaatgtttctcgtaagtacaaaaatgacaagaaattgtgggttgctgctatatctaatttggaaaggaaaataaaggccatgaaacaagagcagcaattgttgtcccttgaagcacatgattgcgcgaatgcaattcctgatttgagcaagatgatcggggctgttaagggcctagttgcacagtgtgaagatttaaagttgaagtactatgaagagatggataagaggaagaaacttcataatattgttcaagagacaaaaggaaatatcagggttttttgtagatgccggcccttaagcaaagatgaggtgtcatcgggtcagaaatgtgtagtggattttgatggatccagtgatggtgacattgtaattacaaatggcggaactaaaaagacctttaagtttgatagagtcttcacgccaaaggatgatcaagatattgtgtatgccgatgcgtctccactagtcacatctgtcttagatggctacaatgtatgcatctttgcttacggacagacgggaacaggaaagacttttaccatggaagggactgagagtaataggggtgttaactacagaactctggaagaactgttcaatattgcagaggagaggaaagaaagcgtcacatatgacttatctgttagcgttcttgaggtttacaatgaacaaatcagagaccttcttgccacgtctccatctaaaaagctggagatcaagccaaacagtgaaggacaaaatcatgtccctgggttagtggaggccaaaattgagaacataaatgaggtttggaaagttttgcaaactggaagcaatgcaagggctgttggttcaaacaatgttaatgagcacagcagtcgctcccactgcatgctatgcatcacggtgagggctaagaaccagcttaatggagagtgtacaagtagtaagctttggcttgtagatttggctggaagtgagcgtttagccaagactgacgtgcaaggcgaacgacttaaggaagcacaaaatattaacagatcactttctgcattgggtgatgtcatttcagctcttgctacaaaaaacagccatataccctacagaaattctaaattgacacacttgctgcaagattctctaggaggagactcaaaagcattgatgtttgtgcaaattagcccatccgataatgatgtttcggaaacattgagttcactaaacttcgctagccgtgttcggcgtattgaattgggaccagcaaagaaacatgttgatactgctgaacttcaaaagaccaaacagacgcttgaaagagctaagcaagaactcaggcttaaggatgattctttgagaaagctagaagaaaacttacaaaatttggagagcaaagccaaagggaaagagcaactttgcaaaaacttgcaagagaaggtgaaagagctcgagggtcagttagattccaaggcacagtgtcaaataacatcagagaaacagcaacggcagctttctggaaaactaaaagagaaggaagaaatgtgtaatgtacttcagcagaagattgcggacttagaatgcaagcttagacaaccacaacaatcagaatctgaggttgcacttcttaagcaaacgatccaagagttggaggtcaagttgaaggaacaacaacatgaccgatcagccatggaattaagtatcaaagagatggagctaaggttcaaggaagaagaacaccagcgatctgttgcagaactaaagatcaaagagctggagctgaagctgaaggaacaggaacaccagcgatcagttgcggaactaaaggcaagagaaataggacatgagctgctggagactcagagaaccgagtcaatgcttcagattaagctaagagaacttgaaagcaaggcgaaagagcaggacacaaacatgacggcagtggtggagtcccgcgtcgtcgtcgcgactcctgtaaacgcgaaggtgatgagcgagaaggagaaccacgtcctgaggatctcaaactccctgaacaagcagctggctcacgtggagaacactcctgaggcccctgaagcggcttgcaacgagaggaagaggaaaggcgaggcgaggaacgcgtccatcggcggcggcgagcaagagaacactaacaacggtgggaggaagaggagcctgccagccgagcgcgaggcgaggctgaagaggaagtcgacggagcctcctccccaggtgaagaatctggtgaggtcgacggcgtcgtccagggcggctgccaaggcggcggcggcggcggctccgagctccagagccggcggcgccaagcagcaaccgggcggcgggaacaagaccagagggtgggttaggtagacgagatgatgatggtgattgcgtgtgttgtatgtgcaccggtggctggctcaacttttggctgagtcccactcactacattgctgcggtgatgaattagccagcttgtttacattgctcctgtgtctatgctgctgcattgtcgtttgtgatacttttgtaaaatttgaaagctatgttgccgcaacaggaaacaacagtgcgtgtgcgtcggggaaaacagaatttggc

SEQ ID NO: 5290 - DNA, 3635 bp, Zea Mays
caaaggcatttcgcttctcctccgacaaatccatatccagaagatagcaccagtgcgtctcctcccaagctctcggatccaacccaatggaaggcgcggaggcgcttttccccggcgacggatgcggcggtgaccccatggacttctcgtggaccgctgacggggagaagcacccggacccggcggcttgcgccagccccggccgcgacgacgaggctacctcggcctcgaccccggttccttcgccgcaggagatggcggagtccatgattctcgtgcccgggccgcgcgtcgtcatgtctggactcaggctggctgattgccgttcagatgactgtgttctcttcattaatgctggtggtggtgcaatcgaaagctgtgatccctgtgtgaaggtttctggtgattcattctttgaaggaggggatgtgatagaaacaaatgagagcatagccgaaggtggtgattgtccatttatttatcactcagcaagatacggcagtttcagctacaagttcgacggtcttgcccccggagcttattttctagatctgcattttgctgaaattctatacacgtgtgggccaaaaggaattagcatgttcgatgtcctggtgcaggacgagaagatactgtctcagctcgatgtatatgctgtagttggagggaacagggcccttcaagtgcgtgatattagggttactgttgagatgaatggtgctgttatgatcaatttcaaaggaagtgataatcttggtcttacactcgtggcagcaaactcggttacaaatggcaatgtcttgtgcaaaagatgttcatctgatattgatgtctcaactacacagactaggacaagtaaactgatctcaaagtatgagaagcagattgaggagctcaccagccaatgcactatgaagtccaatgagtgctatatggcatggtcttcagtagacactaccaacgtggagcttgggagactgaaaatagagcttcaccaaaagggtgctgaaatggagaatcttgtgcaaactcttggtagagagagcgaccaactaagaaatgtttctcgtaagtacaaaaatgacaagaaattgtgggttgctgctatatctaatttggaaaggaaaataaaggccatgaaacaagagcagcaattgttgtcccttgaagcacatgattgcgcgaatgcaattcctgatttgagcaagatgatcggggctgttaagggcctagttgcacagtgtgaagatttaaagttgaagtactatgaagagatggataagaggaagaaacttcataatattgttcaagagacaaaaggaaatatcagggttttttgtagatgccggcccttaagcaaagatgaggtgtcatcgggtcagaaatgtgtagtggattttgatggatccagtgatggtgacattgtaattacaaatggcggaactaaaaagacctttaagtttgatagagtcttcacgccaaaggatgatcaagatattgtgtatgccgatgcgtctccactagtcacatctgtcttagatggctacaatgtatgcatctttgcttacggacagacgggaacaggaaagacttttaccatggaagggactgagagtaataggggtgttaactacagaactctggaagaactgttcaatattgcagaggagaggaaagaaagcgtcacatatgacttatctgttagcgttcttgaggtttacaatgaacaaatcagagaccttcttgccacgtctccatctaaaaagctggagatcaagccaaacagtgaaggacaaaatcatgtccctgggttagtggaggccaaaattgagaacataaatgaggtttggaaagttttgcaaactggaagcaatgcaagggctgttggttcaaacaatgttaatgagcacagcagtcgctcccactgcatgctatgcatcacggtgagggctaagaaccagcttaatggagagtgtacaagtagtaagctttggcttgtagatttggctggaagtgagcgtttagccaagactgacgtgcaaggcgaacgacttaaggaagcacaaaatattaacagatcactttctgcattgggtgatgtcatttcagctcttgctacaaaaaacagccatataccctacagaaattctaaattgacacacttgctgcaagattctctaggaggagactcaaaagcattgatgtttgtgcaaattagcccatccgataatgatgtttcggaaacattgagttcactaaacttcgctagccgtgttcggcgtattgaattgggaccagcaaagaaacatgttgatactgctgaacttcaaaagaccaaacagacgcttgaaagagctaagcaagaactcaggcttaaggatgattctttgagaaagctagaagaaaacttacaaaatttggagagcaaagccaaagggaaagagcaactttgcaaaaacttgcaagagaaggtgaaagagctcgagggtcagttagattccaaggcacagtgtcaaataacatcagagaaacagcaacggcagctttctggaaaactaaaagagaaggaagaaatgtgtaatgtacttcagcagaagattgcggacttagaatgcaagcttagacaaccacaacaatcagaatctgaggttgcacttcttaagcaaacgatccaagagttggaggtcaagttgaaggaacaacaacatgaccgatcagccatggaattaagtatcaaagagatggagctaaggttcaaggaagaagaacaccagcgatctgttgcagaactaaagatcaaagagctggagctgaagctgaaggaacaggaacaccagcgatcagttgcggaactaaaggcaagagaaataggacatgagctgctggagactcagagaaccgagtcaatgcttcagattaagctaagagaacttgaaagcaaggcgaaagagcaggacacaaacatgacggcagtggtggagtcccgcgtcgtcgtcgcgactcctgtaaacgcgaaggtgatgagcgagaaggagaaccacgtcctgaggatctcaaactccctgaacaagcagctggctcacgtggagaacactcctgaggcccctgaagcggcttgcaacgagaggaagaggaaaggcgaggcgaggaacgcgtccatcggcggcggcgagcaagagaacactaacaacggtgggaggaagaggagcctgccagccgagcgcgaggcgaggctgaagaggaagtcgacggagcctcctccccaggtgaagaatctggtgaggtcgacggcgtcgtccagggcggctgccaaggcggcggcggcggcggctccgagctccagagccggcggcgccaagcagcaaccgggcggcgggaacaagaccagagggtgggttaggtagacgagatgatgatggtgattgcgtgtgttgtatgtgcaccggtggctggctcaacttttggctgagtcccactcactacattgctgcggtgatgaattagccagcttgtttacattgctcctgtgtctatgctgctgcattgtcgtttgtgatacttttgtaaaatttgaaagctatgttgccgcaacaggaaacaacagtgcgtgtgcgtcggggaaaacagaatttggc

SEQ ID NO: 5291 - DNA, 3671 bp, Zea Mays
gtttcacttgttcaaattccaatcgcggggcaagcaaaggaggaaagcaaccaaaggcatttcgcttctcctccgacaaatccatatccagaagatagcaccagtgcgtctcctcccaagctctcggatccaacccaatggaaggcgcggaggcgcttttccccggcgacggatgcggcggtgaccccatggacttctcgtggaccgctgacggggagaagcacccggacccggcggcttgcgccagccccggccgcgacgacgaggctacctcggcctcgaccccggttccttcgccgcaggagatggcggagtccatgattctcgtgcccgggccgcgcgtcgtcatgtctggactcaggctggctgattgccgttcagatgactgtgttctcttcattaatgctggtggtggtgcaatcgaaagctgtgatccctgtgtgaaggtttctggtgattcattctttgaaggaggggatgtgatagaaacaaatgagagcatagccgaaggtggtgattgtccatttatttatcactcagcaagatacggcagtttcagctacaagttcgacggtcttgcccccggagcttattttctagatctgcattttgctgaaattctatacacgtgtgggccaaaaggaattagcatgttcgatgtcctgatactgtctcagctcgatgtatatgctgtagttggagggaacagggcccttcaagtgcgtgatattagggttactgttgagatgaatggtgctgttatgatcaatttcaaaggaagtgataatcttggtcttacactcgtggcagcaaactcggttacaaatggcaatgtcttgtgcaaaagatgttcatctgatattgatgtctcaactacacagactaggacaagtaaactgatctcaaagtatgagaagcagattgaggagctcaccagccaatgcactatgaagtccaatgagtgctatatggcatggtcttcagtagacactaccaacgtggagcttgggagactgaaaatagagcttcaccaaaagggtgctgaaatggagaatcttgtgcaaactcttggtagagagagcgaccaactaagaaatgtttctcgtaagtacaaaaatgacaagaaattgtgggttgctgctatatctaatttggaaaggaaaataaaggccatgaaacaagagcagcaattgttgtcccttgaagcacatgattgcgcgaatgcaattcctgatttgagcaagatgatcggggctgttaagggcctagttgcacagtgtgaagatttaaagttgaagtactatgaagagatggataagaggaagaaacttcataatattgttcaagagacaaaaggaaatatcagggttttttgtagatgccggcccttaagcaaagatgaggtgtcatcgggtcagaaatgtgtagtggattttgatggatccagtgatggtgacattgtaattacaaatggcggaactaaaaagacctttaagtttgatagagtcttcacgccaaaggatgatcaagatattgtgtatgccgatgcgtctccactagtcacatctgtcttagatggctacaatgtatgcatctttgcttacggacagacgggaacaggaaagacttttaccatggaagggactgagagtaataggggtgttaactacagaactctggaagaactgttcaatattgcagaggagaggaaagaaagcgtcacatatgacttatctgttagcgttcttgaggtttacaatgaacaaatcagagaccttcttgccacgtctccatctaaaaagctggagatcaagccaaacagtgaaggacaaaatcatgtccctgggttagtggaggccaaaattgagaacataaatgaggtttggaaagttttgcaaactggaagcaatgcaagggctgttggttcaaacaatgttaatgagcacagcagtcgctcccactgcatgctatgcatcacggtgagggctaagaaccagcttaatggagagtgtacaagtagtaagctttggcttgtagatttggctggaagtgagcgtttagccaagactgacgtgcaaggcgaacgacttaaggaagcacaaaatattaacagatcactttctgcattgggtgatgtcatttcagctcttgctacaaaaaacagccatataccctacagaaattctaaattgacacacttgctgcaagattctctaggaggagactcaaaagcattgatgtttgtgcaaattagcccatccgataatgatgtttcggaaacattgagttcactaaacttcgctagccgtgttcggcgtattgaattgggaccagcaaagaaacatgttgatactgctgaacttcaaaagaccaaacagacgcttgaaagagctaagcaagaactcaggcttaaggatgattctttgagaaagctagaagaaaacttacaaaatttggagagcaaagccaaagggaaagagcaactttgcaaaaacttgcaagagaaggtgaaagagctcgagggtcagttagattccaaggcacagtgtcaaataacatcagagaaacagcaacggcagctttctggaaaactaaaagagaaggaagaaatgtgtaatgtacttcagcagaagattgcggacttagaatgcaagcttagacaaccacaacaatcagaatctgaggttgcacttcttaagcaaacgatccaagagttggaggtcaagttgaaggaacaacaacatgaccgatcagccatggaattaagtatcaaagagatggagctaaggttcaaggaagaagaacaccagcgatctgttgcagaactaaagatcaaagagctggagctgaagctgaaggaacaggaacaccagcgatcagttgcggaactaaaggcaagagaaataggacatgagctgctggagactcagagaaccgagtcaatgcttcagattaagctaagagaacttgaaagcaaggcgaaagagcaggacacaaacatgacggcagtggtggagtcccgcgtcgtcgtcgcgactcctgtaaacgcgaaggtgatgagcgagaaggagaaccacgtcctgaggatctcaaactccctgaacaagcagctggctcacgtggagaacactcctgaggcccctgaagcggcttgcaacgagaggaagaggaaaggcgaggcgaggaacgcgtccatcggcggcggcgagcaagagaacactaacaacggtgggaggaagaggagcctgccagccgagcgcgaggcgaggctgaagaggaagtcgacggagcctcctccccaggtgaagaatctggtgaggtcgacggcgtcgtccagggcggctgccaaggcggcggcggcggcggctccgagctccagagccggcggcgccaagcagcaaccgggcggcgggaacaagaccagagggtgggttaggtagacgagatgatgatggtgattgcgtgtgttgtatgtgcaccggtggctggctcaacttttggctgagtcccactcactacattgctgcggtgatgaattagccagcttgtttacattgctcctgtgtctatgctgctgcattgtcgtttgtgatacttttgtaaaatttgaaagctatgttgccgcaacaggaaacaacagtgcgtgtgcgtcggggaaaacagaatttggc

SEQ ID NO: 5292 - DNA, 1770 bp, Zea Mays
aaatcacaatgttattcttttgacggacattttggtgaagtggatctgacctactgtaggggaaagagcaaagtacattatcttgtacaaatgtgcattacgctacctttatcataaaccaaatcatctctgtttctgggaacagcaaccagtaatttcccatgcaacctcttggttgatggatgttcttcctgttgggtcagaaagagaaagtcaaacagatagtcaccctttactcatggagcatgcgattggcatcccaaggcatgatgttgcttctacttcgacacctcatcgagacaataatgatggcatggatcaactgccccgtgattcagaaagttcttctggaacaactgatgcatcttactctccgaatgctcctctagcaaggagagatgataatcgccttcggcgtcagcaaagtctaaattctggcttctggatatcaattgaactagctgtaaatcttagccagattatagctgctatctgtgttctgtctgtgtcaaagaatgaacatcctcatgctccattgtttgagtgggtcattggttatacaataggctgcattgcaactcttcctcatctatactggcgctatctccagcgcaaccagctggccactgtgcaagggtcaaatcagaactacgttccagacaacagctttgagagtagttcttttactgggatttcgccccctcctgtgtctgaagctggtgttgtaactgtatcaaatggagtcttgagaaacaatgtggttatcacaaatccaagggcccaagcttttgctgatcacttcaagatggcgctggactgcttcttcgctgtatggtttgttgtgggaaatgtgtgggtgtttggtggacattcttccgcccatgacgcacccaacctgtacaggtgcgctcctaacctgccatgatggcgtaccttcgcatacttatttcgatgtttcaaggtgtgtgtactcatgtttttcaggttgtgcatagccttcctcactttcagctgcattggctatgcgatgcccttcatcctctgcgcgctgatatgctgctgcttaccctgcataatctccctgatgggcttccgggaagatctggacgaaaacagaggtgctacttcggatgcgatcaacgccctgggcacatacaggttcaggtcaaagaagcctcgtaacggggaggcaaacgaaggtggcggtggagtctttgctcctggaacggacaaggaacgcgctgtttctgctgaagacgccgtttgctgtatctgcttggcgaggtacgtggataacgatgatctccggttgctcccttgcgggcacttcttccacaaggactgtgtcgacaaatggctcaagataaatgcgctgtgcccactctgcaaagctgagatcgacgtcgtcccgaggaccgctcctccagccattggctttgggcgccgcgacagccacaggagggtaggaaacgacattgaatcacaacggcttccatgatgtatagtgagacagcaacttgccttgggcgtgtgtgtggcttccagaagagcaccttgtaaattatatagtgagagagagaaagagattatgtcatggaccaacgagtccttacatgatccagcaagtaatcgcctgactgaaaaatgtgtcgttgttgtcaatatgtgtgaatgtgtccctgtagctgtagctttgttcactccaaaatgtaccttgtcatagctaccgtgacgtcaattaactaatctattttataaagtaaagtctaa

SEQ ID NO: 5293 - DNA, 1585 bp, Zea Mays
tttgctttggaataccaaatgtgcgatacgtcatgtcctgcttgctggccgttgtctcattgtctggccgccggaccaaatccgaaaacccaccgagtaactgacaatctcgatccccgcagtcatcgcgggatcggcccgtcctcgccggcgactcattcccgcaactcacctgctctcaaccgcgaactcggcgccctgcacggcctccaagtcgcacgatgcggcggcgcccacatcatacgtggctgcgtctccgcctccgctttcgccgcgccgacgtgtcagcttcccgtccactacagagtccacattgtcctcctattacttgctccgccggcaactattagcccctccccagtcgccactaaatccgctgccgtttcttctcgagtgtgaccatggcggctcagggatccctcgtcatgtggagggcggtcttcgcagcgctgggcttgctcatggtggccacgctggtgtacaccttggccaccgacggctcgccgttccgccttgagctgtttacgccgtggatggtggcaacactggctgatttttatgttaatgttattgcaatctcggcttgggttatctacaaggaagcaaactgggttagttctgctgtgtgggtggttctgttgttttgctttggcagtgctgtcacttgcgcttatattgttaagaaacttcttgaagtaacatctgcagggtcatcccaagatcctcttgaccttctatttatcaggcaaggtaatctatcccaaagaaagtgctcttatgttgtaattggaagggttattttcagcattttggggatattcatggctgcggttgtcacatatactgtcatcactgatggactaccttttaggaaggaattgttgacaccgtggatggcggcaaccttaattgatttctacataaatgtctttgcgatatcggtctgggttgctcacaaggaatcatcatggatatcaactaccatttggattgtcttgctgatatgctttggaagcatcacaacatgcggctacattgtcatccaacttttcaaagtatcatatcaagatccaatctaccacgtgctattgaactcccacagcaaatcgagtgatggtttaattttgaatgacggactagaagtcagcagctcagtctcagcattcagttgggcagattagctcagggccaagccctttgagaatggaccgaggccaagcctctttcagttgggcagatttagcaatgatcagatcagcaacaggaggatcaggaggtgagagccccctccagggggcaggaaaggaaacaaaaggttgttctgcctcgaacaaaaattcaagaaaccaaagatctctagagaaactcgtatggcactacaagcagtaatacgaacaccgagaacatgaggggtacatatgtattttcagtgaagaggagccacagtttactctgcagcagccccaaatccagtctaccctctaacagtctggttgtatgcactctcaccagcttgaggtgactaggtaaggagggatgtttggcaacaatgtttttcaaaattatagttttacaatactttgtc

SEQ ID NO: 5294 - DNA, 1615 bp, Zea Mays
caggcacggccgcctcgcatcgcggcccttaacggaacaatacttatctttttccctgcccccgcggccgccgccccgaacgcgcacgcctcctccgccgaagccaagcaaaccaccgacctcgacggagtcttctagccgtcaccctcgttgtcgccctgctcctcctctcagccggtccggccggcggcgtggcgtgaagatcaatccggacccggaacgagttccctcttttgctggttacataaactttggaataggaggatatcccatattgatctttgtgattgagattgattttttttctggaaaatggagatacaaacttcagggaagcccattgatgtgctgatggagaaggttcttagcatgaacattctgtcttctgattactttaaggagctctataggttgaaaacctatcatgaggtcatcgatgagatctacaacactgtcaaacatgtggagccttggatgactggcaattgcagaggcccctccactgcattctgtcttctatacaagttctttaccatgaagcttactgtcaaacagatgcacggtttgttgaagcatcctgactccccacacattagagctattggtttcttgtatcttcggtatgttgcagacccaaaggttctttggatgtggtatgagccctatttgagggatgatgaggagttctcccccggatctaatggccgcaagacaaccatgggtgtttatgtgcgtgatcttatacttggacagtactactttgatagtcttctaccaagaattcctctcccagtaactcgtcagattacagccaatcttgaaaagatgaaattgcccactaagctttctggggcaactggagactccagtcgtcagggatcagaagatactgcacgccgtcctccttcagtgaaagcttctctgtcagtttcctttggacagcgtgctccacatcgggcttccaccagggattcatctccagttcgtcgaacagtcacccgtgatggtcatcgaagttcatactcaccatctcgtcgtagtggtagccgtgagggtcctgatcatgaccgttctgaccgggaactggatcattctagtcgtgaccgtgaaagagcccgggatcgttcaaaccgggatcggtatcattcaagccgagaccttgaccgtgacaaggatgccagagattatcatcggcatgagcgtgatagcagggatcgtgagtactacaggtccaggcattcagaagaaagacgggacgacagaagagatcatgaaagtagcaggcacaggcgctctagctctcgccacaggagcaggagtaggagccgaagcaggagcaggagtaggagcaggagaagccgcagccgaagcacgagcaggaggagcctgaatgagcagcgatccagcccattcagggatgcaaataaagagaaggcagccaccgtgtcgagcaacctagcaaagctgaaggacttgtacggtgacataactgcaaagaaggaagacagtgatgctgaaaagcttcaccgtgattcatgcgctgaggaggtcatcaggctgggaggccctcgatggagggtgatacatcatttcctgtcaactcattagcaacatg

SEQ ID NO: 5295 - DNA, 1951 bp, Zea Mays
aacggaacaatacttatctttttccctgcccccgcggccgccgccccgaacgcgcacgcctcctccgccgaagccaagcaaaccaccgacctcgacggagtcttctagccgtcaccctcgttgtcgccctgctcctcctctcagccggtccggccggcggcgtggcgtgaagatcaatccggacccggaacgagttccctcttttgctggttacataaactttggaataggaggatatcccatattgatctttgtgattgagattgattttttttctggaaaatggagatacaaacttcagggaagcccattgatgtgctgatggagaaggttcttagcatgaacattctgtcttctgattactttaaggagctctataggttgaaaacctatcatgaggtcatcgatgagatctacaacactgtcaaacatgtggagccttggatgactggcaattgcagaggcccctccactgcattctgtcttctatacaagttctttaccatgaagcttactgtcaaacagatgcacggtttgttgaagcatcctgactccccacacattagagctccactaacggtccgacaacttgtttctttggatggacttgtggctgaatttcttggtcctaggacacggggatgacaaagtttgcaagaagttcatagtgtaccagtctgtgctttggagttattggtttcttgtatcttcggtatgttgcagacccaaaggttctttggatgtggtatgagccctatttgagggatgatgaggagttctcccccggatctaatggccgcaagacaaccatgggtgtttatgtgcgtgatcttatacttggacagtactactttgatagtcttctaccaagaattcctctcccagtaactcgtcagattacagccaatcttgaaaagatgaaattgcccactaagctttctggggcaactggagactccagtcgtcagggatcagaagatactgcacgccgtcctccttcagtgaaagcttctctgtcagtttcctttggacagcgtgctccacatcgggcttccaccagggattcatctccagttcgtcgaacagtcacccgtgatggtcatcgaagttcatactcaccatctcgtcgtagtggtagccgtgagggtcctgatcatgaccgttctgaccgggaactggatcattctagtcgtgaccgtgaaagagcccgggatcgttcaaaccgggatcggtatcattcaagccgagaccttgaccgtgacaaggatgccagagattatcatcggcatgagcgtgatagcagggatcgtgagtactacaggtccaggcattcagaagaaagacgggacgacagaagagatcatgaaagtagcaggcacaggcgctctagctctcgccacaggagcaggagtaggagccgaagcaggagcaggagtaggagcaggagaagccgcagccgaagcacgagcaggaggagcctgaatgagcagcgatccagcccattcagggatgcaaataaagagaaggcagccaccgtgtcgagcaacctagcaaagctgaaggacttgtacggtgacataactgcaaagaaggaagacagtgatgctgaaaagcttcaccgtgattcatgcgctgaggaggtcatcaggctgggaggccctcgatggaggtaactttgagacctgtagaactctggtttccgctttgttctgccagcctctctgtaggccttcttgaaaatgctctttatgttcccaaacttgatagagtcgactggtacttcggtatcttgacttgttgtcgcctgacatttgccattaatgtatgttgtttggtatgttattcctaagaattcctatgacattggaacgtactgtataaaccgtggtatccgagcttcatgtttgcttgatgcttatgcaaattgaaggttgaataagtttcagtttca

SEQ ID NO: 5296 - DNA, 1462 bp, Zea Mays
aaatccatgttgaaaattaagataccagaaaacaaattgtcttggatggcccacggagttgtggtaaaagcattgcacttgcgatgcttgtccattgggcgcgtactgaaggatggctggtattttatgttccacaagggaaggattggactcatggaggattcttttatagaaacacatacagtgattttttcgatacaccagtacaggctgccaatatcttgcagttaccatgccaaatttttgagcgtattcccctgggagaaggtgctggtgttggaatgatgaaaggggttgacacaatggaaatgcctgaagggtccacattatatgatctcattcaaactgggataactcaaacacatgcttcagttggtgttatggttcgcttaaggaaggagctgtcccttgttaaagacgtgcctgtactatttgccattgatcagtacaatagctggttcacattcagtgacttccaggaacctgtaactgtccgatcctgtcgatcgatccatgcaaaagagcttacaatggtcaatgcttatagatcaatgctgcacaatgatatgatggtgggggctttttcacactcaacagcagttggcaaactacggcaggagctgccagatgttccttctgatgctcgtttgatctttccacgttacaccttagatgaagctgagactgcatgtcactattatatgaggcaaaagatcattcggcgcgagaatttttcagaagagaaatggaaaaagatatactacttatcaaatggaaatggtgcagagatgagatggcttgctgccttcgtttgagtttctgatacctggattgtactcagttttggtggtggtgtagaaaggttgccacctctgtttcagcattccgttacacaccacagttcattgttgtgtacttgtagtccgtctcttgacatctctagaagaaagtttggcgtcaacatcatttgtgctgagtagaacttgaggagataaggcataagtatgtggctcagttacatgattatatccttaggcttctttcagttctcgctcagatgctagatacaaaataatgtagcattgttattggagaagttttcacatgttttggctccgccgagcacgatgagtatgatgagttgatgccaatctactcagcatgcttgctactatgttgctgaattgagctccgttgagtattttttttaaattactgtacgaatcgaacaattatttgagttgggaacaatattcttctttgcggaactcaaaggttacgaggcatatcctcagtttgaatagtttagcttacccttgtttcctcagtttgaatagtttagcttacccttgtttctcggagagatgcaacatattgatttagctacattgtctattccggtgtactcctatgccgtttatcgattttccttctggaaacgaataactctttaactttttct

SEQ ID NO: 5297 - DNA, 1002 bp, Zea Mays
accgaacagcctcgcgtgtggcgccaccccgcaggctgtgcacacgacacgatcagtgcgcagcgaactgcgcatggcggtgcacccaatccacctgttcccgtgacaagcagcactcaagacacacacgcgcgcgaacacgaacagggacacgagacagcggcggccatggcgagaggcggcggcgatcggagtcgggaggatgaccccttctccgacggcggcaccaccggaaccgactcggacgagtcctctccgcgtggggtgggggcccgcggccccggctccacctccaacccgatcctgacacgcctcgcggtgtcgcggaacccgagcccgctggctgcggccaccgcggccccaggggtctgcctcctccgcttcgcctgggagtccgccgcgggctccctcgtcggcgccgccgttggctacggtgcggacttgggacgatggggttggactccgtgcggcttaggtaaaggtttggttacgatgaaggggattaaaggctcatttgctgatgctgcgtcatctgctaagatatttgctgttcttgctggtgttcaaagtttagtagcctgctctttgagaaaactacgtggaaaagatgatggaatcaatgcaggagtcgcaggctgttgcactggccttgctctgagctttccaggtgcaccacaaactctgattcagagctgcctgacctttgggactttctcttacatcattgagaagctaaacaagcagcaacctgcgctggcgctcccacctgcgacaggtgtgatggatccgaaggctggacaaagcgttcttcctcccttcacacttcctcctctggatgccatggacgaattttgtagtgttttggtagtgttgatgattctaccttgacatatccaacacaaggcgagcagcttgtcctttgttcaactgattggatcttcggagttttacccacagaccatgccccgtaacaaggaagaacatgcaccttgattcttcaga

SEQ ID NO: 5298 - DNA, 833 bp, Zea Mays
gttcatactaagcgttgttaaagagaaacttattgtcctgctaagagatggacggaaactgcttggcaccctctgctcatttgatcagtttgcaaatgttgttcttcagggtgcttgtgaacgagtgattgtgggggaacaatattgtgatgttcctcttgggctgtacgtaatccggggagagaacgttgttttaatcggagaattggatcgcgaaaaggatgaactccctgctcacatgacctgtgtttcagaagcagaaataagaaaggctgaaaaggcagaacgggaagccagagatctgaaagggacgatgaggaaacggatggagttcctggacttcgattaacaccgtcaccgcggccgttgccgctccccattgtggcggaatctttagtggcggcctgtgtgccatacatgcctggtgaccgcgccggcgcaccttggattgctggagggtttagcgaacagtttctttttaactagcagtgctgttttatactctcgtggccacagaccctttgagcgcctcctgatacagctttgtcaccactctgatcattgcctcgatgaatttatatacctgacgttttggattggatctgcgccaaaacgccatttctatgcagagagtctgtactcttatagctgagacagatttttttcctttaaacgatttgggattggatctgggccaacgccatgcctttgcaggatcctggatgccggagcaaggctgtctcagctcctctgaacagtacattgctctatatttagaggacaacgactaatatataagcaaatatataagcaggtgcaagtatgtaagtaga

SEQ ID NO: 5299 - DNA, 1442 bp, Zea Mays
caacaccaatgttgggggcaagactgtgcagtccaaattgttgcagcaacaggaaccaaaactcccttgcgaaaacgcaagatatcaaaatgcggtccaaggtttcagatgcctgatcacataaaggacacctttctggatggtcaagccccctcttagccaacctattagctgtccaacacctatttagggctgcgagccagaggaagaagtggcatttggagggggcccaagttccccaaatcttttcatagtgtccgaaggagacagaaccagtaaacaatccttcataggcagctttagctgaataaaccccattagcagcaatactgaaaatatgattatcctccacattgggatgcaacacaaattctgaaagcagattccaaaggtgaagataatccattaagaccccaacagatattactttcattaccttggaagtataattagtgggtgcatggattatgctcttttgaggtttaagctaaactattgttattgataaaatagtttaaaccaaaatattgtactagcatgagtcatgttaattaacatttcttttttatatttaataaaaacaatatcggcggtaaccgatggtactaattttttttcgtacctgatctcagagaaacttattgtcctgctaagagatggacggaaactgcttggcaccctctgctcatttgatcagtttgcaaatgttgttcttcagggtgcttgtgaacgagtgattgtgggggaacaatattgtgatgttcctcttgggctgtacgtaatccggggagagaacgttgttttaatcggagaattggatcgcgaaaaggatgaactccctgctcacatgacctgtgtttcagaagcagaaataagaaaggctgaaaaggcagaacgggaagccagagatctgaaagggacgatgaggaaacggatggagttcctggacttcgattaacaccgtcaccgcggccgttgccgctccccattgtggcggaatctttagtggcggcctgtgtgccatacatgcctggtgaccgcgccggcgcaccttggattgctggagggtttagcgaacagtttctttttaactagcagtgctgttttatactctcgtggccacagaccctttgagcgcctcctgatacagctttgtcaccactctgatcattgcctcgatgaatttatatacctgacgttttggattggatctgcgccaaaacgccatttctatgcagagagtctgtactcttatagctgagacagatttttttcctttaaacgatttgggattggatctgggccaacgccatgcctttgcaggatcctggatgccggagcaaggctgtctcagctcctctgaacagtacattgctctatatttagaggacaacgactaatatataagcaaatatataagcaggtgcaagtatgtaagtaga

SEQ ID NO: 5300 - DNA, 2167 bp, Zea Mays
ggcaatggcaccaatcaacaaaaccttttttcataggagttggttccacagttggagcaggagtatatgttcttgtgggaataattgctagggagcacgctggtccagcattgacaatttcatttctgatagctggaatagcagccacactttcagctttctgttatgctgagcttgctagtcgttgcccctctgctggaagtgcctaccattattcatacatctgtgttggagaaggtgttgcctggttgattggctgggctctagtgctggaatatactattggtggatctgctgttgcccgtggtatatctccaaacttagccttgttttttggaggacaggatagtctgccatggattttagcacgccatcagcttccatggtttggtatcattattgatccctgtgcagctgctcttgtttgtgttgtgactgttttactctgcatgggaattaaagagagttcatttgcacaaggagttgtaacagttctgaatgcttttgtaatgatatttgttattgtagctggtagttatattggcttccaaataggatgggtcggctacaaggattctgatgggtatttcccatatggagtaaatggaatgcttgctggatcagcaactgttttctttgcatacataggctttgatacagttgctagtacagctgaagaggttaggaatccacagagagatcttccattgggaatcggagtagcgttggctatttgttgtgcattgtatatggctgtttctgttgttattgttgggctggtaccatattttgccatggacccagatactcctatttcatctgcctttgcaaaacatggaatgcaatgggccatgtatgttgtgacaactggtgctgttcttgcactctgctcgaacttgatgggctcacttcttccacagcctagaatacttatggccatggcacgagatggcctgttgccatccttcttctctgatgttaacaagcaaactcaagtacctgttaagagcacaattgtgacaggcatctgtgcagctgctctggcttttacaatggatgtctcacagttagcaggaatggtcagtgtaggcacactccttgcattcaccgtagttgctgtttcgatcttgatactcagatatgtccctccagatgaggtccctttgccaccctctctgcaagaatcattccgtttgaaccaggaatgcgatgaggaaagggacagggctcttcttggagttgggaactgtaccttgtctcagacaaaggatgtgattgtggtagtagaatcagttaaggaccctctcattgatataccgctgcataaaggcaagatggatgagacaaagcgccgaaagatagcctctttaagcataggatctgtgtgtataggggttctgatcctcacatcttcagcctctgccacatggttgccttttctcccgatatgtattggctgcatcattggagttgtgctccttctggctggcctcagtttgctctcctggatcgaccaagatgctggcaggcactcttttggtcattctggaggattcacatgcccttttgttccagtgctgccagttttgtgcatcctgataaatacgtatctgttgataaacctgggtggtgacacatggatgagagttggcatatggctgctgatgggtgttctcctgtacattttctacggacgaacccacagctccctaacagatgtcgtctacgttccagtagcgcaggctgatgagatgtacaggagttcatcaggatatgtatcatagaaaagaacagccgcagttacttcaaggtggttggtcattcagttgtagataattggttatcaaccaggaaagaggggaattggctgttatttctttcatgcttggccaacaagatctcgtggatgcaactttgcaagatatatatgatgttcacgagcctggtcaatttacacattgtttgttggagtgtgcgtagatgtggtgtatataaacccagctgggtggaatgatgtggtacataatttatgcaattcatgtaaaagccctttctacctttctactgaaatgggagagcatttaaagggcatattgaaacagtacatgaatggcaagagaagctacctttttttatatctttttacctcgaacaagtcataattgtg

SEQ ID NO: 5301 - DNA, 2465 bp, Zea Mays
cagatacgacaccagacgagagggaacctcgagccaagaaagcgagagggggaagctgcggccgccggccgagcgagctcgccgtccccatccacccctctcactctcctcttcctcctctctgtctttcgctccgtccagccgccgcgtaatccgcggaaccagatgccctcatccgccctctgatcgaatcccgcgagaaaggccggttctctgtcctgccgtgccggcgatcttgatggcattggaggcggggagcagcggctgcggcgggaggggatggggcggcgggttccggagcctgatgcggcggaagcaggtggactccgaccggatccgcgccgagggccagccgcagctcgccaaggagctcaacgtgccggagctggtcgccatcggagttggttccacagttggagcaggagtatatgttcttgtgggaataattgctagggagcacgctggtccagcattgacaatttcatttctgatagctggaatagcagccacactttcagctttctgttatgctgagcttgctagtcgttgcccctctgctggaagtgcctaccattattcatacatctgtgttggagaaggtgttgcctggttgattggctgggctctagtgctggaatatactattggtggatctgctgttgcccgtggtatatctccaaacttagccttgttttttggaggacaggatagtctgccatggattttagcacgccatcagcttccatggtttggtatcattattgatccctgtgcagctgctcttgtttgtgttgtgactgttttactctgcatgggaattaaagagctggtagttatattggcttccaaataggatgggtcggctacaaggattctgatgggtatttcccatatggagtaaatggaatgcttgctggatcagcaactgttttctttgcatacataggctttgatacagttgctagtacagctgaagaggttaggaatccacagagagatcttccattgggaatcggagtagcgttggctatttgttgtgcattgtatatggctgtttctgttgttattgttgggctggtaccatattttgccatggacccagatactcctatttcatctgcctttgcaaaacatggaatgcaatgggccatgtatgttgtgacaactggtgctgttcttgcactctgctcgaacttgatgggctcacttcttccacagcctagaatacttatggccatggcacgagatggcctgttgccatccttcttctctgatgttaacaagcaaactcaagtacctgttaagagcacaattgtgacaggcatctgtgcagctgctctggcttttacaatggatgtctcacagttagcaggaatggtcagtgtaggcacactccttgcattcaccgtagttgctgtttcgatcttgatactcagatatgtccctccagatgaggtccctttgccaccctctctgcaagaatcattccgtttgaaccaggaatgcgatgaggaaagggacagggctcttcttggagttgggaactgtaccttgtctcagacaaaggatgtgattgtggtagtagaatcagttaaggaccctctcattgatataccgctgcataaaggcaagatggatgagacaaagcgccgaaagatagcctctttaagcataggatctgtgtgtataggggttctgatcctcacatcttcagcctctgccacatggttgccttttctcccgatatgtattggctgcatcattggagttgtgctccttctggctggcctcagtttgctctcctggatcgaccaagatgctggcaggcactcttttggtcattctggaggattcacatgcccttttgttccagtgctgccagttttgtgcatcctgataaatacgtatctgttgataaacctgggtggtgacacatggatgagagttggcatatggctgctgatgggtgttctcctgtacattttctacggacgaacccacagctccctaacagatgtcgtctacgttccagtagcgcaggctgatgagatgtacaggagttcatcaggatatgtatcatagaaaagaacagccgcagttacttcaaggtggttggtcattcagttgtagataattggttatcaaccaggaaagaggggaattggctgttatttctttcatgcttggccaacaagatctcgtggatgcaactttgcaagatatatatgatgttcacgagcctggtcaatttacacattgtttgttggagtgtgcgtagatgtggtgtatataaacccagctgggtggaatgatgtggtacataatttatgcaattcatgtaaaagccctttctacctttctactgaaatgggagagcatttaaagggcatattgaaacagtacatgaatggcaagagaagctacctttttttatatctttttacctcgaacaagtcataattgtg

SEQ ID NO: 5302 - DNA, 3346 bp, Zea Mays
cgaaaaaaccccaaccccgaaggcaaggggtgggaaaaaacacgaggcgggggtgggggatagaaatacgagagcgagcgagcgagcgagcgagcctgcagcagcgagagggacgagaggcgagagagataagcaagcggcgcgcgttaaccctagcccccgtctccgctccgctccgctccgctagcgctcccgcccgccgcctcgctcgccggaggattcgtacgcgcgccgggcccgacgacctgccgcgccaccttcgcgccgccgccgccgcgcgcgggcgcgcctcggtcgttgcagttgtccttcaccacagcggagtgatggctgttgtcaacccaaccaaccttgctattgacgacgatgacgacgatactcccatttcattcaagaggacgagtaactctacgaagactgccaggcccaccccttccaagcatgaggggtcgtcaggaggtaatggtgcacctgttaggatccccaaacctgtgtctcccaatccgcagaagaacggagccaccggggcttcaaggccgttgcatatgaagccaccgtcatccagtccaaaccatcgtccttctggatctggccagccaaacagtttggcacaacatagttcaaaggctaatagcattgacatgagtaaactgaaaagacctctcgtcaaagatgagagatctgatgactcagatgacgaggtgccgattgggttaaggagaaaggttgaggagaagaagttgaagggagttgatactcgggttcagaagacagatgactcagatgacgatgataagccattgggtctcaagatcaactcatccagaatgtcttccaacagagtgaataagcctgttctgcagagaactgtaccaaaggttgagcagcctgatgaagattcagatgatgataaaccattggcaagcaggttgcccagtaatgccggtccaaaaagtggaggtgatgtctctgaggattcagaggatgagaagccactggctgccagattttcaaaagttgctggtagtggaaacccaaaaatagcttcttccagcaaagggttaaccagtgatacaaatggccaacaaagtttgggtaaaaggcctctagacaatagtaatcaaacaagttcagctcttaagaaggctaaaccttcaaacgtttcagcttctgcaatcgttagaagagaaatcaagacagatgacaacacacctcttgcacaaaggctgaaaatgggagagtcttcgaaaggcaagtcatctgcaaagagtgtctttaagaagagtcctgcttctgtgaagaaggacatcaagaaaatgaaagggaaagggaaattaaagaagaacatgaaaaattctcagttctcaaagataatgaaggtcccccctggatctggtggaggaaagaaatggactaccttggagcacaatggtgttattttccctcccccatacaagcctcatggtgtcaaaatgctttacaatgggaaacctatcgatctgacaccagaacaagaggaggttgcaacaatgtttgctgttatgaaagacacagactatgcggccaagccaacattcattgataactttttcactgattggagaaaagttcttggtaaaaatcatattattaagaacttcgagctttgtgatttcacaccaatatatgaatggcacctcagagagaaggagaggaagaagcagatgacaacagaggagaaaaaaacattgcgggaagacaaattgaaacaagaggagaagtacatgtgggctgttgtagatggtgttaaagaaaaggtcggaaatttcagagtagaaccgcctggcttgttcaggggacgtggagaacatccaaagatggggaaacttaagcgccgcattctaccaagtgatattacaataaatattggaaaaggagctccagtccctgagtgcccgatacctggagaaagttggaaagaagtcaaacatgacaatactgttacatggttggccttttggaacgatccaattaacccaaaggatttcaagtatgttttcctggcagcaagcagctcactgaaggggcaaagtgacaaagagaagtatgagaagtccagaaaattgaagggtcatatacaaagaattcgtgagaattatacaaaagatttcaaaaacaaagatgtgacgaggaggcaaatagctgtggcaacataccttatcgataaactagcccttagggctggcaatgaaaaggacgacgatgaagctgatactgttggttgctgtacgctgaaggttgataatgttacatgtatgcctccaaatcagattcagtttgactttctgggtaaagattcaataagatactttaacaccgtagaggttgaagagcttgtgtacaaggcaattgagggtttccgtgctggaaagaagccaggacaagatctatttgacaagattgatacatctaggctaaatgctcacttgaaggatctaatgcctgggctcactgcaaaagtgttccgtacatataatgcttccataacattggacggaatcttgcatgaagaaacagaagatggaactgttttagaaaaaatcgctgtctatcagcgggcaaacaaagaggttgccatcatctgtaaccatcagcgtagtgtctcgaaatcacatgagtcccagatgactagaatgaacgaaaagattgatgagttgaagtcccagatggaggagctgaaagcagacttgaacaaagcaaagaaagggaagcctctaggctatgattcagaggggaagccaaagaggaacttggctcctgaagcgattcaaaagaaggttgcaacacttgaaggcaagatagagaagatggagatggataagaggataaaagaggatctgaagacagttgcgcttggaacgtcaaagatcaactatcttgatcctagaataaccgtggcatggtgcaaacgccatgaagtccctattgagaagattctaggagaccattggctaccatgtgccagccagtttggtccagtttccagcccttctccctggacactaattgcagctaggaaaggaaagagctcggtgtttgttttttcaaagtccccaccccccctgctcgtggaacgaaggaaagcacccgtcattctctttgtaggcccttcttttttttttcttttggttcaattgcgctaagttcaatatgtattctgctgagaaatctgagctcgtttgagaacggttggacattgaattcatagtgagttttaatcttgaatatagatgacttgttgagggatgatcccgtggtcgtttgtgtgttttgtcgactagtgagcttgccttgtccaccaaagtca

SEQ ID NO: 5303 - DNA, 944 bp, Zea Mays
cgatccccaccacttttttgtggtcacacgcgccggcttctccttcagtccttctcccgcttccgcttccgcgatggtatcctaccatccctcccttctccgtccatccgtcctcatcgcccaggccagcggcatcggccggtgcccaacactcaacgccttcctttccacccccgtcgtctccgcggtgccacttcgcctgcggcctctgcgcgccgccgccggtggagcagcctcgccggtcagtggcgatggaggcaaacgcgctgttccgccgcctgccgcgctgcttgtcttcgcgcgtagcaacttcctcccgcttgctctcgttagtggggtgatatttggtctcctagatcctactcttggatgccttgctcacaaatactctctgtcgaagttcagcacttttgggatattcattatgtcaggactgaccctgcgaacgaaggagcttggtacagcattagaagcttggcctgctggattatatggattagtatgaccttatgtttattctgtgtctgtcggacttggatgctctaatatttttttgatcataactgtaaatatgttgaataaattactcactccagttttggaccaagatataatttccgaaaattcggtaccattgatcttctagcatttatttggctaccaggagtaataattgtctttctggttgtttctgaagatgccaattccctacttctattggtcattcaagcgccctcaacaagtttgctaacatcttattttactgtgtataattgcagggatctgttttgctctttacgcccttcctttctcaatttatcatgcaagttcagttctcccctcgtgaatttatcactggggcggacatgtgggtgggtccaggtgggccatggcacaccctaagccaggcccaccaagatcctagccccaatgctttagtcttg

SEQ ID NO: 5304 - DNA, 1628 bp, Zea Mays
cgatccccaccacttttttgtggtcacacgcgccggcttctccttcagtccttctcccgcttccgcttccgcgatggtatcctaccatccctcccttctccgtccatccgtcctcatcgcccaggccagcggcatcggccggtgcccaacactcaacgccttcctttccacccccgtcgtctccgcggtgccacttcgcctgcggcctctgcgcgccgccgccggtggagcagcctcgccggtcagtggcgatggaggcaaacgcgctgttccgccgcctgccgcgctgcttgtcttcgcgcgtagcaacttcctcccgcttgctctcgttagtggggtgatatttggtctcctagatcctactcttggatgccttgctcacaaatactctctgtcgaagttcagcacttttgggatattcattatgtcaggactgaccctgcgaacgaaggagcttggtacagcattagaagcttggcctgctggattatatggattaggatctgttttgctctttacgcccttcctttctcaatttatcatgcaagttcagttctcccctcgtgaatttatcactggattagctatattttgctgtatgccaacaacattatcaagtggagtcatactaacacagcttgttggtggtaattctgcacttgctcttgcgatgacagttgcatccaatttacttggcattataatcgtacctctttctcttgcaagatacatcggcactggagctggggtgtctttgcctactgagaagttatttagaagtctggtcaccagacttctaatccctcttattatagggaaggttgctcgagaagcctcaaaaggtattgctgattttgttgatggaaaccaacaaggattttcagttggaaacgcggtgcttcttagcctagtcccatggattcaagtaagtaaatcaagatcactgatcttatctgttcaagtggaagcttttgctgctgctattactgttggagtgcttctacatattgcactgttggctttcaacattgcaacgttgcatatcttgtcacatcttgaaaagaaaggggattcagtctttgcaaagaaagagtacacacgagctgtcattttggtgactagtcagaaaacattgccagttatgataacagtggttgagcagcttggaggagccctcggggagtccggacttctagttatcccttgtgtttttgcacacattaaccagtaaattggtggcgccggagggatcaacaatttagtaatccaaagtaactccataattcaattttggcgtgcaaaacagagaattagtcaggaattgctgactgcgaggctgattttgtgaagatgtaattgtacttgtccagcaagttcagtaatggaagaattgctgactgcaaagctgatttcgtgaaggccgttatatatgtcttcaaagcaggaaaatgaattcatctccaattgacaggcttatttgtttgaggcctgagtgggtgctgttgtagtggccgttatgttttccttcacatctaaaactgaatctccacataaacattattaaatgtccagatttaggttaagtaaaacctacgcccctctttggtagtgctccatacggatctagc

SEQ ID NO: 5305 - DNA, 2166 bp, Zea Mays
tgctaggcagttggcaaagcagtccttaccaactgcccttccccaccccgctcccgcgtaatccaaccgctaataataaccgctgctctgattagcgcaatctccaccgctataattacgctcccgcctgcgcgcgcgggcctatcagccctagctagctacccagccgcctccgctgctcgcctcctcacttgcgcgtgtcgtgtcgtgtcgtgttgcgctaagtcagctgcttgctactagggttagggtttgcggctgcgcgctcgcgtgcgtgcatgcgcgtgggttggccgcggcagggatgacgccgcagcggtcgccgatgggtaccggaggaggaggaagtagcggcggaggcggcgggggaccgccggcgctacactacctgagcggcccgtacggagacaccacctttaccaaggttttcgtgggcggccttgcctgggagacgcgaagcgagggccttcgcgcgcactttgaggtctatggggacatcctcgaggccgttgtcatcaccgaccgcgccacgggccgctccaagggctacggattcgtaaccttccgggacccagagtcagcgaggatggcctgcatggacccatacccagtgatcgacggccggcgtgctaattgcaaccttgccatcttagggcggcctggtccagctgtgccttttgcacctacaaggccggtcatcccatacaatggaggtgtggcggttccagggggcatgtatgtgcaaagcccaacatatcagcaatccccttacaactactcacaggcctttgtatatccttatgggccatcagcatatggaccagaatacctatatcagcagaatgcatacggtccatatgttggacaacagtacgtgccggtttacggtggcccaaggacagtaggcccagcagtctacccatatgggcagtttggccaacctgtaccaagcgatcatgcttattctcctggttatgccccaagtcatgttctcccactgtcgaatcagaatgttagtgctgcaaatgttgtgcgcataccaccagttcagcaacaacttcctccaggagctccacgccctcagcaacagcttttggtccctgcccgtgcaccaccgttcccgcagaacaacatttctgaacaagcgacaggttgacaaggacgccagaaagtgacgaattttaggcatcctatagtctgcagcaggactaagaaaagccataccgctaaattgggcggcatgcttttttttcttgcaaattgttttcttttgcactctaaaggttgtcgttatccatggttacccgaacttcttataatgtgagtgtctgaagatgaagcccctcttgctcagcttctgtcagtgtgtgtgtacattccccatctcctgccagaaattctgatagctggtggtctgtgcatggaccaaagtggatggccggaaatggagtccggcctccaacctgtgtataataatataggtcatgcagtaggtccaaatcgtagaacattctttcaaaacatctggttgtgtatattaattctcttcttcgcaccttctcagtacctccagtgcatgttcccatgtctcattagagcataggtatttcagtgtcactgtgtcgtcgtcagcgagtcatgtacattattatcctgaaactgtaaactatatatcacctatgtcaactgtaatcaaataatgacagccctaccttgggaaagaatgtgatttgttgcaaattgcaacggatggggggaaaacatcggggcatattcatcatactattcgtctgtttctatggataagaaatactgcatacataactacagaacgagcaaaattgaaaatcgtgtttgttggcatgtaactctagtttatggttttgtataaaattaaaaacaatctacgtagcaaagccagtagtaacatcaaaacggttcgtagctctagtgctatatatataaacacgatcctggggatggcaatgggcaaatggtaacatggggctctgagaagccgaggtcacctgacttatatgattccatatccgtgtctttcttcctgatcccagcatatatgatgaacatcattggtaaaatgaatattaaaaagatgctccatagtccttaagctgaatgacagaccctgcagcatttttatacgtc

SEQ ID NO: 5306 - DNA, 4128 bp, Zea Mays
aaagcggtcagtgggtggaggcagccaagagtcaccctgtcgccgttgccgtcgccgaggcaggcagagtctccctgtcgccgttgccgtcgccggcctcctcctcctctgccacttcctcccaactcccagccgcaggggccgacggcgacgggagggaagaggcggcagaggtactccgaggggcgcggagagaggctgtgccaggccacgccgtccagtgcctccgggtccgtcgccgcagcttccggccgcgtcggagaggtagcccccggagctcttcgcggaggctcgggaatggtgcactgggttagcgacagtgatggcagtgataacttcgaatgggacagtgatggtaacggggagcagacagtgagcttcaacgctgctggtgctggttcatcagctctggcagcgacgaacactgatgctcctggcccatcgacacgggttgctaatggcaatgggaaggctgggcgatctgcctctttggttcagaagtatgtggacatgggtttctcagaagagattgttctgaaggccatgaaggacaatggggataatggagcagattcattagttgagctccttcttacttaccaggaactaggcaatgacctcaaagtggataatgactttgcttctagttgtgcccccaaaactgctgacgatagtgatgatgatgacacactggaaatctgggatgatgaggatgctggagggagaagcaccagggttgctaactctgttgatgattctgatgacgaggatttcttacatgagatgtcacggaaggacgaaaaagttgattccttagttaaaatggggtttcctgaagacgaggctgcactggctattaccagatgcgggccggatgcatctatttctgttctggtggattcaatctatgcttcacagaccgcaggagatggttactgtggcaatctgtctgactatgaggataattcctatggagggagaagcacagggaacaagaaaaagagaaaaagatatggaggccaagcacagggaagtagaggcccattagatggtagctgtgatgaacccatgcctctcccacatccaatggttggatttaacttgccagaccagtggtcaagacgagtggacagatcgttgcctgcacaagctattggtccgccgtacttctactacgagaacgttgctcttgctccaaaaggtgtctggactaccatatcaagattcttgtatgatattcaaccagagtttgtggactcaaagtacttctgtgctgctgccaggaaaaggggttacatacacaacctgccacttgagaacaggtcacctctcctccccatacccccaaagacgatatcggaagcatttcctcggaccaagaggtggtggccttcatgggacccaagacgacagttcaattgcctccagacttgcgtgtctagtgcaaaattgttagagaggattcgcgtagccctcacaaacagttcagacccacctcctccaagagttcagaagtatgtgttggaggagtgtaggaaatggaacctggcatgggttggcttaaacaaggttgctcctctagagcctgacgagatggagtttctactcggctttccgaaggatcacacgagaggtatcagcaggacagagaggtatcgatctctaggaaattcatttcaggtcgatactgttgcttaccatctctcagttctgaaggatctgttcccacaaggcatgaatgtgctgtctttattctctggtattggaggagcagaggtggctctccacaggcttggcatacagatgaacacggttatttcagtggagaagtccgaggtcaaccggacgattctgaagagttggtgggatcagacgcagacgggtactctgattgagatcactgatgtgcagacactgtcatctgagaggatcgaggcgtatattagaagaattgggggcttcgatcttgtgattggtggaagtccctgtaacaacctcactgggagcaaccgtcaccacagagatggtttggagggcgagcattctgcattgttccatcattattttaggatcttacacgccgtcaagtccatcatggagcgtttgtagttcttagaatctttactgttgttttggttctagtagaatactttgtgaccgaacttgtaaatggtttgcaggttgactggtttagttctcttgccactctaatttaggctagttttttttttatttaatcttctttggtgatcttggtgcagttctgtggcactgttgggtattcaaatgcagattgatccgagaggctgccctgttgcattttctttttaaaatttgtatttgtcaatgagagatcaggtattctggttgccaaaaaaaaatctgaagttgtggagctgagaaaaggacggtgctaagctacaaccacccactgccacaccatgcgcacccccaacccaaaagatcctgcttttgctcacgcttatcaccactcccatctccatccaaaaccataaaaaaaaccagtgcgagctgaagcatccaggctctggaatcatcgtcgggatgtctgtgccagcatcagcccaggtgcctcacaccatacgatctgctgggagctgctgcttcaggtcgtcgcatcaactatctgcgcagaatctgggccgacgtggcgggggaccggaaagaagaagatcctttccacccgtggcgtgcttgagtccagaaacggcgcacatcctggtggccttatgaagagaaggaaggtcgtggagcacatcatcctgctcagagccaagcccaacatctcagacgctgaagagaaagacatgctggactacctatacacatcgcagtaccagatgcgagggatactcgcggtctcgctaggccgcatcgaggaccccaacagcgacaacttcacgcacgctgtgttcatgcgtttccagcagaagcaagacatcgcggagttccagagtaacgcgtactactccaaagttgtcgacgagcacgtaaagcccgtttcctatggctcggtttctgtagatttcgagtccgaggtggaagacgacattatacctctctttcgcaggggagagactgcgtctagagaggcaacggaggacgcattagcgtctcttgacaagttgatcagccaatgcagcgcttctattgtgcaggcaacatgtggctgctgtttggatcgtccggataacgggtacagtcatgctgcagtaatccgtttcccatcatctgatgagttgaagctgttcagggagagcgaggagtacaaggatatgtgggcgtccaagttccgcccgatcgtggagagatccctgcacctgcacttcaccgttgaccccgtggggaaccagctgatgtagaccaaccgagtggtcatccctatacatgggaccaagagcatctgtactgtacagtgtaaaacagagagatggggtaatatagaggataccgatagggtcaacaagtgccagtgctcggttacattacatcacggcaaaaaaaaaacaaaaaaaacaagagaaaatagcctcccttgtcgctcaggagctcagatagatagatagacagatagatgctgagcaccgaccgagttgaggtccctcttgagagttcagttgtgcagcgggtttgacccctgcggcacccttctcttagcctcggacagatcctgcacctgcacgactcgcctccagccaagtttctgttgaccgtgctgcctgaaagacgacgtcccctcggcgtcggattccggaacccgtcggccgtggcagaagaggcctctctgctctgctcccaggagcgagactgtgagcactactactaccatgagcctgaccaagctttgttgcggcaatcccatgctttttcaggcagggtttcaacagcacaagttggagatggcaagggacggtagtttgtaatacatcacgcacaagcaacggaataaagattttatatacgcagacaacaagggcggcacagaaagtaaatccagctcggccatctggagacccgtggcggtgataccagacaccggggcaggcgtgcgcttgcctcaccaattttggtttggtgcggcggacagcgatgcatgcattttcatca

SEQ ID NO: 5307 - DNA, 4181 bp, Zea Mays
aaagcggtcagtgggtggaggcagccaagagtcaccctgtcgccgttgccgtcgccgaggcaggcagagtctccctgtcgccgttgccgtcgccggcctcctcctcctctgccacttcctcccaactcccagccgcaggggccgacggcgacgggagggaagaggcggcagaggtactccgaggggcgcggagagaggctgtgccaggccacgccgtccagtgcctccgggtccgtcgccgcagcttccggccgcgtcggagaggtagcccccggagctcttcgcggaggctcgggaatggtgcactgggttagcgacagtgatggcagtgataacttcgaatgggacagtgatggtaacggggagcagacagtgagcttcaacgctgctggtgctggttcatcagctctggcagcgacgaacactgatgctcctggcccatcgacacgggttgctaatggcaatgggaaggctgggcgatctgcctctttggttcagaagtatgtggacatgggtttctcagaagagattgttctgaaggccatgaaggacaatggggataatggagcagattcattagttgagctccttcttacttaccaggaactaggcaatgacctcaaagtggataatgactttgcttctagttgtgcccccaaaactgctgacgatagtgatgatgatgacacactggaaatctgggatgatgaggatgctggagggagaagcaccagggttgctaactctgttgatgattctgatgacgaggatttcttacatgagatgtcacggaaggacgaaaaagttgattccttagttaaaatggggtttcctgaagacgaggctgcactggctattaccagatgcgggccggatgcatctatttctgttctggtggattcaatctatgcttcacagaccgcaggagatggttactgtggcaatctgtctgactatgaggataattcctatggagggagaagcacagggaacaagaaaaagagaaaaagatatggaggccaagcacagggaagtagaggcccattagatggtagctgtgatgaacccatgcctctcccacatccaatggttggatttaacttgccagaccagtggtcaagacgagtggacagatcgttgcctgcacaagctattggtccgccgtacttctactacgagaacgttgctcttgctccaaaaggtgtctggactaccatatcaagattcttgtatgatattcaaccagagtttgtggactcaaagtacttctgtgctgctgccaggaaaaggggttacatacacaacctgccacttgagaacaggtcacctctcctccccatacccccaaagacgatatcggaagcatttcctcggaccaagaggtggtggccttcatgggacccaagacgacagttcaattgcctccagacttgcgtgtctagtgcaaaattgttagagaggattcgcgtagccctcacaaacagttcagacccacctcctccaagagttcagaagtatgtgttggaggagtgtaggaaatggaacctggcatgggttggcttaaacaaggttgctcctctagagcctgacgagatggagtttctactcggctttccgaaggatcacacgagaggtatcagcaggacagagaggtatcgatctctaggaaattcatttcaggtcgatactgttgcttaccatctctcagttctgaaggatctgttcccacaaggcatgaatgtgctgtctttattctctggtattggaggagcagaggtggctctccacaggcttggcatacagatgaacacggttatttcagtggagaagtccgaggtcaaccggacgattctgaagagttggtgggatcagacgcagacgggtactctgattgagatcactgatgtgcagacactgtcatctgagaggatcgaggcgtatattagaagaattgggggcttcgatcttgtgattggtggaagtccctgtaacaacctcactgggagcaaccgtcaccacagagatggtttggagggcgagcattctgcattgttccatcattattttaggatcttacacgccgtcaagtccatcatggagcgtttgtagttcttagaatctttactgttgttttggttctagtagaatactttgtgaccgaacttgtaaatggtttgcaggttgactggtttagttctcttgccactctaatttaggctagttttttttttatttaatcttctttggtgatcttggtgcagttctgtggcactgttgggtattcaaatgcagattgatccgagaggctgccctgttgcattttctttttaaaatttgtatttgtcaatgagagatcaggtattctggttgccaaaaaaaaatctgaagttgtggagctgagaaaaggacggtgctaagctacaaccacccactgccacaccatgcgcacccccaacccaaaagatcctgcttttgctcacgcttatcaccactcccatctccatccaaaaccataaaaaaaaccagtgcgagctgaagcatccaggctctggaatcatcgtcgggatgtctgtgccagcatcagcccaggtgcctcacaccatacgatctgctgggagctgctgcttcaggtcgtcgcatcaactatctgcgcagaatctgggccgacatcgcaggtggcgggggaccggaaagaagaagatcctttccacccgtggcgtgcttgagtccagaaacggcgcacatcctggtggccttatgaagagaagcgcacgccttgcaggaaggtcgtggagcacatcatcctgctcagagccaagcccaacatctcagacgctgaagagaaagacatgctggactacctatacacatcgcagtaccagatgcgagggatactcgcggtctcgctaggccgcatcgaggaccccaacagcgacaacttcacgcacgctgtgttcatgcgtttccagcagaagcaagacatcgcggagttccagagtaacgcgtactactccaaagttgtcgacgagcacgtaaagcccgtttcctatatttcgagtccgaggtggaagacgacattatacctctctttcgcaggggagaggattttaactacggcgtcgagtttatgctgctggtgtctttcttgaagactgcgtctagagaggcaacggaggacgcattagcgtctcttgacaagttgatcagccaatgcagcgcttctattgtgcaggcaacatgtggctgctgtttggatcgtccggataacgggtacagtcatgctgcagtaatccgtttcccatcatctgatgagttgaagctgttcagggagagcgaggagtacaaggatatgtgggcgtccaagttccgcccgatcgtggagagatccctgcacctgcacttcaccgttgaccccgtggggaaccagctgatgtagaccaaccgagtggtcatccctatacatgggaccaagagcatctgtactgtacagtgtaaaacagagagatggggtaatatagaggataccgatagggtcaacaagtgccagtgctcggttacattacatcacggcaaaaaaaaaacaaaaaaaacaagagaaaatagcctcccttgtcgctcaggagctcagatagatagatagacagatagatgctgagcaccgaccgagttgaggtccctcttgagagttcagttgtgcagcgggtttgacccctgcggcacccttctcttagcctcggacagatcctgcacctgcacgactcgcctccagccaagtttctgttgaccgtgctgcctgaaagacgacgtcccctcggcgtcggattccggaacccgtcggccgtggcagaagaggcctctctgctctgctcccaggagcgagactgtgagcactactactaccatgagcctgaccaagctttgttgcggcaatcccatgctttttcaggcagggtttcaacagcacaagttggagatggcaagggacggtagtttgtaatacatcacgcacaagcaacggaataaagattttatatacgcagacaacaagggcggcacagaaagtaaatccagctcggccatctggagacccgtggcggtgataccagacaccggggcaggcgtgcgcttgcctcaccaattttggtttggtgcggcggacagcgatgcatgcattttcatca

SEQ ID NO: 5308 - DNA, 1236 bp, Zea Mays
ctttcccgtctccgcaccgcacacgcatcgagcggctcggcggctccgtctcatgagagccgtcgctgctgccgcctcgcccccgctccgcgccctcctcctcctctcccgccacccacgccgcgcaggcttcaccaactggccgtcgctgcctaggggccagaacgcaggacccacagccccgccggccgccaccgcccccaagcctgctgcgccgtccaggaggcaaggccgcggcctcactgccagcctgcctcgccaagtcgcccggatctcgacgccccacctgcggccgccggcgaccccgccaaggtgccctgacagacgccatcagagccacggagttcgtgcgctggctggttgtccgcggaagacggcagtcaggcgggataacaagcagagatttagtctgttggaggaagatggcgagctgttgatccgggcgaaccagggacacacagtaacagtataaggcagaatgtaaacatcttgatacatctagatgttagtaaagcacttaaagatgggatgaagctttatatttcagacaacaaagtgatcttgacagaaggttttggttttgatggcgttgtccctgtgaaatactttgaaagaatcgaaacatggccaggacgagctccaataccgttccaaagataacaggccatgtttcagcattgctagttcgtacgtactgaaaaatgatttgtcatgatgtatcccggagaaccattttttttggtaattcacatacactattttggggggttggcttttttttttgggtgggggggagtcactttgattgtgttgggacctctcagatattcgtttgatgatttttgcatactctgtgaaaagccgtggttcttcgtgacctttttttttggatttttgtgtgtaacgaaaccgaaagacgagcgagttcttttcttcgtgcttgtcaaccgtatatcctaattatctgaattaggcgatgcaaatccatggcgcttaggacatgatatccgtgcatggagtatgagaagaagtatccagaggatgcagcaagcagaccttgaaatgaaaagtatcatcgatctgagagttgcctgctggctgggctggtgtccttcctgtaagttcattaccatctctgctcctggtgttagagctgattgacgtgcggatgatggcttttaaattttaatgtcatgaggcttgatcattcagaaatacagcatagcagtttggcaa

SEQ ID NO: 5309 - DNA, 1292 bp, Zea Mays
ctttcccgtctccgcaccgcacacgcatcgagcggctcggcggctccgtctcatgagagccgtcgctgctgccgcctcgcccccgctccgcgccctcctcctcctctcccgccacccacgccgcgcaggcttcaccaactggccgtcgctgcctaggggccagaacgcaggacccacagccccgccggccgccaccgcccccaagcctgctgcgccgtccaggaggcaaggccgcggcctcactgccagcctgcctcgccaagtcgcccggatctcgacgccccacctgcggccgccggcgaccccgccaaggtgccctgacagacgccatcagagccacggagttcgtgcgctggctggttgtccgcggaagacggtccgccacctccctgctccaacctcgcacctccggttcaccatgaacccttcgtcgtcctcctcctcctctggcgggtaccactccagggccgctgccttcgcttccccgcagccacgcggcggtggcggcagacggcgtggtggcggccgcggccaagacgggagcgaccgcatcgacgcccttggccgcctgctgacgagggtgttgcgccacatggcggcggagctgcgcctagatatgaggaccgatggatacgtgcgcgtccgcgacctgctgaagctcaaccttcagaccttcgccaaggtccctctcaagtctcacactgttgacgagatcagggaggcagtcaggcgggataacaagcagagatttagtctgttggaggaagatggcgagctgttgatccgggcgaaccagggacacacagtaacaatgggatgaagctttatatttcagacaacaaagtgatcttgacagaaggttttggttttgatggcgttgtccctgtgaaatactttgaaagaatcgaaacatggccaggacgagctccaataccgttccaaagataacaggccatgtttcagcattgctagttcgtacgtactgaaaaatgatttgtcatgatgtatcccggagaaccattttttttggcgatgcaaatccatggcgcttaggacatgatatccgtgcatggagtatgagaagaagtatccagaggatgcagcaagcagaccttgaaatgaaaagtatcatcgatctgagagttgcctgctggctgggctggtgtccttcctgtaagttcattaccatctctgctcctggtgttagagctgattgacgtgcggatgatggcttttaaattttaatgtcatgaggcttgatcattcagaaatacagcatagcagtttggcaa

SEQ ID NO: 5310 - DNA, 1733 bp, Zea Mays
tagatagatccgatccgatgcttgtgctcagctcatctgggactgggagtggagcaatctgtcacgtccataccggaagatcatgaagcaacatgttggggctgtgggcttcggcttgtctttgcgagctactcacctatctacaagtgtgggtggtgtggagccgtcacgcagagcaacaaccagactgcaaggaaacctgatagtatatggttttcccactggaggcgcctacgggacaggctcttcgtggctgtgctcgtcctcttcatgctcttcgttatatgtggtggggtctgggcggtatatcctgttgttttctcagtcagcaagttctgtggcgtatttcactgcacggtagcagctgtgttggctgtatgtaccgtcacaagctattgcttggcctctttgaaatgtgcaggcgcaccaacagacataaggtggggcagctatcccgtggttgggaaaggggatcttgagaactataccttttgtacatactgtagcaaaccaaagccccccagagcacatcactgccggtcgtgtaaaatgtgcgtggtggacatggatcatcattgcccatttgtaaattggcaactgcgtgggagcatcaaaccatcaagtgtttgtggtttttctcatttctgtggttatcagttgctcttatgtcgctgggatgaccatatacgcgagctaccagatatggccctccattgaattcccagacctagcatcatcatctcgtcactcgatgagttcttggaaaacggtgctggagatgatcactacggttgcaggctccgccttcttcttgtcagccaggggtctagtcctggtgtatctggcgtttgctagctcgtcagtgaatgctggtatagctgtgttgctgtgccagcagctgagctatatctacgaagggaacacgtacctcagccgtctgagctcaccaccgaatgccttgcagcatggagagaggggtttgcagaacatcgttcggtttttcgggtgcccgtatccagtctccagagctgtgttgcgactgcggtactccaacgctgccaagttgcaggatgattcagggtcgaaacttctttagagaggtatggatcaatagatcagtcaaaatcctctgttttttttatgttccttcttataaatcagtcatggtgtaacagacagtttcgtttacattacatgtcggtttcagtgctatactctcgattaagacgccgtttcgagtcgagacagttctgttctgttactcggaaattgtgatttgtgaacctcactcagttgaccaccggcagatttgtctgaataactgaagccgttttaggatgcagcactcatgacaacccgtgttcgatctggaggaaggattagttgttcatgaggacgccactcgcattgattagactgcagcacctgaaattctgcatcaccatcactgccctttccaactcagcagagcttgaagatggcagcagcttcatccacagctggttgttgcagaagaaatgatcatcatgattaaatctgacagtagtggcttcgagagtgatgctaggatgttggagagaaaaaaaatgtgtcccgccatacctctttgatgttaattcactgacatgtatatatacgatcggaaacgttgtaacgttcacttgatgtaaattattagtcgattaatcatgcacgtgtccgttccgtggtatggattgcatggcgaatggaag

SEQ ID NO: 5311 - DNA, 1876 bp, Zea Mays
tttatgttttcttttcgttcaaagaaaccgtactgataggaaacagttgatattttacatggctctaaaagtttataataataaagaatttaccaacccaggtggaattaataataacaggaggacctgtatctaaaattagaaatccttgaaggagaacacaggaagaccacccaccatgtcagagcctatttaaaccgcgctttgggcagccatctttcacacaacacaagagccttctcgctctgatctgagcaggaggaggaagaaagccaaaggccttccttgcgcttccagggcaaagaagatctgaggccgcggcggagcgtgacgacgacgaagtcggtcaggatgagccgcgaggataccctgaaagtgcagccatgtcttctcctgcggcgtttttctgtctgggcgcacagaccctcgagctcaaggtgaacatccactgcgacggctgccttaagaaagtcaagaaggtgcttcacaagatcgatggggtgtaccagagcacggttaatgcggcggagggcaaggtgacggtgtccgggctcatggacccggacaccgtcatcaggaagctgcacaaggccgggaagccggcgcagctgtggggcgccaccgccaagcctgccgtggcgacccagctcgagaaactgcagctcaaggatgccgggggcaagggccagggccagccgcccaagaacgcaggcggcaagggtcagccgcccaagaacgccgccggcaagggccagggccagggccagaagcagcagcagcccaagggtggagcgggcggcgccggcgccggcgcgaaagtggtggcgctgccgcactcgcagccgacgccgcagcagctgatgcagatgcagcagcagatgcagatgaacgggatgaagtttgctcatccggagctcatggccatgggcgcaggtcgcatgccgatgccgatgccgttcccggcggcagcgcaggcgcaggcgcaggccgccgcggccaaggaccccaagaccgtcaagttcgacctcccggggggcgaggagttcggggacgacggcagcgacctcgacgacgagttcgacgaactagacgacgtggatttcgaggacgacggcctcgacgacgacgacgacggcgacctgtacgacggccccgggatggtgatgaagcccatgggcatgcccccggccgctgctgccggtggcggcaacggaaacggcggcggcaagaagggtggcggcgggaacgaggtcccggttcagatcaatgggaacgccgccggcgtactactacccgatgccgcagcgccacccgcacgacagcatgttcagcgacgagaaccccaacgggtgctcggtgatgtgaggcgaggcgcggcggcggcctgcggggggctccggagaaagtgaaccaggcaaccagccagccagccaaccggaaggagggagctcgggcccgtcaggtcggaggcggccgccgtgagtggaagagtcgtcgtcggtatacatgaagaaaaaaaaaactagctatatgctatagcaccagccgtaacctcgccgccccatttcgttttcgtctttcccctagtttgttttcacctttggtactttttgtttcccttctctgaacaaagaaagagcggcatgcagcttcctcttccttgagtggaaggtaggtatagtggtaacaacaatgatagtggtgatgctagctgatggctgtcttccttcgcttctttctttcttgcttgcttgcttgcttgcttgcttgccccatatctaatgaatggacaatgtgcaagagcagtgcctctctctgcctgcctagcttgttgtgtgagagagacagagaagaatcatcatggatggaggtagat

SEQ ID NO: 5312 - DNA, 2019 bp, Zea Mays
gtctctcttcctcctcctacctcccagtcccacctttctttctttcttttttctttctttttgggtttctctttctcctggtccggtccgggagacctgctggaccagacggtgccgactcactgcaggcgttcgcttgacagccttcctattacgagacgagctcttggttttccgcagacacggactctaacaagcgagggcctgtcatggcctggcctgctatctgaggccgcggcggagcgtgacgacgacgaagtcggtcaggatgagccgcgaggataccctgaaagtgcagaccctcgagctcaaggtgaacatccactgcgacggctgccttaagaaagtcaagaaggtgcttcacaagatcgatggtaaaacgttctccttctttataaagccgcgaaccgcttgccttttttttgttattgtttgccgttctttcgtgttcgtcttctctgcctgccagggtgagacttgagagtgagaccagctcagccggaggggagaggctgctcgcctgctctcttcttctccgtaacagaaacgatggacgataacccttgtgtccattccgaaaataacttgttttcttctgttctaatacaaatgcgctgggcatggattggtgggtgttgcaggggtgtaccagagcacggttaatgcggcggagggcaaggtgacggtgtccgggctcatggacccggacaccgtcatcaggaagctgcacaaggccgggaagccggcgcagctgtggggcgccaccgccaagcctgccgtggcgacccagctcgagaaactgcagctcaaggatgccgggggcaagggccagggccagccgcccaagaacgcaggcggcaagggtcagccgcccaagaacgccgccggcaagggccagggccagggccagaagcagcagcagcccaagggtggagcgggcggcgccggcgccggcgcgaaagtggtggcgctgccgcactcgcagccgacgccgcagcagctgatgcagatgcagcagcagatgcagatgaacgggatgaagtttgctcatccggagctcatggccatgggcgcaggtcgcatgccgatgccgatgccgttcccggcggcagcgcaggcgcaggcgcaggccgccgcggccaaggaccccaagaccgtcaagttcgacctcccggggggcgaggagttcggggacgacggcagcgacctcgacgacgagttcgacgaactagacgacgtggatttcgaggacgacggcctcgacgacgacgacgacggcgacctgtacgacggccccgggatggtgatgaagcccatgggcatgcccccggccgctgctgccggtggcggcaacggaaacggcggcggcaagaagggtggcggcgggaacgaggtcccggttcagatcaatgggaacgccgccggcgtactactacccgatgccgcagcgccacccgcacgacagcatgttcagcgacgagaaccccaacgggtgctcggtgatgtgaggcgaggcgcggcggcggcctgcggggggctccggagaaagtgaaccaggcaaccagccagccagccaaccggaaggagggagctcgggcccgtcaggtcggaggcggccgccgtgagtggaagagtcgtcgtcggtatacatgaagaaaaaaaaaactagctatatgctatagcaccagccgtaacctcgccgccccatttcgttttcgtctttcccctagtttgttttcacctttggtactttttgtttcccttctctgaacaaagaaagagcggcatgcagcttcctcttccttgagtggaaggtaggtatagtggtaacaacaatgatagtggtgatgctagctgatggctgtcttccttcgcttctttctttcttgcttgcttgcttgcttgcttgcttgccccatatctaatgaatggacaatgtgcaagagcagtgcctctctctgcctgcctagcttgttgtgtgagagagacagagaagaatcatcatggatggaggtagat

SEQ ID NO: 5313 - DNA, 2257 bp, Zea Mays
gtctctcttcctcctcctacctcccagtcccacctttctttctttcttttttctttctttttgggtttctctttctcctggtccggtccgggagacctgctggaccagacggtgccgactcactgcaggcgttcgcttgacagccttcctattacgagacgagctcttggttttccgcagacacggactctaacaagcgagggcctgtcatggcctggcctgctatctgaggccgcggcggagcgtgacgacgacgaagtcggtcaggatgagccgcgaggataccctgaaagtgcagaccctcgagctcaaggtgaacatccactgcgacggctgccttaagaaagtcaagaaggtgcttcacaagatcgatggggtgtaccagagcacggttaatgcggcggagggcaaggtgacggtgtccgggctcatggacccggacaccgtcatcaggaagctgcacaaggccgggaagccggcgcagctgtggggcgccaccgccaagcctgccgtggcgacccagctcgagaaactgcagctcaaggatgccgggggcaagggccagggccagccgcccaagaacgcaggcggcaagggtcagccgcccaagaacgccgccggcaagggccagggccagggccagaagcagcagcagcccaagggtggagcgggcggcgccggcgccggcgcgaaagtggtggcgctgccgcactcgcagccgacgccgcagcagctgatgcagatgcagcagcagatgcagatgaacgggatgaagtttgctcatccggagctcatggccatgggcgcaggtcgcatgccgatgccgatgccgttcccggcggcagcgcaggcgcaggcgcaggccgccgcggccaaggaccccaagaccgtcaagttcgacctcccggggggcgaggagttcggggacgacggcagcgacctcgacgacgagttcgacgaactagacgacgtggatttcgaggacgacggcctcgacgacgacgacgacggcgacctgtacgacggccccgggatggtgatgaagcccatgggcatgcccccggccgctgctgccggtggcggcaacggaaacggcggcggcaagaagggtggcggcgggaacgaggtcccggttcagatcaatgggaacgccagcaacggcggcggggcgaagcagaacgggggcggcaaaagcggggccaagaacggcaagggccgccgcatgcgggcatgatgatgaggccgccgaacatgatgggcggcgcgggcggtttccccggcatgggccagatgggcggccacccccacatgggtggcggcggcatgccgcaggcaggcgggggcgccgcgcacggcatgccggctggtggcagcatcagcatggccgctggcggaatgcctggggccgggttctttccgcgcggcgttggcggcggcatgccggccggcgcggagatgctgggcatgtcgcagctgcctccgcagcagcagcagcacatggcggcggtgatgcagcagcagcagcagcacatggctgcgatcatgcagcagcagcagcaacagatgatgatgatgaacgggcacggccacggccacggccaccatggccacggcgggtacgggtacgggcgcccggcgatgccgcagtacccgccgccgccggcgtactactacccgatgccgcagcgccacccgcacgacagcatgttcagcgacgagaaccccaacgggtgctcggtgatgtgaggcgaggcgcggcggcggcctgcggggggctccggagaaagtgaaccaggcaaccagccagccagccaaccggaaggagggagctcgggcccgtcaggtcggaggcggccgccgtgagtggaagagtcgtcgtcggtatacatgaagaaaaaaaaaactagctatatgctatagcaccagccgtaacctcgccgccccatttcgttttcgtctttcccctagtttgttttcacctttggtactttttgtttcccttctctgaacaaagaaagagcggcatgcagcttcctcttccttgagtggaaggtaggtatagtggtaacaacaatgatagtggtgatgctagctgatggctgtcttccttcgcttctttctttcttgcttgcttgcttgcttgcttgcttgccccatatctaatgaatggacaatgtgcaagagcagtgcctctctctgcctgcctagcttgttgtgtgagagagacagagaagaatcatcatggatggaggtagat

SEQ ID NO: 5314 - DNA, 5578 bp, Zea Mays
atgtcgtcgtcggagcccgatgccgagggcgccctcggcggcgcctccccatccgcccgcgtgctcgcccgcgccctcgacaagatcatcaagcactcctcctggcgcaggcacgccgctctcgtcgccgcctcccaagtcagcgctcgatctcctctcctcctccccagctcctgatgacgagcccgagacctcctcgccctcccccgtccccggcctcccagcgcccgccgcggaagccgccctcaccgcacttctcctcgcgctcgacccggcgtccccgaaggtagccgagcccgcgctcgagtgcgtcgccggcctcctctccctgcgccttctcctcggcgacgtcgacgcggctgacccctccctgatctcgaaactcttcgccgcggtgctctcctgcgtctcgctgggtggcagcggggacgaagcgctcgagctgtccgtgctgcgcgttctcgtcgctttcgcgcggtgcccgggagtctccgtcagcggggagtgcctgggccaggtggtcaaggcgtgctacaacgtctacctcgggagccccagcggcggcaaccagctctgtgctaaactagctctcgcacaagtgctggtcatcgtgtttgcgcgcgtcgaggctgacgccatggacgtccgcgtgcgcactgtctccgctgccgacatgatggacctctctgaccgcagcctcaatgactccagcgttgtacaggcggcacaagtgttcataaacgaggccatggaggggagcgacgtgccggaggaggcaccacatgtagatgaggcgtcagttgaggcggaaggcgctggggaggatggtggaataagcaagataagggaggatggcctggctttgttcaagaacctatgcaagttgtcaatgaagtttggtacgcctgatagcccggatgatccaatgctattgagggggaaggtgttatcgctggagctggttaggatggtcattgacaatgcagggctattctggaagacaaatgaaaagtatcttgaagcagttaagcagtacctttgtttatccttgttgaagaatagtgctttgtccgcaatgagtgtcttccagttattgtgttccatatttatgagtctaatatcaaggtttagatctggtttgaaagaggaaattggaatgttttttcctatgcttatcttaagagttcttgaaaatgttctccagcctagttttttgcagaagatgacagttctaaacttcttggagaaaatgtctaaagaacctcaggttatcattgatatctttgtgaacttcgattgtgatgttgatgcaccgaatatttttgaaaggattgtcaatggacttttaaagactgctttaggtgtccctactggatctacaacaacattaactgttgcacaagaccaaacatttaggcttgagtctgtcaagtgccttgcaattgttgttaagtcgatgagtgcatggatggaccaacaactgagaattggtgaattttcaccaggcaattctgaaactctaagttcagctgataaccataatattcataatggagaagaatggagcggaatagattatgaactgcagtttgacactagtagttctgacataaccgactcttcctcacttgagcagcgacgtgcttacaagatggagcttcagaaaggaattaccttgttcaacaaaaaaccttccaaaggtattgattttctcattcggagcaagaaaataggcaattctccagaaggtgtggcatctttcttgagaagtactgctggattgaatgcaacaatgataggcgactatttgggtgagagggatgactttcccctcaaagtaatgcatgcttatgtggacgctttaaacttcgaaggcatggactttggtcaggcaattaggttcttcttgcaaggtttcaggttaccaggagaagctcaaaaaattgaccggatcatggaaaagtttgctcaaggctactgtaaatgcaatccaaatgcttttattagtgcagatacagcatatgttcttgcatattctgtgatcttgctaaacactgatgctcataatccaatggtgaagaacaagatgtctaaggcagattttatgcgcaacaatcgaggaatagatgatgggaaggatttgccagaagattatctgagtgcgctgtatgaccagattgtcaacaatgaaatcaagatgagtgctgattcttcagttgcacaaaccaagcaatccaatagtgtagggaggcttctaggcttggacaacattatcaactttgtcaattggagaccagcagaagacaaggcagtaggagcaaatgacttgctcattaagcacatacaggaaaaaatcaaagcaaaacgtgggaaatcagagtccacgttttatgttgttgctgatgcaaccattttaaggttcatgatggagtcctgttgggcacctatgatggctgcattcagtgtgcttcttgatcagtgtgatgataaggctgctacatcacagtgtttaaagggattaagattttctgtgcacatcacttctgttatgtgcatgcagacacagagggatgctttcttaacgtccatagccaaattcacatctctccattctgccgcagaaatgaagcaaaaaagtattgattctatgaaggctataatatctatcgcaatcgaagatggcaattacttgcaggaagcttgggagcatgtattaacatgtttatcacggtttgagcatttacatctgcttggagaaggggttcccactgatgcatcctttctgacagttcctctgattgagtcagaagaaaaaactaagaagtctacttctgttctatcttctaagaagactagtgctcttcagaatcctgctgtgatggctgctgttagagggggtacttacgatagcacagtggcaaaaggcagtgtgtcagcactggtcactcctgaacagatcaataatttcctatcaagcattaatttgttggatcagattggcattgttgagttaaatcatatctttgcccatagccaaagattaaacagtgatgctattgttgcttttgtgaaggctctttgcaaggtctcaatgactgagctgcagtctccaacagatcctcgtatcttctgccttactaaaatagtagagattgcgcattacaatatgaatcgcatacgtctggtgtggtcacgtatttggaaggttttgtcagatttttttgtgtctgttgggttgttggaaaatctttctgtcgctatatttgtgatggactctctgaggcagctggccatgaagtttcttgaaagggaggaactggcaaactataactttcaaaatgagttccttagaccttttgtgatcgttatgcagaggagcaatgctccagaggtacgagagctgattgttaggtttttacttttgctgcagctgatgatacaagaagtactgtcctattggcatttgagacggtggaaaaaattgttcgagattattttcatcacataactgaaacagagacaacggcatttactgattgtgtgacttgtcttattgcatttacaagtagtcaatttaacagcgatgccaatctcaatgctattgcgtttctgcgattctgtgctgttaaacttgctgaggaaggattttcttgtcaagatagggcttttgaacaacccaggaattcagccatggtgtgtggtggaaatgccactgtgcaaaaagatggtcatatttccctctggatgcctctccttgcaggtttagctaaactgacaagtgattcaagactgaatatcaagaaaggtgctgtaggagtactttttgacattttaaaggatcacggacacctgttctcgctgacgttttggaccgatatctttgaacatgttgtttatcctctatttagcaatgaaaggtcgacacccagtgaccagatttcaacatcaaattctgcagagtataatttacctgatcttgaaacacaaacgttggcagtgaaatgcttggtgggtttgtttgttaatttctttgatgtgatccggccagaacttggtagaacagcatcaattgttacatctttcatcagaagcccctacaaacattgtgctaccattggtgtatctgcaatcatgcgtttagcagatggggttggtaacaaactttccaaagaggaatggaaagagatattgatcttctttagagaatcagtgacgcataccttcatcacgttttctaaaattgtaaggatgatgcaagatattgatatcccagatagaattgattcttattccgaaaccgagcaatatttggatcatgagatgtatgttaacgatgaagaggaagcgaatatggagacagcttcttatgctattgtcaaactgaagaatcatatggctctactgctcatggtgattcagaacattatcaaactatacgaggagcacagcaaatatcttcatgccgagcatattagcattcttttggagatgatgtcagctattgcgatacattcaagtgaagtgagctctgagttatccttgcagtcgaaatttcataaagcatgttcccttttggaggtatctgagccagcaattgttcattttgagaacgattcctaccagagttacctcaaacttcttcaagctctgcaacatgattatccatccttgtcagaagagatgaacatagagtctcaagtgcttgatacctgtgagcaaatattgcaaacatatctgaagtgcgcaggacacaaaccatgtgatggggcgtcccaaagaaatccgcctttacattgtgcagtgccgctgagcgcttctaagaaagaggaattggctgctaggactcctctggtccttcaagtgatgaaattgttgggtgatctggagagagattcctttaggagaatattaccctgctttttcccattattggctgatctgatccgctgtgaacatagctctggagaagttcaacatgcactgtacaatatcttccaatcagccattctccccatgataagggtttaataacagattgtgacccaccaattgtacagtttttgttaccccactttggtgttgtaattcagttcattgtggcgtcattccattacgaggggttgtatacctatgaggttggcacctcagccctaactgattatacctttgcaataccatatacaaggtgaaatgtatcggtagttctaggcgttctcttactgtgttgtaacgcccgaatgtaattgagccggttgtgttgtcttgcaggatgacgtataaaaatgctgcagggtctgtcattcagcttaaggactatggagcatctttttaatattcattttaccaatgatgttcatcatatatgctgggatcaggaagaaagacacggatatggaatcatataagtcaggtgacctcggcttctcagagccccatgttaccatttgcccattgccatccccaggatcgtgtttatatatatagcactagagctacgaaccgttttgatgttactactggctttgctacgtagattgtttttaattttatacaaaaccataaactagagttacatgcc

SEQ ID NO: 5315 - DNA, 5009 bp, Zea Mays
cgctgccgcaccacccgccagcccggttgggtggttacttgccgcaactagcagctatttatatgccccagcctctgtgggccgtttgcactcactccaaagcaaagcaaatctctctctctctctccatctctccacacacagccccttcgctgccgaggtccctcgccggacggggggtgaaggacgaaggggaagaaaggtgcgcgggcatgctttccacaggctttcttgaactgtgaactcgtgggcgtggtggtggtggtgctggtgctgggtgtgtgggacggaatgattggctcctcccagtcccagtcccagtcccacccaccaattctcttccccccgaccggccgtgaattgaattgaatcgaatcgcatcgctgagcttccccccggctcgctcacgcgacctgttgatggttcaagaaagcccatggaaaccatgcagcctccctcctgtgcagctgtgctctggtggcggagaattccgccggttccgggtgagggaattcagcagaccagccaccccgatgcggattcgtgtgtggaggagagttgcagttgcagcgacgactccaactccaacgaggggatccacgcctggactgttctgttccaacgaggggatccaactccaactcagcggcaggcagctagctgtcctgttcgaaattcaaaacccggccagatccgtgcttgcgctgctcgccggggctgctttgtccactcaggccatcgatctccagttccatgtatgctccaattttgttcttgttttttttaaaacaaactcagttccagtacctgagcatgagtcacagcttggtttaggcgtgtggtggcgtttgctgggcagatcagttattactcctccactccacaccactgcaccggccggcaccgctggtaacgcacgcaggtaggcggccaaggccatgccaatgtcatgcagcgggattgatccatgcgtcgtccattggcgccctgccctcggctagctgcggctgtgctggaaagagatctggtggccgaggaggaggagaaggcgaggacgaggacgagggacagaaaagcagcaaaaggctcttgtggttggcatgcctacaaccaacgtcccaaccaggagcctgaaaaataatccccggcataaagccatgtgacaggcgacagcgatgccatctgatccgttccgttcggttccccccagcaaaccgtggtgaaaatcacgcggcccccgctctgccatctacccctgcacgagtacgacggtacggcggctgctcctgcaccctgcactgcaggccttctgcaacgcgggaggcgggaggggatttcgcgcgattcccgagggtgaggcaagaatatatggggtatgtttgattttacttttggctttgctttttaccctctaaaaatcaaaagtcaaacctctaaaaatcaaaagtcaaatcaaatggctgcattcagaaatcatctttttctaaaagcacatttggacatgcttttagtggcttttaaatggaacatgtgaaaatatatatcgaaaaacttttaacgacttttagtagttttcaccgaacgatttttagctttttaacagctcgcagcccataacagttttttttcatagtcacagcccaaccaaacagacctatagtgctgctgagctgaatttatattgcatttttttcataccgcttactaccttttcttctcgatggagattattgtcacctgctggacatcaggggcgtccttaatgactgtctcacatagctagatgacgtggaacaaaaaaaataaaaatagtaatttatctcaccatcagtatttagtcttagctcgtcactagttagggggtgtttggttacaccccgctaaaatttagcctctgtcctatcgaatgtttaaacctccgttccgagtattaaatgtagtcggattataaaactaatttatcagccgaagattaaaagacgagacgaatctagttcagttggttgggtctatatttcatactcctatttaaaagtcaaacgcttgatgtgacccggactaaactttagcagtagcaaccaaacaccccgttattctcgttccaccggtacttggtcttagctcgtcactagttattctcgtttttcatatattttctatccagttaaaaaatagaatgtatagatagtaaaatagctagcaatagggattccctgacaatgcactgcggtccggggaggcgagtgggcagtgcaggtgagctacatgacctagccagtagccaggcgagcgagtttatacggatcacatgatccgcaatgatgggcggagcggagggaggccagttgacccacactgccactgggctgtgctgtgcagatccagagccggggcggggcggggaccaaccagatctcccacggggcatacgagatataccctatcctgcccgcgcacacgagcctgctagctttagcgcagcctagctagctcctccagactactactgtcctcttccagctctactcgacttgacggtgatagaatatatctcaattttgccaatattttatgtggcttaaaataaaatactcgagtatacaatacatcctgaaatcaatgcctatctatgataaaagatatcagctttttttttatctcacaccatatccaaccggcccagacacactcccgctccctctcccaccatcaaatccacaactcaaatccgactcatatccaaccgagcagaagactatgctctctttctctgtagcctgatgcaacaggtaatgcaatataacaatgccgacatcgatgaggacaaaaacatcgagaagtcactccacatttttccaaagaaacacatgaaggccatcttggtgatgcagatgctactagagatggcaacagatataatacccatcggattgtattattcgatatacatacccatcaaaaaaaatctaaccattggcaagtctctctaattggtctctttgacagaaatgttggagcagtaaagctcggggtggataataagtatgtcttggtcttgggaagaaccacatattccatgagaacaggtctaggtcaaatgttacttcactacgagctgcttcaacaactacctcaacacttagaaccaactgctctctaagtcacttgggagggtcaagtttgaggagcttggtgctagactcggaatggtttaaattcctcggaagacatcatagacttgatataatgattgaagacttgatgtcaacattttatcttcattattagcatctaatttagcagttctaatacattataactttctttgttccaaatctgttacctcgatcttaccatggtttagttggattcaaatgaaaaaaaatccaaaaaactatgtgaaccgtgctactaccataccagggatccaatccatcgatgcatgcagtgcaatacaagcactgaataagttctcctaggtacaggttacaggctacagaagaggaagggggaagatctcagctcagaagcccagtcagagctggctagctagctgctcttgcttcatttcaccgccccaaattcagcatcgctcgtacttgctgctactttaatggtagtgtttggttgaggagagtgaacggaacggagcgtcactgtgggagcgggatgggaacggaacggctccgttccgttgattttttggagcggaatggttccggatctgagtagaatattccctaattggagtaatgccgttgtagttactttgtaaccaaacagcaacaaaactggaacagaacggcttcgttctacttggctcttcaaccaaacactatcttactgcttgctttcgctttcccttccttcctagtagcaggcagcagtagttcctacttcctagcaggcagcagcagcagctatttatgcagcagcagtgtgagacgacacattgaaaagcatctgatcctaaaggcgagccaacagcaaagagacgagacgagccccgggcggcccctacgttcctagtacaacatcagagaagtgtgtgatggttgctggtggtggtgtcagatcagcaagcaccaggtcttcagtctcctgctccatcaggaggtagaggtagctcgctcgctaggagctagctgcggaggaaagcgtcgaccttggcgttggtgctgcgggacaggaacttcatgcagatggacggccggcttggcgccggcgagggccaacacagactgcggcagcgtccagatgccgtcgccgcagatgaggcccgacgcgacggggggcgcgaatgccttggcccgggccgggtccaggcggtcccacacgaggcgcaccaggctgccgaagtaggggccgaggtaaaaggggatggacatggccatggtccatggacagcgggatgtaggcggcggcgcgggcgcgcgcgaggtcgcgtgccatgttgatggcgatggcggcggcttagaatgcgatgcagaggtcgagtcagtagcggggcagggttactcggaccccagcatgccgatgtcgcggaacgcgctgtagaagagccagaacacggacggcgccaccacgcagcccatggccgtgccgatcacctggctcacgaacatggaccgcggcgacgccagcgtcatgtacccggtcttgaagtcctgcgtcaggtccgacgccgtcgacacgatgccgatcatcacgctgcacacgccgccagacccgcgatgatgccgccgccgccgtctccgtcgtcggaggccgccgcccagccgcctaccgtcaagatggtcagcttgccgtacgtcgtggccagggaccggtccgtgagcccgtacgtacgcgttgcagaaggccagcactatagatatcgagctagctcggaggtggaggctcgatttgactcggctcgagctccgtttcgctcacgagctaaagcagaaaaaataatatatataataatcaattttaattaatttcaaactaatttaataatagaaaat

SEQ ID NO: 5316 - DNA, 2492 bp, Zea Mays
ctgctgacatgtcagttgtggaaaggaattactttcacaggatggtctatttagttccaacaatcaagtacagagtgcagcattatgttcgctatcaacacttatgacaattactcccaacgacacatttctagagtttgagaagcacttcataggactccaggagcgcaccttgcacgattccttctctgagagtgatattaagatattctatactccagaggggcagttgtcaaccgagcaaggagtttacattgctgaggctgttgctaacaaaaatacaaaacttgcaaaggggcgtttccgtgcatatgatgatcagatgcaggagacagctcggtctattgtccctgcaaagaatgagaagaaagaatcctcaggcattggcaagcgagaaactgggaaatctacaaaaaggactgctcctatagacaaggctaagactgctaaagaggaggccagagagttgctcttgaaggaggaagcatctgtgcgtatgaaggttgggcaagtgcagaaggatctctccttaatgttggatgctcttggcaagttggctattgctaatcctatatttactcatggtcaactgccgtcactggtaaactatgttgaacctttgctaagttctccaatagtaagcgatgctgcattttgtacaatgttgaggctagcacgttgcacagcccctcctctttgcaattgggcgctcgacattgctgctgcgattcgtgtgatatctgttggtgattttgaaatggttttggatcttacacctgtgatcatggaagatgatagtaagaagccatcatctggcatctttgaacaaatagtaaatgggctgactattgcgtgcaaagcgggtcctcttccagcagattcatttactttcgtctttccgatcatggaaaggatccttctatcttcaaaaaagacatgtcttcatgatgatgtgcttcacatactatctatgcatatggatccaatactaccacttcctcgacctaggatgttatcagttctttatcatgtgctaagcactgttcctgcctatcaaccttcagttgggcctatgctgaatgagctatgcctaggtctaagaggccatgagttagcacaggctcttgtcggtgtatatgcaaaagaactgcatgttaggcttgcctgcttaactgctataaaatgtgttcctgtgcactctgtgcaacgagatttgcaggtgtcaacaagcctctggattgctgctcatgatccggagaaggtggttgctgaattagcagaggaattatgggaccgctttggttttgatgccatcactgattactctggtattttcaatgcactttcccataaaaattacaatgttcgtgctgcatctgctgaggctctggctgcggcattggatgaaaatcaagacaaaatgcaagatgcactttctacccttttctctctgtacattcgtgatattggcactagtgttgaatttggagatgcacactggctcggaaggcagggtattgcattagcactccactctatcgctgacgttttggcctctaaagatcttcctgttgtcatgacatttctcatctcacgcgccctggctgatccaaacgtcgatgttcgtggtagaatgattaatgctggcatccttattattgacaggcatggaaaggaaaatgttcctttgctatttcctatttttgagagctacttgaataaaagggcaagtactactttcctattaataattgtactagcatcagatgagaaaacatatgatcttgtgagggaaggtgttgttatttttactggtgctctggcgaaacatctatcaaaggatgatcccaaagttcacagtgtcattgaaaagttgttagatgtccttaacaccccatcagaggcagttcaacgtgctgtctcagattgtttgtccccacttatggtatccaaacaggaagagggtcaggctcttgtttctagactcttggatcggatgatgaaatgtgaaaagtatggtgagcgacgaggtgcagcctttggccttgctggtgtggttaaaggatttggaatttcttccttgaaaaaatatggcatcgctgtgacattgcagaaaaatttggaagacagaatgtctgcaaaatctcgtgaaggagctttacttggatttgagtgcctgtgtgagaagcttggcaaactatttgagccgtatgtcattcaaatgcttccgttcctacttgtgtgtttctctgatcaagtcctagcagtgcgcgaagctgctgagtgtgctgctcgggcaatgatgtctcagctcactggtcctggtgtgaagcttgttcttccgtcacttcttaaggtatcaatatatcttatttgatgctatcaaatcataacatttattgtgtccaaatgttctggagaatacaagtgtccagttcatctagttatatattgaaatctgacaaccacttaacttctgctgaatatttagg

SEQ ID NO: 5317 - DNA, 2788 bp, Zea Mays
gcggctgcgagcacacaccacactaggcactagcacacctcccctctcaggctctcagcgccccgccgccgccacgcaattgccagtcctcgcgatatgggcgcgcaagaggaggcagtggacgagatgctgcgcgccgccgccgccgaggtttcaacctcctcggtgaagcgccgcctccgcatcttccaccacaccctacctcctctcatcgcgaaggccatagagtcaccgtcagatactgtattgttagtcgatctcattttccagacattgccaatatatgacgatcgagcatcacgaaaagcagtagacgatttggttattcaggctcttggtgaacccaccttcatgaagccctttgctgcggtacttgtacaatctatggaaaagaatctaaaggttacaaacccccttacaagcttaaagcttctcagatggtcacactatcttctgaaatggagtcagtttgccacacttacaaaaggcgcctttaccagactggccaatgcacaagcagtcttatgtcaagtccttatggatgggtccttccgtcggcgccggacttgcaaacagttattcattcatctcttctccgagcacagtggaatatataagatgtacatagaggagctcagagatttaaggatttccatgagagattctcctgcatttttgaatctaatactggattttaccattacctctccatcattatccactcagtaccagtcagtattccttgatttgtatgtcaaaatcatcttgagttcaaaagatcggccaccgaaagcagccactgaagcttttaagcctcttttcttgaacattgggcatgaggattttaagaatactattataccatcatgcataaagatgctgaaaagaaatcctgaaatcgtactacagtctattggatatcttcttaagacagtccatttagacctaagcaagtattccatggagtttatgccagttgttctgcatcaagctcggcattcagatgaagagaggaggattaatgctttgagtattataggaacactaagtgagaagtcaagtgatccagatgctctaccttccatggtcaatgctatcaaagctgttttaggaggctcagaaggaaaactatcacttctataccagagaattggaatgataaatgctttagagcagctatcaagatctcctccaaagcaaataggcagacttgccccctcagtatcaactttccttctaacgtgttacaaggatgatggtatcgaggaagtgaaattggcgattctatcagcaatagggtcctgggctttggtatcagctgaagctgtccaaccagatgttgtttcatttattgctgcaggcttgaaagagaaagacactttaaggaaggggcatctgaaatttttacgagttatatgcaaaaactctgagtctttaacaaaggttgcttctttattggatcatttgattcagttgtcaaaaactggcttcagcaaggcaacacagcggttggatggaatctatgcactctttgcagtatcaaggcttgctgctgttgatacaaaaatggtgccattctgaaggagaaactgtggacattgattgctcaaaatgaaccctcattgatctctttacagttgcttcccaaactagcagatgatgattgcttagccgtcctggatcttgttcaatcactgtttgtagaacagttcttcagggttcgagaatatttttcaatccattcattgctgcagctgctaatatatctactttgccatccaagctgggaagttagaaaggtagcttacgatgttaccaagaaaattttctcaagctccagtggtctagccgaagatattctatttttattcacagactggttgtcactggttggagagagactgtcaatattgaaacaaggtgatatggatagcccttcggattctcagctaccattctttccatctaccgaggtccttgtcaagtgtttgtttttgattgcaccttatgctgttgtgcatagtctgagatcatattctcgaattattttgtgctcccaccacccttgccttaccagctcctcaagcccagctggcgtatataagaggttgcaaagaaggcttagacaagaacagatcttttttgttgacttaattactcccaacatctctgttatctgcaaggaattactttcacaggatggtctatttagttccaacaatcaagtacagagtgcagcattatgttcgctatcaacacttatgacaattactcccaacgacacatttctagagtttgagaagcacttcataggactccaggagcgcaccttgcacgattccttctctgagagtgatattaagatattctatactccagaggggcagttgtcaaccgagcaaggagtttacattgctgaggctgttgctaacaaaaatacaaaacttgcaaaggggcgtttccgtgcatatgatgatcagatgcaggagacagctcggtctattgtccctgcaaagaatgagaagaaagaatcctcaggcattggcaagcgagaaactgggaaatctacaaaaaggactgctcctatagacaaggctaagactgctaaagaggaggccagagagttgctcttgaaggaggaagcatctgtgcgtatgaaggttgggcaagtgcagaaggatctctccttaatgttggatgctcttggcaagttggctattgctaatcctatatttactcatggtcaactgccgtcactggacttcacgacaatgaaggttgctagata

SEQ ID NO: 5318 - DNA, 1335 bp, Zea Mays
aaatatcgtcaagcaggggagattgagatgtcatctctcctaccatcgtcgcaaacccaccatgcaaaatacaatagtggcatctgagaatgaaaatccacctttaatgccggcaatcatgactcctggtggtgcgcttgatctcgcaactgtactactgggaaatcgtataatcttcattggccaatatattaactcccaggtggcccaacgtgtgatatcacagcttgtaacacttgctgccatcgatgaagaggctgatattctgatatatcttaactgccctggtggaagtctctattcgatcttagcgatttatgattgcatgtcctggataaagcccaaagttgggacagtgtgctttggtgttgttgctagtcaagcagcaattatccttgcaggtggcgagaagggaatgcgctatgcaatgccaaatgctagagtaatgattcatcaacctcaaggtggatctgagggtaatgtggaggaggtgaggcgacaggttggagaaaccatctatgctcgtgataaagttgataaaatgtttgctgctttcaccgggcaaccacttgacatggtgcagcagtggacagagagggatcggttcatgtcttcttcagaggccatggatttcggattgcttgatgctttactggaaacaagatactagagaagggacacaacccacattctattagcagactagaaatactgcagaactggagccaaagttagatgcttgccgtccatctcgattaaagccctggaatgacagatgtttaccgaagaacaagatttgcttccattgcatttatggttgtaccattcaccagcttatggtggcacgtaggatggcattgtcatgcactcatgctaaaacgatgaagactgtttaatgtagacctagatgatctttgcggatgggagaaaagtgccagtttgcaaacttatagcccaggaaaggagaagtggtttaagaaatcgtttggattcaacatattggatttatggtgagaccgtcacatgatttttatttgtatgtgggcaactactcgtgttagcgttcaggaaaactcatacattcggatgttgcaaatacgtcttcaaggattttgataagggccccgtttggtttggatactttgaattgaattttattctaataatcataatttggacacagatcaattaagctggtatgtttttttttataaatatatctgtatactattgttggccgacgtatcataactctatatgttgcatcccttgataatatgatatacctataattttaagtacaaagattactctataattcaaccatttaaattt

SEQ ID NO: 5319 - DNA, 938 bp, Zea Mays
cccagcccttctccgtcctttccatggagacgaagccggagcggcaccaccgccacgaggaagcccgtgacggggaggacgacgcagtagccatggaacacggcgctctctcgctgcaacgcggcggagccaccttgtttggctggcggcaggacgaggaggccggccgccgccgccgagtagagatccgggaggtggacttcttctcgagggactccagagcccgcagccatgacgacgccggcgacggacgtgacgacgtcaacatcgggctacacctgctaaccacgacaagccccgacgaggaaatgacggcggcggcggccaagaatcaaaagatagaggcctcatcagctgttgaagcagagctcaggcgggtggtggaggataacaggcggctgcgtggcatgatgaacgagctcacacggaactatggcgcgatgtaccagcagcttctccaggtcacacaacaccacccacatcgacagcatcccgttgatctcatgatcaacagatcatcattggctcatacccgcctgaccaccgcggcctcgtacaacgacgacacgtccgctcagcagctgttgagggttgaggacgaggcggctagcgacggagctggagaggcgtcgccttcgctgagcaatggaggaaaccataacgacggcggcgacggcaagcagcggaggacgtcttcgaatgtgacagcaccgccggcgagagagaacggcggcggcgagcgggcggagttgccagcccacaagacaagggtgtctgtgcgtgcgcgatctgaggcaccaatgatcagcgacgggtgtcaatggagaaagtacgggcagaagatggccaaaggtaacccatgcccaagagcatactaccggtgcacaatggctgtggcatgccccgtgagaaagcagaaagggataccatgccattaa

SEQ ID NO: 5320 - DNA, 765 bp, Zea Mays
ggtagaggcaaggtagccaaacagaaaacaggggttcagatacaagtagtctgtctttctctctctctctctccccagttcttgagcggcatcaagcaaaatggacaagagcgttcctgtagttagcaagatcttttgctcaggagctccaacaatgctgatgataaggaggagacctgctgtggtgaacggtggcggttttgttgttactgacctcagccatagcattgtgttcatcgtagatggttgtggaacacttggatccaagggagagcttatggtcaaagatggtgaaggagaaccaatactatccatctctaaaaagggaggaattgtccaggcgctaagcacaaggaacagatggaatgggtactccatggattaccaaggaaaaaacaagctggtttttagcctaactgatccgaaatcatgcacagcacaagatgggtaagaaagggctgatgggaggcaaggacttctaccatgtggaagtacagtcaggatatgaccaagctttcatcattggggtgatggcaattcttgacagcatacatggagaatccactagatgctgacagcatgaattaaagaatttgctcttgtttataagagtacattaatgtccgatagcattgatcttgcaacctactttcatcttcaagtaagaaacagacgcatgctggcggcatcataatgattgtatgacccacgttgaataacatagaccagctgatgatatgagcctgactttcggtgccacttaat

SEQ ID NO: 5321 - DNA, 903 bp, Zea Mays
tcctcgttgcttcttagcttgggagactgtcttgttccaaacaatcatccaatgctcccatataagtactcgcctgctggccacagaacttggtagaggcaaggtagccaaacagaaaacaggggttcagatacaagtagtctgtctttctctctctctctctccccagttcttgagcggcatcaagcaaaatggacaagagcgttcctgtagttagcaagatcttttgctcaggagctccaacaatgctgatgataaggaggagacctgctgtggtgaacggtggcggttttgttgttactgacctcagccatagcattgtgttcatcgtagatggttgtggaacacttggatccaagggagagcttatggtcaaagatggtgaaggagaaccaatactatccatctctaaaaagggaggaattgtccaggcgctaagcacaaggaacagatggaatgggtactccatggattaccaaggaaaaaacaagctggtttttagcctaactgatccgaaatcatgcacagcacaagatagagactgtacgatagttgattgcaccagaaaaatagtagcccagatgggtaagaaagggctgatgggaggcaaggacttctaccatgtggaagtacagtcaggatatgaccaagctttcatcattggggtgatggcaattcttgacagcatacatggagaatccactagatgctgacagcatgaattaaagaatttgctcttgtttataagagtacattaatgtccgatagcattgatcttgcaacctactttcatcttcaagtaagaaacagacgcatgctggcggcatcataatgattgtatgacccacgttgaataacatagaccagctgatgatatgagcctgactttcggtgccacttaat

SEQ ID NO: 5322 - DNA, 1441 bp, Zea Mays
accaaacccaatgtttttgaggcgcccgtccaagcatcccatccattctctctcgctgctctgctccccacggaccacggggcaccaccacaaaccagacgcgacgcacgcgcgcaaaatcatccggcggagccagggcggaggcaagccagagacgcggcacgcgacgcgtgagggcgaggagcagcggcagcgcgggcgcggcgacaccgcgaggacagagcgagacgcagcggcggaggaggggcagaggcgagcgccgcctagagtccctgctaccatggacactttcttcctgtcgcacggctcgcccacgctctccatcgacgacaacatcccggcgcggcacttcttcaagtcgtgggtgccggcgaaggtcgcgggcgaccagcccccgcgcgccatcctcgtcgtgtcgggacactgggacacggccacgccggaggtcaacgtcatccgcggcagcaacgacaccatttacgacttctatggctttcccaagcccatgtacaagctcaagtaccccgctccgggcgccccggacctggccctgcggaccaaagggctcctggagcaagccgggttcggccccgtgaaggaggaccacagccgcgggctggaccacggcgcctgggtgccgctgatgctcatgtacccggacgccgacatccccgtgtgccagctgtcggtgcagagcgaccgggacggcgcgtaccactacagcctcggcagggcgctggcgccgctgcgggaggagggcgtcctcgtcctcggctccggcagcgccacgcacaacctgcgcaagatggggccgttcgacgcgcccgtgccgcagtgggccgccgagttcgacgcctggctcaaggactcgctcctcgacggaaggtacgaggacgtgaaccggttcgaggagaaagcgccgcatgggagggtggcgcacccgtggccggaccacttctacccgctgcacgtggcgctcggcgccgccggggacggcgcaaaggcggagcagatccaccagtgctggaccaacgccacgctctcctacgcgtcctacaggttcaccaccaagagctgacgcgcccgtgcagctgtcgggtggaggaccgccacccccctcccccccggggccagctgctgaattcgtgggaagcacatccgtcgacgtgcgcgacagcattcatatacacgcaccgcatgtagaaatgtgtttttctcaataaactcccgagtgccgatcgcggtagatatgtcttgcattgttcaacgcagcagcttgtttcgagaagcattctgttgttaaatctcattccatcatcattgtcttcaagtggtgcatattacggatcagcaagagaattgccgagtaaattcatcagagagcaagcaaagaaaaccatggtaggtaagagaaagggcacaatttctcccattttctgaa

SEQ ID NO: 5323 - DNA, 1211 bp, Zea Mays
accgtgtctgcctcaaagcgatgccaggacgccacgtccaagcaaagcacccgatgccattgccacctcccagcactcacgcgtgagcgtgactataaaaaacgcaccctctgcatccgcccccgtctgcctgccctaccgaatctttcgccgtcccatcagcccagcaattcttcgctgttcgaggacccctcggtttcgaccgaagcccagcaagccgaccacacaccgctgccgttggttccgtcccaagagatgggcaagtcctggtcgctcatcagccacctccacaccgtcgccgggccaagcatcaccctgctgtaccctctgtaagttccttcatcaccctaataatagcagggaccagttttaccagtgcagcagtgaccgaccacggtccacggcatacgtgagctgagagcatcgtgctgggacatgcgtgccgttggtggtgctgcaggtacgcgtcggtgtgcgcgatggagagcccgtccaaggcggacgacgagcagtggctgtcatactggatcatacactccttcgtcaccctcctggagatgctcgccgagccgctcctccactgggtacccgtgtggtacccggccaaggtgctgttcgcggcgtggctggcgctgccgcagttcaagggcgcctccttcgtctacgagaagctcgtcagggaacagctccggaactaccgcgccagatacccgcgcaagggcgccgccgccgccgccgtcggcggcgacgacgacgaccataaggtgcacatagccaagtgaaagcgtgtggagacgacgcaggagctgaccggagatcatcacaggaacttctgtagatctggtgttccaaggtgttcattcgatgtatcatcctacgtatctctgtaactcttgtggactgccggtgtcgcgtaatgtatctgaactcttcgtgagtgcgatggaacccccctccccttgcagcacgagatgcttctgtaagaacgataacatgtagacaagccaagcgcctcagctccttaagtgaaattctctactactactactactataatgcaccagctttgtgcacggatgaattcatgcatcgtgcccatccccacccaaggactagattcaagtcaactacatgctatgcattacaacaagcatctgttgcttgcacaaatggataaatggcataaagggaataaaaattgggctagataa

SEQ ID NO: 5324 - DNA, 1481 bp, Zea Mays
cagcctgggccgccaccagtgtcagacgcagaacaaattttaggtcggacgacaccataagagacaaattacggcatggtggcgtctttagacaatgtgaggggcttgactttagccatgtcatctagtgcattcattggttctagctttgtgatcaagaaagttggattgaagaaggctggggataatgggcttctggaggcttctcatatctatatgagccgttatggtggttgggaatgataactatgattctaggcgaggtagccaattttgcagcatatgcatttgcccctgccgtacttgttactcctctaggagctctaagcatcatatttagtgctcgcacacttcattctgaaagaaaatttgcacatgtttggcgttgttggttgcatactatgtgttgttggttctgttggtatagttttgcatgccccaaaggagagaaaaattgattctatgaaggaaatatggcatcttgcaacacagccaggttttattgtttattcatgcgtggcagtggcctgcgttctttttttgatatttcgggttgttgagcgctctgggcacagattgatgcttgtttacatagcaatctgttcattaatgggatctcttacggttatcagtgtaaaagcagttgctattgctttaaagctatcatttggtggatcaaatcaattcatctacgtccagacatggttcttcatagtagtagtcactatttgctgcttggtgcaattaaactacttaaacaaggctctggactcgttcaacacggctgtggtttctcctgtatactacgtgatgttcaccattcttaccattgttgcaaacatgatcatgtacaaggactgggcctcgcagactgcaacgcagatcgcaacacagctatgtgggtttgtgaccattgtcgcggggacttttctgcttcacaagactagggatatgggaaatccaccaccaccaccacctgaccaaatgtgcctgcaagaagccggggaatgtgctccacggtcaatgaccagttctagctgaacacactaagatgtcaaaatctcacagcctctatggactgaattggaattttgagctatatggtgacctttgtagatatattaggaaggagtaaagattggagtgcccagcagttggacataccgatgaagttttacgtttctgcaaaagaaagaatgaactgtatgaaggcatcggaatcttgtgaagacatgagattcaaactagctacctaactttggtaaatagcttgttatgccattttaaaacgatcatgatgctcaagaggcagggcgaattaggcttctctatactttttgtgataattaaaccctagttacaaatttaactttacccgagtgtccaatatatgtacaaaagctttaaaccttaatttcaactgtacgttgccatggcaagccgagttacccacctttatggatgatccttgcactttgatc

SEQ ID NO: 5325 - DNA, 2544 bp, Zea Mays
ccgcggcggaaccaaccgtggcaggggacggccaagggcggtcgctgccttgcctggcgttgacagtttgatgcgaccgcgggagcgtccgcccgaccgccaccgcgtccgcctcagctcccctcgcttccctctaatttccagcccagtagtagggagactagaatcgtcggcgcgacgccttggcagattcgtccgccccgatcccaccaccaccgtgccccgcgggtgacgtcggaccggcggcgatggcaacgtcggcggcggcgggatcgcgcaggaaggcgccgagccctccgaagcaccgccacgacggtacctcgccgctgcctctcggcatggactggagccctcccccgaagagatggttttacaggatacatgttggtatacaatcttcagaaggctttagctctatccatggaatcctcagaaggtttagtgactttctgaagctatcttctgatcttaagagcgcgtttcccagaaaagatgtcccatcggctcctccgaagcatgctttcttaagaataaattcaagcaggttgcttctagaagagagaaggcatgcattggaggagtggatgcagaagttactttctgacattgacttgtcaagaagtgctcctgttgctgcttttcttgagcttgaagctgctgcgcgttcatatttccaagaacggaatgggcgtccttctgaagtaggtccttctgcaaaaagcagtactaaatcttcctcacattctgatggacctgcttccggttctcttgctgagtccaatgaaataaatcaaggtcttactcgcggtagcagtctgacaggagcaactggtaatggtgtgcttggagaagctatcttagatcagtctgatgagcatgttagcagtgccttgaatcacaggaaagggaaccttgtattggaacatgatggtagaaatggttcggtagcgtcttataggggagttctttcagaagaggaccgtgattcttatcccggccatgctcggaaggactctgctgaaagtattgggagtgatttgagttctttaagaggaagtgaattatctgttccaggggctagtaattccctttgggatggtgctgtggtggatggacatgttagtcaaacagaacatcttactggtttagatatgcatcttttgtatgatatggatgcgcaagtcatccttccaaatgataaaaaacagaagttgactagacttttgatcacaatgcaacgaagaatagggacagcaaaaactgatatggaggatctcatagcacgattaaatcaggaaggagctgttaaagaatatcttactacaaaggttaaagatttagaggttgaattggaagccacaaagcaaaaaggtagagagacactgcaacaagctatcctggctgaaagagagaggattacccagatgcagtgggatatggatgagctccgtaggaagtactctgagatggagtcaaacctgaagaccgaacataatgagaaaactcgtgcggagtcagaaagaacaactgctagtggtgaaaatgaaacattacttgaagaattagaaatcaaacaaaaagaagttgagagtttgaaacagcaacttgtagaagctgaggcaaagtccaaagctgataagaaagttcttgtcaaagaggtcaagtctcttagaaactcccaaactgagatgaagaaagtgttgaatcagtatcttgaggagaagactgatttagagagagttattaatagagataaacagagatcagcacgtacaaagttatcccgagtaaaaattcttcatgagtgtcgactgctgcgggagcggctacaagactgcagtgctaaatttctagcagaagaacaagacaactttactattgatccatcatccttgcctgatgcattagatcttctagcaacatcagacaatagaatacgcctactcgttgctgaggctcaacttctagcacgagatgatgaacaaggctcttctgatggtggcgacgattctgatagtagatcctcattaactatgagcagtgaagatgcaaaagttaccgatgaagatactactaaaatgctttctgatctgctcattgacaatgcgcagctgagactacgcctcaatgctgtcatccgcaatgctgtaaatacttccgtgaagccagagaaagaaggtagtggcgaggttctccccaaaaagacagtccttaactggttgttggacagatgagagaaccaccaatatatatttatgtggattagttcttcaaacttacgcggcttgaccaaaattatatgatgagcgtacctatagtgccagggtagcatcaggaattcaggataaaaccttccctccatggagggaaggggagcctggaagcctttgtttctgttgcacgattttttatccacgcatggaagtcacggaggatggtatatatagggccacggctttggctcctaaaaaatgactgtctggcttctcttccagaaactctataaaagctagtgttttttaacaaatcgtttggcaaagcggg

SEQ ID NO: 5326 - DNA, 1953 bp, Zea Mays
ctttgcagtcgccactgcacgccactgattggctcgcgtgattcgtggaccttcttgccatggcgacgatgtctgcagcgtctcatcgctgctgtgcttcttccttgagagctttaacggtgttatttgtgttggcagctcttgtttcagatgttggcgggcgacatcatcatcatgtttgtcctcattatttctcctgtggtggtttaagcaatatatcgtatccatttcgtcggcaaggtgatccatctgggtgtggtgtccaatcgtacgagctggtttgcacggatacagatgctacaattcgcatcggcagtggaacatacaaggcatgcaggtgccctcgaatacaagctatccagatgttgttaagttcatgaggagtggatttgcccttggatttccctcgtatggtgataacatcagagaatgtctcgcaaaggatatgcgtactttccataaagaaccaagaaatagtacaggcatcaggcaacagatcttggacattcttacggtcgtcgacatattctgggcttgtgttatctatcaacttcaatcaactaattataatggtgtcacaactgttgtcatcggcatcattgaaacgatacaatatgttagcggggtcctggattatacagctggtgtttgcaggttcgtattaatgccgctggcagtattcgtcttcctagtctataaatactggaaaacaaggataacagtagatgcagtcgagaagttcttgcgaacgcagcagatgctcgttccgatgagatatgcatacacaaacatcattgctatcaccggccatttcagagacaagctcggacaaggtggttacggttctgtatacaagggggtgctacagccaggtgaagttcatgttgctattaagatgttgggcaactccaactgtaacggagacgagttcatcagtgaggtcgccaccattggcaagatccaccatgtcaatattgtgcgcctcatcgggttttgctccgaggaaaatagcagagcacttatctacgagttcatgccccatggatctctcgataagtacatcttctcgtcggagaagagtttctcatgggtcaaactcaatgagatcgctctgggcattgctagcggtctcaactacctacatcatgggtgtgatatgcagattgtacacttcgacatcaagccacacaacatccttcttgacagcaactttgttccaaaagttgctgattttgggcttgccaaactgttcccaagaggcgacagtttcgtgccactgagcgctatgcggggaacgataggatatatagctccagagatggtatctcgaagctttggtgtcatctctagcaaatccgatgtgtacagctttgggatgctactattggagatgacgggtgggcgaaggaacgcagatcctcatgcaggaagctccagtcaagcatactacccatccttggtgtacaaccagctgagccagggtgatgcgaacgggattagtgaaggtgttaatatgcacgatttagagaagaagctatgtactattgggctttggtgcatccaaatgaagccgcaagatcggccgacgatgagcgaggtcatagagatgcttgaatctggtgtcgatggcatgcaaatgcctccaagaccatacttttgtgatgaagagggtgacagttcttactctataatctctgaactggatacaattgaagagtaataattgtagtaaaatacacttgtgtctatgtgatcttaatgtattagactactaataatgcaaggttgtcataagctaaggtactggttgtatacttttattgagagtgtggtaatgtgttttgatataaaatacctccatgaacctatttttacaaagaactcctcaagaacatttgtttgcctacaagcagaggatcagagtcctagccgttctatcttccaaaggttgca

SEQ ID NO: 5327 - DNA, 2122 bp, Zea Mays
gcgattttgttccacgaatacagcgaagatgctgaggctgtgaccccgggtgactcttgtttctacccacttatctttgcagtcgccactgcacgccactgattggctcgcgtgattcgtggaccttcttgccatggcgacgatgtctgcagcgtctcatcgctgctgtgcttcttccttgagagctttaacggtgttatttgtgttggcagctcttgtttcagatgttggcgggcgacatcatcatcatgtttgtcctcattatttctcctgtggtggtttaagcaatatatcgtatccatttcgtcggcaaggtgatccatctgggtgtggtgtccaatcgtacgagctggtttgcacggatacagatgctacaattcgcatcggcagtggaacatacaagccaatagagaacaatgatactgataaatatcatatatatgagccggtgtcttgcttgagcaattcttctttcatctacttggtacctgactactggcatgcaggtgccctcgaatacaagctatccagatgttgttaagttcatgaggagtggatttgcccttggatttccctcgtatggtgataacatcagagaatgtctcgcaaaggatatgcgtactttccataaagaaccaagaaatagtacaggcatcaggcaacagatcttggacattcttacggtcgtcgacatattctgggcttgtgttatctatcaacttcaatcaactaattataatggtgtcacaactgttgtcatcggcatcattgaaacgatacaatatgttagcggggtcctggattatacagctggtgtttgcaggttcgtattaatgccgctggcagtattcgtcttcctagtctataaatactggaaaacaaggataacagtagatgcagtcgagaagttcttgcgaacgcagcagatgctcgttccgatgagatatgcatacacaaacatcattgctatcaccggccatttcagagacaagctcggacaaggtggttacggttctgtatacaagggggtgctacagccaggtgaagttcatgttgctattaagatgttgggcaactccaactgtaacggagacgagttcatcagtgaggtcgccaccattggcaagatccaccatgtcaatattgtgcgcctcatcgggttttgctccgaggaaaatagcagagcacttatctacgagttcatgccccatggatctctcgataagtacatcttctcgtcggagaagagtttctcatgggtcaaactcaatgagatcgctctgggcattgctagcggtctcaactacctacatcatgggtgtgatatgcagattgtacacttcgacatcaagccacacaacatccttcttgacagcaactttgttccaaaagttgctgattttgggcttgccaaactgttcccaagaggcgacagtttcgtgccactgagcgctatgcggggaacgataggatatatagctccagagatggtatctcgaagctttggtgtcatctctagcaaatccgatgtgtacagctttgggatgctactattggagatgacgggtgggcgaaggaacgcagatcctcatgcaggaagctccagtcaagcatactacccatccttggtgtacaaccagctgagccagggtgatgcgaacgggattagtgaaggtgttaatatgcacgatttagagaagaagctatgtactattgggctttggtgcatccaaatgaagccgcaagatcggccgacgatgagcgaggtcatagagatgcttgaatctggtgtcgatggcatgcaaatgcctccaagaccatacttttgtgatgaagagggtgacagttcttactctataatctctgaactggatacaattgaagagtaataattgtagtaaaatacacttgtgtctatgtgatcttaatgtattagactactaataatgcaaggttgtcataagctaaggtactggttgtatacttttattgagagtgtggtaatgtgttttgatataaaatacctccatgaacctatttttacaaagaactcctcaagaacatttgtttgcctacaagcagaggatcagagtcctagccgttctatcttccaaaggttgca

SEQ ID NO: 5328 - DNA, 2162 bp, Zea Mays
cgcccatctcccctctcatcgtctctctcatctcatccagcctgtgccaaaacaaaacgagaaaaaaaagtcttgctgctgctggtggtggagcgagaaaggaaaaaaaaaaagaaggggtaatctcaggaaccatctagatacagcggcggtacgtggactggactggagcgagcaagcctgcgccggcgccgccgtcctcccgaaacagaagctgtagttggtcaagaactggggatactgagttgaatatgatctcaaatccggtggactggtatagtttcggacccggatagaattggtagggatgcaagattggagggtgcgtgagttcgaaggtaaattcactgatgagtttgcccacagcagtagcaacgaacataaaggtggagttgaggcttctggtgtcattagtagtaagaagttgaagcatgcagttgctaatgagaaaatccaaggtgtcatccccggtacaaatagctcaggttcactgaaacgtaattcagagaacatccaacatgcgaacggggtattatcccagaatataagctgcgctggtgactacaaaaatggctccattgcctttcctttgagagaagaaaatacaataactgagaccagatgtccagatgataactggaactcctgtcagtttgcactgaacaatggttcgtccattctcaataaccacagtgctccccaggatagcctcacttatggagataatgatctaaactacatcgaatggcctggcattgacaattttgaggatgtcgatacattattcagcagctggagaatgcagatgggttatcttggattccgtcttcagatgctgtttactctaccgatgttgctttgcaacaagggcttgattcgtcttattcagattatggtattctggatgatctctccgcattccaatgtgcagaagataaatcactacccttggttgatccttcatcagctttatgtgataatcaattcaatgatacctacctgttcagtgaacaaaagaatgtgaatgcatatggtgaacagatataccaagaggatttgatggagttgttgcccactgaccagatatgcagcggacatgaaaacattgatatggttggaaaccagtatccatctgaaaatgcaattcaaggtaccgaagataagaaattctctatagcgtcaacttcccagctgagttctcagaatttactgaatcaaagacaccacttagattccagttcaccaagcaatattacttcggagtcctatccaggaaagttcggtccatctagctgttcttctgcacaaagaaactcaaaagtgcagaagaaaactgtcaacatacaaccaagacagccagcaaatgataatgttatgaacacaagcagagcttcttacccttgtgagaactatgaaactgaaagaagaggattagggaaagaactctgggggatcctcaagttacaatgggtagttcaatggtagtggatggctcatttgtatcatctatgtcctctgataactcagtcgaagaaagcagctttcaacaactgcaggatgctgttagtcagctggatgtgcaaaccaaattgtgcatcagggatggtttataccgattggcacgaagtgcgcaacatagacaagtttttccaaatacgatgaacagcaatggtggtagcgaggacggaaaggaactggagaacgcagaaacttcgtgcaagttcatggaccctcggagcatcgagacgcagacaaacccgatcgatcggtctatagctctgctacttttccgcgagtcatctggcggccatgtccatgtggctgtagcagccgacgatgcctcgtcactgaaatcccctgctggtgtatgatttcctgcctgccacatctcagttccagggccctgctgctaacccaggatgtttctaggcatgtatgtaaaaaaaaaaacaagcgtattgtgtagccaatagtctgtactctgtagtcacattaattttgtcatgcttgtatcctattgctagacggccgatgtgctaacctagtgctgttgactcaaattttatgcgtaatctaaaaaaaattatttcttttcgtggatctctagcataccttcaaactgatgcacgggagtggaaggattcgcttcaacaatcgttagg

SEQ ID NO: 5329 - DNA, 2181 bp, Zea Mays
aaagatccttctggtaatttggtgctcaaggcgagacgcccatctcccctctcatcgtctctctcatctcatccagcctgtgccaaaacaaaacgagaaaaaaaagtcttgctgctgctggtggtggagcgagaaaggaaaaaaaaaaagaaggggtaatctcaggaaccatctagatacagcggcggtacgtggactggactggagcgagcaagcctgcgccggcgccgccgtcctcccgaaacagaagctgtagttggtcaagaactggggatactgagttgaatatgatctcaaatccggtggactggtatagtttcggacccggatagaattggtagggatgcaagattggagggtgcgtgagttcgaaggtaaattcactgatgagtttgcccacagcagtagcaacgaacataaaggtggagttgaggcttctggtgtcattagtagtaagaagttgaagcatgcagttgctaatgagaaaatccaaggtgtcatccccggtacaaatagctcaggttcactgaaacgtaattcagagaacatccaacatgcgaacggggtattatcccagaatataagctgcgctggtgactacaaaaatggctccattgcctttcctttgagagaagaaaatacaataactgagaccagatgtccagatgataactggaactcctgtcagtttgcactgaacaatggttcgtccattctcaataaccacagtgctccccaggatagcctcacttatggagataatgatctaaactacatcgaatggcctggcattgacaattttgaggatgtcgatacattattcaggagttctgattcaacatatggtcagcagcagctggagaatgcagatgggttatcttggattccgtcttcagatgctgtttactctaccgatgttgctttgcaacaagggcttgattcgtcttattcagattatggtattctggatgatctctccgcattccaatgtgcagaagataaatcactacccttggttgatccttcatcagctttatgtgataatcaattcaatgatacctacctgttcagtgaacaaaagaatgtgaatgcatatggtgaacagatataccaagaggatttgatggagttgttgcccactgaccagatatgcagcggacatgaaaacattgatatgttgcaggttggaaaccagtatccatctgaaaatgcaattcaagattccagttcaccaagcaatattacttcggagtcctatccaggaaagttcggtccatctagctgttcttctgcacaaagaaactcaaaagctggtgtgacacttaagtgcgcaaatgcagtgcagaagaaaactgtcaacatacaaccaagacagccagcaaatgataatgttatgaacacaagcagagcttcttacccttgtgagaactatgaaactgaaagaagaggattagggaaagaactctgggggatcctcaagttacaatgggtagttcaatggtagtggatggctcatttgtatcatctatgtcctctgataactcagtcgaagaaagcagctttcaacaactgcaggatgctgttagtcagctggatgtgcaaaccaaattgtgcatcagggatggtttataccgattggcacgaagtgcgcaacatagacaagtttttccaaatacgatgaacagcaatggtggtagcgaggacggaaaggaactggagaacgcagaaacttcgtgcaagttcatggaccctcggagcatcgagacgcagacaaacccgatcgatcggtctatagctctgctacttttccgcgagtcatctggcggccatgtccatgtggctgtagcagccgacgatgcctcgtcactgaaatcccctgctggtgtatgatttcctgcctgccacatctcagttccagggccctgctgctaacccaggatgtttctaggcatgtatgtaaaaaaaaaaacaagcgtattgtgtagccaatagtctgtactctgtagtcacattaattttgtcatgcttgtatcctattgctagacggccgatgtgctaacctagtgctgttgactcaaattttatgcgtaatctaaaaaaaattatttcttttcgtggatctctagcataccttcaaactgatgcacgggagtggaaggattcgcttcaacaatcgttagg

SEQ ID NO: 5330 - DNA, 2579 bp, Zea Mays
ggctccaatgcgagtcgtgaacgcaaacagatagcatcccgcgtcgccgcgatggaactctcgcccttgccgatgctcgctgcctcccgcttcctgtccctgtcgccgctgctggcgccaacatgcccccagcggaccgctccttcagtccgcgtggccacgcagacgctggaagcgccggaggcgcccaaaccgccgcggccgtcccccaggcgcagcgccgtcgctgaggtcaagggggcccttgaccccatcgccgccctcaacaggtttgaggaggtactgcagacacaagactgcaacataattctgcgccactgcggggacattaggcgttgggatgacctctctaaggtctttgagtggatgcaggagcgcgagatgaccaacgctgcatcttatagcagctacttcaagtaccttggactgagccgtgaccctgcgagggtgcttcgagtgtacggtgccatcaaagaccgaacattgagggtccatgtctccgtctgtaattcagttcttgggtgcttggtgaagaatgggaggttggacagcagcttcaagctctatgacgagatgatacgggaaggtctatctcctgatccattcacctacagcaccctgttagcagggtgtatgaagttgaagcaaggttataccaaggcaatgggattgatcaatgagatgaaatctcgtggtcttcagatggatattgtaatatatggcactcttctggcaatatgtgcatctcataactactgtgaggaggctgaagtatactttcagaaaatgaaagatgaaggccatagtcctaatctgttccattacagctccctgttgaatgcatattcagaaaattctgattatggaaaagctgagctattgatgaaagatctgaggtcctctggattaacaccaaataaggttatgttgaccactttgttaaaggtgtattctaaaggtggtctctttgagaaggctaagggactgctaactgaactggaagcctcaggttttgcacaggatgagatgccatactgcatattgattgatggccttgtcaaaggtggaaagatacaggaagcaaatattctatttaacgaaatgaaagaaaaaggagtcaaatctgatggttatgcatttagcatcatgatttcagcattgcacagaggtggtcatcaccaagaatcgaaacagcttgccaaagaattcgagtctgagaatgcatcatatgatctggttatgcttaatacatcactgcgcacttactgcagcacaaatgacatggagagcgtaatgaggatgctaaagaaaatggatgaatcaaacatatcacctgataacattacatttaataccttgataaggtacttctgcaatgcaaaggtttgtcacctagcatacaaaacagttgaagatatgcatgcaaagggtcatcaattaaatgaggagctttgttctcatgtaatggtacagctaggaaaggcaggtttcccttctgaagcattttctgtgtataatatgttgagatatagtaaaagaacagttcacaaatctcttcatgagaaggtcttaggcatcttagttccagcagaacttctcaaagctgcttatatagttgttaaggacaatgctgatctgatatctccttcttctttggagaagtttgctaaatcgttcatggtctcaggcaatataaatctaattaatgatgttatgaaagccctaaaccgctccgggtggcgtatcagccaggacatctttgggagagcaattaagagatacatccaaaagcctgataagaaacagttgctgctgtgcctcttggactggatgattggacaaggctattctgtagactcgtcatcaaggaacttacttttgaagaatgcacaactttttggcgaaaaacaagttatagcagaaatcctttctaagcagcagatagcatcaaggactattggcctaagacacaaaaaatgataaaggaaagattttgtatatgtaaattgttcatatacatccaggatatgcctaggctgattgtttgaggatcaatttattgtgctctgaggggaattttccaatgaggcatgcttgttccagtagcggtacagctgggagtggagtatgaccatgcttgctatgatatgtgtgttagattgtgttgtctgaaggcttacaataaaattgtagccatgctgaggcatccaatgtttatctgttatctctattgaaaggcttgaagttatttgtcttcatcgctaaattggtgccaatgttgaggtgaacttggagaaagaatcgtgctttagtctgacaatttatttgctggtggttacataagatgtcctttttagagatgcgtctatggcacgaactggtaaacagtgacatgaacagatagctactgtactatattttagctttgaggcagagcccgattatttttcttatgctaggcgtcaattttgcctttgagatatttcagtttgagcttagctgaacggtggggactctatgattgaacttaaccaccacaagccgcatgatcttttcaataaatattgtcctgagtctac

SEQ ID NO: 5331 - DNA, 3057 bp, Zea Mays
ggctccaatgcgagtcgtgaacgcaaacagatagcatcccgcgtcgccgcgatggaactctcgcccttgccgatgctcgctgcctcccgcttcctgtccctgtcgccgctgctggcgccaacatgcccccagcggaccgctccttcagtccgcgtggccacgcagacgctggaagcgccggaggcgcccaaaccgccgcggccgtcccccaggcgcagcgccgtcgctgaggtcaagggggcccttgaccccatcgccgccctcaacaggtttgaggaggtactgcagacacaagactgcaacataattctgcgccactgcggggacattaggcgttgggatgacctctctaaggtctttgagtggatgcaggagcgcgagatgaccaacgctgcatcttatagcagctacttcaagtaccttggactgagccgtgaccctgcgagggtgcttcgagtgtacggtgccatcaaagaccgaacattgagggtccatgtctccgtctgtaattcagttcttgggtgcttggtgaagaatgggaggttggacagcagcttcaagctctatgacgagatgatacgggaaggtctatctcctgatccattcacctacagcaccctgttagcagggtgtatgaagttgaagcaaggttataccaaggcaatgggattgatcaatgagatgaaatctcgtggtcttcagatggatattgtaatatatggcactcttctggcaatatgtgcatctcataactactgtgaggaggctgaagtatactttcagaaaatgaaagatgaaggccatagtcctaatctgttccattacagctccctgttgaatgcatattcagaaaattctgattatggaaaagctgagctattgatgaaagatctgaggtcctctggattaacaccaaataaggttatgttgaccactttgttaaaggtgtattctaaaggtggtctctttgagaaggctaagggactgctaactgaactggaagcctcaggttttgcacaggatgagatgccatactgcatattgattgatggccttgtcaaaggtggaaagatacaggaagcaaatattctatttaacgaaatgaaagaaaaaggagtcaaatctgatggttatgcatttagcatcatgatttcagcattgcacagaggtggtcatcaccaagaatcgaaacagcttgccaaagaattcgagtctgagaatgcatcatatgatctggttatgcttaatacatcactgcgcacttactgcagcacaaatgacatggagagcgtaatgaggatgctaaagaaaatggatgaatcaaacatatcacctgataacattacatttaataccttgataaggtacttctgcaatgcaaaggtttgtcacctagcatacaaaacagttgaagatatgcatgcaaagggtcatcaattaaatgaggagctttgttctcatgtaatggtacagctaggaaaggcaggtttcccttctgaagcattttctgtgtataatatgttgagatatagtaaaagaacagttcacaaatctcttcatgagaaggtcttaggcatcttagttccagcagaacttctcaaagctgcttatatagttgttaaggacaatgctgatctgatatctccttcttctttggagaagtttgctaaatcgttcatggtctcaggcaatataaatctaattaatgatgttatgaaagccctaaaccgctccgggtggcgtatcagccaggacatctttgggagagcaattaagagatacatccaaaagcctgataagaaacagttgctgctgtgcctcttggactggatgattggacaaggctattctgtagactcgtcatcaaggaacttacttttgaagaatgcacaactttttggcgaaaaacaagttatagcagaaatcctttctaagcagcagatagcatcaaggactattggcctaagacacaaaaaatgataaaggaaagattttgtatatgtaaattgttcatatacatccaggatatgcctaggctgattgtttgaggatcaatttattgtgctctgaggggaattttccaatgaggcatgcttgttccagtagcggtacagctgggagtggagtatgaccatgcttgctatgatatgtgtgttagattgtgttgtctgaaggcttacagtaagtttttgatacatatggacatacccatacagctaaagcaaagacaatttgatttgattttagaggattttgcatgtaattcaacatggttgaggtcactgtacctagaaagcagcatacagatctaattttgttgacaatcgtacaaggtattattacttaattactttggtgaaaagaggttgctttgaagatttgacttcacgttgtacatacaggcagagtatcagacaggtggatttttcctaaaaagtggggaatatgtttctaacctgttttgttctttaggaaactggattgcacactattgtgcctttatgcaaaccaagttatgtatcatttttaggtgatgaattgtatctttttttagaagatgaacacccagataaaattgtagccatgctgaggcatccaatgtttatctgttatctctattgaaaggcttgaagttatttgtcttcatcgctaaattggtgccaatgttgaggtgaacttggagaaagaatcgtgctttagtctgacaatttatttgctggtggttacataagatgtcctttttagagatgcgtctatggcacgaactggtaaacagtgacatgaacagatagctactgtactatattttagctttgaggcagagcccgattatttttcttatgctaggcgtcaattttgcctttgagatatttcagtttgagcttagctgaacggtggggactctatgattgaacttaaccaccacaagccgcatgatcttttcaataaatattgtcctgagtctacatgttactaggacagcgagaatattcgaacacagaagatcccttcttgtacagtttttgaagaatcttgttgcatgtctaaccttcataa

SEQ ID NO: 5332 - DNA, 1484 bp, Zea Mays
agaatcaactctcggagttagagaattatggagcggagctctaccaaacgagctctaacttgacactttatttagagtctatcggtaacccgcttcagctagcgagcattgagcagtctgcagtcgccgagccgcgtgtccgccgggccggcggttaccaagctcaccaaaaatctttccaggttcgaggccgcccatgttcgcctgcaggtctctcctcgcaagggatcatattgtcgaaataagttggcctcattcgtgatggaaggggcgcaaggatcaagcattgtgacaaaacacaataaaaggcagtctcctgtgcagagatggaggccagtttcaacagaagcagttccccagcatcaccaagatgacattattgagacatcaaattctggaagcaagaaaattatagaggattgcatagcttctagtgagaatttgccaccagatggaacaaccaatgttgttgaagttaccgccaatgatgcttcatcgtcaaaaaataatttaagttttgggtacagttcaactaaagtagttatagaagaccatgcggagttatctggcttcaataaggatctagctgggtccaatgtcttcgggacacattcctcctctgttgaggcggttcaaagtcgacagcttgactactctcatttcatatcacttccattggctttacacccagatcttgtcaacaaactgaactacttccagagttcgatccttggggaagaaaacagtaacaaagatgggagccaaagtgaaggttctattggtgaaatggactatgaccacaagcaagcggaagcaaaaatgggtgccaaaggctcccaatcagattttggcattgacaagtcaatatttatcaaacccgaaacgtttcacctgacggttcttatgttgaagttgtggaacaaggaacgtatagataaggcctcggatgtgctccagtcagtatctacccaagtaaatgaagctttggaaaatcgacctatttccatacagcttaggggtctgacatgcatgaaaggctttccagctaaggctcgggtggtatatgttccagtgctggaagttggtagcgaagggcgcctagctcatgcttgcaaagtcataactgacgcgtttatcaaggcaggcctagtttttgaaagggacgtgagagaactgaagttgcacgcgaccgtaatgaacgtgcggcacaggaagagcagaaataaacggaacacatggacggattcgtttgatgcccggggcatattcgggagatttgggaaggcggagtggggtgcatatcccatccatgagatccacctttctcagaggttcaagtttgacagaagtgggtactactattgctgctcgtcgatccccttgcctgcggagatgcacacggagtgagtcagttcctactcactgtctgtctccctctctggacgagacgagaaggcgacgcaaccccagggggtgagggtggg

SEQ ID NO: 5333 - DNA, 1498 bp, Zea Mays
agaatcaactctcggagttagagaattatggagcggagctctaccaaacgagctctaacttgacactttatttagagtctatcggtaacccgcttcagctagcgagcattgagcagtctgcagtcgccgagccgcgtgtccgccgggccggcggttaccaagctcaccaaaaatctttccaggttcgaggccgcccatgttcgcctgcaggtctctcctcgcaagggatcatattgtcgaaataagttggcctcattcgtgatggaaggggcgcaaggatcaagcattgtgacaaaacacaataaaaggcagtctcctgtgcagagatggaggccagtttcaacagaagcagttccccagcatcaccaaggcggttcaaagtcgacagcttgactactctcatttcatatcacttccattggctttacacccagatcttgtcaacaaactgaactacttccagagttcgatccttggggaagaaaacagtaacaaagatgggagccaaagtgaaggttctattggtgaaatggactatgaccacaagcaagcggaagcaaaaatgggtgccaaaggctcccaatcagattttggcattgacaagtcaatatttatcaaacccgaaacgtttcacctgacggttcttatgttgaagttgtggaacaaggaacgtatagataaggcctcggatgtgctccagtcagtatctacccaagtaaatgaagctttggaaaatcgacctatttccatacagcttaggggtctgacatgcatgaaaggctttccagctaaggctcgggtggtatatgttccagtgctggaagttggtagcgaagggcgcctagctcatgcttgcaaagtcataactgacgcgtttatcaaggcaggcctagtttttgaaagggacgtgagagaactgaagttgcacgcgaccgtaatgaacgtgcggcacaggaagagcagaaataaacggaacacatggacggattcgtttgatgcccggggcatattcgggagatttgggaaggcggagtggggtgcatatcccatccatgagatccacctttctcagaggttcaagtttgacagaagtgggtactactattgctgctcgtcgatccccttgcctgcggagatgcacacggagtgaggtgtgtagctgtgatcatgttgtaggtttttaaggggcgtttatagcatatacatatatatattttaccgcagttcatgaggcgtttaaccttgttattagcgttggcccttaggggccaggtgttaccatgtatctatctatcggtttgaatcaccgatgggcaggtgttaccgtgcatctagtgttttgaatctgaatcgccgatttgagccgttgttggatgctgttgtatgttacaagcaatggcaggcactggtagtgggttccctgttgtaaagttgtagttggtgttgaactgttggttgttattgcctttccatatggcccattccattgtgcagtcaa

SEQ ID NO: 5334 - DNA, 1752 bp, Zea Mays
agaatcaactctcggagttagagaattatggagcggagctctaccaaacgagctctaacttgacactttatttagagtctatcggtaacccgcttcagctagcgagcattgagcagtctgcagtcgccgagccgcgtgtccgccgggccggcggttaccaagctcaccaaaaatctttccaggttcgaggccgcccatgttcgcctgcaggtctctcctcgcaagggatcatattgtcgaaataagttggcctcattcgtgatggaaggggcgcaaggatcaagcattgtgacaaaacacaataaaaggcagtctcctgtgcagagatggaggccagtttcaacagaagcagttccccagcatcaccaagatgacattattgagacatcaaattctggaagcaagaaaattatagaggattgcatagcttctagtgagaatttgccaccagatggaacaaccaatgttgttgaagttaccgccaatgatgcttcatcgtcaaaaaataatttaagttttgggtacagttcaactaaagtagttatagaagaccatgcggagttatctggcttcaataaggatctagctgggtccaatgtcttcgggacacattcctcctctgttgaggcggttcaaagtcgacagcttgactactctcatttcatatcacttccattggctttacacccagatcttgtcaacaaactgaactacttccagagttcgatccttggggaagaaaacagtaacaaagatgggagccaaagtgaaggttctattggtgaaatggactatgaccacaagcaagcggaagcaaaaatgggtgccaaaggctcccaatcagattttggcattgacaagtcaatatttatcaaacccgaaacgtttcacctgacggttcttatgttgaagttgtggaacaaggaacgtatagataaggcctcggatgtgctccagtcagtatctacccaagtaaatgaagctttggaaaatcgacctatttccatacagcttaggggtctgacatgcatgaaaggctttccagctaaggctcgggtggtatatgttccagtgctggaagttggtagcgaagggcgcctagctcatgcttgcaaagtcataactgacgcgtttatcaaggcaggcctagtttttgaaagggacgtgagagaactgaagttgcacgcgaccgtaatgaacgtgcggcacaggaagagaaataaacggaacacatggacggattcgtttgatgcccggggcatattcgggagatttgggaaggcggagtggggtgcatatcccatccatgagatccacctttctcagaggttcaagtttgacagaagtgggtactactattgctgctcgtcgatccccttgcctgcggagatgcacacggagtgaggtgtgtagctgtgatcatgttgtaggtttttaaggggcgtttatagcatatacatatatatattttaccgcagttcatgaggcgtttaaccttgttattagcgttggcccttaggggccaggtgttaccatgtatctatctatcggtttgaatcaccgatgggcaggtgttaccgtgcatctagtgttttgaatctgaatcgccgatttgagccgttgttggatgctgttgtatgttacaagcaatggcaggcactggtagtgggttccctgttgtaaagttgtagttggtgttgaactgttggttgttattgcctttccatatggcccattccattgtgcagtcaa

SEQ ID NO: 5335 - DNA, 1678 bp, Zea Mays
gccggtgccactgccagtgcgacacggatcacgcaatgcctcccaccatgctcgcgccggtgcccaccaggccgcgctccaaccccttccgccggcgcagaggagctgctccgctgcttctcgatcagacttcggcgaagcggcccgctgagtcgtccacctcagcctcatcctgcttctacagtgaggtgatctccaactcctccacatccctcgccccgtatcagcgcctggagaagaggcatcgacgccaggacacagacgcgggcgaggcgcggccggctggctccgagtgctcggaggtgatcggcggcgcgagggtgcgccccgccgaggtcgaggtctccgaatcgtcctgccctgtctccgtgctcgagtccgacctcgcctgcccgaagcagctcgccgacgacgctgaggcgatcgagaaatcctccgcgtgcgatgagctgaccccgtcgtcggagcccgatgaggaggaggtgctcagtgatcccagccactcggggtactcccccagtcccctgatcagctccccattgaccgaagatgacagcgacgacgcgccctctgcgaccttctccctctttctcgacttcgccaagcagttcgtcccctgcttgcaccccaaaccgtgcaccgtcaccagttccactctcgatctcctgacggggaggcggtttgaggacttggacgacgaggagagctacgagcgcttccggcggcgcgagcgacgcgaggcagttgcgcgcgacttcactgaggtgtgcagctccacctccatacccgacagctaccgccctctcgtcgtggagcaacgtgtcatcatggtgaactggatcatccagcattcacgtctgatgaagctccagccagttacaatgttcatgggaattggattgatggaccgcttcttgacacaagggtatatgaagggtttgagaaaccttcagttgttgggcattgcctgcatcaccttggctacacgcatcgaagagaaccagtcatacaattgcgttcttcgaaagacttttcaagttgggatcaatatctacagccagagtgaggttgttgccatggagtggctggttcaggaggtcctcaacttcaagtgttttgtcacaacaacccatcatttcctatggttctatctgaaggctgcaaatgctgatgacagggtagcggacctggcaaactacctggccttcatctcacttcggaaccatgagcagctctccttctggccctcgactgtggcagctgcagtggtagttcttgcttgccttgccacaaacaaggagtcctcatgccatttggtgacggaggtgaacacccagactcacatcaggacgcaggatgatgatctaccagaatgcctaatgagcctcgagtggctgatcaagtacgtctcgtgatacccagagctcccagctttctgattaggagcacgacaaggacgaggaatttggtattgagcttggcctttaggaataactgaacttctgtatcgggggatgtctatctttacatcggttagtcgctctttttagaaggacggctaaggctgggcgttgttgtactcgttgatctatttgtttaaccaatgtattgctgatggatgatataccactgaaatctgttgttctggtgtgacaagcggcatgatcttttgatccca

SEQ ID NO: 5336 - DNA, 1875 bp, Zea Mays
gccggtgccactgccagtgcgacacggatcacgcaatgcctcccaccatgctcgcgccggtgcccaccaggccgcgctccaaccccttccgccggcgcagaggagctgctccgctgcttctcgatcagacttcggcgaagcggcccgctgagtcgtccacctcagcctcatcctgcttctacagtgaggtgatctccaactcctccacatccctcgccccgtatcagcgcctggagaagaggcatcgacgccaggacacagacgcgggcgaggcgcggccggctggctccgagtgctcggaggtgatcggcggcgcgagggtgcgccccgccgaggtcgaggtctccgaatcgtcctgccctgtctccgtgctcgagtccgacctcgcctgcccgaagcagctcgccgacgacgctgaggcgatcgagaaatcctccgcgtgcgatgagctgaccccgtcgtcggagcccgatgaggaggaggtgctcagtgatcccagccactcggggtactcccccagtcccctgatcagctccccattgaccgaagatgacagcgacgacgcgccctctgcgaccttctccctctttctcgacttcgccaagcagttcgtcccctgcttgcaccccaaaccgtgcaccgtcaccagttccactctcgatctcctgacggggaggcggtttgaggacttggacgacgaggagagctacgagcgcttccggcggcgcgagcgacgcgaggcagttgcgcgcgacttcactgaggtgtgcagctccacctccatacccgacagctaccgccctctcgtcgtggagcaacgtgtcatcatggtgaactggatcatccagcattcacgtctgatgaagctccagccagttacaatgttcatgggaattggattgatggaccgcttcttgacacaagggtatatgaagggtttgagaaaccttcagttgttgggcattgcctgcatcaccttggctacacgcatcgaagagaaccagtcatacaattgcgttcttcgaaagacttttcaagttgggatcaatatctacagccagagtgaggttgttgccatggagtggctggttcaggaggtcctcaacttcaagtgttttgtcacaacaacccatcatttcctatggttctatctgaaggctgcaaatgctgatgacagggtagcggacctggcaaactacctggccttcatctcacttcggaaccatgagcagctctccttctggccctcgactgtggcagctgcagtggtagttcttgcttgccttgccacaaacaaggagtcctcatgccatttggtgacggaggtgaacacccagactcacatcaggacgcaggatgatgatctaccagaatgcctaatgccaaccaactattagctctagtgcattcaaacactcctttattctcctacacaatctgtttcatgcagagcctcgagtggctgatcaagtacgtctcgtgatacccagagctcccaggtgatagcagtgttttcacttttttctgtatggggacgtgaaatcttagcattgacaaatagtctgcctgtagtgtagataagatagccatgcggcatgaaacgtagcttgtggattttgattttgcagctttctgattaggagcacgacaaggacgaggaatttggtattgagcttggcctttaggaataactgaacttctgtatcgggggatgtctatctttacatcggttagtcgctctttttagaaggacggctaaggctgggcgttgttgtactcgttgatctatttgtttaaccaatgtattgctgatggatgatataccactgaaatctgttgttctggtgtgacaagcggcatgatcttttgatccca

SEQ ID NO: 5337 - DNA, 3505 bp, Zea Mays
atttgaaacttcactccaacctaaagttttttgtctatgactagcttcttgcacatatatactaaataccataatttgaggtactttatttccaaacaaatattgctaacaatgctgtaaaaaatactatagtttactttatttccaaacaaatctttactaactattaagaaggtaacatagaccacttttgtgcccccgcctccccctctgctcgactcaattgcgtgcaccctcgcctgtcccagcgtccccgcccctgtctcctgaagtcgtccgcgaccgccgccatgctcccctcgccccgtgccgcgtccgtcgtgacagggatccgagaacaccccatggatgtgtctgggattcgaggcctcccccctcccttcccctcccccacccccatcggcgatgcctggatccgcgaccgccaccgtccaaccccggcctccgtctatgaccgctccgtcgtggcgcaagcgctggaggcatccacagggggctactgatggctgggacgggttcgtgctcaccaccgatgactgggacgtccatcgggggaccttcctagcgtggatggtgtcttcacaaggaaacggcagctcgctggtgctgctgaacacccgtccgggtccggctgcggacagcgcaggcatggcagagcacctgaagctgcacctggggcaggtgagcctacggacctggtcgagttccgctggctgctgggtggcccgctggaccttcccgtccgactacagatccagcgccttcttctgcgaccgttttggcgtttgcacgagcaccggcacgtgtgcctgcgtcgacgaattcgagccttcgaaaccctgcgagtggcagcgcgggtactttgtggacgggtgcaccaccaggtctcacccgctgagctgcaccgcagacgatagtggccgccgcccgacgacggagcaggacgactcgttcctgctcctggacaacctgcgagggctcccttacagttccatcccccagcggagggccacggctggccgcgcttcttcacggcggccgcggcgtggggaggcatcagctggatctggtggtggatgaagagcggaggggcccgacgccgcgtcctctgctcctcgccgcttgactgtctcgctttctacaacaacattattgccaagaacatttttgatgatgtactgcattccatagcagcattattgtccgtagcagatgatggcaattcgctgctagcactagctgaagcttccttaacttgagcgggaatatcaatcttaactgaaggtctgattgctcgaattggagctgccagtgattcctttgggccttgggtttgcgcatccttcatctaaactgatggaactgcttccttccttgattgatcttgcatgcccgtgtgcgccgtggagggcaggccggagtcttggacgatgctggccgtggcagccgtcgacatggaagcccgtaggcagttgccggtgccactgccagtgcgacacggatcacgcaatgcctcccaccatgctcgcgccggtgcccaccaggccgcgctccaaccccttccgccggcgcagaggagctgctccgctgcttctcgatcagacttcggcgaagcggcccgctgagtcgtccacctcagcctcatcctgcttctacagtgaggtgatctccaactcctccacatccctcgccccgtatcagcgcctggagaagaggcatcgacgccaggacacagacgcgggcgaggcgcggccggctggctccgagtgctcggaggtgatcggcggcgcgagggtgcgccccgccgaggtcgaggtctccgaatcgtcctgccctgtctccgtgctcgagtccgacctcgcctgcccgaagcagctcgccgacgacgctgaggcgatcgagaaatcctccgcgtgcgatgagctgaccccgtcgtcggagcccgatgaggaggaggtgctcagtgatcccagccactcggggtactcccccagtcccctgatcagctccccattgaccgaagatgacagcgacgacgcgccctctgcgaccttctccctctttctcgacttcgccaagcagttcgtcccctgcttgcaccccaaaccgtgcaccgtcaccagttccactctcgatctcctgacggggaggcggtttgaggacttggacgacgaggagagctacgagcgcttccggcggcgcgagcgacgcgaggcagttgcgcgcgacttcactgaggtgtgcagctccacctccatacccgacagctaccgccctctcgtcgtggagcaacgtgtcatcatggtgaactggatcatccagcattcacgtctgatgaagctccagccagttacaatgttcatgggaattggattgatggaccgcttcttgacacaagggtatatgaagggtttgagaaaccttcagttgttgggcattgcctgcatcaccttggctacacgcatcgaagagaaccagtcatacaattgcgttcttcgaaagacttttcaagttgggatcaatatctacagccagagtgaggttgttgccatggagtggctggttcaggaggtcctcaacttcaagtgttttgtcacaacaacccatcatttcctatggttctatctgaaggctgcaaatgctgatgacagggtagcggacctggcaaactacctggccttcatctcacttcggaaccatgagcagctctccttctggccctcgactgtggcagctgcagtggtagttcttgcttgccttgccacaaacaaggagtcctcatgccatttggtgacggagactcacatcaggacgcaggatgatgatctaccagaatgcctaatggtacacattctcttatttttctcttcttttttgggaatacactggtgggcatgaatcatgattcatgcatgctacagtttgcaaggctgttaactttacatttaggaggtgtttgaatgcactagagctaatatttagtggctaagattagtactagcaaatttttagccaaccaactattagctctagtgcattcaaacactcctttattctcctacacaatctgtttcatgcagagcctcgagtggctgatcaagtacgtctcgtgatacccagagctcccaggtgatagcagtgttttcacttttttctgtatggggacgtgaaatcttagcattgacaaatagtctgcctgtagtgtagataagatagccatgcggcatgaaacgtagcttgtggattttgattttgcagctttctgattaggagcacgacaaggacgaggaatttggtattgagcttggcctttaggaataactgaacttctgtatcgggggatgtctatctttacatcggttagtcgctctttttagaaggacggctaaggctgggcgttgttgtactcgttgatctatttgtttaaccaatgtattgctgatggatgatataccactgaaatctgttgttctggtgtgacaagcggcatgatcttttgatccca

SEQ ID NO: 5338 - DNA, 908 bp, Zea Mays
ctccccgcccctcccggttttcttcctcccggaccccgccccggcggccgccgattttggggaagcccggccgtttcgcctcccgaaaacccggaaattggaaacttgtaagcctattgcatcctttgatcgcggtaatcataaggtgagacaacaacacaaggcgaaagcgtttgatcctctctctgtggactacatagacgtagtcgatgattgggctgtggatagacctgcaatgttctctggcccagctgagcagccaaactggatggagattaatcaatcaggcaaccgaatgacatcaagggaaccaactgaagatgaattcgaatccttcattgaaggagttgatgacgaaatgatccaaggtgctgcacagggcttccatgaagatggtgatgatcctgcttgtggctgaggctatatagattgacagccagttaacctgtaagctaatgttgcatggctaaaatctggggttgcctgctgtattttttcgaaacaaggccatcttattgtgtatcttatacttggtgtctatttgggctagttgtagagatattttagtgtccagatatcttcccgagtccatcgttggtctacgacacacatttttgtcacaataaagtttgaggtttcagttcctgggccatttttaaagatattttagggggtgtttggtttacgtatcattccatccaaaatgagatggtgcatcataaatctatttctcaaatttggtggcatgatttattcctcgtattagtattaactaactatgagtaataaggtgatgatgaatgaactcattaccaaacaaaatgtgagaagtgaatagatgatggactaggtcatttctcaaactaaacaccctattagtgtttatatctttctcagtccatcattgg

SEQ ID NO: 5339 - DNA, 2392 bp, Zea Mays
caacatcgtgacaagatggagattaggaagttatggccttcttgacaggctacctagttttgtttgcattgcaaaatacgagacaagatggagatgagcatgcaccttgtgagtatgtgcggcatacttgctgtgctcgggtgcgccgacgaggccaagggcagcagcaagaggtcccgggtgctggagctgtcgcggcggctgaagcaccggggccccgactggagcggcctccggcaggtgggcgactgctacctctctcaccagcgcctcgccatcatcgacccggcctctggcgaccagcccctctacaacgaggaccagtcggtggtcgtcgccgtcaacggcgagatctacaaccacctggacctcaggagccgcctcgccggcgcaggccacagcttcaggaccggcagcgactgcgaggtcatcgcgcacctgtacgaggagcatggagaagagttcgtggacatgctggacggcgtcttctccttcgtgctgctggacactcgccatggcgaccgcgcgggcagcagcttcttcatggctgctcgcgacgccatcggtgtgacgcccctctacatcggatggggagtcgatgggtcggtgtggatttcgtcggagatgaaggccctgcacgacgagtgtgagcacttcgagatcttccctccggggcatctctactccagcaacaccggcggattcagcaggtggtacaaccctccttggtacgacgacgacgacgacgaggaggccgtcgtcaccccctccgtcccctacgacccgctggcgctaaggaaggcgttcgagaaggccgtggtgaagcggctgatgacagacgtcccgttcggcgtcctgctctccggcgggctggactcgtcgctggtggcgaccgtcgccgtgcgccacctcgcccggacagaggccgccaggcgctggggcaccaagctccactccttctgcgtgggcctggaggggtcccctgacctcaaggcggccagggaggtggcggagtacctgggcaccctgcaccatgagttccacttcactgttcaggacggcatcgacgccatcgaggacgtgatctaccacacggagacgtacgacgtcaccacgatcagggcgagcacgcccatgttcctcatgtcgcgcaagatcaagtcgctcggggtcaagatggtcatctccggcgagggctccgacgagctcttcggaggctacctctacttccacaaggcgcccaacaaggaggagttgcaccgagagacgtgtaggaaggttaaggctctgcatcagtacgactgcctgagagccaacaaggcgacatcagcttggggcctggaggctcgcgtcccgttcctggacaaggagttcatcaatgcggccatgagcatcgatcctgagtggaagatggtccagcctgatcttggaaggattgagaagtgggtgctgaggaaggcattcgacgacgaggagcagccattcctgcccaagcatatcctctacagacagaaggagcagttcagtgacggcgttgggtacagctggatcgatggcctgaaggctcatgcaacatcaaatgtgactgacaagatgctgtcaaatgcaaagttcatcttcccacacaacactccgaccaccaaggaggcctactactacaggatggtcttcgagaggttcttcccacagaaatctgctatcctgacggtacctggtgggccaagtgtggcgtgcagcacagccaaggccatcgagtgggacgcacaatggtcaggaaatctggacccctcgggaagggcggcactgggcgtccatctcgccgcctacgaacaccaacatgatcccgagcatgtcccggcggccattgcagcaggaagcggcaagaagccaaggacgattagggtggcaccgcctggcgttgccatcgagggatagacgacgacgcatatataagcttcctacttttgtttcaatgcatgcatgctatgtatctgtgtccaccggctgtctagccttatcatcatcactgtctgcaacaaattaataatcaagtggtatggggtacctacgtttaatgtatacggagtattgtattgcttgtgtgtggtatgcttaggttggccgtgagtaagggattacaagtattcgatatcgggtgtttctataggttgaagtgctcataaagggctccctatcctctatggtcatgtttgtaatagtttttttttctaaagagcttttctatgaatttggattcctgataatctaaccgtcacgggaatctaaatatcgtagggtttgcggtggaggaagatgaaagggtatgcacgattcaaggtttaggaagcgacatatttctcccgtcgcgatgaatcagtggattctacattta

SEQ ID NO: 5340 - DNA, 1400 bp, Zea Mays
ataatatcgtgacatcgtctgtccgccaccgggtatctctttctccgggtagtgcaccagcggaacggcgaggtgcagtcgtgcagacgggaacggggatgggaagcacaggggcgctgctttggcacccgtcgccgcaggtgcactccggtggcgtcctcttccgccagagccggcgcatcgtacgccagcgcaacttgcctctattatcgctagctgacgcggcgcttgagcccgagcgccgccgcgggcagcgcctccgctgcgctgccggcgacggggacggcgggccccgggaggctcagaaggagtctccgagcggcatcggcgcagcactcgaggatccgtctccaggacctcctgtggaaaacggttccttcagaagcccctcacaggaagaacagagtgctctgtataattttctctatccaagcaaagacttacttccagatgataaggagatgagtatatttgatcatctggaggagcttcgcgagaggattttcatctcagttttggctgttggggctgcgatactaggctgttttgctttttcaaaagatctggttctttttctagaggcaccagtgactgttcagggtgttcggtttttgcagctctcgcctggggaatttttctttacaacattaaagcaatgtacaatgcacttgaacaagccctttcttacttcatggttctagcgatgtgtaatcaatccggaggtaattgtggttccacatggtgtgcagcgggtgcatcagtgcatgtatctgaggttgtgtgactttttatcatatttgtccaaactacatccgctggtagtcctaaagaccaaacagatggaaatcttctcagttctcacacatgattggaaagcttaactgcaaagtccatatacctaggtttcaggttattgtggccttttacttggaagtcctatcattttatatgagatcattgcatttgttatcccagatggggcagtggaatcgttgtggtcaatagaccagtacttcgaattcatacttgtgctgatgtttagcacagggttgtcctttcaggtccctgttatccagcttctgctaggacaacttggattggtttctagtgaccaaatgctttcgatctggagatatgttgttgttggcgctgtcgtcgctgctgctgtgcttacaccttcgacggatccgttgacacaaatgttgttggctggtcctttgcttggtttgtacttgggtggcgcatggatggtcaagctaactgggcgataagtgagtggttcatgcaaggcaatgatgctccgggaagcaagagcgccactgtaacctagtcttgtaaaaatgaattcactctgttcatcagatgatattgttaccatttctctttctgaaaaaaataag

SEQ ID NO: 5341 - DNA, 3239 bp, Zea Mays
cgcttcccttcccgcgcccatggcaatggctgccgctcctcacagtcatcacactccagtgggggccgcagcggccacgtccgccgccgtatccatgccctgctgctcctccgcttcctgttacgacgacaaggacggcgacccgtcctcctcctggtcgctgtcctcgccgcggcgccggcagccgtaccggcgcctcctccgcgacgaggcgcagcggctccggcgcgcgcggcggagccagggcccgggcgccgacacgccgcggtgggtgcggcgcaccacggatcagatggcccggtacatcgaggacgaccgcgcggggcacgtgtacgggcggcacgtggtcgccgccgtccgcgcggtgcgggccacggcgtcgcgcccgtccgcggacatgcgccaggccatggcgtcgtttgttaccaggctcaccttccgcgagatgtgcgtcgtgctccgcgagcagcgcggctggcgtcaggcgcgcgacttcttcgcttggatgaagctccagctgtgctacgaaccaagcgtcgtcgcctacaccgttctgctgcggttgtatggcagggtcgggaaggtgaagcttgccgaagagacgtttcttgagatgctccaggttggctgcgagcctgacgccgtggcgtgcgggaccctcctgtgcgcgtacgctaggtgggggcggcacgaggacatgatgctgttctactcggcggtgcgcgggcggggcctagtccctccgatctctgtctacaactacatgatctcgtctctgcagaagcagaagctgcacggcaaggtcatccatgtgtggaagcagatgctggaagctggcgcgccgcctaaccaattcacctacacagtcgtcatcggctcccttgtgaaggaagatctcctggaggaggccgtcgatttgttcggtgagatgcggcggcgtaggttcgttccggaagaggcgacttacagcctgttgatcagtgcgagctccagacatggcaaaggagaacaggcgttgcggctcttcgaagagatgaagggccagggaatcgcccccagcaactacacctgtgcgtctctcttggcactgcactgcaagaacgaagactacccaaaggctcttgctctcttctctgacatggaaagcagcaaggtcattcctgacgaggtcatctacgggattcttatcaggatatacgggaaactcgggctttacgaggaggcacgtcagacgtttggcgagatcgagaaggcaggtcttctgaacgacgagcagacttacgtggcaatggctcaggtccacctgaacgctggagactgtgacagagcactggaggtgttagaatctatgaagacgagaggcgtgaagccttcgcgcttctcttacagcgctcttctcagatgtcacgtcgcaaaggaagacgtagtcgccgcagaagacaccttcagagctctctcccagtcccagcacggcctccctgacgcgttctgctgtaacgacatgctcaggctgtacatgaggctgggacgtctagacaaggccagggcactggtttcggtgctgctgagggaagatggtttccagcttgacgagaacctctctacgacagtgatggagttttactgcaaaagcggtatggttgaggacgcagagaagttactcgaagatattcagaggaacaggaaacccgtgaaggttccaacgctgcttttgcttgtagagatgtacgctagaaacagacccagtgtggttctggaagaacgcagctcgtcgagggcactcggcagttcagcagctagcgtggccttgaactccctgttggacatgcctgggggcttgtccagtgtgtccctactgatcagcagattggctagggaagggagcacagatgaggcgagattcatttacgatcagctgactgaactgggaaccaagcctgacgattcggcggtcgctactctgatcgtccagtatggccaggcaaagcagttagagcgagcacaagaactattcgattcagcgtcagcgtcgttcccagatggggcgcttgtctgcaacgccatggtcgacgcgttctgtaaatgtggcagagctgaggacgcgtaccatcttttcatggagatggctgatcaaggcagttacagaaatgctgtgacagctagcattcttgtcactcacctgactaagcatgggaaatttcaagaggttgagaacatcatgcatggctgtttccgagatgaagtccagctcgacactgccttgtacaacacatttatcaagtcgatgcttgaatcaggtaaactgcattcggccgtcagcatatacgatcgcatggtatcctctggcgtttctcagtccatgcagacgttcaatacaatgataagtgtttatggcaaaggaggaaagctggacaaggccgttgagatgtttgctgctgcgcaggagctgggcctgccgatcgacgagaagatgtacacgaacatgcttagcttatatgggaaagccggcatcaagaggcgtctttgatgttcaaaagaatgaaggaagatggcatcagacctggaaagatcagcttcaactccatgatcaatgcctacgccacttcaggactgttcagcgaggcgaaaagcgtgttccaggagatgcaggactgcgggcacgcccccgactccttctcctacctcgcgctgatcagagcgtacacggaggctaagctgtacaccgaagcagaagaagccatccggacgatgacgctgagcagcagcaacacgaccccttcctgcccgcacttcagccacctgattctcgcgttcttgaaggaaggccgggtcggtgaagcccggaggatctacggccagatgatggaggtaggcgtggctcctgacctggcctgctgtagggccatgatgagggtgtacgtggaccgcggtctcgtcgacgatggcatctcgctctatgagacgacgtgtgggtcgttgaaacctgatagcttcgtcttgagcgctgcgtttcatctgtatgagcgtgcgggcagggagtgtgaagcccagggtgtcctggagtccatcagtgcgagtggtacctccttcctgaggaacatgaagattggatttggatcgtctttaagaagttagaacttaaacatgctagtttttctcttttttttcaagtgtttgggttaaatatcttaacttatattctagcttttccaatatttggcttaaatactgctagacat

SEQ ID NO: 5342 - DNA, 3250 bp, Zea Mays
cgcttcccttcccgcgcccatggcaatggctgccgctcctcacagtcatcacactccagtgggggccgcagcggccacgtccgccgccgtatccatgccctgctgctcctccgcttcctgttacgacgacaaggacggcgacccgtcctcctcctggtcgctgtcctcgccgcggcgccggcagccgtaccggcgcctcctccgcgacgaggcgcagcggctccggcgcgcgcggcggagccagggcccgggcgccgacacgccgcggtgggtgcggcgcaccacggatcagatggcccggtacatcgaggacgaccgcgcggggcacgtgtacgggcggcacgtggtcgccgccgtccgcgcggtgcgggccacggcgtcgcgcccgtccgcggacatgcgccaggccatggcgtcgtttgttaccaggctcaccttccgcgagatgtgcgtcgtgctccgcgagcagcgcggctggcgtcaggcgcgcgacttcttcgcttggatgaagctccagctgtgctacgaaccaagcgtcgtcgcctacaccgttctgctgcggttgtatggcagggtcgggaaggtgaagcttgccgaagagacgtttcttgagatgctccaggttggctgcgagcctgacgccgtggcgtgcgggaccctcctgtgcgcgtacgctaggtgggggcggcacgaggacatgatgctgttctactcggcggtgcgcgggcggggcctagtccctccgatctctgtctacaactacatgatctcgtctctgcagaagcagaagctgcacggcaaggtcatccatgtgtggaagcagatgctggaagctggcgcgccgcctaaccaattcacctacacagtcgtcatcggctcccttgtgaaggaagatctcctggaggaggccgtcgatttgttcggtgagatgcggcggcgtaggttcgttccggaagaggcgacttacagcctgttgatcagtgcgagctccagacatggcaaaggagaacaggcgttgcggctcttcgaagagatgaagggccagggaatcgcccccagcaactacacctgtgcgtctctcttggcactgcactgcaagaacgaagactacccaaaggctcttgctctcttctctgacatggaaagcagcaaggtcattcctgacgaggtcatctacgggattcttatcaggatatacgggaaactcgggctttacgaggaggcacgtcagacgtttggcgagatcgagaaggcaggtcttctgaacgacgagcagacttacgtggcaatggctcaggtccacctgaacgctggagactgtgacagagcactggaggtgttagaatctatgaagacgagaggcgtgaagccttcgcgcttctcttacagcgctcttctcagatgtcacgtcgcaaaggaagacgtagtcgccgcagaagacaccttcagagctctctcccagtcccagcacggcctccctgacgcgttctgctgtaacgacatgctcaggctgtacatgaggctgggacgtctagacaaggccagggcactggtttcggtgctgctgagggaagatggtttccagcttgacgagaacctctctacgacagtgatggagttttactgcaaaagcggtatggttgaggacgcagagaagttactcgaagatattcagaggaacaggaaacccgtgaaggttccaacgctgcttttgcttgtagagatgtacgctagaaacagacccagtgtggttctggaagaacgcagctcgtcgagggcactcggcagttcagcagctagcgtggccttgaactccctgttggacatgcctgggggcttgtccagtgtgtccctactgatcagcagattggctagggaagggagcacagatgaggcgagattcatttacgatcagctgactgaactgggaaccaagcctgacgattcggcggtcgctactctgatcgtccagtatggccaggcaaagcagttagagcgagcacaagaactattcgattcagcgtcagcgtcgttcccagatggggcgcttgtctgcaacgccatggtcgacgcgttctgtaaatgtggcagagctgaggacgcgtaccatcttttcatggagatggctgatcaaggcagttacagaaatgctgtgacagctagcattcttgtcactcacctgactaagcatgggaaatttcaagaggttgagaacatcatgcatggctgtttccgagatgaagtccagctcgacactgccttgtacaacacatttatcaagtcgatgcttgaatcagtttccaagcaggtaaactgcattcggccgtcagcatatacgatcgcatggtatcctctggcgtttctcagtccatgcagacgttcaatacaatgataagtgtttatggcaaaggaggaaagctggacaaggccgttgagatgtttgctgctgcgcaggagctgggcctgccgatcgacgagaagatgtacacgaacatgcttagcttatatgggaaagccggcatcaagaggcgtctttgatgttcaaaagaatgaaggaagatggcatcagacctggaaagatcagcttcaactccatgatcaatgcctacgccacttcaggactgttcagcgaggcgaaaagcgtgttccaggagatgcaggactgcgggcacgcccccgactccttctcctacctcgcgctgatcagagcgtacacggaggctaagctgtacaccgaagcagaagaagccatccggacgatgacgctgagcagcagcaacacgaccccttcctgcccgcacttcagccacctgattctcgcgttcttgaaggaaggccgggtcggtgaagcccggaggatctacggccagatgatggaggtaggcgtggctcctgacctggcctgctgtagggccatgatgagggtgtacgtggaccgcggtctcgtcgacgatggcatctcgctctatgagacgacgtgtgggtcgttgaaacctgatagcttcgtcttgagcgctgcgtttcatctgtatgagcgtgcgggcagggagtgtgaagcccagggtgtcctggagtccatcagtgcgagtggtacctccttcctgaggaacatgaagattggatttggatcgtctttaagaagttagaacttaaacatgctagtttttctcttttttttcaagtgtttgggttaaatatcttaacttatattctagcttttccaatatttggcttaaatactgctagacat

SEQ ID NO: 5343 - DNA, 833 bp, Zea Mays
aggcaaatatgagatagcatttcatcccttatgtattcaggtaactgatttcttgaggcaaactgggaagctgcatggattgtgtccctctgcatcatgcaagaaaggaaagatcacataattctctgaacaaagagctatacaaacattagctgcgggtatttggaagagaacttacgaaatttctggtacggcaacttccctggacaaccagatttgtcatgtttcctatgaggtatgccaggaaaaaggttaggatgatatctatagcaaagaagctgttgacaatgttctcaaccagaaaaagcacccatgagagatgtctcagaaatgctagctcaaatggacagatccatgctgagtaaacaacaagcacaagcaagaacgtctcccaggttctgataaggcatgacaaacaagcaaggcatacagcaggaaccctccaaaaggcttcgccaatgaagttgtatggacagatatataaataaaaaggagtttacttaatccgttgtgaagaaatataaatattccgattgcggggttcagcttggcctttcttacaatgcattcgttgccttccagatgctgaacttttgtcacatgctgcctgtgagtttgcaccttcgctagaactagaagcctgtatactgggccgccaacatctgttctagtaccttttagcttcatcacatgtatccatttggttgcttttgatccctgcatcactctcagctttgctaactcgtgacccttgttcgagagtctgagcacctggaaatatatacgttgattcatgaagagtggagataactcacggggtacttgccttgtta

SEQ ID NO: 5344 - DNA, 672 bp, Zea Mays
ctgcggcggatggagcagcgggcctaactgcagacgacatcaaaggtcgggcacctaaataactcatcgattcaggctcttatccatgggctgaacagacactactaatttgcaatcaattaccgcaaaaatgagctcgagaagaaaatgttgttgaacttgcacaaaaagaaatggatagatgggctaattttgaagaggtttgacactcactcaaaaaaccaacgagcaaactgtccaggttccatccgtcttgtatgggaatgaccattgagcaagccaaaaaattacatgtgctcggattgtgctaaagaaaatggtgcaaagagaccctcaaactcatacccagtttcaccaaactctgattctaagatatggacctcggtggttttctccacgttaggaaagctggaagagtcttttctactcagttttatgataacagtggtgttatggtcaaacaaagtcttgcgtgtatgtaccaacagctaaactgtaaacacgacattaccatagttgattacatgaataattatcttttatatcttattgtaaaatctgaaacagttgtcatgtagatggttagcttgcattttacgctacaattacttcaaatcacttcttgtttcattttacaccaatttacgacatttattgatgcgttttacgtca

SEQ ID NO: 5345 - DNA, 640 bp, Zea Mays
cttaatgcccggtcgacatccttggcgaccgtgcgctcttgccgatcggcgacggagccgcggtggttgatactgactgttgaggctgccacatgagcgggtggtagcgacccgcgctggaacccgccttagtggtgtgatgtcacgaaggttttgtggctccaaacatagtgagaaaaaaatagctctttactattttaggtgcaaaaaaggataaggctagtaagctaaaacaggtgttaccatgacctttggttactagttactccaacacttgacagggagaatcacaacacaaacaatatctgtaccaaggacgtccatgacttcgaagagatggacataagtcaagtttgatcaacatgttctaacactagtttatggttttgtacagcacaatcgaaaagtaattcattccaattgatgaactttgtacagcacttgattctttcaggaaaaaatggcagttagttttctatatcttttttgaagatagattatatgatgttaactttctttgtgcatacacgatatccgagaagtttgctgattgttggataaaagtggtacttctcttgatattgttaatagaatcaacaattcttgcttaatcgttacaaaccaaaacaataaagaaaaa

SEQ ID NO: 5346 - DNA, 1891 bp, Zea Mays
tccgacggctataaataaccgccccccttcctccgcagctctgctctgctcccccgcgtctttccctctttttccaagcggtcaaagccaaatcagtcgcgagcggcggcggtaacgagaacgagacgcgcgcgctagctgaatcaggagcagggcccagggaggagagtggagagccgccggcgagcagcaatgccttactgcgaggtgggcaggtacgcggacggcgacaagtgggagggcgtccgcctcttctaccgccgctacggcagcggcgccaccaaggtgctcctcgtcatcggacggcaatcatggccacggatgccttggccttgatcgatcatttggggtggaagaaggctcacgtcttcggccactccatgggtgccatgattgcttgcaagctagctgccatggcacctcacaggctatgttcgctggcattgcttaatgtcaccggaggtggctttcagtgcttcccaaaggtagacgcgcagatgctatctcttgcattccgtttcttaagggcaaaaactccagaggaaagagcccttgtggacctggaaacacattatacgaaggaataccttgaggagactgtcgggtcatgtactagaagaatggtcctctatcaagaatatgtgaagggcatatcgtcaacagggatgcaatccaattgtggttttgaagggcaagttaatgcatgctggactcacaaaatgactactaaggaactagatacaatacggtctgccggttttctagtttcagttattcatggaaggtacgatatcattgcacaattgtgccatgcaaaacgtctagcagaaaggcttcttcctgttgcaagaatggtagtgcctcatggtgcacatctagtgagccatgaaagaccagacgaggtgaacaatgcacttatggatttgataaaggccaccaaatctgagataaaacctgaagagtggtcagcccagcccgagaacacgtcggaaaccggggcgctcatttctgcgagacccatcaccgtcatggtgcgaacagatgcaggcgtagacgctaccgcagcggtctataacttgcttgggaagctgcaactgagcttcctttatctcataggcatgatactcatggggtttgaactcatgaggaacattgtaagggtgatgaagccagtaagggttgcagcaattgagtcgtaagtcataagaaccaaatacatgtacactgttcttgagaccttgtggtagtcgagatgggagatgatgattttagagtagcatctgctaacacatgtgaaactcggcctgctcctagtagcagaataatacgaaacactgagaaaacagtgcgcgcctggacagaaatgtctatggcaaggttgcccgttggcgtatgtacctataagagtatctgtaccataccgagatttggaatcgaagctttgctgcttatttcgtgtcgcgtcgctgggcatcttctttcctacatggcgctttacaacgctgcaaggtgacaaatagtagcgtaaaactgaagagagaacgaaagtggcagccacaactgggtttgttttgggtgtgacgtgtgcggtacctaataaaagtttagccacgtcaattctcttgccgtgctttcgggggaaaaaagaactgggtttcactggtgcaaatggcacgaaatatttttcctggtctgaatttgtttgtagtcgatcgtatctgagtgtaaattcgtttatttgagtttagatcggttaggataggagcctgaatatttaacatttgataccgtacctgaacttagatatttgtatttatatattcatgtatatggatagttggatactgatacccatcttatatatttacatttatggatatctcaaattaca

SEQ ID NO: 5347 - DNA, 2187 bp, Zea Mays
ccggtagtacgtagcgtaggtatcgtccactcgtccggccgtcgcgcgcgctgctcctgccttcttcctctcgctgatatattggcgacgcacttacgatcgaggccagcagctggggttggacttggatagctagctagatggccaagccactgaacctgactcctgccttcctctcgctgatggccaccagctgccgcttcagctccggcgggcatgcgcaccgcttcgcctcgtcgctaccgtgcgggaggacgacgccgacgccacggaccacgtcgtcgtctacgcgccctgcggctcaggttagccctgacagaagcaagcaacgcgatgacgaagcagcatcggagactacgataaggcagcagctccagcaagtcgatgtgcttgagaacacggggatttctcggcattttgctggtgaaatcaagtgtatccttgacaggacatacagatgttggttagagaggcacgaggaaattatgcaggacacaacaacatgtgcgatggcatttcgtattctaaggatgaacggatatgatgtctcttgtgatctgttgtatcatgttgttgaaacatccgggatccatgatccacttaggggacatttgaatgacacaagaaccttgttagaattacacaaggcctctacagttagtatctctgaagacgagtctatcctggatagcataggcttaaggtcaagtaccttactgagggaacaaatggagtctagtggtgctctacaaaatcctccactctttagagaggtggaacatgctctgtaccatcccttctacgccacattggaccgtctaacccacaggtggaacattgaaaatttcaatactacagagcaccagatgctagacacaccatacttgtccagtcgatataccagtagagatattctagccttgggtatcagagacttcaattcctctcaacttacttaccagcaagaacttcaacatcttaaaagttgggtgaaagaatgcaggttggaccaactaccatttgtgaggcaaaatttggcatacttcttattgtccgctgctggctgcatgtactcccctgaactgtctgaagctcgcactttgtgtgcaaaaaatggtgcactcataactgttgttgatgacttctttgatgttggaggatcaaaagaagaacttgaaaaccttgtcatgttggttgagctgtgggacgagcatcgcaaaattgagttttactcagaacatgtagagattatattttcttcaatttacaactcagttaaccagtatggtgcaaaggcttctttgttacaagaccgcaatgttaccaaacacctagtacaaatatggttggatttgctaaagtctatgatgacagaggtagagtggcgtttgaacaaatatgtgccaacagaggaggaatacatgacaaatgcatctttaacatttgcattgggtcccattgtattgccagcgttgtattttgttggaccgaagatcccggagtctattgttaaagatccagaatacgatgagttgttcaagctaatgagcacatgtggtcgactcttgaatgatgttcagagttttgagagggagtacaaggagggcaagttgaacattgtttctctcctcgttcttcatggtggctccatgtccatatcagatgccagaaggaaattacagaagcccatagacacatgtaggagagacctcctaagactagttcttcgtgaagaaagtgttgttcctaggccatgcaaggaattattctggaaaatgtgcaaggtctgctacttcttttactcgagaactgatgggtttagctcacaagtggagagggctaaagaagtggatgcggtgatcaatgagccactaaagctacaaggaagtcatacgctggtgtctgatgtgtgaaaggaactaagcgtcgatgtgatgtgttcttttgatttattagtagttgtgttttctctatatggtggtttggtaggtgactgtataatgtaaaggagttggcacatgttgtcagtgtcgtaacatcttcttgatctattcagcgctctcttgggcttgcgttatggcgatgttgttgggtatgatgtagttgataactagtgtagactcatgtacatgataatacttcatgttacactaacatgcgcacgtgtggctatatggttgaagctca

SEQ ID NO: 5348 - DNA, 3277 bp, Zea Mays
aatgacctgtgctgcatggtctcgctacgcaccaactagtactcagagattcagagctgagcatcgttgtgctagctgacagcgtactgtagtcttcccacccataaacctgagcgtcagaaacggtgctcacaatcacagcgcagggtgggcaccgattcgaacgctttctctcctccgccgctgatcccctctcgatttgttgtgcctccagcccccgattcctactgttgtggtccagtgatccaatcgacgtcgacgactccgcagccaccgctcctctcctctcgtcgcttctgccgtctctcggcgtcgaatctcatccggccagtgaccacactctactggccgcccggaaggagttcttccaggattcgagccgttgctgccgtcacctctgcaggcccagcgtcgagcggagatccaatcggaaattcaactgacttcgtcttttatcctccgattcgaacgctttatactccgccgttgatcccctctcgatttgttgtgcctccagcccccgattcctcctcattcgtcggcgatcgaacgcagccagccagttctcctcgacttcttccagtcccacccaccgaggttcctcttcttcttcggcgcgcccgtctcggtggacgccacaggaattggctcctgacttttttcaacgggtggtttcgctgggcccgatgcccgacgttatggccgcagccctaaccggcttctcgcctcgcggggtgattccgagcagaggcagagcatctcttcccggggtcgctagagcgtatgccgagaggcggttggttgcagaaaacacaagcctgccaaacatgcataaagaacaacttgagactataataaggaatcagctccggaagccccagttgccaccttcttcatacgacacagcgtgggtttctatggtgccagtgcggggctctcatcagactccccgcttcccacagtgtgttgagtggatactgcagaaccagcaggatgatggatcttggggtgtcagccaatctgactcatcggtcagcaaggatgttctcctatccacgttggcatgtgttcttgcgttgaagagatggaatgttggcagagagaacatttggagaggactgcatttcatcgggaggaatttctctgttgctatggacgagcagttcacttctcctataggtttcaacttcacctttcctggtttgcttagcctcggcattgatatgggtttagaatttcctgtaagacaaattgatgtctgtggcattcttcaccgccgggagatggaattgaaaaggctggctgtggatagttcttttggaagaaaagcatatatggcttttatcccagaaggattcggaaatatgctggactgggatcaagttatgaagtttcagaggaagaatggatcattgttcagcactccttccacaactgctgttgcattaatccacaaatacaacgaccaagcccttcaatacctaaatttgcttgtcaatgaatttggcagtgcagtaccagcaatgtatccttcaagggtacattgtcagctttcaatggtggacgcgcttgaaaaaatgggaatttctcagcgctttgtcagtgaaatagaaagcatcctggacatggcatacaattgctggttacagaatgatgaggaactcatgatggacatagcaacatttgcaatggcatttcgccttttgaggatgaatggttacgatgtttcctcagatgagctgtctcacgttgctggagcttccactttccatgattcactacaaggatatttaaatgatacaaaatccctactggaattgtacaagacctcaaaagtcaccttatcagaaaacgatctgatcttagatcgcataggatcctggtctggcaacttattgaaggataagatgtgctgtagtagggtgcaaaaagactcgatttttggagagatcgagtatgctgttaattttcccttgtattccacactggagcgtctagaacacaagagaaacatcgaacattttgatgcttggggttctctgatgctaacaacaaaatcctcatcttttcgtatcaatcaagaattcctagctttggcagtcgaagatttcagtttctctcaacgtgtttaccgggatgaacttcggcatcttgatagttgggtgaaggagaacaagctggaccagctacaatttgctcggcagaaactgacatattgctatctgtctgctgctgctaccgtattttcttctgaattgtctgacgctcgcatttcatgggccaaaaatggtgtcctcacaactgtggttgatgacttcttcgatgttggtggatcaaaagaagaattagaaaacctgatagcactagttgagaaatggcatgggcaccatgcagttgagttctattcggaacaggtgaaaatagtattttctgctatttatacaacagtgaaccatcttggagcaatggcttctgcagcacaaggccgtgatcttacaaaccacctagtagaaataaatggcagagatgccaatatgtaccaacagttgaagaatacatgacaaatgctgttgtctcatttgcactgggcccaattgtgctcccagcattgtattttgtagggcaagagctattagagcatgctgtcaaagatgaagagtacgataaattatttaggctagtgagcacttgcgggaggctcctcaatgactaccaaagtttagagagggaaggcaaccaggggaagctgaatagtgtttctctacttgtgctccacagtggtggttctatgtccatagaagccgctaaaaaggcaatgcagaagtccatagacgtgtctaggagagacttgctaagattggttctcaggaaagaaagtgctgttcctaggccatgcaaggagctcttctggaagatgtgtaagatacttcacctgttttactctcagaatgatggatttagctccccaaaggaaatggtcagtgcagtgaatgctgttatcaacgagccactcaaagtccaaaacagtactacgtttttgtctagttcatcaaggtagcgaggatatcatgtaatttatcctgttcatatggatcagaagcaacagcagcaagcttaagatatttgtaagtttgtgactgggctgctgtggatctgtgaagctacaactttgctgtatgtggatcaaggtattaggaagatctggttcacatattgataacataatggataaaccataacgttaaattatgtttgcttaatttcaaccgtaatcgat

SEQ ID NO: 5349 - DNA, 3370 bp, Zea Mays
gggtgggcaccgattcgaacgctttctctcctccgccgctgatcccctctcgatttgttgtgcctccagcccccgattcctactgttgtggtccagtgatccaatcgacgtcgacgactccgcagccaccgctcctctcctctcgtcgcttctgccgtctctcggcgtcgaatctcatccggccagtgaccacactctactggccgcccggaaggagttcttccaggattcgagccgttgctgccgtcacctctgcaggcccagcgtcgagcggagatccaatcggaaattcaactgacttcgtcttttatcctccgattcgaacgctttatactccgccgttgatcccctctcgatttgttgtgcctccagcccccgattcctcctcattcgtcggcgatcgaacgcagccagccagttctcctcgacttcttccagtcccacccaccgaggttcttctctcctccgcccccgacagctgattgccttcttgctggtgactaaaacctactagctgcttgcttcgttcttcctttttatttctgggtgcgggcgacgagttctcagatcttcgggttcgcgtcgcgagtggtacatacattcctataataagcagtcccaaaaactcaaacttctcgatcaggttcctcttcttcttcggcgcgcccgtctcggtggacgccacaggaattggctcctgacttttttcaacgggtggtttcgctgggcccgatgcccgacgttatggccgcagccctaaccggcttctcgcctcgcggggtgattccgagcagaggcagagcatctcttcccggggtcgctagagcgtatgccgagaggcggttggttgcagaaaacacaagcctgccaaacatgcataaagaacaacttgagactataataaggaatcagctccggaagccccagttgccaccttcttcatacgacacagcgtgggtttctatggtgccagtgcggggctctcatcagactccccgcttcccacagtgtgttgagtggatactgcagaaccagcaggatgatggatcttggggtgtcagccaatctgactcatcggtcagcaaggatgttctcctatccacgttggcatgtgttcttgcgttgaagagatggaatgttggcagagagaacatttggagaggactgcatttcatcgggaggaatttctctgttgctatggacgagcagttcacttctcctataggtttcaacttcacctttcctggtttgcttagcctcggcattgatatgggtttagaatttcctgtaagacaaattgatgtctgtggcattcttcaccgccgggagatggaattgaaaaggctggctgtggatagttcttttggaagaaaagcatatatggcttttatcccagaaggattcggaaatatgctggactgggatcaagttatgaagtttcagaggaagaatggatcattgttcagcactccttccacaactgctgttgcattaatccacaaatacaacgaccaagcccttcaatacctaaatttgcttgtcaatgaatttggcagtgcaggcttttgcagtaccagcaatgtatccttcaagggtacattgtcagctttcaatggtggacgcgcttgaaaaaatgggaatttctcagcgctttgtcagtgaaatagaaagcatcctggacatggcatacaattgctggttacagaatgatgaggaactcatgatggacatagcaacatttgcaatggcatttcgccttttgaggatgaatggttacgatgtttcctcagatgagctgtctcacgttgctggagcttccactttccatgattcactacaaggatatttaaatgatacaaaatccctactggaattgtacaagacctcaaaagtcaccttatcagaaaacgatctgatcttagatcgcataggatcctggtctggcaacttattgaaggataagatgtgctgtagtagggtgcaaaaagactcgatttttggagagatcgagtatgctgttaattttcccttgtattccacactggagcgtctagaacacaagagaaacatcgaacattttgatgcttggggttctctgatgctaacaacaaaatcctcatcttttcgtatcaatcaagaattcctagctttggcagtcgaagatttcagtttctctcaacgtgtttaccgggatgaacttcggcatcttgatagttgggtgaaggagaacaagctggaccagctacaatttgctcggcagaaactgacatattgctatctgtctgctgctgctaccgtattttcttctgaattgtctgacgctcgcatttcatgggccaaaaatggtgtcctcacaactgtggttgatgacttcttcgatgttggtggatcaaaagaagaattagaaaacctgatagcactagttgagaaatggcatgggcaccatgcagttgagttctattcggaacaggtgaaaatagtattttctgctatttatacaacagtgaaccatcttggagcaatggcttctgcagcacaaggccgtgatcttacaaaccacctagtagaaatatggctggatttgttaagatctatgatggtcgaggcagaatggcagagatgccaatatgtaccaacagttgaagaatacatgacaaatgctgttgtctcatttgcactgggcccaattgtgctcccagcattgtattttgtagggcaagagctattagagcatgctgtcaaagatgaagagtacgataaattatttaggctagtgagcacttgcgggaggctcctcaatgactaccaaagtttagagagggaaggcaaccaggggaagctgaatagtgtttctctacttgtgctccacagtggtggttctatgtccatagaagccgctaaaaaggcaatgcagaagtccatagacgtgtctaggagagacttgctaagattggttctcaggaaagaaagtgctgttcctaggccatgcaaggagctcttctggaagatgtgtaagatacttcacctgttttactctcagaatgatggatttagctccccaaaggaaatggtcagtgcagtgaatgctgttatcaacgagccactcaaagtccaaaacagtactacgtttttgtctagttcatcaaggtagcgaggatatcatgtaatttatcctgttcatatggatcagaagcaacagcagcaagcttaagatatttgtaagtttgtgactgggctgctgtggatctgtgaagctacaactttgctgtatgtggatcaaggtattaggaagatctggttcacatattgataacataatggataaaccataacgttaaattatgtttgcttaatttcaaccgtaatcgat

SEQ ID NO: 5350 - DNA, 3915 bp, Zea Mays
gctagtggcaggtggcagcgagtgagaaggtgagctcgcctccctcgcgcctcccattcccccctcgcgcagtcctatcgtaggaatgggatgaggccggggcccctccctccttcctcctcggcgcttctcccgtgacaagcctccattctccagataggggaggatggatttgtccaggttcgcctccggcgtcgggcccagccgcgtggccccgcgggcgggcctgcagatcggcgccgccgagaatggcttccgggcctgctccctgcggcgagcacggcaccgcggcggcgggaacgggaacctcacggccgccgcgtccaccctccgcggccgcggcgggctcttctacctggctcccacgcgccggagtcatcccagtctccggctcttctacctgcttcccacgcgcgggagtcatctcagtctccgcgccagatggcggccgcgctgccagggcaacgactcattggcctacgtcgacggccccttggagaccgctaagggctccggcgaggtcgacgacaacgtgcccaccagctcggggtccgacgacgacaggggcctcgccgacgtcgacggcctcagggagatgctgcagaggtccaggaacgagctggaggtggccagggtcaacagcaccatgttcgaggagaaggcgcagcggatatccgagtcggccatcgcgttcaaggaccgcgccgacggcgcccagagggatgtgtgcgcggccgtagccaccgtgcaggagatcatcagcaaggaggcggacgccaaggaggccgtccagaaggctaccatggcgctgtccatggccgaggcgaggctgcagctggccgcggaggcgctggaggccaaccggggctcggtaggcccgacggaggttagcatcgaaggcatggagcaggaggccctcctgtctgcacaggaagagattaaggattgtcgggcagccctgtcgcggtgcgcggaggagctgagtcgtgtccaggacaagaaaatggagctgcagaaggaggttgataggctgacggatctcgctgggaaggcccagatggatgcgtccaacgccgaagaagatgttgccaatataatggtgctggctgagcaggcggtggctcttgagatggaagcctcacagcgtgtcaacgatgcggaaatggtgctgctgaaagcggagaaggccatagcctcgattgataccgtggtggagctaccgtcacctgctgaagagcagagaagcactgaagaagacagcgtttctgaaggggctttgagcagcttgaaccatcccgtgaaatatatgatgaagaaagcagtaataagatgtctgttgagcctcagaaagaagctgagtctgattcagataagtcgaaacaagggaagaagcaagaaatggaacgaaaggagcacaccaaggaaccactgagtgctccaaaagcactggtgaagagatcatcccgtttcttctcggcatctttcttctcctccaaagttgatggagagtttacacctacatctgtcttccgagggttaatgaaatcagtgcaaaaacaagctccgaagcttgttgttgggatattgcttctcggtgcaggggcattcttcttaaatagggctgagaagagtcaactatttcagcagcaaggcattgccacaagtattggaaaggtaacctccacaacaaagcccatagttcttgagatacggcgaattccacagagagtaaagaagctaatagagctcttacctcatcaagaggtaaatgaggaagaagcttcacttttcgacatactatacttgcttctggccagtgttatttttgtaccattatttcagaaaatccctggagtcctgttcttggatatcttgctgctggtgtcctcattggtccatatgggctgtccatcatccgtaatgtgcatgagacaaaggcaattgcggaatttggagttgtgttcttactatttaacattggacttgagctttctgtggaaagactaagctcgatgaagaagtatgtctttggcttgggatctgctcaggtgctggctactactgctgctgttggtgtgatagctcattgttttgccgcactaccaggaccagcagcaattgttgttgggagtggcttggctctgtcatccacagctgttgtcttgcaagtattgcaagagcgtggtgaaagtacgtcacgtcatggacgtgctacattttctgtgttattgttccaggatttggctgtggtggttctgttgatattaatacctctcatatcacctaattcttcaaaaggaggggttggtttccaagcaatagcagaagccatgggaatggctgcagtcaaagcagtagctgctataactgccataattgctggaggtcgtctgttgctccggcctatttacaaacaaattgctgaaaatcagaatgctgagatattttcagcaaatacactccttgttatttttggcacaagtcttcttacagcccgggctgggttatcgatggcacttggagcttttttagctggtctgttactagcagaaacagagttctcattgcaggttgagtcagatatagctccctatcgtggtcttctgttaggacttttctttatgacggttggaatgtctattgacccaaagctgcttctgtcaaacttcccagcgatctctgtgatattgagtctcttgataattggaaagacattgttagttacatttgtcggcagggtgtttggggtttctgctatagctgccattcgtgttggcctcttgcttgcacctggtggtgagtttgcttttgttgcctttggagaagctgtcaaccagggtcttctatcacctcaattaacatcgttgctatttttagtcgttggcatttcaatggctctgacaccatggttagctgctggagggcagtttctggcatcaaaatttgagcagcatgatgtgaggagtttattgcccgtggaaagtgagactgacgatttgcaagaccatatcattatattaggctttggacgtgttgggcagatcattgcacaactcctgtcagagcggttaattccttttgttgcacttgatgctggaagtgatcgggttgcagctgggcgtgcacttgatcttccagtgtattttggtgattctggaaagcagagaggtactgcacaaaaattggagctgaaagagcttgtgctgctgcaattactttggatactcctggtgcaaactacagagctgtctgggcgttgaacaaatatttcccaaatgtgaagacatttgttagagcacatgatgttgatcatggtgttaatttggagaaagctggtgcaacggcggttgtccctgagaccttggagccaagtcttcagctagctgctgctgtccttgcacaagcaaaactcccaatgtcagagattcaggaaaccatcaacgagttccggaatcgtcatctgtcagagcttacagagttgtgtgctacgtcaggaagttctcttggctatggattttccagagctacgtccaaatcgaagtctttcacctccgacgacgaaaaccaaacagtggatggcacactagcaatctgatgctgatgagataaaatgggatccccttgctagcgctagattggttgcattgttcagtagataatcctgtttcatgtggaaggagggtggaataattattcatataagagctgtcataaaagttggcgtccatttttgtatgttagacacttagtgcttgtttgagagtaatggaagggactgagagggccaaaatcctttatgccccgtttgtttccttttattttgaggacttggaatctaactattggaataggctatttttttaaaatgtgacattccaccacttccaaagttatcatatgagcctatctctaatt

SEQ ID NO: 5351 - DNA, 1361 bp, Zea Mays
agcagagcagttggtaggacagcaggagaagcctttctctcttcccgttccagtgttgtgtaggccatcgactcgagtgctcgggcagatagaagagagagagagagagaggggggagatgcagcggctcacggggcgggacatgtgggacgtggaggagtgccagagcccgcgcatgggcagcgtcatcctcggcgtcgacggcggcgccagcaacaccgtctgcgtctgcatccccgccgccatgcccttcaacgacccgctccccgtcctctcccgcaccgtcgccggctgctccaaccacaactccgtcggagaggacagggcaagggagacgctggagagggtgatgtcgcaggcgctgctcaaggcgcgccggcgacggtcaaatgtctgcgccgtctgcttggccgtagcaggcgtcaaccatccagtcgatcagcagagaatgctggactggctcagggacatatttccaagccatgtcaagctgttcgtggagaacgacgcggtggcggcgctggccagtggaaccatgggcaagctgcacggatgtgtgctgatcgcagggacagggaccatagcgtatgggttcaccagtgatggtagggaagctcgagcagcaggtgcagggccagttctgggtgactggggcaggcattgacagcagtggtgagagcttatgatggccgaggccccgaaacagtgcttaccaacaacatccttgacttccttggactggcatcgccagatgaattgatagggtggacatatgaagaccaatcatgggctcgtatcgctgaccttcttccagttgtggtagaatcagctgaaagtggtgatgaggtggcaaacaagatcctacacaattcagttggggaactagcttccagtgtcaaggctgtagtgcaaaggcttgaccttggtggtgaagatggcaagcatccatttccacttgttatggttggtaaagtccttgaggcaaacaaaaagtgggacattgggaaagaagtgatagattgtgttaccaagaattacccaggtgcctatccaatacatcccaaggtggagccagctgttggtgcagctttattagcatggaatgctatagcaagcgaattagatggcgacattagaactgttcaataatggaacatcctgcaaattattgtatattatgttttactgctgaatcatcacctagccttttgcatttgctgtaacaggttgcttgaaaaggttgtaatcttctcgagaaagaaaggtttacaacaaggaatttgatttagcggtagtttctttcgataaaaatagagtgacaggagagaaaatgtgtgtcaatacatgagatttgttttggt

SEQ ID NO: 5352 - DNA, 1071 bp, Zea Mays
tccgctttgtctcagcctctctctcccgtactgcttctcctctacctccgccgccagccagccactgcctcgattcgctcccctccggccctcctgtcgcgcgcgctctgcctcgctggcgccacggtcgcccgcgccggcaggctcgctgataggctcgagtccctcgacgccatcgcctagattgtctactagctggcccccgctcgccgcgaggtggtgcttgcggaggtggcggcgatcgtgcctgcatggtgctcgacaaaaaggtgctctacgagacgacatctgcttccgcgcgcacaagctcaccatgcacaacttcggtgacgtttagccacctcatctccgccaccatgagcggcgtcacctgctgcctttgcttctccgatatgggatgccaagaacatgatttgcatcgtggacccgcgccacggtcgctacctgacggcgtccgccatgttctgcgacaagatgagcagcagggaggtggacgagcagatgcttaacgtgccaaacaatgactcctacttcgtggactcgatctccaacaacgtccagtccacggatgtgcctcttttgagagtgaattatacttttactcaattaggatatgtgtttctttggatctttgtttgattaatgatttttttggatgagagtgtggctacaggatgaagcaatgcagtttttgatggaacgcacatgtgcagtatacaaatggaccatcaggttgcggagcattccattattccaaccttattccagagtagttctgtgcactttaaagcctaacgtttgtggatccagaaaagaagcaaattttgtatgtatatatgtgtagatccaggtgatcgctattgttagcttttgtttacaatggttgccacccaaaaaagttgtaactcgctcatttctagacttgtgaataatgttgttagcactatgtttgcttttgcagtgacactacctgacgcttgtaatgttgtttggtcgtgaactgttgccgcgctatgtaaagatctagacataaccactttgtttgcatgcttgttgactcccataacaact

SEQ ID NO: 5353 - DNA, 2065 bp, Zea Mays
aagctcttcaccacaaactgacaaacacgacccaggccttcttcctgcgagtttcatttcatttcatcctaccttacctttttactcctccagtccagtcagagaacaccataagtggccgctacacctgctcactccattgcaccactagcaagtagcaacaggagcgcaggcagaactagagcggtcttggtatggcttcttccctcgcgcccgcgtcgtgggcactgccgctgcagatggtcggggctggggcggcagcggcggggccttcctgccgcgcgacgctagccgtcgtcacggagccccgctgggccgcgtcgctgcgccgggcaagggttctcgtggcgctggcgccccggtgcgtggcgctcgacgggcccggcgccagcggcgaggaggaggcgcccaagatcgaggacgagaggaagaagagcggtgagacgaagaagccggcgcgcggccggccggtgtggagccggatcctcttcgcctccaagaagacacgaacaagtgatattccggttttgaaagaggtcgaagccctgacagagcctgcggtcttcaacatggtgcggttcgttgttgcagccatccccttcgtaccattcgcgctccgttccttcggtgaccgcagtgtacgctacgcgggactggagctgggagtctgggttagcttagcttacctttctcaagcaattggattgctctcatctgatgctggccgagcatccttcatcacggccttcacggtcgtagttgtgcctctaattgatggtcttcttggtgcttcgatccccagactcacatggttcggagccatcatgtctctgttcggaattggcctgctggaatgtggtggatctcctcccagtgttggcgatattttgaacttcttcagtgccgtgtttttcgggatccatatgcttagaacagaacaaatatcaaggagtacggacaagaagaaatttttagctcttcttggcttcgaggtccttgtggttgctttctcctccgttctctggtttatgttcaaagatggctacgttgataccagcggatccagctttgaatcttggacgttcgggatgctctgggataccacagtttcgtttccttggataccagcattgtacactggggttctttctacggtgttatgcatgtgggcagagatggtggcgatgggcgatgtttcagcaaccgaaactgcagttgtttacgggttggagccagtttggggagctgcttttgcttggttcctccttggtgaaagatgggatgacgctgcatggactggagctgctctcgtattatgtggcagtttgacagttcagctatttgggtcagctcctgagaagtccaagaaagtcaaaaaacgcagcagcaatgctttagaaactccagtgaaacgacgagactacttatcgttgtctcccataccagttgattccgggaagatcataggaaggcaattagaaaggaagaacaaagcagtataggtagcccaactacaaggcaagaagaaaggaaacgctgcgatgataggggcgcgcatgtaccaaatcattgtcctgaggcatcgtctgtttggctccgtcaatggccatatggggatgctgctcgattgtccgcatggagttttttttttcctttgtccgtattgaaaatggtcgtatttggatttctgttgtctcggttgaccgcattggtagtggcaactcgaggagaatacttagacacatctactggcgtagtaatgacgttcagtgagataacttagtatgttttgggcactgctaaccgtaaaggttcatgtattaatatagtgggtaaatggttctagagtactgaactgagcataccattgtatagtactgaaataacaaataccacgcatggtattatttggctcccagtcaatagatccaggaatcaggacatgtattgtgttccgttgagattgattttgtggctgtgattttatttttttattttttttttggtcgaaggacataatcttgtattctgctcttgtattatgtaagtctatgcttagttgttt

SEQ ID NO: 5354 - DNA, 1291 bp, Zea Mays
cgcgaaacgcgccaacaaccagatcaatggagtgaggcagtgactcagctcagggcctcgggcccagcacaccaaccctccagtagtatctctgacgtgcgggctccgccagacaacgagctcacgagtcacgatccaaatcccttttccactccgccggacgtcgagagaggcggtgggtgcgggacgcgaaggcgaagccctagccccctccctgccgcggacgccgatggacccacctcgcgccgtcgcctttcttctcatactcctgcccgtgctcgccccggtggcctccggtgtacctttcgtcgtcctacacgggattggcgacgagtgcgggaacgatgggctgtcatccttcaccaagatgcttggggagtggtcaggctccaagggttactgcattgaaattggaagaggagcatgggactcttggttaatgccacttcaagagcaggcaaatacggtttgtaagaaggtcaagaaaatgaaagagctcagtgaaggttacaatatagttggcctgtctcaggggaacttaattggcagggctgtaatcgagtactgtgattgtggacctccggatatggaagattatttgaagggttgcaaatttcttccaaaacttaacaatgagatcccaagtgcaagaaatactacctataaagaaagattcagcagcttggaaaacttggtactgatcatgtttgaggacgatgcagtattaatacctcgggaaacagcgtggtttggttattaccctgatggagcctttagcccagtgctgccccctcaagagacgaagctgtatacagaagattggattggcttgaagaccctggacgaggctgggcgtgttaaattcgtgtctgtgccaggaggtcacctgcgtatcaccagaagcgacatgaagaagtacattgtgccttacttgacgccggaggcgtcatccaagaagaacatacacatacaccggatgctgtcgctttgagcgagtatctaacaaggtttgtatcggtggccattgtgccctgacacgtgggccatgtgttgacgccttgtaaatacgctgaacacgaagggaggaaatgatagctccttggaagagtggatccgaacttgtgaagtgaagcgtgtttggtcctttccgtttcctatctgacaaacaaatatgtccatgccgtggccacaacacgcataaatcattatgcacatttcctattgagtaaaatacaattccggtctgtaaacttgtcgaaccatgtcatgccggttcataaacctttaaaat

SEQ ID NO: 5355 - DNA, 1489 bp, Zea Mays
accgcacaaaccctaaccaatcattctaccaatccatgtcaccctctatatatttgcactcctcccgtgccgccgccgccgcgccgtaccgccggcctctccaccgttcattctccaatggcgtcgactcacgcaatcagcaagaagcggaagttcgtggcggatggcgtgttcttcgcggagctgaatgagatgctgacccgcgagctcgcggaggatggctactccggcgtcgaggtccgcgtcacccccatgcgcaccgagatcatcatccgtgccacccgcactcagaacgttctcggcgagaagggccggaggatcagggagctgacttctgtggttcagaagcgcttcaacttcccggagggtggtgttgagctctacgcagagaaggtgaacaaccgtggcctctgcgccattgcccaggccgagtcgctacgctacaagcttcttggtggactagccgtgagaagggcatgttatggtgttctcaggtttgtcatggagagtggtgctaagggctgtgaggttattgtaagtggtaagctcagggctcagcgtgctaagtctatgaagttcaaggatgggtacatgatttcttctggtcatcctgtcaacctatacattgattcagctgtgagacatgttctattgagacagggtgtgcttggtatcaaggttaagattatgctggactgggatccaaagggcaagcaagggccaaccatgcctttacctgatttggttacaattcacgtgcctaaggaagaggatgaattcttgaggcctcttgcagctgaaatccaagttgcctgaagtaaaaaagtagttccagatttttgtatcggcagcatgctaattgtgcaatgttaccgagcggtcctgcaaaatcgatttcagggaggatggccttctccgcgcttagtgttgtcaccgaatgcattaagctgtcccctctatatgactttggtgaattctgtgtatttgattttggggaagaactttgttggttgtttgcgtttgtgttttttgtaaggattgcaaacagcctaggcgagttgctactgtgtttgtttgggactggtaattccatcactacattacctctttaggtgctccataagggctcctttgggagcaaggatacccggggttttaggcccttcaatctcctctgctatcattgctcccaaacaaaaaaataggaaaggaatgtattagtgtaatgcaatctctgtaaacagtcatgatgacttttaaataactctcactgtgcatgagctttcccctgatatgttttcataaaaaaatctgtggctggggattggactggtaactatacttcccctggagcagaaattgtcgagttcttacctgttgtctatcgtaactggagcttcatctgaaaaagcaaacgctgctggagcgcgcctctctataccatcgttgcagccgttttgtgtaaaacaatttacgttgcaaatgtacg

SEQ ID NO: 5356 - DNA, 2706 bp, Zea Mays
cgcgcaagcccacttagccattagtcaccgcacaaaccctaaccaatcattctaccaatccatgtcaccctctatatatttgcactcctcccgtgccgccgccgccgcgccgtaccgccggcctctccaccgttcattctccaatggcgtcgactcacgcaatcagcaagaagcggaagttcgtggcggatggcgtgttcttcgcggagctgaatgagatgctgacccgcgagctcgcggaggatggctactccggcgtcgaggtccgcgtcacccccatgcgcaccgagatcatcatccgtgccacccgcactcagaacgttctcggcgagaagggccggaggatcagggagctgacttctgtggttcagaagcgcttcaacttcccggagggtggtgttgagctctacgcagagaaggtgaacaaccgtggcctctgcgccattgcccaggccgagtcgctacgctacaagcttcttggtggactagccgtgagaagggcatgttatggtgttctcaggtttgtcatggagagtggtgctaagggctgtgaggttattgtaagtggtaagctcagggctcagcgtgctaagtctatgaagttcaaggatgggtacatgatttcttctggtcatcctgtcaacctatacattgattcagctgtgagacatgttctattgagacagggtgtgcttggtatcaaggttaagattatgctggactgggatccaaagggcaagcaagggccaaccatgcctttacctgatttggttacaattcacgtgcctaaggaagaggatgaattcttgaggcctcttgcagctgaaatccaagttgcctgaagtaaaaaagtagttccagtgaggcctacgcctgtggttgtggtcctcctttttttgtgtaatgttcattattaacatgtcgaaagtaaaaagagctttactttctacagttgcaagcagtggtaatcaatgtattatttctgcttctcactttagttttgtttgtttttatcttgctgctctgtattatcctgttattcacttgacttgccttgtagttacagtttatactttctgctagtgtgttatttagactgatgtttcctttggcaaaaattcatgagttgttaattgtttgcctactatggtcctgcaggatagtgtgtatcagcttcacgcaattttgatgcgtcttttgctgaaagtgtttcctgctatatcaatctgaggaaaatgggcagttgggttaagcatatctgctttctccaacaatcattttcctctcatgtactcagaaacatattttgttttttatatgctatcgtcatctgctttgttggttagtttttttttgtaatatatcatttccatagaatttggcagtatgcttctatttgtctgctgtaaatttatagatgtcaggacatgtactctacattcatgttcttctgaactggactgtcacaagttttcttcacttctgcacaactagttgctaagaaggatagtgtgtatcagctttatgctaacttctatgcattttgcgctgaaagtgtttcctgctatatagattgaaggaaagtgggcagttgggctagacttgtatcctgttttctccaacaatcattttcctctcatgttaccagtttttgaattgcgggcttagtatttacatgctttaactgctttgtactgtatgaatcaaggagtatgtaaattggtctattgcatgtgccatagtttgaattccatgtgcaggacttgtctagacaggcatacacagattgtgttacttgccacctgaacattcctgctatatcagtttaagaaaaatgggcagttgagttaggccagatattttactgtggttttctcaacaatcatttttctcatattgtatccctacaaacaactccttggttaaaacttttgtttgccttgaggaatgctttaggtttaggcctatattcttgttttcgtgatggagtgatgtttcatgtgcttccatgattgattggaattgtactgttaaagcatttgttggtgcaggatttttgtatcggcagcatgctaattgtgcaatgttaccgagcggtcctgcaaaatcgatttcagggaggatggccttctccgcgcttagtgttgtcaccgaatgcattaagctgtcccctctatatgactttggtgaattctgtgtatttgattttggggaagaactttgttggttgtttgcgtttgtgttttttgtaaggattgcaaacagcctaggcgagttgctactgtgtttgtttgggactggtaattccatcactacattacctctttaggtgctccataagggctcctttgggagcaaggatacccggggttttaggcccttcaatctcctctgctatcattgctcccaaacaaaaaaataggaaaggaatgtattagtgtaatgcaatctctgtaaacagtcatgatgacttttaaataactctcactgtgcatgagctttcccctgatatgttttcataaaaaaatctgtggctggggattggactggtaactatacttcccctggagcagaaattgtcgagttcttacctgttgtctatcgtaactggagcttcatctgaaaaagcaaacgctgctggagcgcgcctctctataccatcgttgcagccgttttgtgtaaaacaatttacgttgcaaatgtacg

SEQ ID NO: 5357 - DNA, 1095 bp, Zea Mays
aaccaacttgccgaccgcaggaatccagccgacccagcacttccccggttcctcccagcagagtcttcttctctgcatccgttccgttccccggcctctcgcacatccaccgccaccgagccgcgtgcgtcttccatgaaggacccgttcgaggcggacgtcgaggagcaggactcgccgccggagtcgccggcgccgcccgaggatgaacccggcgccgcgggccctgcggaggaccccgaggactacgacggcggcccgcccccgcgccagccgtctgccccggcgtctcacgcagccggtgccaaggccaaggcccgtgtccatagggagcagcaggaggatgacgacgaggacgaggaccagattgaggtcgacctcgagaagcttcccagcagcactggcgacccagacaagctcgctaagatgaatgctatactgtcccaatttacacaacagcagatgaaccgttatgagtcattccgaagatctggatttcagaaatctaacatgaaaaggctgttggcaagcatcactggaagtcagaagatttctatccctacttcaattgtggtatcgggaatcgccaaaatatttgttggtgagctaattgaaacaggcaagttcagaatagtcgtgttgtttactttgtttctatggaatcgaatctgctacagcgttgctgaattgtatgttttgtactttgtctaagcatgatagtgaacctacagctgtaatcttaactagtatgattttgtgttttagtttgccttttgtttctgtttggaatcagaggcccattttcttctttccacctcactatgttacaaggaacctgctagcagagcagactttaggtttgacaaaagtcttcagggtggatttcttgattgttgttttcccttaacaatttcatcgtgtgtattgcagcaagagtggtcatgagcgagaggaaggattcaggacccattaggccttgccacatcagggaggcatacagaagattgaagcttgaaagggatgatcccacggcgatctgttcctaggcttttccgtttgtttgaagcatgtatattacacatgtgtctggagtcc

SEQ ID NO: 5358 - DNA, 1863 bp, Zea Mays
acgtactctgtcaaacgatacgccgcgatgcttccagacgagcgccatccccttcctcgcctcacacgccgtcctgttggtcgtgcctctcttcaacctttttttcttgagcattagcgagagccccttacatggtgcagtgctagcatcgttgctggcgacctcggtgaggtcggatctgcaaaggttgcagctagcgcgcctacactacatcaacatggtgtggcatctcctttcgcagatccccaacatgctacgccgccggctgcctcattggaactcctgtgcaccgcttgcctttcttctcccattcaacccgcaggcgttccctggctcaatagcgcaactaggggatgtccgccgctacctccatataggaaacgacagatttagattttcaggtgatgcgtggtcgggatcccggatcaatcaaaataagtgtgaaataagtgtgaaatttgagaggctgttgaacttccagatcaggtaccaaccaaaaaaagtgacccttttgacggcgtattgcgtgggcaaggcatgccagtgcgacaatagagaaactaacggggagctctgttcgttctgctgattgcttatgattaggctcgcagtggtggtagctgggagagcttgggactggccagacgcgaccaactcacccatgtaataagacaacttttatacatagccgacagtacgcaacctcatgcgcaagatccttaatgaaaccaaagagctgcagcagataaccaacgacaagcagaaaaatcaggttgtacgcatccaacattttactttcatatttgctgaagatgtcaacaaacaaaatagacaagcagcccagacaatggagatgatgtatacgataattgcagatgagttcaagtcaatggacaataaggacatgcgccctgaagattacttgaacttcttttgtcttggaaaccgggaagaaccaccatctaatggcagcccagaatcagagaaatctacatataaaagtgcagagatagatatagagttcatgaaaaagaaacttgaggaccttgataagccaatgaagaggaggaatgataagctgctcaaaattgagcatgaattatgtgagaggattgatccagcacaatgccgaggagactggagactaaacttggaggtgctactgaaggatgtgactttgagtcaaagggtagcacatggagagcttgaattgaattcaagcttggatatgattggaaaatatttgtattagatcacctagaagggtgattgatgcttgttattggccaagcagacaataggtagtcagatgaagattgtaaaaaacaagcatgcttaacccttcaagaatgcacagtttgagcttgaatttggaaaggggatatgccacagttcagagttttttgaacagaatttctggagcagttgttcctataaaataatattttaggtcttgaagccaccaccgtttggattgacatgatctgtggtattctggtgatctcattatagcagacttcatttcttattgtgcttatacagtagtgtagcgggaagagaattcacattgcatgaaatcatgttgatagctaagaggtggaagttgaagtaagccgggaagggtgaggtattgggaactgtggcatttaaagttcagtaggcagcagtaaactgtagtggtgtggtcgtgtacataagatgtgcacattttgaactcaggcattctttattgagtgctgctagaattacattgagctccctccacttctgatacttgcctggttttgcgtcaattggatctgtttgtccgtcctcaacactgttgtctgtttttgctaatttgggcattatctatgacagaag

SEQ ID NO: 5359 - DNA, 2102 bp, Zea Mays
acgtactctgtcaaacgatacgccgcgatgcttccagacgagcgccatccccttcctcgcctcacacgccgtcctgttggtcgtgcctctcttcaacctttttttcttgagcattagcgagagccccttacatggtgcagtgctagcatcgttgctggcgacctcggtgagatccccaacatgctacgccgccggctgcctcattggaactcctgtgcaccgcttgcctttcttctcccattcaacccgcaggcgttccctggctcaatagcgcaactaggggatgtccgccgctacctccatataggaaacgacagatttagattttcaggtgatgcgtggtcgggatcccggatcaatcaaaataagtgtgaaataagtgtgaaatttgagaggctgttgaacttccagatcaggtaccaaccaaaaaaagtgacccttttgacggcgtattgcgtgggcaaggcatgccagtgcgacaatagagaaactaacggggagctctgttcgttctgctgattgcttatgattaggctcgcagtggtggtagctgggagagcttgggactggccagacgcgaccaactcacccatgtaataagacaacttttatacatagccgacagtacgcaacctcatgcgcaagatccttaatgaaaccaaagagctgcagcagataaccaacgacaagcagaaaaatcaggcccagacaatggagatgatgtatacgataattgcagatgagttcaagtcaatggacaataaggacatgcgccctgaagattacttgaacttcttttgtcttggaaaccgggaagaaccaccatctaatggcagcccagaatcagagaaatctacatataaaagtgcagagatagtctgtttttgcattttccttattcttaagggtatggcttagctcaacccttctgattacaccaaaactgaatatggttttggcgcacggaccttatgggaagctagagaagcatttgaagacgcagaaattactcatgttgacgatacagtagatcctgttagagacatggaaactattagtgaagagctcagactaaagttttcgttggattttgttgatttacaagatcagctgtacaacacttaaaccttttttcgacactattctgtttctattttctgcaggatatagagttcatgaaaaagaaacttgaggaccttgataagccaatgaagaggaggaatgataagctgctcaaaattgagcatgaattatattgatccagcacaatgccgaggagactggagactaaacttggaggtgctactgaaggatgtgactttgagtcaaagggtagcacatggagagcttgaattgaattcaagcttggatatgattggaaaatatttgtattagatcacctagaagggtgattgatgcttgttattggccaagcagccaaaatctatagtgggaactcctgcatacattgctcatgaggttcttctgaagaaggaatacaatggaaaggttgctgatgtgtggtcatgcggagtgatgccatacgtgatgctgacgatcaccatccctgagataagaaaccatccatggttcttgaaaaacctcctagctgaccaaatggatgacaatacgatgagtaagcagtacgaggagcctgaacaaccgatgcagagcatgaatgagttcatgcagatcctggttgaggcgaccattccagcagttggttcacgtggactcaatcagtttctgaatgatgacattgacctcgacgatgacatggaggacctagactcagatgccggtcttgacctggaaagcagtggggagatcgtgtatgctatttgacaacattgaatactttgttgtgtcgtaggttaccaagataattagagacaaggggcaggttgttgtgcttgcaagtatctgttgcagctgttgttcatgcctgatgttgatgcctcttttcatactgttgtgtttggatggtgtaccaccagtgttttacaacagtttggcccttggaattgctattgctaaaacttggttcctctgagaagaccttttgtttttgtattcccagtcgagggacggtgaagtactta

SEQ ID NO: 5360 - DNA, 3489 bp, Zea Mays
acgtactctgtcaaacgatacgccgcgatgcttccagacgagcgccatccccttcctcgcctcacacgccgtcctgttggtcgtgcctctcttcaacctttttttcttgagcattagcgagagccccttacatggtgcagtgctagcatcgttgctggcgacctcggtgaggtcggatctgcaaaggttgcagctagcgcgcctacactacatcaacatggtgtggcatctcctttcgcagatccccaacatgctacgccgccggctgcctcattggaactcctgtgcaccgcttgcctttcttctcccattcaacccgcaggcgttccctggctcaatagcgcaactaggggatgtccgccgctacctccatataggaaacgacagatttagattttcaggtgatgcgtggtcgggatcccggatcaatcaaaataagtgtgaaataagtgtgaaatttgagaggctgttgaacttccagatcaggtaccaaccaaaaaaagtgacccttttgacggcgtattgcgtgggcaaggcatgccagtgcgacaatagagaaactaacggggagctctgttcgttctgctgattgcttatgattaggctcgcagtggtggtagctgggagagcttgggactggccagacgcgaccaactcacccatgtaataagacaacttttatacatagccgacagtacgcaacctcatgcgcaagatccttaatgaaaccaaagagctgcagcagataaccaacgacaagcagaaaaatcaggttgtacgcatccaacattttactttcatatttgctgaagatgtcaacaaacaaaatagacaagcagcccagacaatggagatgatgtatacgataattgcagatgagttcaagtcaatggacaataaggacatgcgccctgaagattacttgaacttcttttgtcttggaaaccgggaagaaccaccatctaatggcagcccagaatcagagaaatctacatataaaagtgcagagatagatatagagttcatgaaaaagaaacttgaggaccttgataagccaatgaagaggaggaatgataagctgctcaaaattgagcatgaattatattgatccagcacaatgccgaggagactggagactaaacttggaggtgctactgaaggatgtgactttgagtcaaagggtagcacatggagagcttgaattgaattcaagcttggatatgattggaaaatatttgtattagatcacctagaagggtgattgatgcttgttattggccaagcagacaataggtagtcagatgaagattgtaaaaaacaagcatgcttaacccttcaagaatgcacagtttgagcttgaatttggaaaggggatatgccacagttcagagttttttgaacagaatttctggagcagttgttcctataaaataatattttaggtcttgaagccaccaccgtttggattgacatgatctgtggtattctggtgatctcattatagcagacttcatttcttattgtgcttatacagtagtgtagcgggaagagaattcacattgcatgaaatcatgttgatagctaagaggtggaagttgaagtaagccgggaagggtgaggtattgggaactgtggcatttaaagttcagtaggcagcagtaaactgtagtggtgtggtcgtgtacataagatgtgcacattttgaactcaggcattctttattgagtgctgctagaattacattgagctccctccacttctgatacttgcctggttttgcgtcaattggatctgtttgtccgtcctcaacactgttgtctgtttttgctaatttgggcattatctatgacagaagaagaacgattatgaattatagattaaattgaacataatgttgttctaagaacaaaaacagattatttcactgaatattttctcatcgcaagatgtactaaatagtaggttcactacagtcttacagaagccaataacccacttgatcttgctataatgatgttcttagaatacttatagatgtgttggctggaacattagctctgacaagatagaagcttgtttgttctgttatttagtcatgtctgcccctcaaactactgaaacctaaaatctgaaactgaaaatctgaaaatataaaactaaaaatatgaaactgaatattgtatgtcatgtttgtgtcatgttttcttagactgcattgaactccaacagagactgagaaacatggaattatagctagaacttggatctatggctgtgatattcttgcttgcggaaactgggaattatagagagacggaaatactttttaaattagaatctaactacaattcgatttagttcaagtcaatattcagagttctactttctggaattattcagagttcagttattcaaagttattaatagctatacttagccacccatgatgtagtcaagaaaaaaataactgaactcttctgcttataatttcaactatattaatagatattgttatcaggtgtttaaaaagaatgtggtcatcttgtgtgacatttgtgttcttaaattgttgctctgcttataaccttttttacaatgtactcatcagttctatactcgcagccaaaatctatagtgggaactcctgcatacattgctcatgaggttcttctgaagaaggaatacaatggaaaggttttatgcgtagtgtcgttaattattctacacttgacatactgtttttgtttagtgtgcatgttattattctccacttgaacaacatgtttgtttgtcaaaacattttatacacgcacgatttgtagtcatgcataacagggaactatgttggaaggttcgaatgctaaattagtcactaactctttgttactgaactaaggttgctgatgtgtggtcatgcggagtgatgccatacgtgatgctgacgatcaccatccctgagataagaaaccatccatggttcttgaaaaacctcctagctgaccaaatggatgacaatacgatgagtaagcagtacgaggagcctgaacaaccgatgcagagcatgaatgagttcatgcagatcctggttgaggcgaccattccagcagttggttcacgtggactcaatcagtttctgaatgatgacattgacctcgacgatgacatggaggacctagactcagatgccggtcttgacctggaaagcagtggggagatcgtgtatgctatttgacaacattgaatactttgttgtgtcgtaggttaccaagataattagagacaaggggcaggttgttgtgcttgcaagtatctgttgcagctgttgttcatgcctgatgttgatgcctcttttcatactgttgtgtttggatggtgtaccaccagtgttttacaacagtttggcccttggaattgctattgctaaaacttggttcctctgagaagaccttttgtttttgtattcccagtcgagggacggtgaagtactta

SEQ ID NO: 5361 - DNA, 3698 bp, Zea Mays
acgtactctgtcaaacgatacgccgcgatgcttccagacgagcgccatccccttcctcgcctcacacgccgtcctgttggtcgtgcctctcttcaacctttttttcttgagcattagcgagagccccttacatggtgcagtgctagcatcgttgctggcgacctcggtgaggtcggatctgcaaaggttgcagctagcgcgcctacactacatcaacatggtgtggcatctcctttcgcagatccccaacatgctacgccgccggctgcctcattggaactcctgtgcaccgcttgcctttcttctcccattcaacccgcaggcgttccctggctcaatagcgcaactaggggatgtccgccgctacctccatataggaaacgacagatttagattttcaggtgatgcgtggtcgggatcccggatcaatcaaaataagtgtgaaataagtgtgaaatttgagaggctgttgaacttccagatcaggtaccaaccaaaaaaagtgacccttttgacggcgtattgcgtgggcaaggcatgccagtgcgacaatagagaaactaacggggagctctgttcgttctgctgattgcttatgattaggctcgcagtggtggtagctgggagagcttgggactggccagacgcgaccaactcacccatgtaataagacaacttttatacatagccgacagtacgcaacctcatgcgcaagatccttaatgaaaccaaagagctgcagcagataaccaacgacaagcagaaaaatcaggttgtacgcatccaacattttactttcatatttgctgaagatgtcaacaaacaaaatagacaagcagcccagacaatggagatgatgtatacgataattgcagatgagttcaagtcaatggacaataaggacatgcgccctgaagattacttgaacttcttttgtcttggaaaccgggaagaaccaccatctaatggcagcccagaatcagagaaatctacatataaaagtgcagagatagtctgtttttgcattttccttattcttaaggaagcatttgaagacgcagaaattactcatgttgacgatacagtagatcctgttagagacatggaaactattagtgaagagctcagactaaagttttcgttggattttgttgatttacaagatcagctgtacaacacttaaaccttttttcgacactattctgtttctattttctgcaggatatagagttcatgaaaaagaaacttgaggaccttgataagccaatgaagaggaggaatgataagctgctcaaaattgagcatgaattatattgatccagcacaatgccgaggagactggagactaaacttggaggtgctactgaaggatgtgactttgagtcaaagggtagcacatggagagcttgaattgaattcaagcttggatatgattggaaaatatttgtattagatcacctagaagggtgattgatgcttgttattggccaagcagacaataggtagtcagatgaagattgtaaaaaacaagcatgcttaacccttcaagaatgcacagtttgagcttgaatttggaaaggggatatgccacagttcagagttttttgaacagaatttctggagcagttgttcctataaaataatattttaggtcttgaagccaccaccgtttggattgacatgatctgtggtattctggtgatctcattatagcagacttcatttcttattgtgcttatacagtagtgtagcgggaagagaattcacattgcatgaaatcatgttgatagctaagaggtggaagttgaagtaagccgggaagggtgaggtattgggaactgtggcatttaaagttcagtaggcagcagtaaactgtagtggtgtggtcgtgtacataagatgtgcacattttgaactcaggcattctttattgagtgctgctagaattacattgagctccctccacttctgatacttgcctggttttgcgtcaattggatctgtttgtccgtcctcaacactgttgtctgtttttgctaatttgggcattatctatgacagaagaagaacgattatgaattatagattaaattgaacataatgttgttctaagaacaaaaacagattatttcactgaatattttctcatcgcaagatgtactaaatagtaggttcactacagtcttacagaagccaataacccacttgatcttgctataatgatgttcttagaatacttatagatgtgttggctggaacattagctctgacaagatagaagcttgtttgttctgttatttagtcatgtctgcccctcaaactactgaaacctaaaatctgaaactgaaaatctgaaaatataaaactaaaaatatgaaactgaatattgtatgtcatgtttgtgtcatgttttcttagactgcattgaactccaacagagactgagaaacatggaattatagctagaacttggatctatggctgtgatattcttgcttgcggaaactgggaattatagagagacggaaatactttttaaattagaatctaactacaattcgatttagttcaagtcaatattcagagttctactttctggaattattcagagttcagttattcaaagttattaatagctatacttagccacccatgatgtagtcaagaaaaaaataactgaactcttctgcttataatttcaactatattaatagatattgttatcaggtgtttaaaaagaatgtggtcatcttgtgtgacatttgtgttcttaaattgttgctctgcttataaccttttttacaatgtactcatcagttctatactcgcagccaaaatctatagtgggaactcctgcatacattgctcatgaggttcttctgaagaaggaatacaatggaaaggttttatgcgtagtgtcgttaattattctacacttgacatactgtttttgtttagtgtgcatgttattattctccacttgaacaacatgtttgtttgtcaaaacattttatacacgcacgatttgtagtcatgcataacagggaactatgttggaaggttcgaatgctaaattagtcactaactctttgttactgaactaaggttgctgatgtgtggtcatgcggagtgatgccatacgtgatgctgacgatcaccatccctgagataagaaaccatccatggttcttgaaaaacctcctagctgaccaaatggatgacaatacgatgagtaagcagtacgaggagcctgaacaaccgatgcagagcatgaatgagttcatgcagatcctggttgaggcgaccattccagcagttggttcacgtggactcaatcagtttctgaatgatgacattgacctcgacgatgacatggaggacctagactcagatgccggtcttgacctggaaagcagtggggagatcgtgtatgctatttgacaacattgaatactttgttgtgtcgtaggttaccaagataattagagacaaggggcaggttgttgtgcttgcaagtatctgttgcagctgttgttcatgcctgatgttgatgcctcttttcatactgttgtgtttggatggtgtaccaccagtgttttacaacagtttggcccttggaattgctattgctaaaacttggttcctctgagaagaccttttgtttttgtattcccagtcgagggacggtgaagtactta

SEQ ID NO: 5362 - DNA, 1275 bp, Zea Mays
attccagaacacagcctcagcaccttccttcttctccgtctcgtcgtccctttccatttcctctcccatttatgtccccgcttcaggtctgccaaataaacccccgaaaagcaggagagcgagacccggaagtggaagactagggttagggtcccagctccgccgttgtctgggcgagtcgagacatggccggccctgcccccgccgttgcagccagtgccgccgcctcacagtcgccgccgatgcagctgccgtcgccgttcgcggagctagtcaagggttcctccggcctcgagaagatcgtgcttcgcggcgctcgcaactgctgtgccgagatctatctttatggaggtcaagtaacatcatggaagaatgacaatggggaagagttgctttttctcagcagcaaggctattttcaaacctccaaaagctattcgtggtggtataccaatttgctttccccaatttggaacacatggaaatcttgagcaacatggatttgctaggaaccggttttggactatcgacaacaacccaccccctttaccagtaaaccctgctattaaggcttatgttgatctgattttgaagccttctgaagaggatttaaagatctggccccacagttttgaatttcgcttgagagtttctcttggaccttctggagatctgagtctcacatcccgaatcaggaataccaacacagatggaagacctttctcttatacatttgcatatcacacatacttctctgtctctgacataagcgaggtgcgtgtcgaagggctggaaacaatggactaccttgacaacttgaaggcaaaggagcgtttcacggagcaaggcgatgctattgtttttgaatcagaagttgataaagtttatcttgccgcaccctctaaaattgccatcattgatcatgagaagaaaagaacatttgtcgtgacaaaagaagggcttcctgatgctgttgtttggaacccttgggacaagaaggcaaaagcaatgcaagattttggggatgcagaatacaagagcatgctgtgtgtggagcctgcagctgttgagaggcctattactctgaaacctggggaagagtggaaaggaaggcttgtgctttcagctgttccttcgagttactgtagcggacagttagatccatcgaaggtccttcagggttgaaaatcctcactttctgcatcttgtacaggatggcaaatgcttgaaacttttcgctattggagcctccccgtcagcactcggctcggagcct

SEQ ID NO: 5363 - DNA, 1275 bp, Zea Mays
caggctagcgtctctgagacgagatcgaagggctgctaaagacaacacgtactctagctagggcgttggcgttgcattgcttgcccgcccgctttccatctctatttcgtgccgggagcaggagatcgccgtgacatcgtcctcagcccgcacgcaaacgcagagtccccgcgcgcggcggccgccacagcaccagcaccacaccgacgaaggcgcggacgagcgacccatggcgcaggtgagcgtggtgacggcggcgaggagggagctagcgggcgcgctgaaccccgacgccagggagttcctcccgtggtggcgcctagggggcagcaggaagcagctctcggccgacgcgccagagttcacgcggtccagcttggggcgagcggtggccgcagccgccgccaacggtgcggtgatagccgccccaaacaacgccggcgtggggaaggcggcgcggaggtctgcaagcaataatgggcaacacgcagagtcgacaatgcctacatttttcaagtctcacaggtctcagtgggatgaaacagtgaaaagaacaatctttgtcaaatacattgatcacaatgtggtggattgccgcatttgtggagatcccacatctgatgatggtctcaggtttggatttgttgagcttcaacacgaggatgaagcaattgcttcgttggatcttgatggatatattattagcgtatcccctttgagcgtttcacgctcaaggactgcaatctgccctattaaccccaagttccttcctcagtctgaagctgagtgggagacgtgcttgaggactatatattgcaccaatatcagcaaaaatgtgtgtcgcgttaggcttctggataataaagagcgctccaccaatatagctttcattgagtttgttgaggtttatggtgctattgctgctcttgggtccggtggcatttatgtggatggcgttcctatcaggatgtgcccatccaagagcccgataaggacccattgctttgggaagcttagtagctaataagctggagtgcaggacctaatgccatcatggtgtgtcatgatccggcaatatatatctgcatattatccgttgcatttggttgactcatgacatgagccatgaacaacctttaaacttttgctttagctttaatgccccagaacaataacaacaacaacatttcagaatattatcatactatactatacaacatttaactaaacataggtctaaccatttgttttaaatagcaggctactatatagtgg

SEQ ID NO: 5364 - DNA, 1323 bp, Zea Mays
gcgcaggctagcgtctctgagacgagatcgaagggctgctaaagacaacacgtactctagctagggcgttggcgttgcattgcttgcccgcccgctttccatctctatttcgtgccgggagcaggagatcgccgtgacatcgtcctcagcccgcacgcaaacgcagagtccccgcgcgcggcggccgccacagcaccagcaccacaccgacgaaggcgcggacgagcgacccatggcgcaggtgagcgtggtgacggcggcgaggagggagctagcgggcgcgctgaaccccgacgccagggagttcctcccgtggtggcgcctagggggcagcaggaagcagctctcggccgacgcgccagagttcacgcggtccagcttggggcgagcggtggccgcagccgccgccaacggtgcggtgatagccgccccaaacaacgccggcgtggggaaggcggcgcggaggtctgcaagcaataatgggcaacacgcagagtcgacaatgcctacatttttcaagtctcacaggtctcagtgggatgaaacagtgaaaagaacaatctttgtcaaatacattgatcacaatgtcactgaggacattctggcttgtctatttcagttgtttgggacagtggtggattgccgcatttgtggagatcccacatctgatgatggtctcaggtttggatttgttgagcttcaacacgaggatgaagcaattgcttcgttggatcttgatggatatattattagcgtatcccctttgagcgtttcacgctcaaggactgcaatctgccctattaaccccaagttccttcctcagtctgaagctgagtgggagacgtgcttgaggactatatattgcaccaatatcagcaaaaatgtgtgtcgcgttaggcttctggataataaagagcgctccaccaatatagctttcattgagtttgttgaggtttatggtgctattgctgctcttgggtccggtggcatttatgtggatggcgttcctatcaggatgtgcccatccaagagcccgataaggacccattgctttgggaagcttagtagctaataagctggagtgcaggacctaatgccatcatggtgtgtcatgatccggcaatatatatctgcatattatccgttgcatttggttgactcatgacatgagccatgaacaacctttaaacttttgctttagctttaatgccccagaacaataacaacaacaacatttcagaatattatcatactatactatacaacatttaactaaacataggtctaaccatttgttttaaatagcaggctactatatagtgg

SEQ ID NO: 5365 - DNA, 412 bp, Zea Mays
cgacgcgcctaaatttatgccgtggcggttagggcagtgacaaaaggggaagcgagaccgccgccacatgcctcctggcctcctacctcgcggctgcctcctcctcgtcgttccccatcttcgccgccacttgccggcgctttgttctactcttcgaagcagccactcgcataagcgccccgcggttatcttctcccccgtacgtgccgtctccggctactccgccatggcggctggttcgccggagcagcagcagcggagcgttgtggtcaaggagactgtggagctcacggagacggaggagcgcatctttcgccgccttctcgaggttgttcgccacttcagtctcggcacgcagctccgcgtcgccggcggatgggtccgtgataagggtggacattctttgtttttt

SEQ ID NO: 5366 - DNA, 1701 bp, Zea Mays
gttccggtgccgcgtgcggcgtgcctgcccgagccgtgaagccgtgtcgcgccgacaagttgggtcacggccagctcgccccctgaccttccgcctccctgccaggtgccagctcgcacagttgcacacccacaaaacgcgccggagacaacgcacgtaactgccgagaagccgaagtccgaacgccgcccaccggcatccgccaagtgcggccgtttatatacttgcacgcctcccctcccctccagcctccccttgcacgacgtctccaccactacaccacacctcaagtccacaacaccaccagcctcgtctcagccgcttcagcataccacaccgcacgcaaacccaccgcgcgctacgaccaccaccgtcaccatggccgccgcgcgctacgacgtggagaagggcgggaggaataacggggatgggaagccttcgccgccgccgccgggccacctgtacccgcagcgcgacggggagagggagtgggtgccgtggttggtgccgctcgtcgtggccgtcaacatcgtgctcttcgccgtggcgatgtacgtcaacaactgcccggcccacgccgcctcgtctcgccgcggcggcgccggatcatgcgtcgcccgcgggttcctccaccgcttctcgttccagccgctcagcgagaacccgctcctcgggccctcgtcggccacgctgcagaagctgggagcgcttgtatgggacaaagttgtgcgggagcaccaggggtggaggctcgtcacctgcatctggctgcacgccggtgttgcccacctcctggccaacatgatcagcctcgtgctcatcgggctcagactggagcaacagtttggatacgtgagagttggcatcatctaccttgtctctggcgtcggaggcagcgtgctttcgtctctgttcatcaggaacaacatctctgtcggcgcttccggagctctgttcgggctccttggggccatgctgtcggagctcttcaccaactggaccatctatgcaaacaaggctgcagccctggtgaccctgctggtcgtcatcgccatcaacctcgccatcggcatcctcccgcacgtcgacaacttcgcgcacatcggagggttcctcaccggcttcctcctcgggttcgtcttactgatgcgcccgcactacggctggatgcagcgctacgccctgccctccgacgtcaagtacaccaccaagaagtacctggcctaccagtgggctctgctggccgtggcctcggtcctcgctgtcatcgggttcgccgtagggctggggatgcttttcagaggagtgaacgcgaatgatcactgcggctggtgccactacctcagctgtgttccgacctccagatggagctgtgggaactcgcagtcttactgtacataatgtcaccaggatgtggtttatatatgacattatttatgctatctgattgatcgatggttcattctatttattcagcgagtgaaaattgaaatgccttcaatctttcgcttgccagctatatttgaaaactagatgcagttgtgttgttatcaactcccccgttcttttttatttatcgtcatttagttaaaaaataaactagtgagccacaaagaaggtagacctgtcaaccacaatcggccttccatgattactgtggttatttcataatataagttatgtgatgctggttttcatctc

SEQ ID NO: 5367 - DNA, 1677 bp, Zea Mays
acccatcctgctcagtgctcacttccacgcgggccccagcccgccacgagtccccgctcccacctgctcctcgccgccgttagcgcgccccgagccccgacagcctttctccttctagggtttctctctgtttcgtcctcatcgaatcggagtttcgcatggagtcatcgcggtctcggaagcggacgcgccaggcgcatgactgtgccgccgcgccgccaccagagcgagaagtggtagcgaggggtggcgcgtcgccaccatggagggaggatgaccgtgatggacacttcgtattcgaccttggcgagaacttgacccgccgatataaaatcttgagcaaaatgggagaaggtacatttgggcgtgttttggaatgctgggaccgtgaaacacatgaatatgttgccataaaagttgttcgcagtatccgcaagtaccgtgatgctgcaatgattgagatagatgtgctcaatcgccttgcagaaaatgaaaagtacagatctctatatgcatgagttgcggcttatccacactgatctgaagccagaaaacatactacttgtctcttctgagtatataaaagttccaagtacaaagaagaattcgcaaggtgaaatgcatttcaagtgcttgccgaagtccagtgccataaagctgatagattttggcagtaccgcctttgataatcggaaccataactcgattgtttctacgaggcattatagggcacctgaaataatattaggtttaggctggagttttccatgtgatatttggagtgttggctgtattcttgttgagctatgctctgttagatctcttcacacactttatttttctagtaccagtctggtaattgttttcctaacatcacattttttagggggaagcattgtttcagacacacgagaatctggaacacctagcaatgatggagagggttttgggacctctaccagaggatatgatacggaaagcaagctcttcagctcagaaatattttaggagagcaacacgattaaattggcctgaaggtgctgtttcaagagaaagcatcagagctgtgaggaaactggatcgactaaaggacttggtatcgaggaacgctgaccattcaaaggtggcactggtggacttgctatacggtctcctacggttcgagccatcggaacgcctgacagcagaagaagctctggaccatccattcttcaggaacccaacatgacttgttgagcaggcttgactcatgtaactctactgaaggtggtggtaggaagcaggcagagccgtccccattgcaaagctgaaggcatcttgttcctctataccagagagtttgtgtaaggcctgtcaatggggcttcttgtggtgataaaactgatggctttagtcacccaatgtcatgtacactagcatttttcctagggagcttagttcgccagacggcgcttgtatgttgttaaccgggatacactatgagctgtgccccgatgccctggtgctataatccaatcgcaaatgatgaaatcaagcatagcgtgcgtccgtatagtttatgattgaattgtaccttggaatgattgccctacattcgttcattcctacctagcgttgttacttcgatggttctggggtgctgttgataggtgcacacggcttgggatttgttgcatc

SEQ ID NO: 5368 - DNA, 1004 bp, Zea Mays
  misc_feature (1003)..(1004): n is a, c, g, or t
ctggcttcgagttttgtgagctctctgttgtgtgatgtgcaagttataggaattggatgtggctgggatttgagtgaattgtggtctaagaacaagagggaaggatctttctccagacttcgcaattttggacgacgaggttttgtgttatctggtttgtcgggatggatgccaaaaagttcctgcagctggtcgaagagaagaaaaggaggatcctcgagaagaaagaagccccactaaagtggcagcagaagctagaagcagcagttaacgtcaaagctgatgcagaagcgaaggcgaaaaaactaaaatcaagaaagcataggaggagaggagattcttcctcggactctgacagtgactatgacagcgatgttgatcggaaacaccggaggaggaaggatcgtagaaggaacaagaagcatgagcattctgactctgatgatgccaggagaggcaagcgtaggtccaaaaagggctcagactcaagtgatgagagcaaccgtgaatatgaaagcgggtctgaagaagaacatacaaagaagaagcgtttgcacagaagaaggcatcacagacactcttcaaggtcagactctgaagacaacagtgatgaggaagagcggagatctgccaaggaccattctcagccccgcagacgccaccatcagtcttctgatgatggctcggacaaggtcaggttgagacatgggaagcgtctgagatcaagtgacgagaatgctcggccagattccaacagccataagcatctcaggagccaatccttggaggagtcatcagatgatagagatgatgatggaccagagaagataagaaatggcaaaaggtatcacaagaatcatcaccgtcaccaccatcatcatcgtcaccatcggcaccaccatgaaagacataataactcagcagaacctaatgacaggaggcaagtactgaaagatgaccagagggcccttgaaggtagcagtgcagactgaaggtatccacnn

SEQ ID NO: 5369 - DNA, 3487 bp, Zea Mays
tgcctaccaagtcacctctttgcccggttggccgccgcgcccagtggccccctcctagcctaccgctccccgatccaatctgtgccgtccgttctcccgccgcaaccttcgtcttgtcctcaaggccggcggcggccactgcccgccttacaccatgaaaccaccacggctctttcccctcctccgccgccacctctcatccgccgccgacgccaccgccgacgccgcggagctttccagcgcgctatccgtggcgccctcctcagatgcgaaacgcgatcttgccatcctgctccgccgccttggcggccgcggtctcgcctccgccctctcgtcccttccggctccgcttcccgcctcctccgccctgcgcctccttcagcatattctctccgacacccacgcgtccgcctcccgccacgccgaggacctcctgtctcctcgcgtctctacgctcctcctaccatcgctcgtcgccgatggcgcctcgctaccgtccgcgcgccgcctcatctcacgcctcctcttcttcaaccctctttctgtcgccgcagcggctatcgcggactccgactgcactgccacagcggaccttctcgtccgcgcctgcctcaactcgcctgcccccggatctctgtcctgtgccgccgatgcctttctcgagctttccacacgtggtgcatcaccgtccatcaagacatgcaatatccttgtcgaagccctaggttgtggtggccaactggacctggcccgcaaggtgttcggagaaatgcgggatggcaacgctgttgctcctgatgtgtacacatacacggtgatgattaaggcactctgcagggctggagagattgatgctgcttttgtgatgcttgcggagttggaacggtctggtatccagccgacggttgtcacttacaacgtgctaatggatgcattgtgcaggagtgggagggtggaagaggcctttcagttgaaggggagaatggttgaaggcaggctgagaccaagcattgtcacatttggcatcctgatcaatggtcttgcaaggggccaacggtttggtgaggttgatgcagtgctgcaggagatggagggttttgggatcacccccaatgaggttatttacaatcagctgatcggttggcattgtagggaaggacattgctcagaggcgcttaggctgtttgatgaaatggtctcaaaggggataaagcagacagtggtgacttacaacttgattgcgaaggctctgtgcaaggaaggagaaatggaacatgctgagcagatattggatgagatgttgttggctggaatgacggttcattgcagcttgtttaatagtgtggttgcatggcatcttcgcggaactggaagactggatgtggtgctaaggcttataagagaaatggttgcgagatttctgaaaccaaatgatgctgtgatgacagcttgtatccaggagctttgcaaaagagggaaacacgaagaagcagctgaaatttggttcctagtattgggtaaaggtttgggtgtcaatattgcaacatccaatgcgttgattcatgggctttgccaaggtaacaacatgaaagaagctactaaggttctaaaggctatggtggatagcggggttgaattcgatagaatcacatataatataatgattcaattctgctgcaaagccagtaaaatggaggaagcaatacaacttcgtgatgacatgatcaaaagagggtttaagccagacctcttcacgtttaatactttcctacgcgcttactgtaatttgggtaaggtggaagacatccttcacttgctggatcagatgaaaagtgagggtcttaagccagatattgtgacatatggtaccataatagatggttactgcaaagcgaaggatgtgcataaggcgaataaatatttgattgaattgattaaaaatgggttaagaccgaatgcagtcatctataatgctcttattggtggttatggtaggaatggtagcatttctgatgcaattggtgttcttgacactatgaagcataatggcatacaaccaacaccaataacttacaacagccttatgtattggatgtgtcatgctggtcttgttgaagaggccaaagaaattttcgcgcaatgtatactaaagaacattgagcttggtgtaattggctacacaattataatacaaggtttttgcaaaataggaaaaattgatgaagctgtgatgtactttaaggaaatgcattacagggatatacgtccaaataagatgacctacaccactttgatgtatgcctattgcaaatgtggcaacaaagaagaagctttcaagctttttgacgagatggtgagctcaggcattgttcctgatactgtttcttacaatacactaatttcagggtgttgtgaggtggattcattggataagattgtagaaagtcccgctgaaatgtcctcatgagttttggaacaaggtggttgtttgtcaacgtttttgataatggataactacaccctggagccagagaagctgtgtctagtgttgaattatgtgtaaccaaggaagatgtaagaaaggagactcaaactttgagcttgatatatcaccctaatgtcatcaggtcttagcgctcatttgttgtgggtcaaaacctttgggtagtagtgctgttcatgctagaaggttcatgtttgcaccaaatgaaggttggatatctgatggttttgaggagccagttattgcctctattctaaaggaaacactcaaagctctagactacctccataggcaggatatctttattgccatcccggtgtagtcaagcttggggactttggtgtctctgcttgcatgtttgataggaggcaaggggctatgaatacatttgttggaacactgtgctggatggctccagaagttctccagcttcaaactggatataatttcaaagctgatatggtctttggaataactgcactggaggtggcacatggacatgctccctttttgaagtaccctcctatgaagctaaaggattcagctagctttgaagagaatgccttcttcagaaatcagaacaagaaacacttttcatgggtgagtgttaataaggggtcagtgcatgaaactttgatattgaggatctaaaaagccagccatcactgatttgcaatgatgatgcacctgaaatagaagaacatgatgacactgctagaataactgacttcgataaagtttgtttgagtcctttgtctttattttaaaaatgccttcgagtcctttgtctttattttaagaaatgcattagtcatgtgtactaggaataatgacataaatatgatgtaagcttcacagagtgatagaagaaatcatatataagatcatcatctgtcactaggtgagtacccgtgcgttgcaacggggacatataataacataataacttatatataaaatgtgtcttatattgttataagaaaa

SEQ ID NO: 5370 - DNA, 3531 bp, Zea Mays
tgcctaccaagtcacctctttgcccggttggccgccgcgcccagtggccccctcctagcctaccgctccccgatccaatctgtgccgtccgttctcccgccgcaaccttcgtcttgtcctcaaggccggcggcggccactgcccgccttacaccatgaaaccaccacggctctttcccctcctccgccgccacctctcatccgccgccgacgccaccgccgacgccgcggagctttccagcgcgctatccgtggcgccctcctcagatgcgaaacgcgatcttgccatcctgctccgccgccttggcggccgcggtctcgcctccgccctctcgtcccttccggctccgcttcccgcctcctccgccctgcgcctccttcagcatattctctccgacacccacgcgtccgcctcccgccacgccgaggacctcctgtctcctcgcgtctctacgctcctcctaccatcgctcgtcgccgatggcgcctcgctaccgtccgcgcgccgcctcatctcacgcctcctcttcttcaaccctctttctgtcgccgcagcggctatcgcggactccgactgcactgccacagcggaccttctcgtccgcgcctgcctcaactcgcctgcccccggatctctgtcctgtgccgccgatgcctttctcgagctttccacacgtggtgcatcaccgtccatcaagacatgcaatatccttgtcgaagccctaggttgtggtggccaactggacctggcccgcaaggtgttcggagaaatgcgggatggcaacgctgttgctcctgatgtgtacacatacacggtgatgattaaggcactctgcagggctggagagattgatgctgcttttgtgatgcttgcggagttggaacggtctggtatccagccgacggttgtcacttacaacgtgctaatggatgcattgtgcaggagtgggagggtggaagaggcctttcagttgaaggggagaatggttgaaggcaggctgagaccaagcattgtcacatttggcatcctgatcaatggtcttgcaaggggccaacggtttggtgaggttgatgcagtgctgcaggagatggagggttttgggatcacccccaatgaggttatttacaatcagctgatcggttggcattgtagggaaggacattgctcagaggcgcttaggctgtttgatgaaatggtctcaaaggggataaagcagacagtggtgacttacaacttgattgcgaaggctctgtgcaaggaaggagaaatggaacatgctgagcagatattggatgagatgttgttggctggaatgacggttcattgcagcttgtttaatagtgtggttgcatggcatcttcgcggaactggaagactggatgtggtgctaaggcttataagagaaatggttgcgagatttctgaaaccaaatgatgctgtgatgacagcttgtatccaggagctttgcaaaagagggaaacacgaagaagcagctgaaatttggttcctagtattgggtaaaggtttgggtgtcaatattgcaacatccaatgcgttgattcatgggctttgccaaggtaacaacatgaaagaagctactaaggttctaaaggctatggtggatagcggggttgaattcgatagaatcacatataatataatgattcaattctgctgcaaagccagtaaaatggaggaagcaatacaacttcgtgatgacatgatcaaaagagggtttaagccagacctcttcacgtttaatactttcctacgcgcttactgtaatttgggtaaggtggaagacatccttcacttgctggatcagatgaaaagtgagggtcttaagccagatattgtgacatatggtaccataatagatggttactgcaaagcgaaggatgtgcataaggcgaataaatatttgattgaattgattaaaaatgggttaagaccgaatgcagtcatctataatgctcttattggtggttatggtaggaatggtagcatttctgatgcaattggtgttcttgacactatgaagcataatggcatacaaccaacaccaataacttacaacagccttatgtattggatgtgtcatgctggtcttgttgaagaggccaaagaaattttcgcgcaatgtatactaaagaacattgagcttggtgtaattggctacacaattataatacaaggtttttgcaaaataggaaaaattgatgaagctgtgatgtactttaaggaaatgcattacagggatatacgtccaaataagatgacctacaccactttgatgtatgcctattgcaaatgtggcaacaaagaagaagctttcaagctttttgacgagatggtgagctcaggcattgttcctgatactgtttcttacaatacactaatttcagggtgttgtgaggtggattcattggataagattgtagaaagtcccgctgaaatgtcctcatgagttttggaacaaggtggttgtttgtcaacgtttttgataatggataactacaccctggagccagagaagctgtgtctagtgttgaattatgtgtaaccaaggaagatgtaagaaaggagactcaaactttgagcttgatatatcaccctaatgtcatcaggtcttagcgctcatttgttgtgggtcaaaacctttgggtagtagtgctgttcatgctagaaggttcatgtttgcaccaaatgaaggttggatatctgatggttttgaggagccagttattgcctctattctaaaggaaacactcaaagctctagactacctccataggcaaggacatattttcaccatgatgtgaaggcaggatatctttattgccatcccggtgtagtcaagcttggggactttggtgtctctgcttgcatgtttgataggaggcaaggggctatgaatacatttgttggaacactgtgctggaattaggatggctccagaagttctccagcttcaaactggatataatttcaagtatatgagctgatatggtctttggaataactgcactggaggtggcacatggacatgctccctttttgaagtaccctcctatgaagctaaaggattcagctagctttgaagagaatgccttcttcagaaatcagaacaagaaacacttttcatgggtgagtgttaataaggggtcagtgcatgaaactttgatattgaggatctaaaaagccagccatcactgatttgcaatgatgatgcacctgaaatagaagaacatgatgacactgctagaataactgacttcgataaagtttgtttgagtcctttgtctttattttaaaaatgccttcgagtcctttgtctttattttaagaaatgcattagtcatgtgtactaggaataatgacataaatatgatgtaagcttcacagagtgatagaagaaatcatatataagatcatcatctgtcactaggtgagtacccgtgcgttgcaacggggacatataataacataataacttatatataaaatgtgtcttatattgttataagaaaa

SEQ ID NO: 5371 - DNA, 1664 bp, Zea Mays
agccgtcgcctctccttgctctgctcctctctctcccaagcggctctccctctatctcctcgtttctctcccctcctcttctacagccgctgccaggcaaccgaccgccgagcagcgcagccacccgagccccacgcccgccgcgccaggaaccagcgcccctgctctcgccaggacgccaggaattgctctttctatagcaagtttatgagttcagtttatattccattgaatatttgttgcagtgaagagaaatgagagaaagccttcggttgtagccttcagtttatattccattgaatatttgttgcatccgactcatctctgtttcgattccatccggtttggctcattttttaatcgagtgtgttgtagttttgtaccctaatgtcgtgggagtgctaccgaagtactgatagcatcactttaatttcattagctccgtcctggcaatcactttgggaaggtggtcagtggaataactttgcttaaaaagcttgaagcagttggtagtgaaactggaaatccttcttatcaagtgaaaattgtagactgtggtgaagtttccaacacaaattctcaggatccgctaaagggagataaagtaagctcaaagacagataacagcagttcagacagtgaaaagggtggccatcgtaccaagcgttccttgacgaaaggttggaatggctgctacactagcttcagtctgttcagtcccattgacttcagtactgcttctctttgagctgacaaaggattacaggattttgcttcctctcatgtgaacaagggagaatattgtgaactgaaggtcatgtatcagcgaaaagcaggctttcctcttgtagcaattgtgcactgaaaaactacagtgcccttatgacaccacaatagttctaagcatgagcaagctgggttatgatggtgttgtggcactgctggttgctgatatatcactttcaatcggtcttgaccagattgaagctctgtatcagtatgcccaatttcagtttgagtgtggtaactactcaggggctgctgattacctttaccagtatggtgctttgtgcacaaacagtgagcgaaatgtgagtgccctctggggaaagctagcagcagaaatcctaatgcagaactgggacctagctttggaggaactcaaccgcttgaaggaaataattgattcaaagctccagaataggatatggctgatgcattgggctctgttcatcttctttaaccatatcaggtacttgaatgctatacagacaaatgcacaccatcttattaggtatctagctactgcagttgttgtcaacaaaaaggagaaggaatatgcttaaagagttgattaaggtcattcaacaggagcaccatagctacaaggatcccgtaactgaatttttggaatgcttatatgttaactatgtagttgtgggcttttgaacaatagctggagtgatatgaaacattagtgatgtagttgtgggcttttgaactgcttcaagcaggagtgatgccgttgtggtgcttttgtgactgatcatctctggagcttttgtgaatgatctagctagctatctataaatgatctagttgtgaatgatattataattgtgatgcttttgtgaatatataattgtggtgcttttgtgtttatg

SEQ ID NO: 5372 - DNA, 2138 bp, Zea Mays
agccgtcgcctctccttgctctgctcctctctctcccaagcggctctccctctatctcctcgtttctctcccctcctcttctacagccgctgccaggcaaccgaccgccgagcagcgcagccacccgagccccacgcccgccgcgccaggaaccagcgcccctgctctcgccaggacgccaggaattgctctttctatagcaagtttatgagttcagtttatattccattgaatatttgttgcagtgaagagaaatgagagaaagccttcggttgtagccttcagtttatattccattgaatatttgttgcatccgactcatctctgtttcgattccatccggtttggctcattttttaatcgagtgtgttgtagttttgtaccctaatgtcgtgggagtgctaccgaagtactgatagcatcactttaatttcattagctccgtcctggcaatcactttgggaaggtggtcagtggaataactttgcttaaaaagcttgaagcagttggtagtgaaactggaaatccttcttatcaagtgaaaattgtagactgtggtgaagtttccaacacaaattctcaggatccgctaaagggagataaagtaagctcaaagacagataacagcagttcagacagtgaaaagggtggccatcgtaccaagcgttccttgacgaaaggtgagctctagaatgttgagccttggcgctctcaccacatttgattacttggggattgagtaaccgggaaaggcgtattgcacttgttgctgctggcgctgctgctggcattgcttcaggcttcaatgcagcagttgctgggtgcttctttgccattgaaactgtattaagacctcttaaagcagaaaattcacctccatttacgactgcaatgataatattggcatctgttatatcatctactgtttcaaatgttttacttggagccagaccagcttttatagtgccagcctatgagctaaaatctgctgccggttggaatggctgctacactagcttcagtctgttcagtcccattgacttcagtactgcttctctttgagctgacaaaggattacaggattttgcttcctctcatgtgaacaagggagaatattgtgaactgaaggtcatgtatcagcgaaaagcaggctttcctcttgtagcaattgtgcactgaaaaactacagtgcccttatgacaccacaatagtaagcaagactacaggacatctatgcgaaatgcagctagccagctacactgatgtagagatcattcaggcaaattcctccagctcgagtacttggagattacatagtcttctccattgtttttctagactttgaggttctaagcatgagcaagctgggttatgatggtgttgtggcactgctggttgctgatatatcactttcaatcggtcttgaccagattgaagctctgtatcagtatgcccaatttcagtttgagtgtggtaactactcaggggctgctgattacctttaccagtatggtgctttgtgcacaaacagtgagcgaaatgtgagtgccctctggggaaagctagcagcagaaatcctaatgcagaactgggacctagctttggaggaactcaaccgcttgaaggaaataattgattcaaagaacttctcatcacctctgaatcagctccagaataggatatggctgatgcattgggctctgttcatcttctttaaccatatcaggtacttgaatgctatacagacaaatgcacaccatcttattaggtatctagctactgcagttgttgtcaacaaaaaggagaaggaatatgcttaaagagttgattaaggtcattcaacaggagcaccatagctacaaggatcccgtaactgaatttttggaatgcttatatgttaactatgtagttgtgggcttttgaacaatagctggagtgatatgaaacattagtgatgtagttgtgggcttttgaactgcttcaagcaggagtgatgccgttgtggtgcttttgtgactgatcatctctggagcttttgtgaatgatctagctagctatctataaatgatctagttgtgaatgatattataattgtgatgcttttgtgaatatataattgtggtgcttttgtgtttatg

SEQ ID NO: 5373 - DNA, 2263 bp, Zea Mays
ggcgacctgcaactgcaaggaagggaaagggggagggaggggataagaacgccgacccctgccttgtttgtgccgcagccagcgagcgcgcagacagcgaccccgttgctattccgattcccacctctcgacccaagtccgcaggccgcgggcatataaagcccatccactagcccatttcccctctgcttgcttcgcttcacctgccccctgcccacattttccttccttccctcccgtcgccgcctgaaaccgcgacagcaagggtcgtaggagcaaggacgacgacgagaaggctcggttcggctcttcccagtctctccgagggaggaaggagaggatcggagggtgcgatggcgatcgaccacgagtccccgttcaaggagctccgcctcaagaaccgcaggatcatggtgagtcacctggccggagccgctcgtccatcgccttcctatatatccttttgtagccccgagccctgccattctcgatttctcttcttgccggccaagaaaagaacgttttttttttttttttgctcctttccgttactgttggcgacgaacgcttacttacgtgcagcaatggcggcggccatgccttagattcaacgactgtttttgtccaccgcctccctcgaccctttctttgggatctccgcattgccttggcgtctcgttctgattgtctcccgtgccgccgttccccgagcaataattttttaaaacttttttttttttgagcgcaagcaaccgaatctctctctcttgcagactactattccatcttgtttgtttgccgatctatctgtgtgacggagcttttcttggcaaacagccaattcaaatgcttcgccatcgagcaaagcgagtcaactgacggaaacatggttgtccgtgcagggcggcggcggccctgaccctgagccggaggaggaggaggaggtcgccacggcggcgtacgcggggcagtggccgcgctggctgcagccgctgctttcggcgcgcttcttcgcgcactgcaggacgcacggcgactcgcaccgcagcggcgagtgcaacatgttctgcctggactgctccgccgcgggcgcgggcgcgggcgcgcgcgccctgtgctcgctgtgcctggcgcaggcccaccgcgaccaccacaccatccagatccggcgctcctcctaccacgacgtcatccgggtgtccgacatccagcgcttcatggacatcgccggggtgcagacctacgtcatcaacagcgcccgcgtcgtcttcctcaacgagcggccccagcagcagaggcctggatgcaaggccgcgtcggcgtccgccaacctctgcgaggtgtgcgcccgcagcctcctcgacaacttccgcttctgctccctcggatgcaaggtcgtgggctgctcccccgacgccgccaaggccaggagctggctcctccggcccgccgtcggcggcagcggcgacggcgactccacgtcctcctcgccgctgcgcgacgcccagaagaggcagagcttcaccccgcccacgccgcagccggcgaagcgccgcaagggcatcccgcaccgcgcgccgttcggcagcttcatcgtcgagtactagctccctctctctccgtctccacggcggcggcggcggctgcattggcagtggcactacacagcacacgcgcgggcaatgggactgggacggccaccacttccttttgccgtgacacactctggctggctggctggtggtgcttctcgaggtggatgccattcggtcgctgctggctttgctttccacaaagggaggggaggaaagaaaggttgaggaagaatcaaaacactggcttttcatcactgttgctaggctctctgatatagaaatatatatgtacatttttagccttgtcctgtttcaaatcatcatagtggagcattatagctagctagctttttttactagattattcgtctgaagaaaagaaaccatggttcaggagatgaccagctagtgcaaggtacttactttatactagtaataagctatggtggtgggtgatgatggctgatggatgccgaaccacattgttggcacttgatgattagtgtgccaagaagaggaagcaaggaaatgccgtcacgttactgcccgggcaaggttgcgttgatgcaaagccactctgaatgcgactggccggcatcgctaaacgccctgattattattcttgttcattctaatctaatcctgggccattgaaccgggccagtttg

SEQ ID NO: 5374 - DNA, 438 bp, Zea Mays
tccttcgtgtattcctcctcattcacgtccccagtcacgacgccgtacgcgtagactcgacagctcacgccgtattgccctcttgatgctcgacatcgccaagtccagcgctcgcctctctagctcgactcatcggacctgccctttctcagcttgctgtctcccagccgtgtgccatgcctctgctcgacatcgactagcgtcgctagccatcgcgcccacctgctggtcgccgagtttgccgacgctcgtcagtgtcgcatccaacctcgcagagctcgacaccaccaagatcacgttactggtggatcaatcgcttggtgaaacaatttcctgaaggctggtcatcaccctgaagacttgtgaaattttatttcctcagtcttcggctcttctctgcaacaaagggtttcaaggaaggcaatcgagttcaaggaa

SEQ ID NO: 5375 - DNA, 989 bp, Zea Mays
ctctgctatataaaaagaagaaaatgagtggggtctcacatcgtaccagtctgccaagaaaaatattaaagaccaaaaagaccccacggaaagaagagagatagcaaaaaagagagaaaaaaggaacacaaagagtcacggttgttcaacatacaaagcaaagatatccttggtgatccaggagtgcagcagggggaaagagcattcggtccatcgtgtgtctgaatttgcctagtttttctggaggtttgaatccttggggcacacctggcacgaggagagcagaagatagggagttcactgcaccttttgtcgacgatggacttcttgaggttgttggcttccgtgacgcctggcacgggctggtcctgctggcccctaatggacacggcactcgcattgcccaggcccataggatccgctttgaattccacaaaggcgcagcagagcacacgttcatgagggttgacggagagccctggaagcagccccttcccaaggacgatgacacggttgtggtggaaatctctcaccttgggcaggtcaccatgctagcaaatgagccgtgcaggtccaagagcgtcaacgaccagtcgtcactgtcgccggcgcacgacagtcatggtgattacaatgatatcgctgaggaggacgaagacgagtgggaggacggcaggaggaagtttggggcggcagatacatttaagattcctgacgagattgacattgctcatttcagttgagctttgactagtgcatcgtcgtgtgcgttctgatcatacgagtatggtttggtttataaccatctcctttcttttgatttcatatatttgcgatatgattgttgcagccatgtgtaagtgaatcctaggtaaccaagtgctgcgttgctatatatgaccaatgtatgtatagattcagtggaacggtaaaaacacgcgaactctacggttttctccttaaaaataaaaaagaaaataaaataaaaa

SEQ ID NO: 5376 - DNA, 1325 bp, Zea Mays
ttcttggtgaggtctacgtgaaggtagtggaacgagatcaccttccgagacgagaaaggaatcactcgttttcctccgggcacattcctccgagttcggacggcaacgccttttatggccgccgttgcctcctccttctcgcggttctccttccgctgcgccgtctgcccctccccgctccgcgtccgcttttcgcagccccatccgcccgcgcggctccgcgtctcctccaccgtcgttgctctccacaagcgcaaccccaagcggctcaagtacgccgccgagcgccagttcacgagaggggatgccgggttgctgcgggtggaggtggagccctccggcggggacttctggaagcttgaccccattatcgacctcatcaatcgcggcgccgtcggggtgatccctactgacaccgtctactccgtcgtctgtgacctgagtaacaatgaatcgattgagcgccttcgcagactgaaaggcattggagactccaagcctctcagcatcctgtgtcgctcattacgtgacatcgatacctacacaacaggatttcctcaaggcactaaccaagggcaagctaacatttttcgtgttgtcaagcgtgcaatacctgggccttacacatttattttacctgcaagcaagcagtttcctaaacaatgtataaagcatggttcttccacaaggtatgcaaaaaggaggcaggttggcgtccgaattccagatgatcccatctgccaggcaatattgcaaaatcttgatgaacctttgatatgcacaagtgtcaaatatctatcggaggatgaatggatacttgatccagtaatcattgcagatctttatgagccactgggtctaaagttggattggatggtagcaaaagatgaagaggaggacgaggcacagtcgatgttttctttcaaatcagcttgaaatttgcttcgcctgacctgtatgggctggcactttgctatggtcccccaaccgaagcgtcttctttcaactgcatataggatgtcagttgttagctgtaagcatagatgtcgaacacgaactgcgtgctgtaaatatgcaaggcgatgtaagcgaactggcagaatttgctcagtagcaacctttgctggaggtgatggaaagtttcctgctggttttcttgaactttgccgtgtacgcctaccagaatttccgtcctggaaggttccatattattccaattcatcctgcttctgtgatgcttttaattcgagaagcataactttttgggataattatgattatatccttcgctagacttgtaattattattttaccctctatttttt

SEQ ID NO: 5377 - DNA, 2186 bp, Zea Mays
cttgcactcgggagcgctatgtcaagctagggtataaagcacaaaaaagtgatcctctcatctaattgagactgttgagtatctcacatattcttgtgcttgcttgctgggatcggctttggctcaggagcatgagcgaaaagatatgattcttcatttctccttctggctataagttttagtttctttatgatgggaaataaaactggtaagcctgtcttcagtgagctcaaatccacagagtttagtttattggagagcactctagtacaggatcattgtgcaatcccgacttgtgtaccattggattttctgaaggccatcacgagtgatttctctaaggagcaagagctaggaagaggtgggtttggagttgtttataagggccttcttaaaaatgggaaggcgatagctgtgaagaagctttctgaaatgaacctagatgacgatcagttccataatgaagttacttatcttttcgggttgaagcacaaaaatattgtccagctaaaagcttattgtgctgaatcacggtgggaagcaatcgaattgcgcagaaaatatgtcatggctgaatctcggaaaaggctgctgtgctttgagtgtataaataataagagccttgataagcacctttctgatatggctgcagcagttccagaaccacaagtgggtgatctcaccaatttgttcatttaaatgttcctatacagctgaatctcatggggttgagtggcatatcagatatgagataatcaaaggaatttgccatggtttgcattaccttcacacagattgccaaattgttcatttggacctaaagcctgagaatatattgctagatgacaacatggagccaaaaattacagattttggtatgtccaggctctttggtctacaacaatccaaaatcatcaccaaaacttgtggaggaacacttggatacatggcaccagaatacttactaaaagggttgatttcagtgaaggccgacatattcagtttgggcgttataatcatagaggtgatgaccggaggccggaattatcccacttgtgaaaaatcttgcgagcaattcgctgttgatgtggttggacgttggaggaagaggttattggaggaggcaggaaggcttaccaaagtagatgtcacgaacacggacagagggccacccaaaactctggaggccgcgacagggcttacaggccaccccaacctcgcaactagatcatttcttgacaggttccgccgaaccatcgtgatagggatgctgaagaaggccctgaaaatccaggacgtatcgcagttggagcagctcctggccaaggaggtgctgctggagctccacaaaatcggcacgaatgcaactggaaacagatcgttcctggagaggctccacgcaagcatcaccatggctacgctggttcaggcgctgcattccttggacttggatccatcggcggcgctgcgtatggaggtgctgttcttggcgctggagaatatgcgtggaaaaaacaactcaaggcgaagaagcgaggacgtccttgagctggaggagcggccagagcagatccggtcggtgctggaggctggcaccagggccaggctcagtgatgaggaacacatgccgtcggtgtctgtgcaggctgaagaccaggcctttcccaaaccgaagttggccaaagtacgcgccaccgccccggtgtgcgtgtcagcagtgtggttggcggccggcataggattcctgtgtggattcaccctaggagagatgaggggattaaggcggacgagggtccacgaacgcacgtgatgccaatgtgcccacatgacatggccagaaaatgtcactgcggtggaccatgcatgcacgaattaaggagcaccagttagaatacgtattctagattcattttacaaattctgtatttaaaaggaacttgtgcattgtgacagaggcggcggactggatcaggttgtattgtttctgctggtgtcctgtcgtatgtataagccacggagtgtatcggatgaaattgaacagagaaatgtgcaatatagaaccgtgttgagggcagcctttcatgcttctgctaccgtttctatattgtatcctgattgcttcaaacctcccggcgattctcctgggtgtattggtttgtgtgcggcggcgaataatgatatcacgg

SEQ ID NO: 5378 - DNA, 2027 bp, Zea Mays
accgtccctgcctttggcaaccaccccgccccaaaatctctttctccgctgcgctgcaaacccaccgcttccaccatcgccactcgtcaccccttgctcccatagtccccataccatgcccgacctccacccgccggagcaccaagtcgccggtcaccgcgcctccgccagcaagctgggcccgctcatcgacggctccggcctcttctacaagccgctccaggccggcgaccgtggggagcacgaggtcgccttctatgaggcgttctccgcccacgccgccgtcccggcccgcatccgagacaccttcttcccccggttccacggcacgcgactcctccccaccgaggcgcagcccggggagccgcatccgcacctcgtcctcgacgacctcctcgcggggtttgaggcgccctgcgtcgcagacatcaagatcggcgccatcacgtggccaccgagttcgccggagccctacatcgccaagtacctcgccaaggaccgcgggaccacgagcgttctgctcggattccgcgtcttgcgtccgagtcgtcggccccgagggcgccgtgtggcggacggagcgcccggaggtgaaggctatggacaccgtcggcgtccgccgcgtgctccggcgctacgtgtcatccgcttgccgacgaggggatggactgcgcgctcgcggcggcggtgtacggaggaaaaggtggagtcttgtcacagctgcgcgagctcaaggcatggttggaggagcagactctgttccacttctactcggcgtcgattcttctgggctatgatgctgctgcagtcgcagcaggcggaggtgggggtggggtaacagtgaagctggtggactttgcccatgtggccgagggtgatggggtgattgaccacaacttcctgggcgagctctgctagctgatcaagttcgtttctgacattgttccagagactccttagacgcagcctttgggtccttcttaagagaggatcctgacatttttgatttgataacaaaggaagcactttcagctgcaaaaaaagaaagcagcagtgaggatgaagatgacagtagtgaggaaagttcggatgatgagccaacaaaagttgaagaaaagaaggctccaaaagtatcagaaaacattggatctgaggatgaatcttctgaagacgagagtgataaagacagtgaagagcctcagtttctggatcggaggagcatccccgcctaggtctctgcagccatggttcgcggatcgctcggcaagcttgcatcgcgcgccctctccgtcgccgggagatggcagcaccagcagctccgccgcctcaacatccacgagtaccagggcgcatagttgatgggtaaatacgggatcaacgtgcccaggggcgcggcggctgggtccgtacatgaggtcaaggacgccttgaagaacatgttccccagcgagaaagagatagttgttaaaagtcaaatccttgctggtggccgagggctgggaactttcaaaagcggattgcaaagtggtgtccatattgttaaggctgaggaagctgaattgattgcaagtaaaatgttaggccagattctgataacgaaacaaactggtccagagggaaagattgtgagcaaggtctacttgtgtgagaaactatctcttacaaatgagatgtactttgccatcacccttgataggaaaactgctggtccgctcattattgcttgcagcaggggaggaaaacactatagttgacctcaatgttcaaaggatggccagggctacatcatcttgttgttgacgggttccgtgtgttcaatcgccgagcagaaagccaggaacagaacttaggcgttggcgattggcatctccctcccctaagccatggccaccgggcggcccgtacgactcgtgctggatgcctccctcctcctcgacccctcctccaccagggaggcggcggcggtggctctgcggcccggggtagaggagctgttgcggcggttgcgctactccaacctgactgtg

SEQ ID NO: 5379 - DNA, 2123 bp, Zea Mays
accgtccctgcctttggcaaccaccccgccccaaaatctctttctccgctgcgctgcaaacccaccgcttccaccatcgccactcgtcaccccttgctcccatagtccccataccatgcccgacctccacccgccggagcaccaagtcgccggtcaccgcgcctccgccagcaagctgggcccgctcatcgacggctccggcctcttctacaagccgctccaggccggcgaccgtggggagcacgaggtcgccttctatgaggcgttctccgcccacgccgccgtcccggcccgcatccgagacaccttcttcccccggttccacggcacgcgactcctccccaccgaggcgcagcccggggagccgcatccgcacctcgtcctcgacgacctcctcgcggggtttgaggcgccctgcgtcgcagacatcaagatcggcgccatcacgtggccaccgagttcgccggagccctacatcgccaagtacctcgccaaggaccgcgggaccacgagcgttctgctcggattccgcgtcttgcgtccgagtcgtcggccccgagggcgccgtgtggcggacggagcgcccggaggtgaaggctatggacaccgtcggcgtccgccgcgtgctccggcgctacgtgtcatccgcttgccgacgaggggatggactgcgcgctcgcggcggcggtgtacggaggaaaaggtggagtcttgtcacagctgcgcgagctcaaggcatggttggaggagcagactctgttccacttctactcggcgtcgattcttctgggctatgatgctgctgcagtcgcagcaggcggaggtgggggtggggtaacagtgaagctggtggactttgcccatgtggccgagggtgatggggtgattgaccacaacttcctgggcgagctctgctagctgatcaagttcgtttctgacattgttccagagactccttagacgcagcctttgggtccttcttaagagaggatcctgacatttttgatttgataacaaaggaagcactttcagctgcaaaaaaagaaagcagcagtgaggatgaagatgacagtagtgaggaaagttcggatgatgagccaacaaaagttgaagaaaagaaggctccaaaagtatcagaaaacattggatctgaggatgaatcttctgaagacgagagtgataaagacagtgaagagcctcaggcatgccatcatttaacacctcagctcgcgagctgaactggctcgctcttttattgagccagaaaaaaactccgctcgaccttgttctaagcacagtttctggatcggaggagcatccccgcctaggtctctgcagccatggttcgcggatcgctcggcaagcttgcatcgcgcgccctctccgtcgccgggagatggcagcaccagcagctccgccgcctcaacatccacgagtaccagggcgcatagttgatgggtaaatacgggatcaacgtgcccaggggcgcggcggctgggtccgtacatgaggtcaaggacgccttgaagaacatgttccccagcgagaaagagatagttgttaaaagtcaaatccttgctggtggccgagggctgggaactttcaaaagcggattgcaaagtggtgtccatattgttaaggctgaggaagctgaattgattgcaagtaaaatgttaggccagattctgataacgaaacaaactggtccagagggaaagattgtgagcaaggtctacttgtgtgagaaactatctcttacaaatgagatgtactttgccatcacccttgataggaaaactgctggtccgctcattattgcttgcagcaggggaggaaaacactatagttgacctcaatgttcaaaggatggccagggctacatcatcttgttgttgacgggttccgtgtgttcaatcgccgagcagaaagccaggaacagaacttaggcgttggcgattggcatctccctcccctaagccatggccaccgggcggcccgtacgactcgtgctggatgcctccctcctcctcgacccctcctccaccagggaggcggcggcggtggctctgcggcccggggtagaggagctgttgcggcggttgcgctactccaacctgactgtg

SEQ ID NO: 5380 - DNA, 3429 bp, Zea Mays
cctttcgacatgtcattttcaggttgcttgcctcctgcaatccccctcttgcacagttgcacacaccaacacagatcttgagagctcgcgagcatggatctggtgtctggggcgattggcaagctcgcccccaagctcctccagcttctgcaagatgagtacaacctgcagaagggagtgaggcatcaaatccagtttctttcggaggagctggagagcatccatggcgccctccgcaaggtggctgccgtgccaccggaccagctggatgagcagaggatgggcaagctgttcgtagatgccaaggctcgccgcgacatcgcaagcgccattgaggccatcaaggggcagctacagcaggtgtccgagcggcgtgataggtgcaaagtcgatgatattgtggccaagcttgccgcaagctcaacaattgatcctcgtctcgaggccatgtacagagaggtgacacaacttgtcggcatcgacggggcaatgggtgagctgataccgatgttgtccctcacgggggatgatgtgtccaacaaggagcttaaggtagtctcggttcttggaattggaggattgggcaagaccactcttgctaaagtggtgtatgataagctcaagtcccagttcgattgtggggcttttgttcccgttggccgaaatcctgacttgaagaaagtcttcagggatatccttatggatcttgatgaacacagatacacggatctcaacatgttaatattggatgaaaggcagctcattaacaaactccgagacttcctcgagagtaacaggtacatcattgttattgacgacgtatgggaagcaaaatcttgggaaacattaagattggctttcattgacaataataaaggcagtagaataatctcaactacccgtaaatctgaagtcactagtggtaacaaggtttacaagccaaaaccactttcagatgataactccaaacgattattttatacgaggatatttggtggagaagacaaatgccctgacaatgaagtggatgaggtatctaataaaattctaaggaaatgtggaggaataccactagctatcatcacaatggctagtttattggtgggtaagtcatggggacaatggtttgaggtctgcaactctattggttttggcgataaagatattgagcaagtagacaaaactatgtcaatattgtctcttagctactatgatcttccctgtcatctaaggacttgcttattatatctaagttcattcccagaggattacattattgataagaattctttgatatggaagtggatagctgaaaattttgtccataagaaaccaggagtttggttatttgaggttggagagggatacttcaatgatcttgtcaacagaagcatgatccaggcagtggcatcaaaagacagcagtataatagatggttgccgcgtgcatgatatggtgcttgatctcctccgttctttggcacgcgaagaaaacttcgtgactgtcttatataatgatgaggacatgttgtcagaaataagcagcacgcgtaggttagcccaccaaaagagtacaatggatgctcatctgcacaattataagcagggcatgcaacatttgaggtcattaacagtctacaggtgtggtgctgataaggagctctcgtttcttctgagctttaagctcttgcgagtcctagatttagagaatgtatatactacgagctggcacaatgctaggcatattgggaatctaattcatctgaggtaccttgggttaaaacacacatatatgcctgagctaccagaagaaataggagctctgaagtttctgcagacactggacctggtggagaatttcttcatggaggaactgccatcgagcatagggcagctaacacagttggtgtgcctacgtgcttcagggttgataacaagcatgccccgtggggtaatcaaaacgctcacggccctggaggagttggcagtacaatgtcaattcaacgagcgtttctgcaggtaccaagggcaattcaaggaactaggcagcctgagtgaacttagggtgctaaagattaaggtcattagcacgatggaacagagcatactgccagatcttatgcaatctctaggaaatctccataagatccagagtctaaaactggagagtcatcctggttgcggtcgtgccgacaatgcaatgtttgatgcaatggcgctaccgggacatctcagacatttgcttgtgtcagagtactttgtccatttgtacaggctaccgtcgtgcattaatcccctatgccttgttaaactctcccacctggaattatatgtgatcgatatggacgagcatagtatgcaaatcctcggggagttggccgagctccgccatcttgtgctgtcaacgagatccacagtaagagttaataacgttgccgctgatggtttcttccacaagttgagatcctgcaagttttatacctcgatggtcctgtttgtgctcaacgaggactcgagtgtctcgtttaccctgtggaacgggacagatgatctagtgctgagctatggaaagaaggatggtgagtgtccaagtgcgccggccgtcatgccaaacctagaagagcttctgtttagcgcccagccgaagtggtccctgatgaaatgccaaggtagccatggcaacctcggcctggagcacctccgttcgcttcagaaagtcacagcggtgatcagctgcgaactgtatatgtttgaggcggagaagatggaagcagagctcggcatcagctgcgaccggtatttcgttgaggcgtgggtgatggacgcggaggatgggctgagagatgcgatcggtgttcatcccaaccaccctactcttgttctcggtcgcaagaatgaaggtgtcctcgcaagtgatgtgtcggacgatactgatgctgattcagccacaagaagaacatgaggttggacatggattattatagggagtggctcctggataaagaccttctctaatagcgaaagtgtacgcggcgtaaaagagcaacccgaaggtgataggagtaagcgctgaagctattgccagagaggttcggcttgatatggtaacaaagaccaaggacaataccaacttaaagggtgaaaaagaccacttattccgtgataatttatattacaattacgagtaaatatcaagggcatgaatgtaattttgtttgggctgtgtcccgtgcctataaatatatgaacagtagtaccgtattgttcaggctggattgtaatcactcccacgtcattctcgctcttacaccttttggcaagccgaaagtacaattataatacaactattggcaatgtttattcatgctcaatagagatgataataatgataaatcattggtatatgacaattattatctttatccctccg

SEQ ID NO: 5381 - DNA, 4834 bp, Zea Mays
gacaaagcaatcacgccacgtcagcgtcaaccccatggctcggctcttccacttatctttcccctttcgacatgtcattttcaggttgcttgcctcctgcaatccccctcttgcacagttgcacacaccaacacagatcttgagagctcgcgagcatggatctggtgtctggggcgattggcaagctcgcccccaagctcctccagcttctgcaagatgagtacaacctgcagaagggagtgaggcatcaaatccagtttctttcggaggagctggagagcatccatggcgccctccgcaaggtggctgccgtgccaccggaccagctggatgagcagaggatgggcaagctgttcgtagatgccaaggctcgccgcgacatcgcaagcgccattgaggccatcaaggggcagctacagcaggtgtccgagcggcgtgataggtgcaaagtcgatgatattgtggccaagcttgccgcaagctcaacaattgatcctcgtctcgaggccatgtacagagaggtgacacaacttgtcggcatcgacggggcaatgggtgagctgataccgatgttgtccctcacgggggatgatgtgtccaacaaggagcttaaggtagtctcggttcttggaattggaggattgggcaagaccactcttgctaaagtggtgtatgataagctcaagtcccagttcgattgtggggcttttgttcccgttggccgaaatcctgacttgaagaaagtcttcagggatatccttatggatcttgatgaacacagatacacggatctcaacatgttaatattggatgaaaggcagctcattaacaaactccgagacttcctcgagagtaacaggtacatcattgttattgacgacgtatgggaagcaaaatcttgggaaacattaagattggctttcattgacaataataaaggcagtagaataatctcaactacccgtaaatctgaagtcactagtggtaacaaggtttacaagccaaaaccactttcagatgataactccaaacgattattttatacgaggatatttggtggagaagacaaatgccctgacaatgaagtggatgaggtatctaataaaattctaaggaaatgtggaggaataccactagctatcatcacaatggctagtttattggtgggtaagtcatggggacaatggtttgaggtctgcaactctattggttttggcgataaagatattgagcaagtagacaaaactatgtcaatattgtctcttagctactatgatcttccctgtcatctaaggacttgcttattatatctaagttcattcccagaggattacattattgataagaattctttgatatggaagtggatagctgaaaattttgtccataagaaaccaggagtttggttatttgaggttggagagggatacttcaatgatcttgtcaacagaagcatgatccaggcagtggcatcaaaagacagcagtataatagatggttgccgcgtgcatgatatggtgcttgatctcctccgttctttggcacgcgaagaaaacttcgtgactgtcttatataatgatgaggacatgttgtcagaaataagcagcacgcgtaggttagcccaccaaaagagtacaatggatgctcatctgcacaattataagcagggcatgcaacatttgaggtcattaacagtctacaggtgtggtgctgataaggagctctcgtttcttctgagctttaagctcttgcgagtcctagatttagagaatgtatatactacgagctggcacaatgctaggcatattgggaatctaattcatctgaggtaccttgggttaaaacacacatatatgcctgagctaccagaagaaataggagctctgaagtttctgcagacactggacctggtggagaatttcttcatggaggaactgccatcgagcatagggcagctaacacagttggtgtgcctacgtgcttcagggttgataacaagcatgccccgtggggtaatcaaaacgctcacggccctggaggagttggcagtacaatgtcaattcaacgagcgtttctgcaggtaccaagggcaattcaaggaactaggcagcctgagtgaacttagggtgctaaagattaaggtcattagcacgatggaacagagcatactgccagatcttatgcaatctctaggaaatctccataagatccagagtctaaaactggagagtcatcctggttgcggtcgtgccgacaatgcaatgtttgatgcaatggcgctaccgggacatctcagacatttgcttgtgtcagagtactttgtccatttgtacaggctaccgtcgtgcattaatcccctatgccttgttaaactctcccacctggaattatatgtgatcgatatggacgagcatagtatgcaaatcctcggggagttggccgagctccgccatcttgtgctgtcaacgagatccacagtaagagttaataacgttgccgctgatggtttcttccacaagttgagatcctgcaagttttatacctcgatggtcctgtttgtgctcaacgaggactcgagtgtctcgtttaccctgtggaacgggacagatgatctagtgctgagctatggaaagaaggatggtgagtgtccaagtgcgccggccgtcatgccaaacctagaagagcttctgtttagcgcccagccgaagtggtccctgatgaaatgccaaggtagccatggcaacctcggcctggagcacctccgttcgcttcagaaagtcacagcggtgatcagctgcgaactgtatatgtttgaggcggagaagatggaagcagagctcggcatcagctgcgaccggtatttcgttgaggcgtgggtgatggacgcggaggatgggctgagagatgcgatcggtgttcatcccaaccaccctactcttgttctcggtcgcaagaatgaaggtgtcctcgcaagtgatgtgtcggacgatactgatgctgattcagccacaagaagaacatgagggtgagggctcttctgttcacctaaacgcgtgtaaacagccgactacacgcgttcaaacactaaacggtatgtttgcttacagcttaggccctagtcactaaattaaacaccaaacacgtctaaatggtcaaaccagtttaaaatagtttaaacggtggcattaaacagtggctaaacgggtgtaaacgccaaaacatgtgttgcaacggcagtttcatttacaggccgtaagcaatggtacgctttcccggcccatttggtgctggttaggttaagggtaaatgggtcggttcggttaagggtggattaaagggcattagagagaattaatctcttgctagttaaatttgaataagccgagatttaatctcctaaatccctcttcaatccgaatgtcgtaaccgaacaggaccttaagggattttttcaacacgttatcaccagtctagcggcttttcaatgggttccatgtcgtatatagatagagatgcgtttggtttaatttattctctgtttctacattcaaaaagcaaaagttaaactccgtttggcgcagctccttgtgacgaataatgactccactcggcgatctgatgcgtgcctcctctcagtctctcactactccggcccgttcaaccaacaccctcaccatacaaagttacaaaccaagcaacaaagccacagcaccagagatattttctaatgtttatgtgaattaattagtttatagttagactaatagatatattcgagacctcttacaggcgatcgtttgaactcttccaaaacaataacatatgcatattgatcatggtggagaataatatatgtaaaaataataatatgcatgtggcatctttaatggtgaagcatgcatttccatattcatgaaatatatgacagtcaaccacaaaaatcgttgtagtgcggttaatttgcatataaacaatcttagagacaatacaaacaaatcttatataatctattgtttcacaacaggttgaacaaaacaacttctaattttttttcaaagtcattagattttttataatagatagctcataggaggttttgttttttcgcagtagaccgctgaaccaagcacactctaggccagtcgatcgacgtgctcttgaaagcgaatttcttatgtgcacttagctttgggcatattttcgaataacactatgcatcctaatttagtttgagatatgtatgagtgcatattttcatctaacaacattgtttgtctagttgtcaaaactcatcaaaagacatgtactcctccattatattccacagctagactagacactagagaacgtctaaccatatgttttcagttggacatggattattatagggagtggctcctggataaagaccttctctaatagcgaaagtgtacgcggcgtaaaagagcaacccgaaggtgataggagtaagcgctgaagctattgccagagaggttcggcttgatatggtaacaaagaccaaggacaataccaacttaaagggtgaaaaagaccacttattccgtgataatttatattacaattacgagtaaatatcaagggcatgaatgtaattttgtttgggctgtgtcccgtgcctataaatatatgaacagtagtaccgtattgttcaggctggattgtaatcactcccacgtcattctcgctcttacaccttttggcaagccgaaagtacaattataatacaactattggcaatgtttattcatgctcaatagagatgataataatgataaatcattggtatatgacaattattatctttatccctccg

SEQ ID NO: 5382 - DNA, 2525 bp, Zea Mays
gctcctccccggaccgccccactcgtgtggaaggccaaaccggcaagtgaaggcgaacttgcgaaagccagaagtaggacgaaacggaggcgcaccgcaccgcagctagcccacgccaccacctcctccagacctccacctcattctctcccaccaccacctccaccacaaagttcgcgttgcgccgcgcccggccccgcccagccgcgcggctcgtctcgtctcgtccctcttcgaaatcctcccacgcaatcgcctccccgcacccctgcccgtgtgacgcggcctcgcactgccaccgccccccaccccggtcccccggggcgccgatctcgtgtcgcgtcgcccgggcgaggaggaggtgggaggatgggggcgtgcgtgtcgcggcccagcgcgtgcgtgggcaagccccactcgccgcggtccggcgatgccagcggccgctcgggcggcgggggtgggacgcggcggaggcgcagccgccgcgtagggaaggggcggaggacggcgccgtcgcgcgccgcgtcgatggaaaccattcaggaggccgaggtgcccggctcgccgtccgccgccgccgccgccgccgatcaccggacgtacagcaaccccgcgttccaagtgtccgggagcattgaggaggactggtacgattccttggcgatgagcgagtcggatgccgaagacgatttccacagcgtgcaagatgatgctttctcattgaatggcttcgagaatgaagctgcattgagcatgaaagatggcaacggtgggagcttcaatggagctgcgcaatcaggcgagcagcaccataaaaagccaaagtccagcgaactgtcgaaggggagctcggagaatggtgtaaggacgtccattagccatgaagatgcggtgagtgtttctggtgcggataccacgcacggtggaggtaggatactggacaattgcgggcttctgccgaataattgtctgccatgcattgcctctgctgttggggtgaacgagaagaagagaactccctcgagccctactcattcaatgaagatgccttctttgaagctttccttcaagaagaagtcaggggaagctcatccatcttccacactactatcaacgaaggatttcctggaaaggcctctagcaggttctcaagtacagttatgcttgctggaaacaaatacgctcaacagttggtctcgtattgatcctggtacattccgggtccgtggagcaaactattttagttttgaatgcacttttccagggataagaagaaagagcttgctccaaattatgctgcatattatccatttggagtcgatgtgtacttatcaccacagaaactcaatcatatatctcgatttgtccaacttcctgacattcaactctccagcaagctcccacctcttttggtggtcaatgtacaggtcccattatatccggcttcattatttcagaatgaaacagatggggaagggatgagctttgttttgtactttaggctttctgatggttactcgaaagagcttccacattcattcattgaaagtatcagaaggctggttgatgatcatgtagagaagataaaagcattcccaatggaaacaactataccattccgagagcggctgaagatacttggccgggtggctaatctggaggatcttcctttgagtgcagcggagaggaagctaatgcatgcctataatgagaagcctgtcctttctagaccacagcatgagttttacctgagtgataactacttcgagatcgacattgacatgcacagatttagctacatctcaaggaaaggttttgaaacatttttggacaggctaaaagcatgcgttttagatgttgggctgacaattcagggaaataaagctgaagagctgcccgagcagatcttatgctgtgttaggttaaatgggatagattacaccaaatatcagcctcttttgactcacggtgcctgaaatcaaggcttacaggaatcacctaacctttaatttggatgctgtgaggtaaccataactggaccagactcctggaaatttcagaccagagccgctgtcgactatcacagcttctgccgaaacgccatcgtccgagcttagttcacacaagtaacattaacagagggtcaatcactcagtgaccattggctaatatagttgaatccgtggtgctgtgctagtatagccgtttctttctgcaaacgtggagaaaaaaaggtgggagactgcggtacatgtaaatgtgtaaatcattgctggatagcttcggttgcctccggcggcagattcagggaaaaaattaggagctgaacaaaaacagtacagcgtgattgatcgctttgctcggctgcgatgtggagccaggacacattgatttggtacaagcatatgtgattgactgattggtttggccgtatgcaatgagccagactgacagggaacgatgtgatgtttggttgactggattaataagatgaaaaaaataaaaaaatgttatatagcaag

SEQ ID NO: 5383 - DNA, 1427 bp, Zea Mays
tcgaggtttttcttgatctatgtgaaaggtttttatcaggcaatgcctgttggttgttttaccctgcaggtcaagtttttttatcttatcagtcaccaccgcatgtataagtggatggaagtcagaagagtttgcaatcatgaaattgccagcacggcaacgacagaatgacaggatccacacagttgcttcaccagacagggagtgccctggtagaggtaacaacaacaacggagttccacagacctatccggatgacaagaaaggctcttcatcagggagtgaggggtccatctggccgaagtttgaaatcaccctgtcaaacagggaaaaggaagaggatttcctggtgttcaaaggatccaagctgcctcaaagacccaagaaaagagctaaggtcatccagagaaccgtcaatgtattttgtatgcccaggaacgtggctatgtgacttgactcttgaaagatatgaagtccgggagaagaaggtttccaagaagcgccccaggggattgaaagctatgcacgacatggacagtgactcggaataaataaaagaagatcactgaacatgagaagctgaatattagaaagaaggccaggacagatcctgcagatggaggccgacgagaaaacgtcctgatggaatgaatggccgtatcaacgattcgccacttctcgtgattgctactggagatcagtttgttccaaaaggacttatggagatcggaggacggccgaaatgtcaggaagctgcatggaagaacagaagagagccgcaggagctggaattcctggacattactattcagttccctctgtaaagcagcaacgctgttttgcaagcctcccatgctaatttcgcgctgccaaatattagcgtgatcgcgaagctagccagtcctggcgcgtctagtttgccgggttgtctgacaacaaaagttagtatgaatatgaaagggccttccttaatgttttttcccacttggtgctgtataaaggttcagtgtatattccattcaggagaatgagaaaaagttcaacactccagtgtgggtggattcaaaacaggcgacttttaattttgaaagtttcagtagatttgttagtttatagtttatattttgaaagtttcagtagtgtccaatggaactcgatgtgtaattcaaaacaggcagacttttaattttgaaagtttcagtagttttattagtttatattttatacagacctactattttcgtctaaaaaagagagaaattcatattagacactagaaaacttttttcctatttaacacttcggttatttcagaccaataacggtgttatgttctagttttacccctattttttttctaaccatgatatttccttttgctagctaaagaaaatatgatagttggaaataaaaaacatcaatagcca

SEQ ID NO: 5384 - DNA, 1688 bp, Zea Mays
ctcctcacctggcatccagagaggaagggaagggaggaactcgggggcacacagcacagggggtcgtccggaatttcctctgcttccgcttaccaccgaaacctctgtcttgaaggaagaatccgttcctctgcttgatctgtattcttatagtggagaagagaagccgaggacgattaatagagctggaaggtgaattgacgcttagtatttgaagctcgtcgccaaatggagaaagaggcgaggaaccactaccgcacgcggggatcctcgcgcggcagcggcggcggaggcaccgctgccgagcgcgacctgctgttacagtggggcaaccggaagcgcctgcgctgtgtcaaggtgcagcgccgcgacgtcgaggccgccgccaccgcggccgccgagaaggccgccatcagccagcgccgcgccgcggccgcagccgcagccgcgcagcaccacccaaccggccacacccaccaccgcgttctcaggaagtcagaagagtttgcaatcatgaaattgccagcacggcaacgacagaatgacaggatccacacagttgcttcaccagacagggagtgccctggtagagggaaaaggaagaggatttcctggtgttcaaaggatccaagctgcctcaaagacccaagaaaagagctaaggtcatccagagaaccgtcaattttgtatgcccaggaacgtggctatgtgacttgactcttgaaagatatgaagtccgggagaagaaggtttccaagaagcgccccaggggattgaaagctatgcacgacatggacagtgactcggaataaataaaagaagatcactgaacatgagaagctgaatattagaaagaaggccaggacagatcctgcagatggaggccgacgagaaaacgtcctgatggaatgaatggccgtatcaacgattcgccacttctcgtgattgctactggagatcagtttgttccaaaaggacttatggagatcggaggacggccgaaatgtcaggaagctgcatggaagaacagaagagagccgcaggagctggaattcctggacattactattcagttccctctgtaaagcagcaacgctgttttgcaagcctcccatgctaatttcgcgctgccaaatattagcgtgatcgcgaagctagccagtcctggcgcgtctagtttgccgggttgtctgacaacaaaagttagtatgaatatgaaagggccttccttaatgttttttcccacttggtgctgtataaaggttcagtgtatattccattcaggagaatgagaaaaagttcaacactccagtgtgggtggattcaaaacaggcgacttttaattttgaaagtttcagtagatttgttagtttatagtttatattttgaaagtttcagtagtgtccaatggaactcgatgtgtaattcaaaacaggcagacttttaattttgaaagtttcagtagttttattagtttatattttatacagacctactattttcgtctaaaaaagagagaaattcatattagacactagaaaacttttttcctatttaacacttcggttatttcagaccaataacggtgttatgttctagttttacccctattttttttctaaccatgatatttccttttgctagctaaagaaaatatgatagttggaaataaaaaacatcaatagcca

SEQ ID NO: 5385 - DNA, 2210 bp, Zea Mays
tcaggactcagggtcatccccgtttctctcctcgagtccccacccccaggtacggacactctcctactccgcccggcgcccatccccgcgcacgcccagcagtccagccggaggccagatcaaagcgccaccgccacgccgcacttagctaatcccgccgctgccccggggtcgctaggaggagatgaagcccaaaagcctcccgttcatcgccttcgagcacaagcgggatgcgtacggctttgctgtgcggccacaacacctgcaacgttacaaggagtacgctggcatctacaaggaggaagaggaggagagatccgatagatggaagaattttctggagaggcagcctgagtcatctggacaggatgctggtgataatgctacgggtgatggttctgaatcactgcatgagaagaccgtagcagggccacagaagattcaaatatggacgccaattagatcgtccctgagcaacattgagcagataatgagcctgcgcatcgggaagaagcaatcttctgctggcaagcagcaagcaaaggacggaacccatcacgtgaaaggtgaagagagcaagttgtcggaggattcagatgacgaattctatgatgtagataaggttgatctgagccaagaagcgcaatcgagtgatactaggaatgctgatgttggaagcaggaaccaagaagaaaattacatttcaagggaagagttggagtgcctggtccatggtggactgccgatggttttgaggggagagctatggcaagcttttgttggtactggagctcgtaggatagaagggtattatgatagtcttgcagcagagggtgaattagataacaaaagttctccaacttctgaaggtgttcaagaaaagtggattgggcaaatagataaggacttgcccagaacttttcctggtcatcctgctttagatgaggatggaagaaatgctttgagacgcttgcttatagcttatgcgaaacacaatccatcagttggttactgccaggcaatgaacttctttgctggtctcttgcttctattgatgccagaggagaatgcattttggacattggttgggattatggaggactattttgatggctacttttctgaagaaatgattgagtcacaggtggatcaacttgttttagaggagttagttcgagagaagttccctaaattagcaaatcacctggattaccttggacttcaagttgcatgggttactgggccatggttcttatccatcttcacaaatgtgcttccctgggaaagtgttctccgtgtctgggatgtgcttttgttcgatggaaacagagtaatgctgttccggaccgctcttgcgctactggagttctatggtcctgcacttgttactacaaaagatgccggtgatgcagttacccttttgcaatctttagctggttccacatttgacagcagccagcttgtcttgacagctcgtatgggatatcaatccgtaaatgaaacaatattgcaagagctaagtaataaacaccgcccatctgttatgtctgccatggaagaaagagcgaaaggtctaggcgtttggacagatactaatggtcttgcatcaaaactgtataactttaaacgtgatcctgaaccactggtttctttaagcaactcagcagaccagttgagtgatgtgggagatggggatgccaatcaagaaagtgatcctgtaaacatggatgacgagtatgttggtgtgacagtgaaatctgagattgattctttgcctgatccaaaggaccaggttgcctggctgaagttggagttgtgccaactcctagaggagagaagatcagcagttctcagagctgatgaactagaaacagcactcatggaaatggttaagcaagacaatagacgccaattaagtgcaaaggttgagcagtttgaacaagaaatatctgaattcagagaggctttgtcagataagcaggagcaggagcaagcaatgtttcaggtcctgatgcgtgtcgaacaagaactgaaaattgcagaggaagctcgcatctcagccgagcaggatgctgctgctcagagatacgcagcaaatgttctacaggtgttcacgggatggagagcgtcgcacagaatataccgttttcagcagatcgcgcataccgtcacagtgtcacacattcattcaatatcagctcgcgcacaaa

SEQ ID NO: 5386 - DNA, 2738 bp, Zea Mays
ctcagggtcatccccgtttctctcctcgagtccccacccccaggtacggacactctcctactccgcccggcgcccatccccgcgcacgcccagcagtccagccggaggccagatcaaagcgccaccgccacgccgcacttagctaatcccgccgctgccccggggtcgctaggaggagatgaagcccaaaagcctcccgttcatcgccttcgagcacaagcgggatgcgtacggctttgctgtgcggccacaacacctgcaacgttacaaggagtacgctggcatctacaaggaggaagaggaggagagatccgatagatggaagaattttctggagaggcagcctgagtcatctggacaggatgctggtgataatgctacgggtgatggttctgaatcactgcatgagaagaccgtagcagggccacagaagattcaaatatggacgccaattagatcgtccctgagcaacattgagcagataatgagcctgcgcatcgggaagaagcaatcttctgctggcaagcagcaagcaaaggacggaacccatcacgtgaaaggtgaagagagcaagttgtcggaggattcagatgacgaattctatgatgtagataaggttgatctgagccaagaagcgcaatcgagtgatactaggaatgctgatgttggaagcaggaaccaagaagaaaattacatttcaagggaagagttggagtgcctggtccatggtggactgccgatggttttgaggggagagctatggcaagcttttgttggtactggagctcgtaggatagaagggtattatgatagtcttgcagcagagggtgaattagataacaaaagttctccaacttctgaaggtgttcaagaaaagtggattgggcaaatagataaggacttgcccagaacttttcctggtcatcctgctttagatgaggatggaagaaatgctttgagacgcttgcttatagcttatgcgaaacacaatccatcagttggttactgccaggcaatgaacttctttgctggtctcttgcttctattgatgccagaggagaatgcattttggacattggttgggattatggaggactattttgatggctacttttctgaagaaatgattgagtcacaggtggatcaacttgttttagaggagttagttcgagagaagttccctaaattagcaaatcacctggattaccttggacttcaagttgcatgggttactgggccatggttcttatccatcttcacaaatgtgcttccctgggaaagtgttctccgtgtctgggatgtgcttttgttcgatggaaacagagtaatgctgttccggaccgctcttgcgctactggagttctatggtcctgcacttgttactacaaaagatgccggtgatgcagttacccttttgcaatctttagctggttccacatttgacagcagccagcttgtcttgacagctcgtatgggatatcaatccgtaaatgaaacaatattgcaagagctaagtaataaacaccgcccatctgttatgtctgccatggaagaaagagcgaaaggtctaggcgtttggacagatactaatggtcttgcatcaaaactgtataactttaaacgtgatcctgaaccactggtttctttaagcaactcagcagaccagttgagtgatgtgggagatggggatgccaatcaagaaagtgatcctgtaaacatggatgacgagtatgttggtgtgacagtgaaatctgagattgattctttgcctgatccaaaggaccaggttgcctggctgaagttggagttgtgccaactcctagaggagagaagatcagcagttctcagagctgatgaactagaaacagcactcatggaaatggttaagcaagacaatagacgccaattaagtgcaaaggttgagcagtttgaacaagaaatatctgaattcagagaggctttgtcagataagcaggagcaggagcaagcaatgtttcaggtcctgatgcgtgtcgaacaagaactgaaaattgcagaggaagctcgcatctcagccgagcaggatgctgctgctcagagatacgcagcaaatgttctacaggatcatgacatgtgcaggaaaagtacgaggaagctatggcttcacttgcccaaatggagaaccgagctgtaatggcagaaacaatgttagaggctacactgcagtaccaatctagccagcagaaagcactgtccccttgcccttctccaaggccatcaatgctcgatgcatcccctagtcaggcaagtcagaattcatcgcaggtgtttcagccaagaaggaaaaacttgcttggcccattttcgctgagttggcgtgataagaacaaggaaaagccgaacaatgttgaagactctgcgaacacaaagtttaccaatagtgatgaaatggtagatgagaagcagatggaaaccctggatctagataacgaacagagagcagaatcaactaaagaagatggcaagatgagagcagaaacccctcagaaagacgacgatctggtaagggtccaattaaccacggaccatttgaatggacaccatgaacagatgcaagaaataaaactggattggtaagcacaatggcacccagtccaagtaccttcggcaacacttctcagtgtatttgtgacctgatcacggtgccagttggtgcagcattgagggtggcctaatgttctttatatcccccccccccc

SEQ ID NO: 5387 - DNA, 1878 bp, Zea Mays
ttatgtgttgagtcataactgtgccctagtcgtcccaccaactgataagcagaatcgatctcctcccatcacctccatcacaacctctcgacggcagcttcatccccacctcaatcggcggcagcctagggcttcatcccccacccccaattccatgtcatgtggatctgaatcagcccactcccaaatctccaatccactcgccggcttttcctcgtgcccagttcacgacatttgctcggggatctgaccaatgtcgtcttctgctcgtgttcctcgcagccgctcagattggagatcaagggtcaagttggtggacttgcaccccacataggcatggatgtcgagcctgtactcgaggagtgcctgcatctgggattatcaaacacagtcaatttgtaggagagaggacgccatacatcaaagatgactgaagaagaggaagatgaagaatacctcgaagaggaagaagatgcccttgctggtgcaggggggaacacatttagtttcacaaccttcatctcttaacccctccgatcccggtgcgtggcggattagactccgatggggaagtctctggcgaggtggatcaagttcgtgctcttcgggaagaagtcgtcgtccaggatgattttggattcaagctgaaagaagaggctatgctgaatagagtactaaaggagacaatcttgtcaaaggtagttgccattgaacaattgcaatctgatctggcatcttcatttcgcatccaagatgttatgagaaatgagatccagagagtccagaatgaactttcttgcataacccacaaagctaagcagttggagcttcaggatttccagtaatctacgaaggagctggctgctcttcgtggaacactgaaaacggtgatggaagacagggacctgtagtggcaggaggtgaagtagctgagaagaaacatgagcatcatgcagaacgaggttgtatcgctgaagaagaagatcgaagccttggacgaagacatacttgtcaaggagggacagatcacgatattgcaggacagcatcgacaagccgttcaacatcatctgcagcccaagttcgatgcaagagttcgacatggcgtgaagacggctgctgttttgtaagtgagttggtggatgaaaattcaagttattgtagaagacaacatatttttttgcttattacagcttgctatgatgttctgaactatgatgggttcagcaggcgccatttttctcttagagcaattgttgacatataagaaatggtggcagcaccagcttaggatgtacaacaattgaatctcctacagaagttgtttctaatgtgctactgagctctattgtattccagcctacgcaatcttggtctccagtgtgcctccaagaaaagctccatagccccatagtttctgcaaaggttcaacaacttcaggatcaattataggatgagaagcaagaaaaaatggacttcatgaagaagcggaaaccattgataatatcaagaggtcgatggaagaaaataacaacctccttcgtcaactattaagcttcaattgaagacaagtgtctccatcataagtctagttgactactataggatctgcagtcttgtggcagctatagtaggtgtttatagtagctctagatttcaagctataggattattttttattatgtttaatgtttaatactttgagttgaagttataagatttgctttgaattttaagttaaaggatttgcagatatatggtttgaagttatatgcttatttgatggatgaattatttgtgttcaacaaattcatacgatattttggctatgatgtgtaatattctatgacgatatcaattcatatgatgtgttccttcc

SEQ ID NO: 5388 - DNA, 1166 bp, Zea Mays
gcggatacacatttcaatctctactactacttatgtctttactgtagccgtgcacagacgcacggttctgtcatcgcgccattcacctcctccatcccgattcctccgcccgcgattcccctccccacgcccgtagcccccgccgtcgtcctcgcggccagccgaggacagccgccgcgcccgcaaatcacgcgaccatgcccttccatgtcctcgcgttctccattgcagccacatccatggcgtcgcccccttccatcgatggcagcccgcgcaagattcttccctgcagccgcgcccgcaaatcacgcgactccccctttcatggcgtcgcccccttccatggcagtcgcgctccctctgcgcccttccatccatggccgcggatccctgcgcgccgcgattcttcccatacactccctctgcgcccttccatccatggccgcggatctctgcgcaccgcaattcttcccatacgctccctccgcgcggtttgcggatgccaatcctctccctccacaccgcgattcttcccatcctctcgcgactgccttccccccattagttttggcgtccacaatccctccctccgcacaccacatccgggcacatcatcggtgtgccgctgccggcgacgaagaaggagccccgctcccgccagccggtgtgccgccactccgcatccgtgcgtagcgccggtgttccacgttgcgaagggaatctcaaataacaaaatttgtcgatcttaagtttcttcatcaaccagtttgttgtttcggctagcgaccggtgcgcaagaaggaagggataaggtgcttggttgacccggaccggacgacaggacaccgtcggggattcgctgcaacgcagcgacggcttccgcatcttctcaggccaagctcctgcaacttctgagaacaccgatttgcatccatcaccatcagggtaggaggctactgaggttccttgcttgccagcattggcgtgttttctctttgcagcttcatgctcacttgttgctgcatttgctcgtctgggtacggctgccccgatgctggtggctcgaggccgtactgggccagtacagtagccaaggaaggcaaccccatgtgcacacaggatcagtctcaaaatagattcatttggttcttccttcatgatgcttg

SEQ ID NO: 5389 - DNA, 2174 bp, Zea Mays
catgcaggaattttaatagtataatttggagagcttgggcgccaccaaagtgcaaattcttcagttggcttgctgttcaaaatagagtttggacagcagacaggttggcaagaaggggatggcctcataatccgcgttgtgtcctatgcgcctcatgcccagaatctggactacatctttttgctgaatgttgcttcaccagacatatttgggctgatttgagtatttgggctgcaattacggagatccatcattcttcttggcaacctgtagattcggtgcaccaatggtggtcgaatcttgcaacatccgcagtgagaagcgtgaagggattgcgaaccctcatcatcctcgtgtcttggacaatttggtgtgagagaaactcgcgaatctttgagcacaaagagaagaccgtgacacagactatagcgatgattaaggagcaaatccgcctgtggattctaggaggagcaaaacacttagcaaggctggtgtaggttttggggaaggggaggggttggttttgggacatttgtgtcaccatacttaatgtctccttccctagtgtgatgtacttgtatattttagccctcgctggctctcaccctctttttaatataacaggcaattctcttgccagttttcaaaaaaatgtaggcgtccacaaaagcttttggtgcacggttctgccgaggatccccgtcataaacgcccgccatcggatcggacccatacgcgatatcagcaccgtccgtcatgcaaggttgccgaggccgccatcaacgtcatcctcccgcaatccccgccgactgccttgcctgcccttccatcctcctccccacccctccttccatcctcgcccgcgcgctccgcacgcattccatccatgctagcctacagcaacagacgcccatccctgtcgtcgcgctcgcctccctcctctttgttgcctccgcgtcggcctccaccccgctcttcgacgcgtttgccgccgactcagatttctggtgcactctcttctctacggcgcgagcaagggcggcgcttgccatggcatcgacgggaaccaggcatcactcttcctatctctctggcgttcctaccgctcttcttcctcccgtgtcgtcagaggaagccgcgaacagcacgcaggaatcaggcggtcttgaggacgaggagctataggtgcaggatgcagttgccagtggttccaagaggagcaaagactccgccgccgccgccacacgcagagccaatgttagctcaccctctgtggttcactcacaccctgccatcctccttgctcccgcgcagcagattctagaggttaagcaagcaggatgggcccgcgacccctgtgtggccttctctactccaagtgtctcgacgtcgagcgactctggatctatcgtcaacgaccttgagagcatcggggtaacacaaatggaggatagaatgtgattgatcattattctttctggaatgacttacctcatcaagcacggtagcaagtcttccacccgcaaaccctcacgccatcgacgcagctgtctttggtctctcgtgcttccctttgagagatcgggctctcatcattttgtttgttgctacctgaggacacatcgttttgtttgttgctacctgctaacatatcaactagcacgattttgagcctatctaaatgcccttctgtttatggctgtcaaggtttatggctgttcaggttcttattgattttggtctgagtttcacattgacaattcctgaggacaaagcagtggacctatatgttctagagagagctttgatttccatgcattcgtcctgtggggaagtgatggagaaaatccttgcggtgtatagaaaggcttcaaagcaatggtgttccacccagaacaagctggctcaagtgaggcaacgggtcaggaagcgcaccatggtcggatgaacgaagaagaaaaaattgtggcatggaatggatgtatgttattagattaaaataacaaaatttatgtatggatagaatcacagatggattctgaaacattttctcataacaatataacacacatatgtatataagttatcgtgttattatatggttccgttgcaacgcacgggcactcacctagtatatatatatagacttattgtcatccatttgaatatgaaaa

SEQ ID NO: 5390 - DNA, 2659 bp, Zea Mays
agcgaccgcaaccgcacagcgaaagcttgcaatcccccaaggatttatctttcaatgttattttttcacactgctggtgtataagctggggcttgggctttgtattcaatgggccgtgggctggtctagtaaatgagccttatgtagttgcccgttcatcttcttcatcttgccaagctttcctcaaaaactcgaaaaaggaacggagaaggcgtcctcgacgactgcccatggccgccgcccggacctaggctagggattgctgtctcctgagtcccgacctaccaaggcggaaagggagagggggcgctgtggcgtcaggaaataactggaagccgagggctgagggcgagttcagagtcaggtggttatcgctttctttttcgttttctttttccggagggtagtattggggatgccggttgctaggccggagccgcaggagccccgggtgatcgcccatgtcgacatggactgcttctatgttcaagtcgagcagcggaggaacccggcgctcaggggacagccgaccgccgtggtgcagtacaacggctggaaaggcggcggcttgattgccgtcagctacgaggctcgtggatttggtgtgaagaggtccatgcgcggagatgaggccaagagggtttgtcctggtattaatcttgttcaggtcccagtggcgcgtggcaaggctgaccttaatctttacagaagtgctggtgctgaggttgttgcaatccttgcaagcaaagggaagtgcgagcgggcatccatcgacgaagtttatcttgaccttactgatgcagcaaatgaaatggtcttacaagctcccccagattcaccagaggggatttttatggaggcggcaaagtcaaatatcttgggccttccggctgatgccagcgagaaggaaaagaatgtgagggcatggctttgtcaatcagaagctgattaccaggacaagttactggcatgtggagctataattgttgcacagttacgagtcagagttctggaggaaacccaattcacatgctctgctgggattgctcacaataagatgttagctaaacttgtcagtggaatgcacaagcctgctcagcaaacagttgtcccttcttcatcagttcaagacttactagcatcactacctgtgaagaagatgaaacagcttggtggtaagcttggaagttccttgcaggatgatcttggggttgagaccattggtgatctcctaagttttacagaggaaaaattacaagagcagtatggagtaaatactggaacttggttatggaagactgccaggggcattagcggggaagaagttgaggaccgtcttctcccaaagagtcacgggtgtggaaagacatttcctggcccaagagcactgaagtacagtgcttctgtcaaaggctggctggatcaactatgtgaagaattaagtgaacgtatccagtctgacctgaaccagaacaagagaattgctcaaacgctaactcttcatgccagagcatttaagaaaaatgaacatgattcaatgaagaaattcccttccaaatcctgtcctttgcgctatgggactgggaaaattcaggaggatgcaatgaggctatttgaatctggccttcatgagtttttagaatctcagaacactggatggggcataacatctctttctgtcactgcaagcaaaatatttgatatacctagtggaacaagctcaatcctgagatacattaaaggtccaagttctgctgcagctctgactatacctgattctccaagttctgctgcagctctggctatacctgattcttcatttgtacctgaggatccatctcttgataatgatgtatttgtggagccaattcatgaagaagaatgccaaccatcaacctctgagaaagaagacgacaataatacacattctgcgtctgcattttcagctaaaaaatgccgagcaaatgaagaaaaaagaatatcaaagaaattgcctggagttcagggaacttcctcgatattgaagtttctttcacggggccaatctaccttacatgagaaaagaaaatctgatggactaatttgcagtcatcaaggtttgctggactgtcccgggagttcttcggaagcatacaaagctggagcacacaatgtgcccgcggaagctgaggataggaacaacaccaacagttgtgctgaaccctctggcagtaacacatggacgttcaaccttcaagacattgatccagcggtggtagaggagctgccaccagagatccaaagagaaatacaggggtgggtccgtccatcgaagcacccgatcacgaagagacgtggttctacaatttcttcatactttccacccgcgaggtcttagatacgttgatacgttagttcttgattgtatattctttattttctacacacaacggcctcgctctgtgtattgtaattgtaagatgtgaagatgtttaggtagccctatatgtgattaacagcttgacgggacctctgagaatggtaagtttatttacgtggggtatggaaacatgaacattaaagcatgtgcaattgagttgaggtcctagggttgcatctacttatgttcatgttggaaaatgatttgagtacagtactcaaacaccacctgaccaccaag

SEQ ID NO: 5391 - DNA, 2698 bp, Zea Mays
accgcacagcgaaagcttgcaatcccccaaggatttatctttcaatgttattttttcacactgctggtgtataagctggggcttgggctttgtattcaatgggccgtgggctggtctagtaaatgagccttatgtagttgcccgttcatcttcttcatcttgccaagctttcctcaaaaactcgaaaaaggaacggagaaggcgtcctcgacgactgcccatggccgccgcccggacctaggctagggattgctgtctcctgagtcccgacctaccaaggcggaaagggagagggggcgctgtggcgtcaggaaataactggaagccgagggctgagggcgagttcagagtcaggtggttatcgctttctttttcgttttctttttccggagggtagtattggggatgccggttgctaggccggagccgcaggagccccgggtgatcgcccatgtcgacatggactgcttctatgttcaagtcgagcagcggaggaacccggcgctcaggggacagccgaccgccgtggtgcagtacaacggctggaaaggcggcggcttgattgccgtcagctacgaggctcgtggatttggtgtgaagaggtccatgcgcggagatgaggccaagagggtttgtcctggtattaatcttgttcaggtcccagtggcgcgtggcaaggctgaccttaatctttacagaagtgctggtgctgaggttgttgcaatccttgcaagcaaagggaagtgcgagcgggcatccatcgacgaagtttatcttgaccttactgatgcagcaaatgaaatggtcttacaagctcccccagattcaccagaggggatttttatggaggcggcaaagtcaaatatcttgggccttccggctgtaagaatgctctcacagttagatttgttactgctctgctatttgatgtagcatggtcataggccatgatatattcaggatgccagcgagaaggaaaagaatgtgagggcatggctttgtcaatcagaagctgattaccaggacaagttactggcatgtggagctataattgttgcacagttacgagtcagagttctggaggaaacccaattcacatgctctgctgggattgctcacaataaggtttataatgagtcgtactaatgttagctaaacttgtcagtggaatgcacaagcctgctcagcaaacagttgtcccttcttcatcagttcaagacttactagcatcactacctgtgaagaagatgatgatcttggggttgagaccattggtgatctcctaagttttacagaggaaaaattacaagagcagtatggagtaaatactggaacttggttatggaagactgccaggggcattagcggggaagaagttgaggaccgtcttctcccaaagagtcacgggtgtggaaagacatttcctggcccaagagcactgaagtacagtgcttctgtcaaaggctggctggatcaactatgtgaagaattaagtgaacgtatccagtctgacctgaaccagaacaagagaattgctcaaacgctaactcttcatgccagagcatttaagaaaaatgaacatgattcaatgaagaaattcccttccaaatcctgtcctttgcgctatgggactgggaaaattcaggaggatgcaatgaggctatttgaatctggccttcatgagtttttagaatctcagaacactggatggggcataacatctctttctgtcactgcaagcaaaatatttgatatacctagtggaacaagctcaatcctgagatacattaaaggtccaagttctgctgcagctctgactatacctgattctccaagttctgctgcagctctggctatacctgattcttcatttgtacctgaggatccatctcttgataatgatgtatttgtggagccaattcatgaagaagaatgccaaccatcaacctctgagaaagaagacgacaataatacacattctgcgtctgcattttcagctaaaaaatgccgagcaaatgaagaaaaaagaatatcaaagaaattgcctggagttcagggaacttcctcgatattgaagtttctttcacggggccaatctaccttacatgagaaaagaaaatctgatggactaatttgcagtcatcaaggtcccgggagttcttcggaagcatacaaagctggagcacacaatgtgcccgcggaagctgaggataggaacaacaccaacagttgtgctgaaccctctggcagtaacacatggacgttcaaccttcaagacattgatccagcggtggtagaggagctgccaccagagatccaaagagaaatacaggggtgggtccgtccatcgaagcacccgatcacgaagagacgtggttctacaatttcttcatactttccacccgcgaggtcttagatacgttgatacgttagttcttgattgtatattctttattttctacacacaacggcctcgctctgtgtattgtaattgtaagatgtgaagatgtttaggtagccctatatgtgattaacagcttgacgggacctctgagaatggtaagtttatttacgtggggtatggaaacatgaacattaaagcatgtgcaattgagttgaggtcctagggttgcatctacttatgttcatgttggaaaatgatttgagtacagtactcaaacaccacctgaccaccaag

SEQ ID NO: 5392 - DNA, 3098 bp, Zea Mays
cagccacagaggtaacccatggggtgcgcgagctccaaggccaacgccgacgtcgcggtggccgacgtctactgcccgccgcccaccagtctgaatctggttaagtctgaacagctcaaaaattctactaaaattcagtacttcgccatttggtgtgttgaagtcgtttggttgccatatacctctagcctagcctgtattaggccagattgtgtggatacatacagtagcagtttgttttgttgtatgtcttaattaagagtggacattatgtatcctacctctttagaacatggataaggaaacatgtttcattttgttgccatacacctctaatctatcctgtataggcgagaccgtgtggatgcagttgcagtttgcttcattagctgaattaattaagaatggtcataaaggatggtttttttttgcccgtataaatacatgctgcatgatatgaaggttgaaaccatgtgtataatctgaagttctttccctactaatgtgcttctgcagttctttcagcctactaatgtgcttctgaagttctttcactacatgtctggacagctcataaaggatggtttagtaatgagggcgtgtctgatcatttgttggacagttctttctcaagtattctttctcaagtatacttgagaaaaaatatggttttctcaagctaaatgggcgtgtctgatcatttgttggacatgtctgatcatttgtgcttctgaagttctttctcaagtattctttcactacatgtctggacagttctttcactacatgtctgcagttctttcagcctactaatgtgcttctgaagttctttcactgcagaaaaccatattctttcagcctactaatgtgcatcatcgagtactaccattttcccactgcctctaccaaatgatcagcaacaaccagtttcccatttgctgctcatttcgttccaaacatcatcgagtactaccaaaaccttgctcccatttagctttttctcaagtattctctgaactagatctaagttactgatgctgttcaagtcagctgatatggagccatcccatgaaaccctgctggttccacctcttttccttttatgcctacggcatttctgtgactgtaccatctcttttgtgaggcgtttgacaccaaatttttctgagacatagagccatgccatgatgtcaaaatgtcctatatcacgaaaatggctgtataccctctgcagtagcgcagttttaccaacgccggcgactccaactattgctattacagaatatggttttctgcaccaatcatttggttgttgctgctgctggtagaggcagtggtgttggttgttgcggaggatgaagagttaacagtacttcgccaaattagtacttcgccaaatgtatcagtacttcgccaaattagtgtatcagtttcaattttatagcagttttagttctagcacttttagcaaatgtatatagcagtttcatagcagttaactgcataacattcatgccattctcttgtagaaaaaacagaagacaagtgttccaacaactaaacctccaaacttgcgaccaagaccacaaagacaaagtgttccaacaactaaacctccaaacttgcgaccaaggccacaaagacaaaatgctcaacctcaagacgaacaagcgattgctgatttgcagacggtgggagattttctcactgacaatgttgaagtttccgaggatgatccaatcaatgctacaaaaaagaggcctgcaaggggcataactaagatggagggaatattctcaaggtcacctgaaatgccaaaaatcaaaattttactcaatgatcgaggtcagcctattggtaaaagtgctagacaactttcaagtgctattgggtgtcaagttagaaagaaattgtctattgctaccacggactggaggcttgttgatataaacaagaagtatgagttgtgggaggatataaagacatattatgatgtagatgctgctgccttaaactgggttatgcgcacagctggaaagaagtggaagcaatttaaagcatccataaagcaacgatacttcaatcctgaattgtctataaaagaaattccagaatgtcctgataagagggttaatgatgatgattggcactctatgtacaactattggatgtcttctgaatttcaggatcgctcagaaaaagctaaaataaatcgacaaaagctaaagatgcaccatacagccggcagtgaccaacttaatgatgttcttggagtatatccagagttaaaggaccgatcaattcaagagggtgatgcattctctattgtttgtggaccgaaagagccaaaaggatatgttcgtgttttgggtttaggccctactcctcaagatattggcactccagagttgaagtcttatactgcaacaagactacaaatggagattcttgctcgtacaaaggttcaaagtgagaaggctgctttagaagagcgtgtacttgagctacagactcaaattgagcaaagggctcaaccagaccgggcaagtgaagagcccatgtcacatcgcggctctacttcatttcaacataaggtgatgaggaacaagtttgctgctgaggatgaggaagacaatgaagaatattgtgcttctgaagatgaggaattagatgatgaggatgatcaaatatttcatcagatgcaaggtgctaactcaccaagatctacaaggcactttgctgaagcttcacactctaaacatgatgatcttgttggaaaagatgtcatattatatgctatgttgagatctgatttgcctgtggctaaagggacaattgtttctactaaaccaagcaccacagttggaggccagatccttggaaggcaatattgtgaagttattgtaacttgtgtgataaaacgagatacagttttgcctcgcccttgtgcaaatgtggaaactatggctgatgcttacatgatgtcagttgcatggccgtacaagaaactgaagttggtgcataaggctgcaacaccgtctagtggaggtagcatcaaaactgtatttttatttgcaaatgtagcaacaatatactaa

SEQ ID NO: 5393 - DNA, 894 bp, Zea Mays
tttttaaattattgtttatgtaatctaaagtttagaaaaggttgtacctgagacgaaatccgggcggcagcagccatcggaggctgggcggcagccgccagcctcccgctcgcacgggagccacacacggacaccacgctgcgttcactcgcaaccgtggcccgtggcccgtgggtttcgcctgtggtcaccgcgaggccgcatccagtcgcccatgccgccttccgcatcgatgccggcgacgcacacggccgtgtacgtggcggcggtgcccctgcgggcgcccaagggccccgcccagctgctgatgtcggcgggctactcgctgggcatgtgggacctgcagcacttcatggtgctcctccgtcccgacccggcgctggcccaggcgctggtcttcgatttccagccgcgggacccggaggacgtcctcgccgcgctcgcggtgctgtcgcggagagagatccctggcgtggttcgcagaagaacgctgcggagggtcccggacgggcggtgctggctcgtggggcactgctgcgacgccgtcggtgccgccacaaggttcagcgagcggtggacgaccggcctggtggtcggggagcacgactgccgggactacaccaacgatggatgatctaaactgtacggactacggtcatatatcggattctataaactggagacccaacacgcaatgcagaaatttcatggaaacgaggagacgttttgaaagggaaaaaaaatgaggagagaaaacaaagaagctactactcaagacaaggcgatggtgtaacgaagaaatgaggccacttgactagttgactgtgaaagatactagaggtgctacgtgaagcaagaaattagacacgctatgtggagaagcaccgatgacat

SEQ ID NO: 5394 - DNA, 1107 bp, Zea Mays
tttttaaattattgtttatgtaatctaaagtttagaaaaggttgtacctgagacgaaatccgggcggcagcagccatcggaggctgggcggcagccgccagcctcccgctcgcacgggagccacacacggacaccacgctgcgttcactcgcaaccgtggcccgtggcccgtgggtttcgcctgtggtcaccgcgaggccgcatccagtcgcccatgccgccttccgcatcgatgccggcgacgcacacggccgtgtacgtggcggcggtgcccctgcgggcgcccaagggccccgcccagctgctgatgtcggcgggctactcgctgggcatgtgggacctgcagcacttcatggtgctcctccgtcccgacccggcgctggcccaggcgctggtcttcgatttccagccgcgggacccggaggacgtcctcgccgcgctcgcggtgctgtcgcggagagagatccctggcgtggttcgcagaagaacgctgcggagggtcccggacgggcggtgctggctcgtggggcactgctgcgacgccgtcggtgccgccacaaggttcagcgagcggtggacgaccggcctggtggtcggggagcacgactgccgggactacaccaacggtgaaaaacgtgtcctggagtcgctcagattgcgcggcaacggcagcagcaccagtggggcggcgccgccgtgatggatgatctaaactgtacggactacggtcatatatcggattctataaactggagacccaacacgcaatgcagaaatttcatggaaacgaggagacgttttgaaagggaaaaaaaatgaggagagaaaacaaagaagctactactcaagacaaggcgatggtgtaacgaagaaatgaggccacttgactagttgactgtgaaagatactagaggtgctacgtgaagcaagaaattagacacgctatgtggagaagcaccgttgactaagtaaacttaggaggtgtttggtttgaagaaatcaatctattctaaatgaggtggtatatcatgagtctattatacaaattttgtggaataaacttattctttatattattactaattattagcccacgtagaatgaaat

SEQ ID NO: 5395 - DNA, 1115 bp, Zea Mays
tttttaaattattgtttatgtaatctaaagtttagaaaaggttgtacctgagacgaaatccgggcggcagcagccatcggaggctgggcggcagccgccagcctcccgctcgcacgggagccacacacggacaccacgctgcgttcactcgcaaccgtggcccgtggcccgtgggtttcgcctgtggtcaccgcgaggccgcatccagtcgcccatgccgccttccgcatcgatgccggcgacgcacacggccgtgtacgtggcggcggtgcccctgcgggcgcccaagggccccgcccagctgctgatgtcggcgggctactcgctgggcatgtgggacctgcagcacttcatggtgctcctccgtcccgacccggcgctggcccaggcgctggtcttcgatttccagccgcgggacccggaggacgtcctcgccgcgctcgcggtgctgtcgcggagagagatccctgaagaacgctgcggagggtcccggacgggcggtgctggctcgtggggcactgctgcgacgccgtcggtgccgccacaaggttcagcgagcggtggacgaccggcctggtggtcggggagcacgactgccgggactacaccaacgggctggtcgaggtcctgacaggtgaaaaacgtgtcctggagtcgctcagattgcgcggcaacggcagcagcaccagtggggcggcgccgccgtgatggatgatctaaactgtacggactacggtcatatatcggattctataaactggagacccaacacgcaatgcagaaatttcatggaaacgaggagacgttttgaaagggaaaaaaaatgaggagagaaaacaaagaagctactactcaagacaaggcgatggtgtaacgaagaaatgaggccacttgactagttgactgtgaaagatactagaggtgctacgtgaagcaagaaattagacacgctatgtggagaagcaccgttgactaagtaaacttaggaggtgtttggtttgaagaaatcaatctattctaaatgaggtggtatatcatgagtctattatacaaattttgtggaataaacttattctttatattattactaattattagcccacgtagaatgaaat

SEQ ID NO: 5396 - DNA, 2597 bp, Zea Mays
ttacccaaatacccctaaccttttcagttttcactgctccagttttcttatctcccccatcttcgtcgtcctcacagcgccggcgctccatcttccgttccttcccttactcgcgctcggcacgcaggcgacggcggcggcggcggcgctcaggctcgggctcgggctctcagcgacggcgtcagcggcttcccctcccgcctctcgctagtcgactcgcgccctcgcatccgttcctccgcacaccggccggtgaccctgcgtgcgtgcctctttctctcttcccgcctccggtgtatcgacaacggcgcccggtcccggtggcggcgccgcgcgcggcctgagggcggtgggagccagcagccgctgctccaccaaggcggtcgcgccgctttgggagcgcttatgccccaaagcgaagcgttacccgacctcttagcgcttcaacgcgctgaagcgtgcgcttagtgccgtttttttggaaccctatatcatacagaacaaggttccctcgtactggtagcgcatgaacacgaaggattgaagttcatatggttcctgccgaggtttcgttcttgttaactattcaagaagtaggaaatgatgagcaacttccaagccactacttgcaagcctcacagtaggatcattgtgaagaaacctatagcaagtcttggaagcacatgtcagtatccattatattcacatgctctcggattccacacgttgcaagagaaggtgtacccaaggctagttctcatttctgctagccacaaaaggcttacttctgtatgtgccttaagtggaaagggaagctctggcactgctgatgaccctttgatggaatctttgaagaaagctgtggctgatgcaaaaaagccccgttccatacaagacttactgaaggagcaggtggctaaactgagagaacaagcgtctggtggaggcagagggaatgggaatcgccgtggaggcagtggtggttctggtggcccagatgatgaatcgttcaaggaaacattggatgaagtagtgcaagttatcttagccactgttgctttcatacttgtgtacatccacataatcagaggggaggagctttaccgtcttgccagggactacaccagatatctcgtcaccggtaagaggactgcccgactgaagcgtgccatgcaaaggtggcgcaacttctcggagagcttcatgcagaaggcaggctcagaagacgaccaatatgagagaccagctgtgtcaaaacctgcatggtggcaacagcctcagaaatttgtgcattttgtggaggacctttgcaggggaaactggcgtccccatgctcaggagtcttagttgatggagtaccccccgacccattgcagaatgcatacttggctgtgattggagcaaggtcgcctgtcaggctgtcacctggggcaggttttttttttttgttatttatcggatatttgccactggtttcttaggagtatgtagaaagtcgctgaattgttggcaattttgcagttgatagaacctcgttttgagactctaacctgccaagtcgggtgtggaattgtttattaataagctgtttggtttgaggaatgatctagtccatcgtcttctcactcctcacttttttgtttggtttgtggaatggattgagttgatccatcatcaccttattccttatagttatttagttagtactaatatgagtaataaggtcatcccaccaaatttgaggaatggactcatgatgcaccaccacattttggatgaaatgattcctcaaaccaaacaccccctaagtcggcctttctatgtacatgtttgttgaggactgcagatctattgccaccaccacaagcctcagccctcagctagctagcaagttgccctgccatacatttttgttgttaggatattaggacttcaaagttacactagccgtgcaaatgtaacaatgtagtattatgttttgtaggaaatttttgcacgacctatcatgcccatgaggccatgaaactattgtcctttcaatagcgatattgctagcacagtaaacaccaatccatcgacagaacaagagagttcatgaaaatatgaaatagctcactttttatgtttcttcgctatggttatacaaactcagtatagttctgaaaaaataaccgagtgtctgcaccaaactaccaaaaagtttcatattgtaaacgtgaatcggtgcatggccgtttccccagattgaaagaaatcatttgtcgctgttatactcggtggttggcaatgctgaaagtaatccggcacagatcaactttcatcagcaggagagcctgacgcttcagcagctttcttttccttctgtttctctctgcgcttcttgtttcgcaatgcatttttgctcatctcccccctgtcacattaagcttgtaccttgtcctgaagttctgcagaacccttagcatgaggtgggcggtatgctgtaggttttggcgctgtaattgcaggggccttgcttgatgtttgtgctgacttggaaccttgtgctgaaactataaaaggaagtcaatgaaagatatcaattgatcagaacagat

SEQ ID NO: 5397 - DNA, 1753 bp, Zea Mays
attatgaatgctagtgctaaaataaaattatattaaagatatgttaaatacacatatattgatataacttttgcacactgagcatgtatataatttgactaattgttagttaaagtttaagaaatctgaccttttcagatcctaacactcagtataataagaaacagatggagtatacatcttacgaaacattttgctttaacaatatccttgaccacattttctcgaccagttgttgtattagcaggttttggcaatttgcctggtgatatggcattctgggattattcagaaaaaaaattggtagcgaaaacaaaggcagaatgttctgtcacaagtgaatggtcccctgatggtcgtcattttatgactgctacaacagctccgaggcttcaaatagacaattgtataaaaatatttgaccacaacggatctctgcagtttaagaagatgtttgaaaggctgtatcaggctgattggaaacctgaagcagctgaaagattcactgacattgctgacctgacaacatccttgagtaccttaaagattgaagaaacaaaaaaacaagtttcagcacaaggttccaagtcagcacaaacatcaagcaaggcccctgcaattacagcgccaaaacctacagcataccgcccacctcatgctaagggttctgcagaacttcaggacaaggtacaagcttctatccaataaccccactatggttctgttccagaactagggtgttcggtctttggttcagaggaatggaatgtgaaactggatgatttggtctattaccatgcaatcgctccttgtcattgtgccacaacaaaaacaacaacaaagcatgttactccaagcaagttgagctagatggttggatttttacgttgatgtggcagacctatcaccaccctccttttaccagggattgtgactggctatgctgaaagtgaaagttgaaacaacacgtgctagatcttgtcagtatgaataaaataaaagaataatgtttctcatacttaataaatcatatgctggcatttacccgggattgtagtttgctgtgctcagcttattctattagttattgttccatctggtcggagaaaattctcattgtttgacagtatagagttgacttatcatgtctgttggtgcattgcagctctttggtggactagctcctgctgggggggagatgagcaaaaatgcattgcgaaacaagaagcgcagagagaaacagaaggaaaagaaagctgctgaagcgtcaggctctcctgctgatgaaagttgatctgtgccggattactttcagcattgccaaccaccgagtataacagcgacaaatgatttctttcaatctggggaaacggccatgcaccgattcacgtttacaatatgaaactttttggtagtttggtgcagacactcggttattttttcagaactatactgagtttgtataaccatagcgaagaaacataaaaagtgagctatttcatattttcatgaactctcttgttctgtcgatggattggtgtttactgtgctagcaatatcgctattgaaaggacaatagtttcatggcctcatgggcatgataggtcgtgcaaaaatttcctacaaaacataatactacattgttacatttgcacggctagtgtaactttgaagtcctaatatcctaacaacaaaaatgtatggcagggcaacttgctagctagctgagggctgaggcttgtggtggtggcaa

SEQ ID NO: 5398 - DNA, 5744 bp, Zea Mays
atgaatacaccaggttctcctagacaactccgtattacctcaactcaagaccttaatttgaacatatctgtttccaatacaaacatgttatcgcaagcttatgctagctggaataatattagctgtggtgatgaattgtataagaaggaaaccttttcttctactgagcgaccagttcttgatgttcatcaaagaagaagttattatgttgtcccacaaaataaacttggacaagatatttatgtaagaactactgaaaatagaggttcacttgttactctgttgccctctggggatgataggtccataaaagttccggctttaagggatctatcagattctcatttaaatggaagatctgttaaaccatatcggttgatgataactgccattcttgcggatgcagagcttaagcttttgggttctctcaacagcttaagcttttgggttgaactggctagtgtgtccactctaacatggttcccatcccaggtcaaggatgatgaaggattagaaactggtgaatatatgactgctgtgcggctcttttcagaaaaccattccatatctgttcaacaacagagtgcccgtacttgtgctgctattggagaacacttgtcacagaacaccagaaaggtgaactggaacgaaatgttctttttcaaagtcgaacgtgtggacagctatactctagagcttcttgtgcttgatgctggtaaaggtcaaccagttggtatatactctgctccattggagcaagttgtgcaaaagctccctcctacctctaatccggactctgtcaaatttgatttggctttaggagaccttatgtcaactaagacagtggaacaggaaactgttaaacctagtggaaaaataagatttgcggtacttgtttctggtagagctagtgtacaacaagggaacagagccagtcctgaaagcaagactggatatattcagattagcccttcaaaagaagggccatggacaagcatgaagttgaactatgctgtacctgcagcatgttggaggtttggtaattgtgtgattgctagtgaagcaacagtcaaggaaggcaacagatacgttagcatacgttcccttgtgtcagttactaatacaaccaatttcattgttgatttacgtctaaaaggaagaatttctcaaagtgcacgggcagatgaacagggagacagttttggtaaagaggatcaaatcctgattggaacgctggagcccaattctactattccagtcccactatcaggcctctcacatcctcttatgccctatatgttgcagttaaggccggcaaaacatcatgatcatgaaaattactcctggagtgatgtccaggagaggcgcagtcaaaccgagtttagaaaggaggagatcctagatttatgtatatcagatctgtatgaatcggaaaacttgctattctgctcacaggtagatggcacctcgaattcttgtcatggactgtggttttgcttgagcatagaaggcaaggaaataggcaaagatgtacagatggaaccaatatatgattggtgcatcattattaagtccccgttgtgtttgacatactatcttcccattgctgcacattatactgtcagttctagccacctcgataatgaagattcaagttgctcccttggcaccttaagtccgggtgaggctgtaaaggttcacaatgttgatccaagaaaccctttgtacttatccctggttccacatggaggatgggaactgatgcatgagcctgttgttatatcacatccaacccaagcaccttccaaatttatcaatctaagaagctctttatcaggaagattgcctacacttactctgcgtctcattgatatttctggaaggaaagagaagaggcgccttctttcacgttcacatctggaaaggggtgagaagcaactctatgatataaaacacgatgaattggttgagggatacactatagcgtctggattaaattttaagggattaggacttctatcatctgttggacatggtggacggtttggatctgtgaaagaattgtcgcctcttggcgatatggatggagcagttgatctttctgcctatgatgatgatggaaaatgcatgcatattcttctttgttcaaagccatcctcgtatcaagctgttccaacaaaggttatccatgtacgcccgtatataacattcacaaacagggccggacaagatttgtacttaaaacttagtattgaggatgagccaaaggtcttacatgcatatgactggagggtttcctttatgtactccaaggggactactgacaaactgcaggtccgactagtggatacagaatggtgccaacctctggagatagtaaaagaagacactattgttatagcaatgagaaagcagggtggtactcagaaatttgtaaaagctgagatacgtggttatgaggaaggttcaagattcttgattgtattccgtctgggcccagcatatggaccaatcaggattgagaaccggacgagtcataccacaatcagtacttgccagtctggtttaggggaggagagttggatccaagtgaagccacatgcaaccagaaaatattcttgggatgacccatatggacagaaagttattgatgttagcattgataaaggcgatgatacttgtgtcctatgtgttgacctggaaaatcctattggaagttccaccagttttagggaacatggcctcatgtttactgttgataccagtgacattaagatattgaagtttgctgattacataaggaaagaggaagtatatggattgcctggatctgaactgactgatcaccaaggatcgtcattgaaggaaaatgagacagagccaggtgctggacccttggagctcattgttgaacttggagttgttggaatatctttgattgatcataagccaagagagcttttatacttgcatctgcagaaggttttcgtttcatacttgactggttatgattttgggaccactagcaggtttaaattaatccttggcgagttgcaactagataatcagttgccactgtctacaatgcctgttgttttgtctaccgagagcaggcctgattcaaatcgttctgttttcaaagcaaacgttgctgttagcaatgtaacttctaatggcattcaagtttacccacatgtctatatccgggtaactgatcaaacatggagactaaacattcatgaacctattatttgggcactgtttgacttctacagcaatcttcgttttgtcaccaccatcaacagcacaactgtcacggaagtggatcctgagatacgaatagaagataaggctaaaaatatctctggaaactgcgcctagtcaaagacctcgtggtgtcctaggcatatggagccccatcctatctgctgtgggtaatgcactcaagattcaggtgcatctgaggaaggtcatgcacagaagccggtttatgcggaagagctccatcatccctgctatcacgaaccgaatcaagagagatctgattcacaatccgctacatctaatcttttctgtggattttcttggagtaacaaaatcaactttatcatcacttagtaaaggatttgcagagctctctactgatgggcaatttcttcagctgagatcaaagcaggtttggtcaaggagaatcactggtgttggtgatgggctagttcaagggactgaagcatttgctcagggtttggctttcggggtttctggtgttttaagaaagccagttgagagtgccagacagtatggtgttataggtattgcacctggcattggccgtgcttttgtgggtttcattgtccaacctttaagtggggctctggattttttttcactgacggttgatggaatcagtgctagttttatgagatgtgttaacattttaagtaacaaatctgttccgcagaggataagagatcctcgtgctatacatcgtgatggtatagtaagagactatgacaaatttgaagctgctggccagatggccctttatctggcagaagctagcagatattttgcatgcacggatttatttcgagaaccttctaagtacgcatggtctgattactatgaagaccattttattttaccaagccagaggattgctttagtaactaataagcgggtgatgctgcttcagtgcttggatctagataaaatggacaagaaaccttctaaaatactttgggatgttccttgggaagaagtactttcattggagctagcaaaagctgggtatcagaggccttcacatgtaatcatacatctgaagaattttaggaggtcagagaactttgtaaggcttattaagtgcaacattgacaacgaacgggaacctcaggctctttcactttgctgttcaattcggaaaatgtggagatctcaccaagcagcaatgaaagttataccattgaaggttccatcaggccagcgtcatgtgtattttgtgtcagatgatgataaaaaggaatcccacagtttatctaggcctttgctaagctcgggaggaacctctactgatgttgagcaacagttcataaacaatacagttcactttcagaaaatgtggagcagtgaaccagaaattcagagccgatgcaaactagttgccaagcagattgcggatgacggaagggtgttcagcatatggaggcctctctgccctaatgggtatgtctcaattggtgatattgcgcatgttggcatccatccaccgcattttgctgctgtatacaagaatatcaatgggaactttgcactgcctcttggctatgacctggtttggagaaattgtgctgaggattacaagagccctgtatcaatatggcttccaaggccaccggggggatacgtagctcttgggtgtgttgctgtcccttcattcaaggagcccactcttgactgtgctttctgtgtggatgagagactcgcggaggatgccgcgtatgaggagcaaatcatatgggcctcatcggatgcttacccatggggatgctatatctaccaagttcagagcgcctcaatgcagttcatggcacttcgtgtcccaaaagaacaatctgagctaaggcccaagaagatattggagtcatttctgcagcaagcatcagagactcaaacgtcccgtgcatgaagaagctgcacatgatgcttgtgcgtgcaagagaactcggctgggacaaagggcaagtctcgtgcaagaaagctcgaagaatgccacttctttcggatcactccatttctccgttgtcaaagcatacacagaggacagagccttgcatgccaacactcgggttgacggaagtgttgtatactagaatagtaggttaaaggttgtaaatgtaaagttttgtaacgtttgatatagtttttgtccagctacatttgttaaggcccatgtggacgtgggccatattagttgtggctacatattctactaagaagttctcaggactaatcatactttctctaatttaaggttgttaaggcccatgtggacgtgggccatactagttgtggctatatattctactaagggcccgtttggtaaaacttcagctcctgcttctttagcttcagattctgatcctcgtgaggagctgatcctcctgattttcctagaaaatcagaatcatttttaaaaccgtttggcaagtaaactgattcttgtcttctgagggttggtggcc

SEQ ID NO: 5399 - DNA, 5751 bp, Zea Mays
atgaatacaccaggttctcctagacaactccgtattacctcaactcaagaccttaatttgaacatatctgtttccaatacaaacatgttatcgcaagcttatgctagctggaataatattagctgtggtgatgaattgtataagaaggaaaccttttcttctactgagcgaccagttcttgatgttcatcaaagaagaagttattatgttgtcccacaaaataaacttggacaagatatttatgtaagaactactgaaaatagaggttcacttgttactctgttgccctctggggatgataggtccataaaagttccggctttaagggatctatcagattctcatttaaatggaagatctgttaaaccatatcggttgatgataactgccattcttgcggatgcagagcttaagcttttgggttctctcaacagcttaagcttttgggttgaactggctagtgtgtccactctaacatggttcccatcccaggtcaaggatgatgaaggattagaaactggtgaatatatgactgctgtgcggctcttttcagaaaaccattccatatctgttcaacaacagagtgcccgtacttgtgctgctattggagaacacttgtcacagaacaccagaaaggtgaactggaacgaaatgttctttttcaaagtcgaacgtgtggacagctatactctagagcttcttgtgcttgatgctggtaaaggtcaaccagttggtatatactctgctccattggagcaagttgtgcaaaagctccctcctacctctaatccggactctgtcaaatttgatttggctttaggagaccttatgtcaactaagacagtggaacaggaaactgttaaacctagtggaaaaataagatttgcggtacttgtttctggtagagctagtgtacaacaagggaacagagccagtcctgaaagcaagactggatatattcagattagcccttcaaaagaagggccatggacaagcatgaagttgaactatgctgtacctgcagcatgttggaggtttggtaattgtgtgattgctagtgaagcaacagtcaaggaaggcaacagatacgttagcatacgttcccttgtgtcagttactaatacaaccaatttcattgttgatttacgtctaaaaggaagaatttctcaaagtgcacgggcagatgaacagggagacagttttggtaaagaggatcaaatcctgattggaacgctggagcccaattctactattccagtcccactatcaggcctctcacatcctcttatgccctatatgttgcagttaaggccggcaaaacatcatgatcatgaaaattactcctggagtgatgtccaggagaggcgcagtcaaaccgagtttagaaaggaggagatcctagatttatgtatatcagatctgtatgaatcggaaaacttgctattctgctcacaggtagatggcacctcgaattcttgtcatggactgtggttttgcttgagcatagaaggcaaggaaataggcaaagatgtacagatggaaccaatatatgattggtgcatcattattaagtccccgttgtgtttgacatactatcttcccattgctgcacattatactgtcagttctagccacctcgataatgaagattcaagttgctcccttggcaccttaagtccgggtgaggctgtaaaggttcacaatgttgatccaagaaaccctttgtacttatccctggttccacatggaggatgggaactgatgcatgagcctgttgttatatcacatccaacccaagcaccttccaaatttatcaatctaagaagctctttatcaggaagattgcctacacttactctgcgtctcattgatatttctggaaggaaagagaagaggcgccttctttcacgttcacatctggaaaggggtgagaagcaactctatgatataaaacacgatgaattggttgagggatacactatagcgtctggattaaattttaagggattaggacttctatcatctgttggacatggtggacggtttggatctgtgaaagaattgtcgcctcttggcgatatggatggagcagttgatctttctgcctatgatgatgatggaaaatgcatgcatattcttctttgttcaaagccatcctcgtatcaagctgttccaacaaaggttatccatgtacgcccgtatataacattcacaaacagggccggacaagatttgtacttaaaacttagtattgaggatgagccaaaggtcttacatgcatatgactggagggtttcctttatgtactccaaggggactactgacaaactgcaggtccgactagtggatacagaatggtgccaacctctggagatagtaaaagaagacactattgttatagcaatgagaaagcagggtggtactcagaaatttgtaaaagctgagatacgtggttatgaggaaggttcaagattcttgattgtattccgtctgggcccagcatatggaccaatcaggattgagaaccggacgagtcataccacaatcagtacttgccagtctggtttaggggaggagagttggatccaagtgaagccacatgcaaccagaaaatattcttgggatgacccatatggacagaaagttattgatgttagcattgataaaggcgatgatacttgtgtcctatgtgttgacctggaaaatcctattggaagttccaccagttttagggaacatggcctcatgtttactgttgataccagtgacattaagatattgaagtttgctgattacataaggaaagaggaagtatatggattgcctggatctgaactgactgatcaccaaggatcgtcattgaaggaaaatgagacagagccaggtgctggacccttggagctcattgttgaacttggagttgttggaatatctttgattgatcataagccaagagagcttttatacttgcatctgcagaaggttttcgtttcatacttgactggttatgattttgggaccactagcaggtttaaattaatccttggcgagttgcaactagataatcagttgccactgtctacaatgcctgttgttttgtctaccgagagcaggcctgattcaaatcgttctgttttcaaagcaaacgttgctgttagcaatgtaacttctaatggcattcaagtttacccacatgtctatatccgggtaactgatcaaacatggagactaaacattcatgaacctattatttgggcactgtttgacttctacagcaatcttcgttttgtcaccaccatcaacagcacaactgtcacggaagtggatcctgagatacgaatagagctcattgatatttcagagataaggctaaaaatatctctggaaactgcgcctagtcaaagacctcgtggtgtcctaggcatatggagccccatcctatctgctgtgggtaatgcactcaagattcaggtgcatctgaggaaggtcatgcacagaagccggtttatgcggaagagctccatcatccctgctatcacgaaccgaatcaagagagatctgattcacaatccgctacatctaatcttttctgtggattttcttggagtaacaaaatcaactttatcatcacttagtaaaggatttgcagagctctctactgatgggcaatttcttcagctgagatcaaagcaggtttggtcaaggagaatcactggtgttggtgatgggctagttcaagggactgaagcatttgctcagggtttggctttcggggtttctggtgttttaagaaagccagttgagagtgccagacagtatggtgttataggtattgcacctggcattggccgtgcttttgtgggtttcattgtccaacctttaagtggggctctggattttttttcactgacggttgatggaatcagtgctagttttatgagatgtgttaacattttaagtaacaaatctgttccgcagaggataagagatcctcgtgctatacatcgtgatggtatagtaagagactatgacaaatttgaagctgctggccagatggccctttatctggcagaagctagcagatattttgcatgcacggatttatttcgagaaccttctaagtacgcatggtctgattactatgaagaccattttattttaccaagccagaggattgctttagtaactaataagcgggtgatgctgcttcagtgcttggatctagataaaatggacaagaaaccttctaaaatactttgggatgttccttgggaagaagtactttcattggagctagcaaaagctgggtatcagaggccttcacatgtaatcatacatctgaagaattttaggaggtcagagaactttgtaaggcttattaagtgcaacattgacaacgaacgggaacctcaggctctttcactttgctgttcaattcggaaaatgtggagatctcaccaagcagcaatgaaagttataccattgaaggccagcgtcatgtgtattttgtgtcagatgatgataaaaaggaatcccacagtttatctaggcctttgctaagctcgggaggaacctctactgatgttgagcaacagttcataaacaatacagttcactttcagaaaatgtggagcagtgaaccagaaattcagagccgatgcaaactagttgccaagcagattgcggatgacggaagggtgttcagcatatggaggcctctctgccctaatgggtatgtctcaattggtgatattgcgcatgttggcatccatccaccgcattttgctgctgtatacaagaatatcaatgggaactttgcactgcctcttggctatgacctggtttggagaaattgtgctgaggattacaagagccctgtatcaatatggcttccaaggccaccggggggatacgtagctcttgggtgtgttgctgtcccttcattcaaggagcccactcttgactgtgctttctgtgtggatgagagactcgcggaggatgccgcgtatgaggagcaaatcatatgggcctcatcggatgcttacccatggggatgctatatctaccaagttcagagcgcctcaatgcagttcatggcacttcgtgtcccaaaagaacaatctgagctaaggcccaagaagatattggagtcatttctgcagcaagcatcagagactcaaacgtcccgtgcatgaagaagctgcacatgatgcttgtgcgtgcaagagaactcggctgggacaaagggcaagtctcgtgcaagaaagctcgaagaatgccacttctttcggatcactccatttctccgttgtcaaagcatacacagaggacagagccttgcatgccaacactcgggttgacggaagtgttgtatactagaatagtaggttaaaggttgtaaatgtaaagttttgtaacgtttgatatagtttttgtccagctacatttgttaaggcccatgtggacgtgggccatattagttgtggctacatattctactaagaagttctcaggactaatcatactttctctaatttaaggttgttaaggcccatgtggacgtgggccatactagttgtggctatatattctactaagggcccgtttggtaaaacttcagctcctgcttctttagcttcagattctgatcctcgtgaggagctgatcctcctgattttcctagaaaatcagaatcatttttaaaaccgtttggcaagtaaactgattcttgtcttctgagggttggtggcc

SEQ ID NO: 5400 - DNA, 1430 bp, Zea Mays
cagatggatgcaatgcaaccttttccggtttcctctcctatatgcattcgccgaccaagtgaccaacacgcgccatccattccaacctggggctgaaccgccgaactatgccgttgtcgtctttctccttcctccgccaccacctgccgctccctcttcagctcccgccaacttcaaatcgtcagccaccacacccccgcctcttccacctcctcctccctccgttcacaccgcgccgcaccttcgtctgccagccgctcaccgcggccacggacgatatggctgctgcggccgcggcggcgtcgccccccacactgctcgagcacatgggccaggcgggcacggccgctgacctcactgtccttgtggcccatatccagagcgcgtgcaagcgcatcgcggctctcgtggcgtcccccggcaacgccgagctgtcgcgggccaaggcgaggggtggggctatggcggcagggcgtgacgcgcctaagccgctcgacgaattgtcgaatgatatcatcttgtcagcgctccaaagttctggaaaggttgcagcgctagcatctgaagaaaacgatctgcccatttggatatctgatggcggtccatatgttgttgttactgatccgcttgatggttctcgcaacattgaggtctccatacctaccggaacaatatttgggatctacaataggctggtggaggtcgaccatctccctttggaggagagagctcagctcaactcactgcaaagtggaactcgccttgttgctgctggatatgtcctgtactcatctgccaccatcttgtgtatcagctttggtgcaggtacccatgccttcacattggattggtcgactggagaattcatccttacacatccttccatccaaataccacctagagggcagatatattcagtgaacgacgctaggtattttgactggcccgagggcttaaggaagtacattgacacaatcagacaaggcaaaggacagcatccgaagaagtactcagctcgctacgtgtgctcactggtggctgatttccaccggacgctcatatatggcggggtcgctatgaacccaagggaccatctgcggctggtttatgaggcgaaccctctcagtttccttgctgaacaggctgggggtagagggtcagatggcaagaacagaatcctcaccattcagcctgtgaagttgcaccagaggctgcctttgttcttaggaagcatggatgacatgcttgagttggaaagctacggagatgtgcagcagaaggtcaatcctggatatgaagtttaacgatatgtaaaaaaaggttcagattttttcaagcgcccaagcagaaaataagcttcctcaaccctgcacgcttatatgtgaataatagaaagcttctaaagtctaaggctacaacaacaaaaaaaa

SEQ ID NO: 5401 - DNA, 1283 bp, Zea Mays
aagtgctgaaagttgtgactgctcaagtccaactgctttatcgcacaagttctggtgaagatacttattctagaatcttcaaaagcatcaacgttagtgttcaagaattcaaagagtaactgaagatggaagactaagatgacatttatggagatctatttttgtaaatgggcttagtacctgtttctgtttggtaaaggaggtaaccggtcaatcctatttactttgtgacaccacatcaatcataaaggaggtaaccgattttcttagactggcattcatatagccagcctaccacacaatccccatcctccacttcaacaaccaatttctaaatggatccatcaaccaatttctaaatcgatgatttttgattgtttgattttggtgtagactctcgatttaaacaatttcaagtgcctgtagaatgtagtttggatgtgaactgaagtagtgatagttgctactgacctgccttcataatttttgcaaatggtctgggatagttcggtgatgctgttcataatcatgtgccttcatattgaggaagcatgcaacctgatacaaaagcatagatgatgggatcatggataagcatttgaagacccttgccccagtctacgtgggaacaaaattcgtcaagcttgatgctgaaatctaatgctccattctttgtggccaaactggcaatcaagacactgccatgtgtaatattgttcaagaagggaattgttgttgaccaattagttgggtttcaagatctcagaagtaaagaagattttctgacaatagcattggaacatattcttattctcaagacgaaagggataatcgatgagaagaagacagataacgacgatgacgatgaagaaagcgaggctaagaataggagggttaggtcctcaactgctcaagactctgactcaaactgaacctgagatgaggattgaggacgcaccgttttttgcactttggattttgtttgtttatttgtttgttctgtgtttgtgttgtattgtactgtaattgatttttgtaaccatgtatcggtaccagacaccacaacaataacatgtacaagagattctttagcatccattgtgtgtaaaagctagggtttgtggctgccttttatttcgtttttcctcagctgtcataggatggtacaccacaacaagaacatgtacaagtatgccatagcttgtctttcttgcttcttaagacattgttctgccttttggcacttatggcatatgactttttcacaaatggattacaaaaca

SEQ ID NO: 5402 - DNA, 1604 bp, Zea Mays
gcgattttctagagtgcgtacagtcgtcgccagtctccgggagcccaaagcaagtgcccccactgccccggcggctgccgaacctctgctccggcgactaggttcccgcctccccgactctgccccaagcgagcgcggcacgcgtgtcgccttggcttcctctcttctgcttcagtctcgcgccgccggtttctatcctgccgtcgcccggagctcatcgtgctgacctccagtgacgcgctgaagggatctgggaacttcgaggatgctttgctgtgctggccaccaggcgtcccttctcctcttcgctctgctctctgtctcctcccttctgctcgtcgacggatcccatcaggaccaggaattcggtgaagctgttggatccagaattcttcaaacaaatccagacgcacatgaggtgcattgctcaagggaaaggagccgtgcagcttgggaagctattgatgagtatttgatgcccttcgtggaaaaagaaaaatatgaactcccaagcaaatgtagacttcgtcctgataatgacatgtttcgggagcaagagcaacataagattcattttgatattaatgagtggcactgtggcttttgcaagaaagctttccgagcagagaagttcattgatcagcattttgaaaatcgccacaagaatcttgtggataatctggtcacttgaaaaagaacacgaggattactggacagctcttttttcacactaatttgcactacagttttcaacatacgcgtgatgagtgaaggaagatgcatggcagatctatgcggcgcactacattgtgatctgatgatgcagttcaaaaaaccaaaaagtaaatgcaatgcagctgcagctacaaggaatcgtcatctttgtgagagccttgcagacagttgctttcctattaatcaaggtcttgctgccagccgtcttcatgaatttttcttgcgccagttttgtgatgctcacacttgcagtaagggaacaaaacctttccccaaaggtggcaggaaacaaacaaacaggttatacctcgctctctccattttgacgctgatacttttgccgctgttctatctaattgtgttcctgcaccagagggaaatgaggaaaggtacccaagatctaaaacggttttcgaaaattgggcagaagaaaaagccatcctagtgtccaacagtcacaacgttctcgagctcatggagccaaggatgagctggataaggaacgtggtatgcagtgtgaaatgtttttatgggcagggaagaaatttccctcatttccaggacgggaacaatgtccgcaggtcgaggaatgctggcttcgaccttttcttttctttttctttcttttttgtttcgacatgtagatgcaaacttcgagaggcaagcatgtgtggtctttgtgagattacggcgatattctatatcgtcaaccataaccgaagtcctattgataatttaaggatttttgggaggcctcaggcttaaaaaccaatgtcagtgaatgtagtatgacttctatccaatgtaatgatcaatgtgttggtgaggcacaatctttattcccttgcaacattgttggatttccttgc

SEQ ID NO: 5403 - DNA, 5314 bp, Zea Mays
cttcgactgtcctcaccttcttgcgccggaagaagcaaacgccggcgattctaacccaaccaggcggagatggcggagccatcggcctcctcggcgtccaccgccgccgccgcggagcagacagacgcagagaggatggatgccctggatcggatgctcacgcggctggccctcgccgacgacgcgcacctcgcgccggtgctcgcccgcgtcctcccctacgccgtcacctcactggcgtcccccgcgccggccgtccgaaagctcgccagagatatcactgccaatgctggagttatggaagatctatactgaacccacttcctcaacaatggtccgaaacttttgtatcctatatattgagatggcgtttgaacgcctgccgactgaggagaaaggaaacatcgcgcctgatcttttaattaatatatcaaatattccacctcagcatcaagggatcatcttgcgacttgtaacaaaggctattggtgaatgtaacacacataaggtggatgagacgattgcatcaaaatatcgagtaataaccgaatccagtgatggtcttttatttgctgacttctgttttcacacattattgtatcaagcaccacctcaaggcagtggatgcccagcaggactgtcagttgtccaatcagaacgtgtcaccgggaaacaacccctaaaaattgacgtacttgcatcaagaaagctaggaatcttaaatgtcatcgaagctatgaacttcacacctgagattgtctaccctctttatttatctgcttcttcagatagccaagatgcagtttctaagaaaggagacgagttcttaaagcgcaaagcttcaacagtgaatttagaagatcccgaccttatcaagagactgttcacactgttcaacggcactgtgggtgcagaaaatatagctgcagagctgaaagtttctccagcacatgcttcattgcgtatgcggcttatgagtgttttctgccgatcagttgctgcagcaaatgcatttccacacacacttcaatgtatcttcggctgcatctacggaagtggaactacttcaaggctaaagcagttaggaatggagttcactgtctgggttttcaaacatgcagtaactgaccagctaaagttaatcggtccagttattcttagtggaatattgcgctcccttgatggttcttcaactgcagaaacagattctactggtagagataccaaaatatttgcatatcaggctatcggtttgcttgcatctcgcatgccaaatttattcagtgataaaactgacatggctatacgactttttactgctttgagattggaggatcaatctcttcgtttgacaattcaagaggcagctacttcccttgctacatcatataagcgtgcttccacgatagtactgaaggatcttgagtcacttcttctggaaaattgtgaagcggagcaaagtgaggttcgcttttctgctataagatgggcaacaacattgtacgatacacgacattgttcaagccggtacatttgcatgattggggcttcagatgttaaactggacataagggaaatggctctagctggtctaaatcttatgaatgatgggaggcaatcatctgcagggtctgttgatttcagctatcctgatataaaggagatgataaattatatctgttgtcagcgacctcagttgctgcattctgatgagcagacaaatggaaaattgcttttcccttcaaaaacatttgtttcaatgatcaagtttctgatgaagtgttttgagtctagtgataacttgaaacttttgcaagaagatccatctcattctgctgtagcaaaaatgtgtgtcatcttggaacatgccatgtcatatgaagggtctagtgaactgcatgcgctggccttgaagtcattggtggacctttcttctcgtgaaccaaagttggtgtcattgaggtatgcagaacgcataaattggctaagatctcttttgggtcatgttgattctgatgcccgtgaagctgtgtcacgcctgcttggtattgcttcttcagctctttcaacctcttctgcactaaatcttctgtctgagctcacttcaactctcagtcaaaaccgtccatcaagatttgaaaattaccatggtgttctttgtgcgatcgggtacctaacagctggtgctttgaagcaatcttgtataactgaggatatggtaaaaaatgtagttgatattcttgtaaaagtagttacttctgaaggttcggcattagcatctgttgcaatggaatctcttggtcacattggtctgcgttgtgcattgccttccatcaaccaaaactcttctacaggtacactattaagcgttctccgtgagaggctgactaagcttctttctgaaaatgatactaaagctcaacagaaaattcttgtatcattgggccacatatcttggaatgagatgtcctttcctcacctgaatgatgcgttagacttgatttttagtctttcacgttctaaggtagaagatgtactttttgctgcgggggaggctctatctttcatatggggagaagttcctgtgacagcagatgtgatattggagacgaactttgtttccctttcccaggccacaaactaccttactggtgatgcatctctagtctcgagtaactcctatgaaaaaagtggctgtgaagaagcacactcaattgcacgagaagaaattattaaaaagttgttcgaaacactaatttatagcagtagaaaagaagaacgctgtgcaggtactgtctggttggtgtcactgacgatgtactgtggccgacataaaaaaatcctagaactacttccacaaatccaggaagccctttcacatcttcttggtgatccaaatgagcttacacaagatttggcatctcaaggaatgagtattgtgtatgagcttggtgatgcatctatgaaagaagagctggttcatgctctagtgaacacactgactggtgctgcaagaaagaaaaaagccattaagttgatggaggattctgaggtctttcaagaaggcacaattggcaataatcctactggagggaaacttagcacgtacaaggagctgtgcagtcttgccaatgagatggggcaacctgacctgatatacaagttcatggatctagctaattatcaggctgctctcaattccaaaaggggtgctgcttttggattttccaagatagccaaacaagctggcgaggcacttcaaccttatctgaataccttaattcctaggcttgtccggtaccaacatgaccctgataaaaacatccaggcgtgttacggacgttttatgttattgggcctcccaaaggtttgtaaacatttgaggaatatatggacaaccaccttccgtgcgatggatgacataaaggaaactgtgcgaactgccggtgacagtttgtgccgagccgtaagctcattgacaattaggctctgtgatatatcactaacttctacttctgaggcaaacgaaacgatgaacattgtgctgccatacttgctttctgagggcatactcagtaaagtatcaagtgttcaaaaagctgctattagtttggtcatgaagcttgctaagggtgctggtcctgcccttcgtcctcatctgccagaacttgttagttgtatgcttgaatgtttgtcaagtctggaagatcaaaggttgaattatgttgagatgcatgcagggaatgctggcatcaaaacagataagcttgaaactttgcgcatagctgttgctaaagattctccaatgtgggaaactcttgatatctgtataaaagttgttgacaagaattcacttgatctattggttcctcgcctggctcaaatgattagatcagctgttggcttaaatacaagggttggtgttgctagtttcataactctattggtgcagaaggtcatggttgacatcaaaccattcgcagcagtcttaatgaagttattgcatagtgcagttctggaggaaaggagttctgccgctaaaaaggccttcgcgtcctcttgtgctactgttttgaaatacgctagtcctccccaggctcagaagcttatcgaagatactacgtctctgcattcaggtgggaaaaacgatcagttgtctggtgcaattcttattaaagcctacttgagcaatgcatcggatattcttggtggatataatgcggtggttatccctgtaatttttgtgtcgagatttgatgatgataaagacaccagtgctttatatgaagaactttgggaggatattcctagtagtgaaagagtaaccctaacactatatttaccagaaattgtatctcttttatgtgatggcatgtcattgtcatcatgggctggtaaaagaaagtcagccaaggctataaagaagctatgtgatgttctaggagaacccctttcagcacactaccagaatattctcaaatcacttctgaaagaattgccaggtcgattttgggagggaaaagatgctattctggatgcattggcttcattgtgtgcttgctgtcatgttgctataactgcagaagactcctgcttgccaagtgttatactaaattgtgtttgtgctgcatgcagtaggaaatcaaaattgtaccgtgaagcagctttcttgtgtttacacaaagtgattacggcattcagagatccaggatttttcaatagtgtgtttccaatgctgttcgaggtttctaaccaatctgccatctcgaagacaaagggctctgctgaactagatgaaagtgaaggtgcttctgtttctctggataaagtgctcaattgtgcaacatcttgcatcagtgttgcttttccacaggatattatcaaccaaaagaagaatgttgtagaattaatattgaattctctcttgcctgaggagagttggcaagttaaactatcatccttcttgtgtatcaaggagttgtgcctcaaatttgacaattctggtgatagtaacacatggcctcaagacacagcttacttggttgaggagctatttcatttggtatcaccgaaattagtagactccataagattagtaaagattgctcaggttcacgttgctgcatcggagtgccttcttgatttgagcaaactgtacagagacttcccgctgtcgaacagaacagaggccaagttcgaggatgaactcacagagctctgcgagtctgaaaaaagcgaacaagcaaaggcgattctgaaggaatgcctggccattcttaaagctctccctggagtaaccatgacgacggattag

SEQ ID NO: 5404 - DNA, 3350 bp, Zea Mays
tgttaacctaatgaccttttaaattgttgtataatatgacccatttctgtttcgtttctgtcactaatcttcatgttcatggttgtgggctgaaccaatatgtgtctgagctgcattgtcgagctattacatatcacatatgcacctgcagttctgcaagatctgtatgcttgagtacaaaacgggggatttaccttaggcaatggtgaaatcatttgaagtttcagaactgccagtgaggtcggcaaaatttatttcaaggaaacaatgggttgtagctggtgcagacgacatgttcattcgtgtctacaactacaataccatggacaaagtcaaagtttttgaggctcatactgattacattagatgtgttgcagtccatccaactctaccatatgtgctgtcatcatctgatgacatgttaataaaactgtgggactgggataaagggtggatgtgcactcaaatttttgagggacattcacactatgtgatgcaggttactttcaacccaaaggatattaacacttttgcaagtgcatctcttgatcgcactacaaagatatggagtttaggttctccagatccaaacttcacacttgatggacatcaaaagggtgtcaattgtgttgactacttcactggtggtgacaggccctatttgattactggttctgatgactccactgcaaaggtctgggattaccagacgaaaagctgtgttcagacacttgaagggcatacacataacatttctgctgtttgtttccatcctgagctccctataatcattactggatccgaagatggtacagttcgtatatggcattcaacaacttacagacttgagaacacactaaactatggccttgagagagtctgggctgttggatacatgaagggatcaagaaggatggtgattggttatgacgagggggccattatgataaaaatgggccgtgaagtacctatagcaagtatggataccggtgggaaaatcatttgggcgaaacataatgaaatacaaactgtaaatattaagacagtcggtgcaggctttgaggtcacagacggagagagattaccgttggctgtaaaagagttaggaagctgtgatttgtacccacagagcttgaagcataatcctaatggacggttcgttgttgtatgtggagatggtgagtacataatttatactgccctggcctggaggaataggtcatttggatctgcactggaatttgtttggtcatcagaaggagaatatgcaattagggaaagtacatcaagaataaagattttcagtaaatcatttcaggagaagaaaactatccgcccttcattttcagcagagcgtatttttggtggggtattgttggcaatgtgttctagtgatttcatctgcttttatgactgggttgattgtagactaatacgccgaatcgatgtgaatgttaagaacgtttactgggctgatagtggtgacctagttgcaatagcaagtgatacatcattctacatcctcaagtacaatagagatgttgttgcttcttatctagaaggtggaaagcctgtggatgaaggtgtcgaagatgcttttgagctgcttcacgaggtcaatgagcgagtgagaactggaatttgggttggagactgctttatctataacaactcgttgtggcgcctaaattattgtgttggtggtgaggtcactacaatgtatcatttggatcgccctatgtacctattgggatatcttgcgaaccaaagtcgagtttatcttattgacaaggagtttaatatcattgggtacacattacttctgagtttgattgagtacaagacccttgtgatgcgtggggatttggaacatgcaaatgaaattttatcatccataccaaaggcacaatacaatagtgttgctcattttttggaatctagaggtatgttggaagaggctcttgagatagccacggatgctgactacaagtttgacctagctgtgcagcttggaaaattagatgttgcaaaggctatcgtcatagaagcacagagtgaatctaaatggaagcagttgggtgaactcgccatgtccacaggcaagctagagatggcggaggaatgccttcttcaagcgaaggatttaagtggcttgttgctattgtactcatctcttggagatgctgaaggaattgaaaagcttgcttctttggcaaaagaacatggaaaaaacaatgttgctttcctctgccttttcatgcttggtaaagtggaagattgcatacagttgcttgtagacagtagccgtatacctgaagctgcactaatggcgcgatcgtatcttcctagcaaagtaccagaaatagtagcaatttggagaaacgacctcagtaaaattaatccaaaagctgcagagtctctggcagatccttctgaatatccaaatttatttgaagactggcaggttgctctaactgtagaaaaaagcgttgcttctcagagggatcattatcctcctgctgaccaatacttgaatcatgctgagaagtcaggcatgattcttgtggaagctttcaaaaggatgcaggtcattgagcatgaggaacctgaagatgcagctgaggaaaatggagaacctgatcaacagtgctaactgaacatgaataggggccgagggaagcacaacgcattggctgcaaatgttattttttcccgagggtaacaaatgtggcccccagttttaccctgaagcaccggaaactggtgatgcttgtggccattggaggccacctgatgcttgtccgatctttctgagtgaaccccaagcttgacatattgatgcttgctacacttttggtgtcgatatgcttcttctgccaacaacataggcaattctttcttctcggatcatctgcggacccgatttctatgcgctcgaaccaatgaactgggtggggactgtggagccattttgtgatgaatagttcgaataatcagtatagaggtacgttgtaagatatgccagattaccatagccatcgaattctcctaggagatgacagtttttgttagccattcattgtaatgatgttacttgataaggaaggttacgtgtagtatatgattgcggttgcgggccgagggttttgcccatgttatacttatatatagtggtatcaatccatcggatcggaggctctcgtctactgatgcctaatcaatgccgatgactgcgagaattcaatgcctagatatgcagtgtaacagtgtctcgctgcacacctattcatcgtttcaaaccatggtccatggaatttattttgatgctggaatgctgcggcatgtacaac

SEQ ID NO: 5405 - DNA, 762 bp, Zea Mays
cgccgccgcctctcatctcatcgccgcgctgcttccccgcccgcccccggattggcgctgccgcacccagatcttccccacccaaatcgactccgccatcgtccggatccacgcagagccgtcgcggatcgacgtgctgccgccacagattgcgcgctgtcgtacggatcgagagacacccaccgcaagccttccgcgctggcgccgttcgggaagtaaggaggctacggagagggcacaagctggggggtgtcgaactccgtggagaacgcgcgggcggtggatgcctagctctggtagtctggtgggagggtgaggaaaatctagtatgaagagctgattgagttcatggagaaggtggctaagacagttgattctgaggagcactacgttctgtcaattgcttacaagattgtcatggaacccaatgtgcttcatggtgcatcatatcctccattgagtagggggaagaaggccgtgtcaacgtggactgtgtcactctcattgaggactaccataacaagattgaagttgaactcagcaagatctgtgatggaatcctcaagctccttgattcccaccgtttccgcctcattaacagctgcagagtccaaggtcttctacctcaagatgaagggtgattactacggtatctttttagttgaattcatgtgtattaggtaccttgcggagtttgaaactggatctaggagaaaagatgcagctagaataccatggtggcacacaaacctgctcagataa

SEQ ID NO: 5406 - DNA, 1738 bp, Zea Mays
aatcacatcaaccggactgcagtccatcgaaaagcccacgaggcgacgagcgtgcaacgaactcactccctcgaccgtatcggctgctcctctatccctttcctgccactagtccactactatctaagctagcatggccatgatgatgctagcgcgcaacctgtgctctcgtctccgcccaccgctcgccgccgccgcggcgttctcgacggtccccgcggcgtcggcggccgcagcggaggcggagaggtcgatacgggacgggccgcggaacgactggagccggcccgagatccaggccgtctacgactccccgctcctcgacctcctcttccacggggctcaggtccatagaaatgtccataaattcagagaagtgcagcagtgcacacttctttcaatcaagactggtgggtgcagcgaagattgttcttactgccctcagtcatcaagatacgacactggattgaaggctcaaaaattgatgaacaaagatgctgtcttagaagcagcaaaaaaggcaaaagaggctggaagcacccgtttttgcatgggagctgcatggagagaaaccattggaaggaaaacaaacttcaaccagattcttgaatatgtcaaggaaataaggtcattgacttaacagccttaattacatggaatatgaagatatatccagccagcaaaagttttatgcatgattcttatattttatttcaccattttagcatggataattgaatttgtaggggtatgggcatggaggtctgttgcacactgggcatgatagagaaacaacaagctgaagaactcaagaaggctggacttacagcatataatcataacctagatacatcaagagagtattaccccaacattattaccacacgatcatatgatgataggctgcagactcttcagcatgtgcgtgaagctggaataagcatctgctcaggtggaatcattggtcttggtgaagcagaggaggaccgggtagggttgttgcatacacttgccaccttgcctacacacccagagagtgtccctattaatgcattggttgctgtaaaaggaacacctctcgaggaccagaagcctgtagagatatgggaaatgatccgcatgatcgccactgctcggatcgtgatgccaagggcaatggtgaggctttcagcgggccgagtacggttctccatgccagagcaagctctctgcttccttgctggggccaactccatctttgccggcgagaaacttctcacaaccgcgaacaacgactttgacgcggaccaggcgatgttcaatatccttggcttaatccccaaggccccaagctttggagaggaagaggcggcggcagcggcggtggcggctcctgtgtgcaccgagaggtctgagcaagctgcttctatgtagaatggcaaaactagaactactgttattatagtttgatttgatctggtccctctatgaggtgtgtgtgtgtgtgcagaagagaatagagcaaagtgtgtgtgtgcagaagagaattgagcaacagagacagataagattacgggagagaacgcaggactgtgagagaatattcttctacgtacatcgcttttcctattacatcctacggcaggtgcttcccatattgcatcctatggcgccttccttacatagagcacggcgctacaccgcaccacctcccacatggtgcctacaggttcctcaagcactgacgaggaagtcgccc

SEQ ID NO: 5407 - DNA, 2044 bp, Zea Mays
ttgcgctctggttttctctctttgcgccgctgttcaggcgcctcgcctctcctatccttgtcttgccctgtgtcccttcgtcgcctcggcgcgctcgcccttcgttcatcgggcttccgcgcgctcgcgtttttcattattccttctctgtaccccgtttcgatttcgagcggggtcagtttcttcttcaccggttgatttgttctgctgctttgcgtctccgtgctctcgcagatcccttgtagccgctttgcctccgcgcgacgccgggagcgagccgagtttggtttggccgggttgttcggtttgcggtttactctttctgcgattatagttttctggtggatcctgttttgttctcgacttctcagcgtgtgggttgcaggattgggtccgattcggtgttgggatttgttcgtcatggcgtcttgtggcgaggaggtgcaggcaggtcagtcttctgtcagatccggcggttcattggttttgtcactggacatggattcggtggtttcaggctccaatgtcttctggtgtggtaccatcagaatcagatagcgtcgtcgtagtttgcacaccaggaccaggtgaattcgagaccttgggtccattcttattttaacggctgatctcgcttgtggcctttcgggtgttcgtcctaacttcagaagtagaaggaagggtccttgctggttatggagagattagttgaagggaaggaggtttgcttatgattcattccttgtttttccttttgatatcaccatattggcgtgaagattgccaccgggctctataagatagtttaccctccattggaaatgctgctgactggatctgcagaggcaacagagttctgtaagtagattgaggcgttgactggaccgaatttcttagtatcgggagaagatcgttcggatattggttcgctgcaattcttattttcttatattggggctggtagttttctccagcaattcgattatatggatggatgggtcggaggcgtttgtcactaaccatcctctctcctgtcttgcttcgaaaattggcatgataagcttgattacccttcattggaaattctgcttgctggatctgcagtggcgaaggagttttggaagtagatggaggcgttaactggactgatgttcatagtatcgggagaagatcgttcggatatatctacctaaatcgctcttctactattggttcatatttaatttctgtccgctgcaatttttagttaattatattggggctgatggttttctccagcaacaagattattatatggatggatggatggatggtgttcaagcgccttgcctgtcctgtcttgccctttgtcccttcgtcgcctcgggcctcggcgtgctcgcattttccattacttcgtttcgattttgagccgggtatcatcttcacctgttgttttgttccgctgctttgcgcctccgtgctcccgcagatccctttgggccgtttcgcctccgcgcgacgctgggagcgagctgagtatggtttggctgggttgttcagtttgcggtgtattcttcctgcaattctagttttcgtgttgattcggtatcgtcctcgacttctcagcgtgtgggttgcaggattgggtccgatcggtgttgtgagagttcgtcatgatggcgtgtggcgaggagatacaggcaggttcactattattgttgatttcgggtttaaggatattctgaaaacaatggttcctaatagaagattaactatggcatgttttggtttgagtccggccattccatgatttttattagagctgatcttgtggcaattgagcatcttctgcctaggccaaattggatggattcctagttttattggcaaacataactgtggcatgttttgagtccgatcatgcaatgatttttattggagcatcttctgccaaatagatggaagactcactagttttgttggacgaaattaactggaagcttgtgatgttttacaattggcacacgttgaatgttcagtcctgtgactaaataaaatactc

SEQ ID NO: 5408 - DNA, 1610 bp, Zea Mays
aacagctaccgactgggctattatttctccccgcgtgctctctctcgccgactaggctattgccgccgccgccctacaccagatgcccagttcttcgtcagccccttctccggcaacgagcacctaacagaggctgcagtatattctgtgagaatggcatggggtcaaggtgctaagaggtccatactagggcttctctttcgttctcagcaccaaactgctcgggcatactcttcttcagcattccagactcaccaattgagcactcatgttccccaagatggagtgtttattaggagattcggctctgaggtgtcttcttcagagcaaatgaaccttattaagcaactcagacaaagaacgagtgctccaatcaaagatgtcaaggcctctctagttacctgcaactgggatattgaggctgcacagaaggacctaaggaagagaggtgttgctcttgctgccaaaaagtcttcacgcactgctgctgaaggcttcatcattggcaaagatggctttatctgctcagggtcctggtgaattgttcatgccttttggtcctgagcttttagagaacatgcctatcaatctagatcaccctaagctcagtgtggaaacaactgtccaaagtgccgttacagaagttgctgcaatggttggggagaatgtgaaactcagaagaggcttcatgctttccacaactgcacatggtgttgtttcatcttatatgcatacctgccctcagccagcttcaggtatgggtcgtatagctggattggtcacactagaaacagaagacagcagtactcttcttgattctgtcaaaagtgttgggtcatctattgcgatgcatattgttgcggcaaagccattattcttatcaaaagaactggtttctgcttcggctttagaaaatgagcgtgaaatacttcgaactcaggcccaaagttcagggaaatcccaaatggctatggataagatggtggaaggacgattgaggaagtactttgaggaagttgtgctcatggagcaaaaatatgttttaaatgacagcactaacattaagaccgtgctgaatgacttgtcgaaagaggttggttctaaggtaacaatcggtaacttcatcagaatggaggttggcgaagggattgagagaactgaagccgctgatggtttagaggttgctggtggcgctatgtagattccaggcagagatggtgtgggctaggacggagataatgtttaggcaggcactagcgttctgggacctgcgaggctgcctagttgatttgtcagttcctagcttgtttggttacagttttggttgaaccctctctgattgaattacagttcgtgtggacgtataaaaaatcgaaatagagtgggaattgccccttgaactttttgcactgagtctggagtgaattagtgttagtgcaaagtagttgttttagctgtcatttttgtattaattaaactttgctagaatgacttgtgagtttgtaggataccttttgcaggctattcacccatcttttgccatctaggtactatcgccatgctaagggtatttggtttctagggactaatatttaatttctttattttat

SEQ ID NO: 5409 - DNA, 3438 bp, Zea Mays
cgcatcactccgcctcgtcccccacttctcgcacttccgcttcagcttccaccgtgcccaagagtcacgaggcggcggcgggtcacgccgacgtactctcaggtgctgcggtgggactgcccctgctgctgccgcgggggcggcggaggggaggatggccgcggcgacggcggcggacatggtgtgggtgagggtgcttgaggatggcgtgttccggttcgacgcgtcggaggcggcgcgcgccgccgcggggcccagcctctcgttcgcggacccgcggcggcgggaggcgccgcatgacggggccgacatgcccgccgttgtcccggtatgcgaggtcgcggcggggggatcccagaaggtcgtgataaagcttcctcctgggacatctttctatggtactggagaagcgagtggcccacttgaacggactgggaaacgagttttcacatggaatacagatgcatggggttttgggccaggaaccacttcgttgtaccagtcacacccttgggttttggctgtcctccctgatggaaaagcattgggtgtccttgctgataccactcggcgttgtgagattgatttgcgacaagaatcaactataaagttctctgccttatctgcctaccctgtcatcacttttgggccatttaatactccagctgatgtcatgacatctttgtcgcatgcaattggtactgtgtccatgccgccaaaatggtcacttggctatcatcaatgtcgttggagctatgattcttctgagaaagtactcaagatccgattccctgatccaatatcaatggtagatgatctccattccattggttgcaaagcaatctggatgcttgacccagggatcaagaaggaggagggttactttgtttatgatagtggctcaaaaagcgatgtttggattcaaaaggcagatggcagtccattcgttggagaatatgcctcacatagtctacattcaggggaggtgtggcctggtgattgtgttttccctgactatacatctgaaaaaacacgagcttggtgggctagtttggtaaaggacttcatctctattggtgttgatggaatatggaatgatatgaatgaacctgctgttttcaaaactaccacgaagacaatgcctgaaagcaatattcataggggagatgctgatattggtggtgttcaaaatcattcatactatcacaatgtctacggaatgctaatggcaagatctacttataaaggaatggaaatgggcaatgcagctaaacgaccatttgttcttacacgagctggttttattggaagtcagcgttatgctgcaacatggactggtgataatctttcaaattgggagcatctgcacatgagtctaccaatggttcttcagttgggtctcagtggtcaaccattgtcaggtcctgatattggtggttttgctggaaatgctactccaaaactttttggaagatggatgggtgtgggtgcattgtttccattttcacgtggccatacagaaactggaagcattgaccacgaaccatggtcctttggtaaagagtgtgaggaagtctgtcgccttgcgctactaagacggtaccggctactgccacatatctacactcttttttaccactcacatacaaagggtattccagttgctactccagttttctttgctgatacacaagaccctgaactgaggaaagttgagacttcctttctccttggaccactcttagtttgtgcaagcactttacctaataaaggagctcatgaatatgcacataagttaccgaagggcatatggttgtcttttgattttgcggattcacaccctgatctgccggtgctgtatctacaaggtggagcaattcttcctgtaggtcttcctattaagcatgttagtgaagcaagtttggaggatgacctgtcactaattatcgcattgaatgaaaatggtaaagctgaaggtgttctctttgaagatgcaggagatggatatgcattcacacagggagactatcttttgacatattatattgctgaactccactcatcagtggttactgtcaaaatcttaaaatctgaagggtcatggaagagaccaaaacgaaatctgaaaataaatatattgcttggtggaggtgctatgataagtacagatggtgttgatggtgaagtaatacaccttacaatgccttctgaatctgtagtgtcaagcttagttgcaaccagcgaatttgagcacaagaaacgaatggagatgattcagcctatacctgatatagaagagccatcggggcaggaaggtgctgagctatcaaaaatacctgttgatttgaaaagtggagactggttccttaagattgtaccatggattggaggccgtattatatcgatggcccatattccttctgattcccagtggcttcacagcagaattgagataaatggttatgaagaatacagtggggctgaatataggtctgctggttgcacagaagagtacaaagtcatcaggaggcaccttgaacaatctggagaggaggaatctatttgtatggaaggagacattggtggtggtctggttctccagcgccagatatccattttgaaggacaacccaaagattgttcagatcgactccagcattcaggcaagaagtgtaggagctggttctggtgggttttcaaggttggtctgtttacgagttcatcctacattcaccctgctgcacccaactgaggtagtagttgctttcacggccatcaatggttcaaagcaagagatctccccggaggcaggagaaataacattcgagggagacctcaaacccaacggagaatggatgctagtggacaagtgtgtcgggctgagcttggtgaaccggtttaatcccagggaggttagcaaatgctttgtgcactggggaactggtgatgtgaacatggagctctggtcagaggaaagaccggtgtctaatgagacgccgttgaggatttgccaccagtatgaggtgcagcaaacaacctaaacacctgcccgaagagcagaaataaaaataccaatttggaggatacttcagttgcttgcacttgttttacggtctctgtattgacggtcgcgcaccataacttccatggtattttggagtcgtgtcgttagtcattaccctcttggaggactttgggtctgctgaaaacatggttactcagcaatatctgctactgttcacgactgacattcaaagggttactcagcaatatatggataaaatttgtgttaaagataagttgtgtcgtgtgggttgagttatgtgtgttgtgttgtgctgtaccttcttctatctattaatggaaagatacgtagatctcctgcgtattcgagaaaaaaaactatatggataaaattttatgaaacatcgtaagtgtg

SEQ ID NO: 5410 - DNA, 3781 bp, Zea Mays
cagccaaatcggtgtagaaccaaataccccctaatcaaccatggcccttcgcattaagagctaatttggtgattagggatccctaggggatccatggggaagtaattccctcgcaattcaattttgaatagcaagaggatttcttcccctcgggatccccggtcaccaaatcagccctaaacaatcccgaatccacgcccgcacggccggccgcgctgtcctttgtacaagaggagatgggatggtcgccacggcccccgcccatcacccgcagcaccgcatcactccgcctcgtcccccacttctcgcacttccgcttcagcttccaccgtgcccaagagtcacgaggcggcggcgggtcacgccgacgtactctcaggtgctgcggtgggactgcccctgctgctgccgcgggggcggcggaggggaggatggccgcggcgacggcggcggacatggtgtgggtgagggtgcttgaggatggcgtgttccggttcgacgcgtcggaggcggcgcgcgccgccgcggggcccagcctctcgttcgcggacccgcggcggcgggaggcgccgcatgacggggccgacatgcccgccgttgtcccggtatgcgaggtcgcggcggggggatcccagaaggtcgtgataaagcttcctcctgggacatctttctatggtactggagaagcgagtggcccacttgaacggactgggaaacgagttttcacatggaatacagatgcatggggttttgggccaggaaccacttcgttgtaccagtcacacccttgggttttggctgtcctccctgatggaaaagcattgggtgtccttgctgataccactcggcgttgtgagattgatttgcgacaagaatcaactataaagttctctgccttatctgcctaccctgtcatcacttttgggccatttaatactccagctgatgtcatgacatctttgtcgcatgcaattggtactgtgtccatgccgccaaaatggtcacttggctatcatcaatgtcgttggagctatgattcttctgagaaagtactcaaggttgttaggacatttagggagaaagacattccttgtgatgttgtctggatggatattgactatatggatggttttaggtgcttcacgtttgatagtatccgattccctgatccaatatcaatggtagatgatctccattccattggttgcaaagcaatctggatgcttgacccagggatcaagaaggaggagggttactttgtttatgatagtggctcaaaaagcgatgtttggattcaaaaggcagatggcagtccattcgttggggaggtgtggcctggtgattgtgttttccctgactatacatctgaaaaaacacgagcttggtgggctagtttggtaaaggacttcatctctattggtgttgatggaatatggaatgatatgaatgaacctgctgttttcaaaactaccacgaagacaatgcctgaaagcaatattcataggggagatgctgatattggtggtgttcaaaatcattcatactatcacaatgtctacggaatgctaatggcaagatctacttataaaggaatggaaatgggcaatgcagctaaacgaccatttgttcttacacgagctggttttattggaagtcagcgttatgctgcaacatggactggtgataatctttcaaattgggagcatctgcacatgagtctaccaatggttcttcagttgggtctcagtggtcaaccattgtcaggtcctgatattggtggttttgctggaaatgctactccaaaactttttggaagatggatgggtgtgggtgcattgtttccattttcacgtggccatacagaaactggaagcattgaccacgaaccatggtcctttggtaaagagtgtgaggaagtctgtcgccttgcgctactaagacggtaccggctactgccacatatctacactcttttttaccactcacatacaaagggtattccagttgctactccagttttctttgctgatacacaagaccctgaactgaggaaagttgagacttcctttctccttggaccactcttagtttgtgcaagcactttacctaataaaggagctcatgaatatgcacataagttaccgaagggcatatggttgtcttttgattttgcggattcacaccctgatctgccggtgctgtatctacaaggtggagcaattcttcctgtaggtcttcctattaagcatgttagtgaagcaagtttggaggatgacctgtcactaattatcgcattgaatgaaaatggtaaagctgaaggtgttctctttgaagatgcaggagatggatatgcattcacacagggagactatcttttgacatattatattgctgaactccactcatcagtggttactgtcaaaatcttaaaatctgaagggtcatggaagagaccaaaacgaaatctgaaaataaatatattgcttggtggaggtgctatgataagtacagatggtgttgatggtgaagtaatacaccttacaatgccttctgaatctgtagtgtcaagcttagttgcaaccagcgaatttgagcacaagaaacgaatggagatgattcagcctatacctgatatagaagagccatcggggcaggaaggtgctgagctatcaaaaatacctgttgatttgaaaagtggagactggttccttaagattgtaccatggattggaggccgtattatatcgatggcccatattccttctgattcccagtggcttcacagcagaattgagataaatggttatgaagaatacagtggggctgaatataggtctgctggttgcacagaagagtacaaagtcatcaggaggcaccttgaacaatctggagaggaggaatctatttgtatggaaggagacattggtggtggtctggttctccagcgccagatatccattttgaaggacaacccaaagattgttcagatcgactccagcattcaggcaagaagtgtaggagctggttctggtgggttttcaaggttggtctgtttacgagttcatcctacattcaccctgctgcacccaactgaggtagtagttgctttcacggccatcaatggttcaaagcaagagatctccccggaggcaggagaaataacattcgagggagacctcaaacccaacggagaatggatgctagtggacaagtgtgtcgggctgagcttggtgaaccggtttaatcccagggaggttagcaaatgctttgtgcactggggaactggtgatgtgaacatggagctctggtcagaggaaagaccggtgtctaatgagacgccgttgaggatttgccaccagtatgaggtgcagcaaacaacctaaacacctgcccgaagagcagaaataaaaataccaatttggaggatacttcagttgcttgcacttgttttacggtctctgtattgacggtcgcgcaccataacttccatggtattttggagtcgtgtcgttagtcattaccctcttggaggactttgggtctgctgaaaacatggttactcagcaatatctgctactgttcacgactgacattcaaagggttactcagcaatatatggataaaatttgtgttaaagataagttgtgtcgtgtgggttgagttatgtgtgttgtgttgtgctgtaccttcttctatctattaatggaaagatacgtagatctcctgcgtattcgagaaaaaaaactatatggataaaattttatgaaacatcgtaagtgtg

SEQ ID NO: 5411 - DNA, 1376 bp, Zea Mays
ggaccgattttgctaaccctgagcccaacgcgacccaacctcttcgtctccgatagtccgactccacgaagcgaagccgctcaacatcctcttccgctgcgcctgcgcgcgcgggaggacgaaatacggcaagaagctactcgagaaaggccacgcacgatgatggcgtgtcggcggctggcgagggacgccgtcgcggcctcgctccggcggagcgccgccaccgagaccaccgcctccacgcccgccttcttctcctcttcctccgccgctgcgtcctcctgctcctccggcgcaccagtcgccggcagccccattcgccacttcctggcgcgctattcaagccccgctttccagatccagcctagcgctgcggggctcggcccttcgttcgccgcgagagtggcccttggtctccggccgcagttgtcaggcctcaatctgatcaaaggatttggaacaagcaccatgctagcgatgacgcttcatcagggacaggttactgctgccacaaaagagcaaccatcaaaagccatagctggaccaccccaggggtctttgaaaaccaagcttggttcattttggcctttggtcaggaaacttcagctgccagttggattgatttttctgattatgtctgggttacacagcccattaagtctcaccctaaatattttgcttctcctctactgctcaagtccaagccgctattcaatatatttgtttcttcaggagcttcatcatagggaggtgggtcaaaaccatgctgtgtcgaaggaggagtacatgcgtacaagaaatattattactgaagattacaagtttttttcaattggaaccattgaattagtagatgggagggtgctgcatctcattggaatgctgggcagctggtggatctaccgtgtgtcattcaagtgcaaagagctggtgtagaatatattttagttctgaaggaagagcgagttaaccatgtggtgctgaatagcagatattttgaatcatttctaactgaaagtattttgcaagaatataatggaagtatggagcccggtggccggtgctatttctcacagggcataaagcaattccatgtggaagatacatttcttgtcacatagcacatcgttgtcctgggtgtgttttctgtacaatcgccaatggattgcattatgtcccaaatgttgcttctctaggtttatcatctgtaaacaaggacatgattataatgaacactagtagctgccgcacgcacctgcgcgctgccgccatggtgctagattcatagtttatcatttgtattaggatatgtataagtataaaagtttaatttttgaataaattttagtctctatattcagagttcatgttctcta

SEQ ID NO: 5412 - DNA, 1405 bp, Zea Mays
ggaccgattttgctaaccctgagcccaacgcgacccaacctcttcgtctccgatagtccgactccacgaagcgaagccgctcaacatcctcttccgctgcgcctgcgcgcgcgggaggacgaaatacggcaagaagctactcgagaaaggccacgcacgatgatggcgtgtcggcggctggcgagggacgccgtcgcggcctcgctccggcggagcgccgccaccgagaccaccgcctccacgcccgccttcttctcctcttcctccgccgctgcgtcctcctgctcctccggcgcaccagtcgccggcagccccattcgccacttcctggcgcgctattcaagccccgctttccagatccagcctagcgctgcggggctcggcccttcgttcgccgcgagagtggcccttggtctccggccgcagttgtcaggcctcaatctgatcaaaggatttggaacaagcaccatgctagcgatgacgcttcatcagggacaggttactgctgccacaaaagagcaaccatcaaaagccatagctggaccaccccaggggtctttgaaaaccaagcttggttcattttggcctttggtcaggaaacttcagctgccagttggattgatttttctgattatgtctgggttacacagcccattaagtctcaccctaaatattttgcttctcctctactgctcaagtccaagccgctattcaatatatttgtttcttcaggagtacatgcgtacaagaaatattattactgaagattacaagtttttttcaattggaaccattgaattagtagatgggagggtgctgcatctcattggaatgctgggcagctggtggatctaccgtgtgtcattcaagtgcaaagagctggtgtagaatatattttagttctgaaggaagagcgagttaaccatgtggtgctgaatagcagatattttgaatcatttctaactgaagtaggtacttgaattggcttttcagtaggtgctgtattactgttttttgaaagcagtgatgtccaatgttttgctagagtattttgcaagaatataatggaagtatggagcccggtggccggtgctatttctcacagggcataaagcaattccatgtggaagatacatttcttgtcacatagcacatcgttgtcctgggtgtgttttctgtacaatcgccaatggattgcattatgtcccaaatgttgcttctctaggtttatcatctgtaaacaaggacatgattataatgaacactagtagctgccgcacgcacctgcgcgctgccgccatggtgctagattcatagtttatcatttgtattaggatatgtataagtataaaagtttaatttttgaataaattttagtctctatattcagagttcatgttctcta

SEQ ID NO: 5413 - DNA, 2235 bp, Zea Mays
atcttcacctgcgtccgcgtgtgctgtctccctctttctctctctgcgacgactgggtgggctaccgccgccgccgccctacgttagataccgaggccttcgccggcgacgaacacccgccagggatggcgaccacagcactgctccgggctctccggcggccctcatccgaagccgcgctgcgattggctacaaaggcaaatgtgcaaacaactaatggatatagacatctgaataacaggaacctaagcgttttcaatgagttttctaagcaactaaagggtgaggccaagagcaatcctgaattccagaaatccatgaaggagttcagcgagaaacttgatgtggtgaaggaagatctcaaagtaagaactaagaaaacgactgagacaatatacaagcgtgttgatgatgtttggagtgaagctgaggagacatctaaaaaggttactgcaaatatcaaagaaaaaatgtttgctgctaaagaagaggtaaaggaaagttttggagttggaaaagaagagagtacaagttgcagggatggtttgcctgaaggttcaaaacatgagaaaactgaggcatcctcacattcagatggcacgactgaagatgccacagacagccatacattgtttactaaattgaagtcaacaatctcatctgcttcaccagtagtatccggtgcgtttgcaaagttgaaggacacaaaagtctcaactttagctaagcagggatatgaaatcgtcaaggatgaattaagctctaactctagcagaaagaaaaaacaccaagctaggcatgcttctgctaaagtagaaaagagtacaagaaccgatttagttcttacgccaacaaaaaagacagtattgggtgaaaaatgggaagaatttaagaataagatccgaggtcacccggtctacagaagagtggatgaatacaccaagcctgttgtaaccaagggacaagaggtagctgaagatgtcagggaaagatgggagacaagtgacaatccagtggttcagaaaattcaagagtactatgtgcctcattattctttgttctatctgattatggaatttgattgattcaatctgaactatgctattctatttatttatgttgtcatttagcacattacattaggtcttcaaagcaccaagtaatgcacctgccaggtgcattcatggctgcaaatccattggtggttcctcttcattagtaacacaatcaatgcaataatctctttcttgaatgtgcaaaccaattgtatttcccccctaatacaatatatatattttttgtgactgacacgttgttgatattttttgtttgttccttgtagcttgaatgaatctttgcttgaagaaacctcagctgcggtgacattcagggaaattcggcaacgagacccgtccttttctctttctgattttgttgctgatgtccaagaaatgatcaagccagttttaactgcatattcaaagggtgatgcggagactctaaaaaactactgcaccaaggaagtgattgagcgctgcaaaggagagagagaagcttatgcatcacagggaatattttttgatcacaaaatcctgcacatttcagaagctgatgtattggaaacaaagatgtttggatcttcacccataattatcttacgcttccaaacacagcagatatactgtgttcgagatcgagaaggacaagtcacagaaggaggacaggataccatccaaaccgtcttctattcgtgggctatgcaactcatggacagcgacgaggtgccagaagaagaatcctattacccagtctggcggctgcgtgagatgcaacaagctggcatcaaagctctcatatagctagctgttcaacgagcatgcaagaacgttgatattctttcttttttatttttggctgatttgatgcatcttctcgcagagttagcttgtagcagcgtatactgatagcaacttggtgaaagtgcattatttaatccaacttataagcctcaacaaatttgtaatgacaagagtagcttgaaacaggaaaaaaaataccgatgagcagctttagcctatctcattagtctttctatctcacattctcactccttatccactgcaatgtcctttatctgctccatcagcacaatcctgcttgctgtccaaaatatttcttgacagttccgtagctgcaatgcaaatgacaggaatattgaaaaggtcgctgttatta

SEQ ID NO: 5414 - DNA, 4573 bp, Zea Mays
cccactcctgtcctctcctctcctctccccgccatttggctccgaaccctcacaacagtgcatcgtctctcctgtccccgccatttggttcggaactctcgcggcctcaactcctcctcgtcatcgtaacacccacgcttagagttcgtgagggtcgcccccaggggatctcgagacgtccgtttccaagagtggaccggctcgcaggcgctgctgttaccttgggtggagctcggacctgcggatcagttggattctcaagggagacggtggtttctgatttcctttctctaagcataccaaatcctttgtctcgagtcgggagcaactggttttgggcgtcgcggagcacatggcttaagaataatttcttccagcccggcgacaaattcgcagttggattcagcatatgcattttttatgctgacataggatgtgctcaaccatccgtggactccctctagttgcacaaaccacctcagtgctctctctttcttcgaatcgggctaataatgggcagtgcttgccaagctggcacagacgggccttcccgcaaggatgtgttagggatagggaatgccgccttagagaatggccaccatcaggctgaagctgacgcagatgaatggagggaaaaggaagaggacttggccaacaacgggcacagtgcgccaccgccaggcatgcagcaggtggatgagcataaggaggaacaaagacaaagcattcactgggagaggttcctacctgtgaagacactgagagtcttgctggtggagaatgatgactctactcgtcaggtggtcagtgccctgctccgtaagtgctgctatgaagttattcctgctgaaaatggtttgcatgcatggcgatatcttgaagatctgcagaacaacatcgaccttgtattgactgaggttttcatgccttgtctatctggtatcggtctgcttagcaaaatcacaagtcacaaaatttgcaaagacattcctgtgattatgatgtctacgaatgattctatgagtatggtgtttaagtgtttgtcgaagggagcagttgatttcttggtaaaaccactacgtaagaatgagcttaagaacctttggcagcatgtttggaggcgatgccacagttccagtggaagtgaaagtggcatccagacacagaagtgtgccaaactaaatactggcgacgagtatgagaacggcagtgacagcaatcatgatgatgaagaaaatgatgacggcgacgatgacgacttcagtgttggactcaatgctagggatggaagtgacaatggcagtggtactcaaagctcatggacaaagcgtgctgtggagattgacagcccacaacctatatctcccgatcaactagttgatccacctgatagtacatgtgcacaagtaattcaccctagatcagagatatgcagtaacaagtggttaccgacagcaaacaaaaggaatgtcaagaaacagaaggagaataaagatgaatctatgggaagatacttaggaataggtgctcctaggaactcaagtgcagaatatcaatcatctctcaatgatgtatctgttaatccaatagaaaaaggacatgagaatcacatgtccaaatgcaaatctaaaaaggaaacaatggcagaagatgattgtacaaacatgcctagtgcaacaaatgctgaaactgctgatttgattagctcaatagccagaaacacagaaggccaacaagcagtacaagccgttgacgcaccagatggcccttccaaaatggctaatggaaatgataagaatcatgattctcatatcgaagtgacaccccatgagttgggtttgaagagatcgagaacaaatggagctacagcggaaatccatgatgagcgaaatattctgaaaagatcagatcagtcagccttcaccaggtggagcaagatatggggaaagctcttcaccacaagataacagttctgaggccatgaaaacggactctacatgcaagatgaagtcaaattcagatgctgctccaataaagcagggctccaatggcagtagcaataacgatgtgggatccagtacaaagaatgttgctgcaaggccttcgggtgacagggagagagtagcgtcaccattagccatcaaatctacccagcatgcctcagcatttcatactatacagaatcaaacgtcaccagctaatctgattggggaagacaaagctgatgaaggaatttccaatacagtgaaaatgagccacccaacagaggttccacaaggctgcgtccagcatcatcatcatgtgcattattacctccatgttatgacacagaaacagccatcaacagaccgtggatcatcagatgttcactgtggttcgtcaaatgtgtttgatcctcctgttgaaggacatgctgcaaactacagtgtgaatgggggtgtctcagttggtcataatgggtgcaatgggcagaatggaagtagcgctgtccccaatattgcaagaccaaacatagagagtattaatggtaccatgagccaaaatattgccggaggtggcattgtaagtgggagtgggagtggcaatgacatgtatcagaatcggttcctgcaacgagaagctgcattgaacaaattcagactgaagcggaaagatcggaactttggtaaaaaggtagcctgttttcagttacatgcctgttgtagctatgacttgaaatcagtaatagttatttgagggttgaagggccttccacttaatatataaaagtaagggtagggattcaaatggtttgcacaattataatcagaaaaaagatagaagtgattattaataatctctacctttggaggatataaaaatgcttatgctacttccagctatgccttttgtctttttttagaaaaacttccagttatgacttaattgttaatattgacaataccagtgtaggaatactgaaattagtcttgaaagtaagacattagttgctgctgtttgcgtgatggcccctagcttgaggatactttgccgctactcttgcggatgctttgccgctccatgtcatctctagcggacgctctgctgtcgtgctgctggatgtttgtctcgtctcctctcaggggatgctctgccactgcagtgtcttcgtctttattggcaacctggagttgatgtgcttttccttctgcaggttcagtcggttagattttaggtggagagtccttcttactgcattttctttctctggttctttgggtcggtttaggttgctaaccacttctgtgcttttgtaatatgggcgacggggtctctcagtagctttgtcataaaacaattctacttccccttaatatagtacatgtgactctgacatgttatcgaacaaaaaaaaacattgctcgctctaaattttatgagatctggcatgatttcaaactattcttcttttcaaaatcctgttttctgactgcagtttttacaagattttatggtcttgccgcttcatttttctgactgtttgcattggaccgataccttctgatggccttgtccgcctattttcaggttcgctaccaaagcaggaagaggcttgctgagcagcggccacgggtccgaggacagtttgtgcgacaatctgagcaagaagatcaaacagcgcaaggttcagaaagatgacacgtaatttctaatacaacgtatcatcttcttcggcagatctgagaattaggcggttcttcctattgcgcatcttcgtcgacagatctgagaattaagtggtccttcccattgctgatagtagcccactgattcccaacgttagagtacacaataaataagactctagttgtcaatttctgtggttgactgcagatgatcaccctagcgctatggagtcaacaatgtaatatttatatactatgttcgtgccttggcgccttggcggtttgcaatcttcagtttcctttctgagagattcttggccaagtgccttgaggaggagcaaactagcagcgtcgccattgctatattaatagctggaatcatgtagtagtagttcatccattcattcgaagatcgtgttccaaatcaacacaagtaggggtttgcttctcctctttccaagaaaagtggttgtagcgtgagatgcaaataggtctcttgtgctagatcaagctcaataaactttaggccgtgttaggcagctgatctacttcaccaatgtggcaaggcattcgtcgtattctgttgacagaaacaaggtgttcactgcacgggcatgccgcacgactcctcgcagatcaaaagagggaacacggcatgcttttaccaaaattattttcgaataacattgtgaggaacagacaataattaacttcccaaaacgtctcgctatactggatttttcgatgttggattcgtaatcagatccttttgacaataattttcgtacatcaggcatgtcaacagtaactgaagaatatgttagagccacatgtctcaaaagaaaaaaaaaacagagataatctcttcagtggttcagacatttcggaagagatatacgctcttcaac

SEQ ID NO: 5415 - DNA, 4611 bp, Zea Mays
ccactcctgtcctctcctctcctctccccgccatttggctccgaaccctcacaacagtgcatcgtctctcctgtccccgccatttggttcggaactctcgcggcctcaactcctcctcgtcatcgtaacacccacgcttagagttcgtgagggtcgcccccaggggatctcgagacgtccgtttccaagagtggaccggctcgcaggcgctgctgttaccttgggtggagctcggacctgcggatcagttggattctcaagggagacggagtcgggagcaactggttttgggcgtcgcggagcacatggcttaagaataatttcttccagcccggcgacaaattcgcagttggattcagcatatgcattttttatgctgacataggatgtgctcaaccatccgtggactccctctagttgcacaaaccacctcagtgctctctctttcttcgaatcgggctaataatgggcagtgcttgccaagctggcacagacgggccttcccgcaaggatgtgttagggatagggaatgccgccttagagaatggccaccatcaggctgaagctgacgcagatgaatggagggaaaaggaagaggacttggccaacaacgggcacagtgcgccaccgccaggcatgcagcaggtggatgagcataaggaggaacaaagacaaagcattcactgggagaggttcctacctgtgaagacactgagagtcttgctggtggagaatgatgactctactcgtcaggtggtcagtgccctgctccttattcctgctgaaaatggtttgcatgcatggcgatatcttgaagatctgcagaacaacatcgaccttgtattgactgaggttttcatgccttgtctatctggtatcggtctgcttagcaaaatcacaagtcacaaaatttgcaaagacattcctgtgattagtaagtagatttcctcaactaccctaatgcacgtgaaattttatcttgttaattgttgggtttaaatacttttagctgctacactgatgtgttttgcatgcagtgatgtctacgaatgattctatgagtatggtgtttaagtgtttgtcgaagggagcagttgatttcttggtaaaaccactacgtaagaatgagcttaagaacctttggcagcatgtttggaggcgatgccacagttccagtggaagtgaaagtggcatccagacacagaagtgtgccaaactaaatactggcgacgagtatgagaacggcagtgacagcaatcatgatgatgaagaaaatgatgacggcgacgatgacgacttcagtgttggactcaatgctagggatggaagtgacaatggcagtggtactcaaagctcatggacaaagcgtgctgtggagattgacagcccacaacctatatctcccgatcaactagttgatccacctgatagtacatgtgcacaagtaattcaccctagatcagagatatgcagtaacaagtggttaccgacagcaaacaaaaggaatgtcaagaaacagaaggagaataaagatgaatctatgggaagatacttaggaataggtgctcctaggaactcaagtgcagaatatcaatcatctctcaatgatgtatctgttaatccaatagaaaaaggacatgagaatcacatgtccaaatgcaaatctaaaaaggaaacaatggcagaagatgattgtacaaacatgcctagtgcaacaaatgctgaaactgctgatttgattagctcaatagccagaaacacagaaggccaacaagcagtacaagccgttgacgcaccagatggcccttccaaaatggctaatggaaatgataagaatcatgattctcatatcgaagtgacaccccatgagttgggtttgaagagatcgagaacaaatggagctacagcggaaatccatgatgagcgaaatattctgaaaagatcagatcagtcagccttcaccaggtggagcaagatatggggaaagctcttcaccacaagataacagttctgaggccatgaaaacggactctacatgcaagatgaagtcaaattcagatgctgctccaataaagcagggctccaatggcagtagcaataacgatgtgggatccagtacaaagaatgttgctgcaaggccttcgggtgacagggagagagtagcgtcaccattagccatcaaatctacccagcatgcctcagcatttcatactatacagaatcaaacgtcaccagctaatctgattggggaagacaaagctgatgaaggaatttccaatacagtgaaaatgagccacccaacagaggttccacaaggctgcgtccagcatcatcatcatgtgcattattacctccatgttatgacacagaaacagccatcaacagaccgtggatcatcagatgttcactgtggttcgtcaaatgtgtttgatcctcctgttgaaggacatgctgcaaactacagtgtgaatgggggtgtctcagttggtcataatgggtgcaatgggcagaatggaagtagcgctgtccccaatattgcaagaccaaacatagagagtattaatggtaccatgagccaaaatattgccggaggtggcattgtaagtgggagtgggagtggcaatgacatgtatcagaatcggttcctgcaacgagaagctgcattgaacaaattcagactgaagcggaaagatcggaactttggtaaaaaggtagcctgttttcagttacatgcctgttgtagctatgacttgaaatcagtaatagttatttgagggttgaagggccttccacttaatatataaaagtaagggtagggattcaaatggtttgcacaattataatcagaaaaaagatagaagtgattattaataatctctacctttggaggatataaaaatgcttatgctacttccagctatgccttttgtctttttttagaaaaacttccagttatgacttaattgttaatattgacaataccagtgtaggaatactgaaattagtcttgaaagtaagacattagttgctgctgtttgcgtgatggcccctagcttgaggatactttgccgctactcttgcggatgctttgccgctccatgtcatctctagcggacgctctgctgtcgtgctgctggatgtttgtctcgtctcctctcaggggatgctctgccactgcagtgtcttcgtctttattggcaacctggagttgatgtgcttttccttctgcaggttcagtcggttagattttaggtggagagtccttcttactgcattttctttctctggttctttgggtcggtttaggttgctaaccacttctgtgcttttgtaatatgggcgacggggtctctcagtagctttgtcataaaacaattctacttccccttaatatagtacatgtgactctgacatgttatcgaacaaaaaaaaacattgctcgctctaaattttatgagatctggcatgatttcaaactattcttcttttcaaaatcctgttttctgactgcagtttttacaagattttatggtcttgccgcttcatttttctgactgtttgcattggaccgataccttctgatggccttgtccgcctattttcaggttcgctaccaaagcaggaagaggcttgctgagcagcggccacgggtccgaggacagtttgtgcgacaatctgagcaagaagatcaaacagcgcaaggttcagaaagatgacacgtaatttctaatacaacgtatcatcttcttcggcagatctgagaattaggcggttcttcctattgcgcatcttcgtcgacagatctgagaattaagtggtccttcccattgctgatagtagcccactgattcccaacgttagagtacacaataaataagactctagttgtcaatttctgtggttgactgcagatgatcaccctagcgctatggagtcaacaatgtaatatttatatactatgttcgtgccttggcgccttggcggtttgcaatcttcagtttcctttctgagagattcttggccaagtgccttgaggaggagcaaactagcagcgtcgccattgctatattaatagctggaatcatgtagtagtagttcatccattcattcgaagatcgtgttccaaatcaacacaagtaggggtttgcttctcctctttccaagaaaagtggttgtagcgtgagatgcaaataggtctcttgtgctagatcaagctcaataaactttaggccgtgttaggcagctgatctacttcaccaatgtggcaaggcattcgtcgtattctgttgacagaaacaaggtgttcactgcacgggcatgccgcacgactcctcgcagatcaaaagagggaacacggcatgcttttaccaaaattattttcgaataacattgtgaggaacagacaataattaacttcccaaaacgtctcgctatactggatttttcgatgttggattcgtaatcagatccttttgacaataattttcgtacatcaggcatgtcaacagtaactgaagaatatgttagagccacatgtctcaaaagaaaaaaaaaacagagataatctcttcagtggttcagacatttcggaagagatatacgctcttcaac

SEQ ID NO: 5416 - DNA, 2404 bp, Zea Mays
cgcgcaggtgcaggcatcaatgctcgcagcgagcgcacgcagatctaactacagcgcggcccagggggcgctgccgcttgtgcgcgcaggtgactgacagccactacgcgaacaggcacaaggggttgaggagaagcaaccaaggggtgtggttagattgcagcacgccaggacaagcctgggtcgattctttgatcccactctctctgttctgttctgttctgttctcttctgtttttttaattgtttctgccttctttcatttcaaattagtgcaggcctgttcattgttttgtattgtctatctatctatctatctatctttccagcagcagcagcagcacagacctgattgacagccacggagttgatcagacggcagatattgtattctactgctacctgcatgtatagatgccagccatgggtggttggttacttggagcaagagatgctgtttaaccattttgctactacaggagtatactctactttttttttctctctctctctgccctaacatccactgatccaccaaattgaaaaaaaagaggaatcttgttcatgatttcaaaccccaagaaaaccatgcactgttgggacacgaaccgcatcaaactggccagtgataggataggtaaagcagaggaaaggctgcgttgccttggcccccttgccttcttgcaggggtggccaaagttgcaacttgttgcagatgctttttttttttttgcctttcatccctactcgccaattctgaactagcagcaccaagtgaaaagctttttcacgcgctatcagcttttactgtgtcctacgtactccagtccacagtctcctacccgctatcaccgtgctcagtttggagagagcagcagtatctgtggtgtttgttgtggcaactgtgagacggtcaaaggcaacaaaggaactgtactgccacgatctccagttactatcagtgttcagtctctgctggagccaatgcatccatccattccaaccagaaccagcttccgcagcctcctgtagtcgcttcaagttcaaggtgacagacggatgatccacccaactggttggttctctgtggtcatggaaaggctcgagtgctggtcgcaaaagggcgcgcaagtgaatgctgcacagcggcacaagaaagcaaaggcatctctgtggctagtcactgatgcggaggcatgcctgcctacctcaaaagaatgagctgggatcagctctctgcatatgtcacgcacaccacctgcgcctgtgctgcctgctgctgctgctggagggtatgcgtgcacaatgctgctttgcctcggtcctctcttctatcattgcaatctttttgccatcgctgaagatgacacaggacaccatgatcgtatgcccccccccagccttcagttccttcgtcaccgttacccgtccacggctttctttcatctgccaagtctgcacactcaaatatagagaaaccaaatgcaaagcctactgttgttttgccatccaattcttggcgaagacgtccaagatgctctctggacaggaggtattctatacgctggacgcaatcacgcaaatacttggtttttatcactgtatttttttttcattactgctacagcctgcagtcaagttactttcctagcaagtggaccatccacatccaggaccagctatggtttttcaggccaagtcttttatataacatcgctcgtcccagatccacagcaggtgatggtacggtgccatgatctgtctctctctgtagctcatcgctctcaaggttgttgggcacatgcatgatgcatcgcgagatattttttgtgcgattttgaacacgctctgtccaccaccttttgtattgaaccatccaatgcagccactgaatcttatcctagtagcacaagcacaaggtgatcatacatgaactgcagacagggtgcatctatccacacaaaaggcacatgatcgcagaattatgattgcctacatgccaagataagattctgctgttgtggttcgccgaatgccatccggccaattcaccttcttataaactgatttcagggttcagtgcggaatccatgcaaaaggttgagaaatgcaaggagcttaacacaactgcgagagatagacgacgatcctccatctgtccaactgcgtcgtcctggaggtgaatggtcaaggtgccaaactttgaaagctagcgtcgtcctggagttacactcaagcaccgaacgttaggattgggttctgaagaatatcacgtcgtgcagccatgcaggcatggacacctgtaagggacgaagcaagtgtacgtaactgttgtcaacgtaggatatttgcataaacgaatcgcaacaagccaacaaggtgcacgagctccagtgaaggagag

SEQ ID NO: 5417 - DNA, 2229 bp, Zea Mays
ctcactatatatcccccgcaccctcgtggtctcccctctctctccatctcctgtctctttctctttctacaaagtcgcttgcgaacagccggtgctgcctgctgccgctgtgttggagagaaagaaagcgagcgagcgaggagggaggagggagagggaccgcaaatccctcggtcgctttcgacggcctggatctcccgcacgcgggatcgtacgaccggcacgctgctgtcgctttccaccgcatagtaaattgccaaggctgttgtaatgggggcaaatggtcatcatgaacctcgcagaggatgtaatggcaccgtctgcaatggtagtataagaccactcgattactttggtgatgtagatccatggacggcttgggcatacaagcctcgaacgatctcgctcttgctgacgggaacatgccttttaatttgggcaagtggtgctctcgatccagaaaggagctcatctgctgatcgtgtttggtcagtcaagaggggtgtatttgcgatgattgctgtttttttggcttactcttttcttcaggcaccttcaactggactcattagaccacatcctgccatttggaggcttgttcatgggatgacagttgtttaccttgtcgccctcactttcttgctttttcagggctgttttcaccccctcctgcttaagatcgaaaccaggccaggagttatgcaatactgtgtttccaccatgtgaagccaatctcagtcccaaattttccgttcatatctttaatcttgtgttatcttgtattattacttaatgtctcatcctcataaagtagaacagtattgcagcaagtcagagttcagtcgcaagattttaaagagtagagcaggaaaacttagtatggcatttcatattttcattaactttgttttgcagactcgtgatgatgctaggcaattcatgaagtatcttcatcctgatcttggtgtcgaattgcctgaaagatcttatggaactgattgtcgcatatatgtccctgatcatccaaaaagcaggagatcatttttgatgaatttgttatagctcatatccttggatggtggggtaaggctataatgatacgaaaccaaccacttttgtgggtcttgtcaattggttttgagttaatggagctcacttttcgtcatatgttgccaaatttcaatgagtgctggtgggatagcattgtcctagacatattgatatgcaattggtttggtatttgggctggaatgaaaaccgtgcagtacttcgatgggaggacatacgaatgggttggtttgagccgccaacccaacattatcagtaaggtaaaaaggatgctgggacagttcacaccagcacagtgggacaaggacgagtggcaacctacgctgggtccttggagattcatccaggtgctgagcctttgtgttgttttcatggctgtcgaactgaacacgttcttcctcaagttctgcctgtggattcctccgcggaaccctttggtcgtgtatcggttggtcctttggtggttaatcgcgataccgaccatccgggagtacaatacctacttgcaagacagcaaaccatttaaaaaggtgggatccttctgctggctttccctggctatatgcattgtagagctcctgatctgcatcaagtttgggcatggtctgtttccgaggtcaatgccttcgtggttggttacgttctggtcagcagtcgccttgcttcttgcgctctttgtgtggacatggaaataccgaacagtgaaaaggaaaagggtataattgttacaaaggaatgtttattttgcctccattctttacccaattcggtgttaccgtgtacataaaaaatctattcaaattgtgtacatgtagcagtagtagtcagttttggtgatctgaagaggattatccatggtaatttttttttgccttgtttgtcttcctattttccgtcagcaaagtattttgaccggctcttagatgtggattttaattttttcagttctcaatcccaaaccgttgaaaaatgtttctggatggcccaggcaaccatatgtgcaggttacaccacactgacactgccttgggcacgggaatttgcattgtgatgtgtgaagataggggtagccgggtaggcctgtcttgctggtgaatgtactcttgtcaggctgggacactctagtctaggttggtactccatagtcttcccggcttccag

SEQ ID NO: 5418 - DNA, 1918 bp, Zea Mays
cgaaaccgccaccaagctgcttgcttacggcctagtttcacctcccccattcccttggaattggatttgctcccgaatccggcgaggaagcgaccggcactccacgccacgccgcggcgcccaaggaagggaagcttggggccctaggcctcgtctccatccccgccgcagccggcgcgaggcggcgcggcacgagcacgacggtcaccatcagccaccgcgcgatcccgggggacggccaggccagattccacaacgttttactcttattaaactccccaacttcgtctaaggaagcaagtgatttcattatgaaagactggtctattttctccaaacttgatcacaatggaggttaccttcccaggttcccaatggactctccaatatctcatgatattgggttacgattggtatcgcaagtcggaaacttagttgagtgttcatttcaacatccaaggcatatatgtgctacggggagtggagctgttcaggaagcattcagctgtttcaacaagtttgctggagctttctatttctggttttctagagcatcgaatcctaagttattccaaaggctatcagcagctgcaggctcaagttcaagagcttgtcggtcacacataaagcaagtgacctcttgcttgcagcatttacctggactggagtttggttcacaattaagagaagatcatgctgtacaagtgcttttagcaaggcttgcaagcgcaacttttggacgcctgtggacagaggtggaggagcggcatgcctgcaacatccttatgctggctgctgctactgtaattccaccatttgaaaacatatcaccaaagatgctggctgcgtcaatggcactaagaaaagatcgtggaaacatagagcctactgaacagtcttattcagaggaaaaccgtccaggttgtgcgtgtgttgctgtgccaagagtactcttaccagaagatgcaacggaaccaacaactggcatcaagttccccactgtactcgaagacaattccaatctgactacagaggtccttgttggaatgggttttagaagcatgcgaataatgagggtcaaaaatctgaatctttatgcctttggattatatatacaacctgattctgtctgcaagaagctgggtccaaagtacgcttatattccagatgctgagttaaaggatcacccagatttctatgaagatcttctgagggaaaatattgatatgactgttaggctagtagtaagctacaatggtctcagcattggcacagttcgagatgcatttgagaagtctcttggcttccggttgcaaaagatgaatcctaatactgattatggttgcttgaagacttttggttcttgttttagtgaagacattcgtatacctgctattgacttccggcaaacatctgatggccagctaataactgaaattgatggcaaacaaattggcactgtccagagcaaagatctttgcagagccttcttcgatatgtatattggtgaccccccagtttcagtggagactaaacaagacattgcgcaaaatgtggctggactcataagaagatgctagggaaacgggaaaactaaatcgaagaacctggaattatttcattcatctatacaaggagaggacatataaacagaaaggaagccaggagaggatcgattgtatttatagtggtagactgtctttgtaagctataaacataaagcatatgcttggcaaaggcctccatgcctttcatatggtttggcatctttgccatttcctggctggctggcgtgctgtatcatgtcgacaaatatatgatacagtaaaaagttgtacaacaagagcatgtttctgtgccccaagtgaaaaatgacggggttcagctttgttcatacagatgattgatggttctccct

SEQ ID NO: 5419 - DNA, 2043 bp, Zea Mays
atgccgagcaggcataaagaagaggcacgcacgtgtaacgtgttgttggtttggttgccgttcctccctcacggtcacgggcggagagcgccgaagcggcgacgaaggcaggcagacgccgcggccgcggcccgagtttttaatacgaaaccgccaccaagctgcttgcttacggcctagtttcacctcccccattcccttggaattggatttgctcccgaatccggcgaggaagcgaccggcactccacgccacgccgcggcgcccaaggaagggaagcttggggccctaggcctcgtctccatccccgccgcagccggcgcgaggcggcgcggcacgagcacgacggtcaccatcagccaccgcgcgatcccgggggacggccaggccagattccacaacgttttactcttattaaactccccaacttcgtctaaggaagcaagtgatttcattatgaaagactggtctattttctccaaacttgatcacaatggaggttaccttcccaggttcccaatggactctccaatatctcatgatattgggttacgattggtatcgcaagtcggaaacttagttgagtgttcatttcaacatccaaggcatatatgtgctacggggagtggagctgttcaggaagcattcagctgtttcaacaagtttgctggagctttctatttctggttttctagagcatcgaatcctaagttattccaaaggctatcagcagctgcaggctcaagttcaagagcttgtcggtcacacataaagcaagtgacctcttgcttgcagcatttacctggactggagtttggttcacaattaagagaagatcatgctgtacaagtgcttttagcaaggcttgcaagcgcaacttttggacgcctgtggacagaggtggaggagcggcatgcctgcaacatccttatgctggctgctgctactgtaattccaccatttgaaaacatatcaccaaagatgctggctgcgtcaatggcactaagaaaagatcgtggaaacatagagcctactgaacagtcttattcagaggaaaaccgtccaggttgtgcgtgtgttgctgtgccaagagtactcttaccagaagatgcaacggaaccaacaactggcatcaagttccccactgtactcgaagacaattccaatctgactacagaggtccttgttggaatgggttttagaagcatgcgaataatgagggtcaaaaatctgaatctttatgcctttggattatctgggtccaaagtacgcttatattccagatgctgagttaaaggatcacccagatttctatgaagatcttctgagggaaaatattgatatgactgttaggctagtagtaagctacaatggtctcagcattggcacagttcgagatgcatttgagaagtctcttggcttccggttgcaaaagatgaatcctaatactgattatggttgcttgaagacttttggttcttgttttagtgaagacattcgtatacctgctggtacaaagattgacttccggcaaacatctgatggccagctaataactgaaattgatggcaaacaaattggcactgtccagagcaaagatctttgcagagccttcttcgatatgtatattggtgaccccccagtttcagtggagactaaacaagacattgcgcaaaatgtggctggactcataagaagatgctagggaaacgggaaaactaaatcgaagaacctggaattatttcattcatctatacaaggagaggacatataaacagaaaggaagccaggagaggatcgattgtatttatagtggtagactgtctttgtaagctataaacataaagcatatgcttggcaaaggcctccatgcctttcatatggtttggcatctttgccatttcctggctggctggcgtgctgtatcatgtcgacaaatatatgatacagtaaaaagttgtacaacaagagcatgtttctgtgccccaagtgaaaaatgacggggttcagctttgttcatacagatgattgatggttctccct

SEQ ID NO: 5420 - DNA, 2410 bp, Zea Mays
gcggctgcgtcgactgactgactcaggcgaacacaagtacacctcacacccactccccgcaccccagtgaccccaccacccagcccgccgcgcagagcagcgcagcgcagcgcaggcgccctccaactccgggctccgcaaccgctgctccccctccctccctccctccagctcggcctgcctcagcccgcgccgcgcgatgtcagaggaggacgaggaccagccgccgcccaagcggccgtgcgcgtcgccgcccgcggaccaggtgctcgacaacgtgctcgagacggtgctccagttcctggacgccccgcgggaccggagcgccgcctcgctggtctgccgctcctggcaccgcgccgagtccgccacccgcgactccgtcgccgtccgcaacctcctggccgcctcggccacccgcgccgcgcgccgcttccccaacgcgcggagcctcctcctcaagggccgcccgcgcttcgccgacttcaacctcctcccgcacggctgggacgcctccgccttccgcccctgggccgccgccgtcgccgccgggtccttccccgcgctcacctcgctctacctcaagcgcatccccgtcaccgacgctgacctcgacctcctctcccgcccgctcccggcgtcattccgcgacctcacactgcacctctgcgacggcttcacctcgcgcgggctcgcctccatcgcctcccattgcaggggcctgcgagtgctcgacgtggtggagtgcgacatggccgaggagcaggaggtcgtggactgggtggccgcgttcccgccggagcccaccaacctggagtcgctctcgttcgagtgctacgagccgcccgtggccttcgccacgctcgaggcgctcgtggcgcggtccccgcgcctcagccgcctgggggtcaacctgcacgtctcgctcggccagctgcgccgcctcatggcgcacgccccgcgcttgtcgcacctgggcaccgggtcgttccgcccggcggaaggcggcgagggggaggcagagttcggggaggttgtctctgcattcgtgtccgctgggcgagcgcgcacgcttgtttctctctccggcttccgtgacctcgcgcaagagtacctgccaatcatcgacgtggtgtgctcccacttgaagagccttgacttaagctacgccgcggtcaccccgaatcagatcctgatgttcatcgggcaatgctacaaccttgagacgctatgggtacttgactcggtgcgcgacgaagggctcgacgccgtggggatttactgcaagaagctccagactcttcgcgtgctcccattggatgcgcatgaggatgccgacgagttggtatcggaggttggccttactgccatcgcacggggctgccctgctctccgttcaatactatatttttgccagacaatgaccaacgctgctgttgtcgacatgtcgcgccactgcccggagctcaaggtattccggttatgtataatgggacgacaccagccggaccatgcgactgaggagcccatggatgaaggattcggtgccattgttaagaactgtaggaagcttaccaggctatccacgtcggggcaacttactgaccgggcgtttgagtacattggcaggcatggcaagtccctgcggacgctctctgtagcgtttgctggaaacagcgacgtggcgctgcaatacatcctccggggctgctcaaagctcgagaagctggagataagggactgccctttcggtgatgccggcctcctctctgggatgcaccagttctataacatgcggttcgtctggatgtcaggctgcaacctgaccctgcgggggtgcaaggaggtggctcgggggctaccacgaatggtggtggagttgataaatggccagcctgatgagagcgagaggaaggaaagtgtggacatcttatacatgtatcggtcactcgatggtccaagggaagatgtaccaccatttgtgaagatcctgtgaagctgcttctggtagtatcatgctgctgcccttgatatgctagttgagtgcagatcatttaacggaatatattaggagttcatcagtgtatgtaaagcgtacgttccacggcgagaccataaaagcgcggcagagcaggcttcttggagggggcctcatggctgcctcagttttgtttgctgctctggaggggctccggttctaggactgtctttcagtgccggtgcaatgaccatgttttccctcataattttcgaggtgaaccttgttgtatatcatattagattcattagaacttgcccttctgccgctgctgcgtgtcgtctgttccatttttcgcgttctggaactatgagacgagaaaacctcctgatccattgttaaagtccaatgttccctgtctcaagttctgtg

SEQ ID NO: 5421 - DNA, 3160 bp, Zea Mays
agacgcttccgatcagcttccgtggcctgttccatttccagtccagcacagaaggccctgcccgccgcggcgccgcccactcgttaaaccaccaaaaccaaaacacttcgagacatgcagcttccctgagatctatcgtcacgtcgccagatctaaccaagccccaaatctgcgcgccggcaatggcggtgcgcgcgagcctcgcctgcttcccctccgacccagcgctccacgcggcttgcggcatgccgtggggcgtcgccatcaccccgttctctgccacagatgagcgcggcttcccgccggccaccggcaccgagggccacctcctcccgcgctgccagtcctgcttcgcctacttcaacttgctctgtccgctcgaccgctggtcctggaactgcgccatctgcggcgccgagaatgacctctccgccgacgcagctgcgcgctacgcccgcgacggtggccacgacccgcccgagatgcgctccgcgttcgtcgacctcctcctcccagtggaggagggcgaggcggcagcggcggcggctccgacgcccgtgtacgtggcggcgatcgacttgtcctcttcagaggagttcttggagctagtcaaaagtgctcttcaagctgctcttgaagctcttttgccaggatcactatttggacttttgacatttagcagcaaaataggattgtatgatgtccaaggtccaataccaatcgtgaagaatgtgtttatccctcctgattctgatggtgccttacaagtcgaccttgaagatatcatgcccctttgctcatttttggcttctattgatagctgcaaagaccgcattactgaagcacttgaaacaattaaaccaatgtcttcctgggaagtagcagcaaatgcgcacgatggacaggatcatgtattgcatcacatacgtggttttggtgtagcgttggatgttcttatcaactacctaagttcagaatatggaaatgcatttgagcttgctaggatatttgcgtttttatctggtccacccaattatggggctgggcagctggatataaatgaggaccaaaattctggtaaagcaaggggtgctgatcatatattgcttcaagagcagacaagtttctacagaaatctggtgtatgcgtggacctttttgcaattacaaatgaatacactgatcttacttctctgaaagttctgagtgttgagagtggtggatcactgtttctatattccagtacagatgaatcaacacttccacaagatatatacaagatgttgagtcgtccttatgcttttggatgtgtaatgcgattgagaacatcgtcgcagttcaagattgttgattcttatggccatttcttcccagacccccagtacatgcatgttcagcacataaattgttgcgactcttttgctacatacagttatgactttgagtttgaaaaggattcccaattttccaggaagtcaagccctcccattattcaaattgcatttaagtacactgtgcttgtgcacaatggtgatatatcagatcttccaaattctgggtgcagatttaaatacttgttagaaaggaggctaagagtgcggactatccagtacaacacaactgctaatatctgggacctttacgattttgttgatccagatgttgttttgacaatattggtacaccaggttattttggcttctttaagtgatgcactggaaacaaggctgtggctccaagattggttggtggttgtcatcgctcagtacaacaaagcatacaagaatgtcacatctggaggtggtactgagatttataatattgatgtcaatttctcacactgctcgcaactgcagcctttgtcacggtttgtgtttgctattctgttgagccccctgcttcaagtcagcagtgaaggcattcatccagattatgtgacatatttgcaatgcctcttgagtgcactggagccagcttcgcttcggcaggctatttggcctacgttgatttcatactcctcccccgatgtagaagcagaagtacatcaatcactaagccggactgtgttcaccagtgagaggccaatatatattcttgatgcatacaaagaccttctggtgtattactcacctacagctagtagcgaaatcccttttcctcctccacgaaactgtctactgagatcaacagtcgatagactaaaacaagaaaggaatataacacccaaactggttttcattcacggagcacatgatgacactacagaatttgagaaataccttgttgaggatcagaccttggatgggtccccgttatctagctccacaggtttcagctcattccttgatgaggttagaagtaaagtggctgagcatggcatttgaggaccagtgtcacctgtctcccgattgctggactgtgatgttaaacgggtgatgactgatgacccatgcaacccagaaatactgtcatgaatagaaagagtaagtgctttgctggtttaccggcaaacgtttttgtatgtgtgccgtgtgtttgatggatgctgttcgccatttttttaccgacagctagatgaattttaaagctttcctttacaagaccgcgctatatgtttttgtaatatccatgcgctactatgtttttttgggtacattgcctgttgctaaactatgcatttgctatatacattgctgaaaaacccgttcattatatttctagattgctctatagttcgaatgcttttggtaccattttcggtgtttggtgttgcaatgtactgttttgtccttgtttttcttaggtttctggcgctacctcagacatttgctacctgatgatcttgaacgcaccaaccaatctcgattttgtattagttagacgtttgctacatgaaaaggaattctgaagcgaatacattcatttcggcagaaagcctgaaggcacgtatacaactcaactactgcatcctgcatgtataaaaagtctgtgtgtgtgggaggggggaatgtaaggatgtgcttctttctcatgtgtgggaaaattgttaaaaccctatagcttgatttgacctttttgttgaggatcttgcagcaatgccgctgaggcagtctgccgttccctccggcagacggccttcgataacgttaacggatttgttg

SEQ ID NO: 5422 - DNA, 2340 bp, Zea Mays
caggagttggctgaacttgttcacaaggtccatttgctttgcctaatagcaaggggtagagtagttgacaaggcttgctatgatacactcattcaggcctcagttctttctcttgtaccatgccacttactatggagtcttgttgatgttccaaacctgaaagctgttaacctacgtagtcttgtgagctgggggatcttttgaatcaaatttggctttcactattcaagatcatgtagggactgctgaagagatttgtgcactctctgtggcattattcagggcactcaacttaccagctaggtttgttacaaatctggatgttgctggactcaagaccgatactaaagtgaagggaacattcagtcaagatgcatctaggctttgtacaagggcactaccatgtggttctccattatctggtgataatgtgattagttctcctgctctactgaaagataattctcaaggtagtgccagcatgaatcaacaaacaggtgatcttggaaaattgaaacagacctcagcatgcaagaggagtttatataaaactttgtcaagcataaaatcagatcatgaaagtagctgtgcttctacatcaaaagataaatcatccagcaaccaatttccttccacttccagtaataatgctgaagtactaaaaagaaaaggggatgtggaatttgagttgcaactggaaatggctctttcagctactgctgctgaaactcaaaataataaactagctactcacatgaatcaattgactgttagcttacaagattctagttcaccattgaagaaattgcgtcaaaatgtggaagctttatccagctcaagtgcagtttggtcaagaagtgctggagctccattatattgggctgaggtatactgtggtgggcaagcatcaacaggaagatgggtacatgttgatgttgtgaataatctcattgatgctgaacagaatgtagaagcttcttctgccgtttgcaagaagcctttaagatatgttattgcttttgctggaaatggagccaaggatgtaaccagaaggtattgcttgcagtggcacagaattgcacaaggcagagtgaattcagagtggtgggataatgttttggcgccactaaaacagatggaactggcagcaacaaacaactatgaagacatggaacttcaaaccagagccctaacagagcctcttcctaccagtcaacaggcctataaggaccatcacctttatgctctcgagaagtggcttcacaagaaccaaatttttcatcccaaaggtccagttctcggtttctgtaaaggacatcctgtttatccaagatcctgtgttcaaacactgcagtcaagacatggatggttgcgggagggcctgcaagtccgagaaaacgagttgcctgcaaaggtggttacacgtccaaagaggactttcaatgcccagtcagttcaatcaagtggcaacgaagatggtctaaaaccaaccttggaactatatggtgaatggcaactggaaccactgcaacttcctcatgctgtgaatggcgttgtgccaaagaatgaacgaggccaagttgatttatggtcagataagtgccttccgcctggtactgtacacttgaggttaccaagattattccaggttgcaaagagacttggcatcgactacgctcctgctatggtcggatttgattatcgcagtggtcggtgccttccagtctttgatgggattgttgtctgtaccgagttcagaagtgctatcctggaggcatatgcagaagaagaggagcagagacgagctgtggagaagaagcaggaggaggctcaagcactctccagatggtatcagctgctctgctccattgtaacaaggcagaggttgaaggactcctacaaaacaccttcacacgggattggtaacgaaggcctgcccgaaaatgataatgtccatagaagcactctcagcagccgatcctcagaaagggaacctagttcaagcaaactgcagacagatcatgaccatgaccatgaatttccaaaggaagaccagagctttgatgaggagaccttcgtgaggacgaaacgctgcccgtgtggtttttctatccaagtagaggagttgtaactttgataccaggaatgcacaagtgcacatgtttaactgtgttaacatatggcccctttcgtccatttgaaagtcggaatccaaaacgtagttttgaatctacttacccatttggatccttgcaattgaattccagtctaataatcataatttaggcacaaattaattaagctaaatgtagttttatgtggaatatatttgtatactac

SEQ ID NO: 5423 - DNA, 1573 bp, Zea Mays
agaggatttctattgtagaaatgcagttaggcccattaggttttgcccttttttttcagactcggattggtccgccctccttgtgctccgccggcaatggcgtccaccgccgtcaagctcatcgacatcgcagtcaacttcacagatggcatgttcaagggcatctaccacggcaagcagtgccacgccgccgacatcccggccgtactcgcgcgcgcgtgggctgcaggcgtcgatcgcatcattgtcaccggaggctccctgaaagagtccagagaggcattgcagatcgccgagaccgacgggagactgttctgcactgtgggagtgcacccaacaagatgcggggaattcgaggagagtggagatcccgagggtcattttcaggcactgctggctctagcgaaggagggtttagataaaggcaaggtcgttgctgttggtgaatgtggtttggattatgacagacttcagttctgtccggcagatatgcaaaagaagtacttcgagaaacaatttgagttggctgaagcagtaaaactgcccatgtttcttcacatgcgtgctgctggtgaagacttctgtgaaatcatgacacggaatttgcacagattccctggtggggttacacattccttcactgactcagcagaagatcgggacatgctactttcttttgagaagatgtttataggtgttaatggttgctctctgaaaactaacgaaaatcttgaggttctacgaggcattcctgtcgagaggttgatgatagaaacagattctccatattgtgacataagaaatactcatgctggaagccagtatgtaaaatctgtctggccatctaagaagaaagaaaagtatgagccagattcaacagtaaaaggtcgcaatgagccttgtttagttaggcaagttcttgaggtagtggctggaagcaaaggaatttctgacatagaaggcctgagtagaactctgtaccacaacacatgcaggctcttctttcctcaagatcttgacgcttctgctaatgcgcagcttgagagtggtactgccgtccaggattgctgatttgcggcggcgtagggcgggggtaggacagggcgcccacgcggtggcggaggccgacatggtggcgctgcaggttctggaaccggaggctgagaagcggggcaggggcgtaatggcggctgcggtggccatggccggagcgcagagatttatagaatatgacgaatattgaataaattattcactatccaggcgtaggggtgggcattttaaaaccgaacctgaacccgaaccaaacccgaatagaccgaattgtcggtctattcgggttttcgggttcgggttcggttcctatatgtgctatatttcgggatatgtgttcgggttcggttcctaacctttaaaacccaaatagacctaataacccgaaatataaaaaagctcttaatatgtgatggtattattatatgtatgatttataaacttagtagcttgaaataatgatatcatcttaacgatagtatatatatctttgtatgctattttttatagtcacttgtag

SEQ ID NO: 5424 - DNA, 1649 bp, Zea Mays
agaggatttctattgtagaaatgcagttaggcccattaggttttgcccttttttttcagactcggattggtccgccctccttgtgctccgccggcaatggcgtccaccgccgtcaagctcatcgacatcgcagtcaacttcacagatggcatgttcaagggcatctaccacggcaagcagtgccacgccgccgacatcccggccgtactcgcgcgcgcgtgggctgcaggcgtcgatcgcatcattgtcaccggaggctccctgaaagagtccagagaggcattgcagatcgccgagaccgacgggagactgttctgcactgtgggagtgcacccaacaagatgcggggaattcgaggagagtggagatcccgagggtcattttcaggcactgctggctctagcgaaggagggtttagataaaggcaaggtcgttgctgttggtgaatgtggtttggattatgacagacttcagttctgtccggcagatatgcaaaagaagtacttcgagaaacaatttgagttggctgaagcagtaaaactgcccatgtttcttcacatgcgtgctgctggtgaagacttctgtgaaatcatgacacggaatttgcacaggtagcatataatctgtattcgattccctggtggggttacacattccttcactgactcagcagaagatcgggacatgctactttcttttgagaagatgtttataggtgttaatggttgctctctgaaaactaacgaaaatcttgaggttctacgaggcattcctgtcgagaggttgatgatagaaacagattctccatattgtgacataagaaatactcatgctggaagccagtatgtaaaatctgtctggccatctaagaagaaagaaaagtatgagccagattcaacagtaaaaggtcgcaatgagccttgtttagttaggcaagttcttgaggtagtggctggaagcaaaggaatttctgacatagaaggcctgagtagaactctgtaccacaacacatgcaggctcttctttcctcaagatcttgacgcttctgctaatgcgcagcttgagagtggtactgccgtccaggattgctgatgtcagagtgatttttttattataaatgtttccttttgactggtactgccgtccagttgcggcggcgtagggcgggggtaggacagggcgcccacgcggtggcggaggccgacatggtggcgctgcaggttctggaaccggaggctgagaagcggggcaggggcgtaatggcggctgcggtggccatggccggagcgcagagatttatagaatatgacgaatattgaataaattattcactatccaggcgtaggggtgggcattttaaaaccgaacctgaacccgaaccaaacccgaatagaccgaattgtcggtctattcgggttttcgggttcgggttcggttcctatatgtgctatatttcgggatatgtgttcgggttcggttcctaacctttaaaacccaaatagacctaataacccgaaatataaaaaagctcttaatatgtgatggtattattatatgtatgatttataaacttagtagcttgaaataatgatatcatcttaacgatagtatatatatctttgtatgctattttttatagtcacttgtag

SEQ ID NO: 5425 - DNA, 1534 bp, Zea Mays
cgaaatttatacgcctgccgctgtcgcctcaggtagttaatggccccttagcttgccttgtgtagctcacatttctgagcaacaacgaacgacggacggcgattcaattcagtggtggtggcttagcccagatctctgtctctgtctctctctcggccgcagtcatcaccctacgacctgcagcccaagccatacatctacacttgagagcgaggagaggacgtacgcatcgcagcagcagcaacaacagcaagcagcgtcatgaggagttgcagctagttagctagctggcgcctggcggcaatgaacttgcagcaggaacacctgttgttctcggtctcccggcctgcttccaggccgtcggcggcaacgacgacgggcttccaggaccacgggctcggcggcttccaggtgatcgccaccgacggcggcgccggcccggccgcgccctggtgggccgccgccgctccccaggggtgcgctgcggccaagttcccgatcggctcaccgccctcaggcggcgatccagaccttcggcggcacgagctgaggttcgtccacgaccacgagtcgtcgtctgcgcccgccggtggggcatcatcagccgccatggccgcgcacccggagctgctgctgctggacaggtaccagtaccaccaccatggccgcttcgacctgaccgttgggcaatccatggtgcttaacaacgacagcgccattgctggccatcagatctatggcgccactgcgtactatcatcccttctacggagcccaagctctgcacgggagggtgctcctgccgccggcgatcgcggccgacgagccggtctacgtgaacgccaagcagttcaacggcatcctccggcggcgcctggcgcgcgccaagcgggcggccgccacggaccgccgggtctccgggagccgcaagccgtacctccacgagtcacggcacctgcacgcgctgcgccgggcgcggggcaccggcggccgcttcctcaacacccggagccgcgacggcgaccccgaggccggcagcgcggggaaggcggcgaggctgcaggaggaggaccggcaggcggacgccgtgttcctctcgtcgttggcgagcatggcgggcggcgatgccacccggtggcccagcgcgccgtcgcgggggcggggctgctgcgacctgctcaaggcgtgacggacggccgtgcgtcgcctggtggtggccgtggctctctaggacgcctactcactgattcttggctcccggtgtgtgagcagactgcagagggagatgcagcagcgacttgtgttgtcaatgtttcgtgcagagttgcagacccttttcaaacacctttccttttgtttgatttgacgagatcgacggatgtggtcactgttcaacccaaaatctttaagttgataagagaaagtacttaatgcacttctacatttcaatatccccactcacatgggaccaaagagaaaggaaatccccattcacatgcagccaaagaaaaatgcacaaacgttagaaataaata

SEQ ID NO: 5426 - DNA, 2510 bp, Zea Mays
ttttatctcttttatgtgtttccccgtttcgttgttttcggttctcctttgcctttgtttcccttttctgttctttgggggttgagctctgaggttttcatacggggtttcatctctagcctaccccaacgtgcttgggacaaaaaaggctttgttgttgttgttgttgttgttgttgttgtataaatagaatgtatattccgtctccaaagtccaaagcagttgttcctcgccgtctcggggtctcggcctctcctcggtctctcctcccagatcgggccatccaggtgctaccgctcttcgccccctccacttcaccgccgccgcgtagatccgtctccgcctcctggaagcgctaccagtggaccaacgccgagccggcggagttagcggcgttagggttgcggttgggaattgattgcgggggacgcagcggtggcgcctggcatggcgggggcgcccggggtcgggccgggtgcggggggtgggggcggcgccgctgcggggctcaagacttacttcaagacgcccgaggggaggtacaagctgcagtacgagaaggcgcactccgcggtgctgcactacagccacggcggcaagaccgtctcgcagttgacagtggcatacctcaaggagaagcctgctagccagggctctcagccatcaacaccaagcgccagcagtgggatgcggtctgcagcagcaaggctgctgggcactgggaatgggagcaaggcacttagctttggtggcggtaatggtgcaagccgagctgttgctggaagcagccgtgtaggaggcggccttggtacacctacaggccttggtggatcacaggggggcacaaattatgatggcaagggtacatatattgtattcaatgctgctgatacactattcatcagtgatctcaattcccaggagaaggatccactaaagtccatccatttcagcaactcaaacccactgtgccatgcattcgacccagaggccaaagagggacacgacctgatcattgggatgggatcaggggatgtctattcaatgtcgctgaggcaacagttacaagatcctggaagaaaacccgtggcagctctacattacaataagggtgataaagatgtctcacccaatggaagtcgttgcacttctgtcgcatggggtgccagagcgtgaaggcattttcgtttgttagccatttctgatggaaatttgtacgtgtatgataaaaacaaggatgggaacacagactgtacgtttccagctgtcaaggatcagtctcagtttatggttgcacatgcaaagtcgagtaagagcaacccagtcgctaggtggcatatatgtcaaggttcgatcaatgcaatttccttttcaccagatggcgcatacttggcgactgttgggagagatggttatttgagagtattcgatttttcaaaggaacaactaatatttggtggaagaagttattatggtgcactgttgtgttgcacttggagctcagatggaaaatatctattaacaggtggtgaagatgatcttgtgcaggtatggggcatggatgatagaaagatagttgcttggggtgaaggacataattcatgggacacccaactacttctgtgggacctggcactggatgagattgttgtcccactacggcatccttcaagtgcctcacctacgtttagcagcgggagcccttccacacactgggacaatgcatgccctccaacaggtgttcttcaaccttctcctagaatgcgagatgtcccaaaactatcgcccctagttgcccaccgagtacatgccgatcccctatctggtatggtgttcaccagtgaatctatcctcaccatctgccgcgagggcctcatcaaaatctgggttcgaccagagcagagcgaaaacaatcagcaatcgaattcttcagaatttgctttaggccctgcttcgaaggatagggcgatcacatcttccaataaagcaagtagctccagctttaagaagctgccgcctgttcttgtcacatgatgaatcaacgggatggttcttgtggatatttctgcttcacgtggcattagtggtggatatgaatcttactccatggttgatggggatgaaactctcatatggagtctgcagactgcaagtaatgagggtgagcatttgatggttgatgttcccaggaagcagggccagcgttgccagtttttttggcacgaaagagtaaatgggagctcttgtacagacacatacttaatgataaaattgtaaaaactcactgtccgtttcataatattcaatagccaccgaaagatgattggacgaccatgttatcgattttagctggtgggttgatagtatccttaaactttggtacttcggagacttgtaattatggaccataatatctgaggaatgcttcagtcttacctggtgtaagttgtgttactatttccttctgccttttgtcaattattagatctagtttggcaactccatttttc

SEQ ID NO: 5427 - DNA, 3002 bp, Zea Mays
gacgagccaagcggcttgtaaccatttttttcctgtcactcagaactagctatcggcctaccgcacccgcaaaatttcccaaaccccgcacacaattgccggaaccctagctccactccatcctcccagcccgcaccaatgacggaccaacaaacccaggatctcgtcaaggagctcgtccaccgcctcctctccgccgccgaatccggcgggcgcggcggcgggcgcgacacgggcggtgcgctgcggttcgcgcaccgaatcctctccagccgcctcgcccccgcggtcctccccgatgagcacgcgctcgcggagtccatcaagcgccgcctcgccgcctcgggccgccccgatgatgcgctctcattcgctgacctccactccaagctctccgtccgtgcccgcccagcgtcgctgtggccgctcctctacctgctcgactctctctcctcgcagtaccgcgccgccgccgcggcttcgtgcctcccaaaccttcccatcgccgccctaccgcagaatgccacctcggggacggcgccgggcgccggtgtcaggccgggttcgcggacgcacggggcgccgccgggcggcctggtgctggtctccaaggatccggacaacatccgcgagatcgcgctgcgtgagtacaccgagctggtgatcgacgagacggaggtgtcggaggccgcgcttgtgcgggacgtgctgtacgcgtgccagggcatcgacggccgctacgtgcgctatgacaagtccgtggactcctacgaccttccagacggtgttcgagtgccgcgatccacgcgcaccctcgttcgcaagctatgcgagcttggctggctgttcagcaaggtgcggggcttcatttctgacaacataagccgctcgccctcagatgctgccactgaggtgggcactgttacccaggcattctgctcggcgctccaggaggagctgtctgattattataagctgctggctgttctggaatcgtactcattgaatccaattcccacacctggatctgattcaggtgtgtccagtaattacctctcactgcgccgtcttgcagtgtggcttgctgagcctgcagtgagaatgcgcctaatggctgttctggttgatggatgccggggactgaggggtggtgctatggctggtgtgatccatgggcacgcacaacacggagatcctatgtttcaggagtttatgggccgattactgcgccgggtgtgctcgccgttgtttgagatggtcaggagctgggtgctagaaggggaattggaggatgtatttgcagagttttttatcgttgggcagccagtgaaagcagaatctttgtggcgggagggctaccttattcaatctgatatgcttccagctttcatatctccagtgctcgcaaaacggattcttagaactggcaagtcaatcaactttcttagagtatgctgtgacgatagtggctgggctgatgctgctgccgaggctgctgcatatgttggcactacaacatctcggggtggccttggttatggggagactgatgctttggaggcattggtggttgaggcagccaagaggattgatcgacatttgatggatgtcattcataagcggtaccgatttaaggaccactgccttgctattaagcgttacttgcttcttgggcagggtgattttgtccagtatcttatggacgttgttggccccgagttatcagagccagcaaataggattagctccttccaattggctggcttgcttgagactgcaatccgagcatccaatgcacaatatgatgactgtgatatcttggaccggataaaggtaaagatgatggatcatggggatggtgatcgtggctgggatgtcttctctttggagtatgatgctagggtccccctggacactgtgttcacagcttcagttatgaagatgtatctcaaggttttcaacttcttgtggaagctcaaacgcgtagatcactcccttaccggagtgtggaagactatgaaacctaactgcattgtttcttctccattttacaaggaaggaacaagcatcagagctcaatttgtatcagttcttcgtaaatgtcaagttctattcaatgagatgaatcactttgtgaccaatttccaatactacattatgtttgaggtcctggaggtttcgtgggcccgtttttctgatgaaatggatgcagcaaaggatttagatgaccttctcttagcacacgataaatatctcaactcgatactggagaaggccctgcttggtgaacattcccaaggacttttgaggaatctgtttgaactgtttgacattattttacagtttcgaagccatgctgatcgatggtttgaaaggatatatgagttgcagctaaggggaaagggtaaatcaaaatcaaaggatacaggttcatggtttgatggcggcagaaaagctatgatccaactagctggagaacttttctggaaaatgggtgaagacctggatagcatcgcaaaggattatacagcttctcttgatgcttttattacgcagctgcccatgcaacagcacgtcgatttgaagttccttctcttccgccttgacttcactgaatattacagtcgtgtttcctccaacaaatgaatgtgagccgcttatgtgaaaaactaggagttagattgatcgtttggttgggacttggaaagcattatttttataccatatcccattaattgatcttggtcgcttgattggcaatggtcacttccattttccttgcacctcctgtagaagaggatctgaatacccttttactgaggattgccaatgctacaatctggtgattctgtcagctgtttgcatgctgatgcttatgtgccgattcaacgaggctaaagccacgcatttcatgcaactctgtacacaattgcttccacagatcaaagcacagtggatacaagaatttttgacctgatgggctaccttctatttcctgctat

SEQ ID NO: 5428 - DNA, 891 bp, Zea Mays
aaccaaacaagcgtcgtcattcatttcctcactcagcgaggctaggcaagctggccgtcaagctcaggccgtcaggcgatacaactacaagcctacagtgcctacccctccgccgcctagagagagagaggccagcgatgacgaagacgacgccgccggcgttcgtgtaccggatcagcacggccgacgagtgggcggagtttcagcgcacgggcgccacccttggaggcgacctcgacagctccaccggctgcatccatctcagcgacctaaaccagatgactttaaaaaactttttccttggaaggaatgatctgtacctactgcaaattgatactttcaagcttgcagatgggttaatttatgagctaagtgatggtgataactattttcctcatttctatggccctggtcggagctttgcacctcttcaactagatactgttgtgaaggcagacaaaatagagtttgcagacaatgattttacctgtggtctacttgatggaagttatctcccaagctgatctgtagagtctcaccttcatcttagcaatgctcatttgagttctctgccaaaggttagtgtttaatatgtctatatatgcagaagtcggtcatatatttgagtgacagattgtaccatccagaattttccacagttattcatatactttctggtggaagataaaatatgaaactgtatgtaattgacgcatcatgatggatacggatgttcattatgctatagcaagtagtacaatgtgtacttgctgtcatgttacatccagtgcctggttgcataaacaataagcactatatgttaccttgggtaacatacttgtaataatgatatgaattcaaaaggagaatgccacttcaattgtttttcca

SEQ ID NO: 5429 - DNA, 2921 bp, Zea Mays
tgattgtcgcgtcgctgaatcgatctcccagctcagagaccgactcccagtttcctccttctggcgtgtctgaatgaatgtccaggcagaagcgcaggacggggcagcggcagcgtgagcgacgccaccacccaagcggacggcaataatggacgctaaccactcgccgccggcgcagccggagaggaatcatggcagcttaaactacgacatcgagagcacggacggcacgtggcgcggcgcgggggcgtggcaggagcaggacccatcgtcggaggccctgatgcggtacgacgacgacgggccccgggagccgctgctgcgaaggcgcaccatgaacaccacctcccagattgccatcgtcggcgccaacatctgccccatcgagagcctcgactacgaaattgtggaaaatgaccttttcaagcaggattggcgatcaagaaagaagcagcagatattccagtatattgttctgaaatggtcattagttcttcttattggcctgtgtactggacttgttggcttcttcaataaccttgcagttgaaaacattgctgggttcaagttgttgcttacaagtgatctgatgctcaagcaaaggtacttcacagcatttctggcatatggaggttgcaatctagtcttggcagctgctgctgcagcgatctgcgcttacatagcacctgctgctgctgggtctggtatccctgaagttaaagcataccttaatggagttgatgcttatgctatattagctccaagcacactgtttgtgaagatatttggttcaatacttggagtttcagctggatttgtccttggaaaggaaggtcccatggtacatacaggagcatgcattgccaacttacttggtcaaggggggtcacgcaagtaccatctgacatgtaactggctcagatactttaagaatgatagagataggcgggatttgattacttgtggctctgctgctggagttgcagcagcattccgtgcgcctgttggtggtgtgctctttgctcttgaagaagcagcatcatggtggcgaagtgctctcctgtggagaacattctttacaactgctgttgttgctgttgtactgaggggtctgatccagttctgtcgtagcggaaaatgtggtctttttggtcagggagggttgattatgtttgatcttagctcaaccgtaccgagttacagtacccaggatatcattgcaattattgtccttggaataattggtggggtcttcgggggcctgttcaactttctcttggataggattctccgagcttatagttttatcaacgagagaggtgctccatacaagatccttctcaccgtcacaatatcaatcatcacatcagcatgctcctatgggctaccttggctcgccccatgcactccgtgccctgctgatgctgtggaggaatgccctaccattggccgctctgggaattttaagaactttcagtgcccgccgggctattacaatggtcttgcgtcgttgttcttcaacacaaatgatgacgccatccgcaatctattcagcagtggcaccgagaatgagttccacatgtccactcttttcgtgttcttcactgcgatttactgccttggccttgtgacatacggtattgctgttccatctggtctcttcatccctgttatacttgctggggctacgtacgggcgcatagtggggacccttcttggtccaatttcagaccttgatcctggactattcgcacttcttggcgcggcatctttcctcggtggaacaatgaggatgactgtgtcagtctgcgtgatacttctggagctcaccaatgacctccttatgctcccgttagtcatgctcgttcttctgatatcaaagaccatagccgacagctttaacaaaggggtttatgatcagattgtggtgatgaaaggcttgccattcctggaagctcatgccgaaccatacatgacgcacttggttgctagcgatgttgtgtctgggccactgatctccttttcaggcgtcgagagagtggggaatatcgttcaggcgttgaggatcacaggccacaacggatttccagtggtcgatgagccacctctatcagaggctccagaacttgttgggcttgtgctcagatcccatctgctggtcctgctgaaaggtaagggcttcatgaaagagaagatgaaaaccagcggtagcttcgtgctggaaagatttggtgccttcgattttgccaagccaggctcagggaaaggcctgaagattgaggacctggatttcactgatgaggaaatggacttgtatgtcgatctccatccaattacaaatacatcaccgtacacggtggtagagaccatgtcacttgcgaaggctgccgtccttttccgggcactgggactcaggcacatgctcgttgtgccaaagaccccagggagacctccaattgttggaatcctgacgaggcacgatttcataccggagcatattcatgggctgtttccaaatatacacaagtcacactaatggaacactcaatcagtccatatcttttcttttcttttttgccgtcgccttgtaggttgtagctagctgtacgaaaacgaagctacttttgtccaatatttgctatcggccatctggccttttcttttccattttgtttcttcaggagtactccagaatcatataatcactggataatattgtatttgttcaagagctggttccctggcagaacactccataagtgatatttctgtctttttctcaaatacgcagaagatctacgtatcaatatattatataggaaaacgaccaaattactaccatcacatatggacagagtttacctaatcttttgatttatttggctctcccgctcctttcttttttccttttttgttatgta

SEQ ID NO: 5430 - DNA, 4591 bp, Zea Mays
gatcccgtctccgctttaccaaaacagctcctcgcccaatcattctctctgcctcgtcctcgcgccgcctctcatcttccgggagtcagcggcggcggaatatggcggggaaatccaagggtgggaagaacaaagggaaggcgcaagtcgtgggtcactccgcctcagctgagccagaggtgctggcgactgatggagccgaattggttaatccagataacggggaagtaagcgaacccggggaagtaagcgacccccctgccacggaggatggcgtggcagatgtagagaaaggagacggggatgctccggaggttgtgcagtctgcaaaaaagccagctgaaggtgagcttcatctgtaccctgttcctgtcaggacacaatctggtgaaaagctcgagctgcagctaagcccaggagattctgttattgatgttaaacaattcctcttggatgctcctgaaacatgcttctacacatgctatgatttgatattgcatactgaagatgggtcagctcatcagttagaagactacaatgaaatatctgaaatagcagatataacttctggtggatgttcactggagatggttgctgcaatatatgatgagaggtctattaggtcacatctccgacgtgtgagggagttactatctctgtctactcttcatgtttccctatcgacatccttaactctgcagcaggagtctgcccagggaaaatctgcagattctggaaaaagccctattcaggagcttgatggtttaaattttatggaggatagtgctggtgctctcactaatttattggcatctacaccagcagagataaaatgtgttgaaagcatggttttttcttctttcaatcctccgccgacctatcggaggttacatggagatctcatctatattgatgttgctacattggaaggaaacaaatactgcattactggaagctccaaatctttttatgttaacagtagcaacaaaaatatatttgactcgaaacctacaaaacaaggactggaggccagcactctcgtaggcctactacagaagatcagtgccaaatttaagaaaggttttcgtgaagttttggatcgcagggcatcggctcatccatttgagaatgttcagtctttgcttccagtgacttcttggctaggagcgtatcctgtgcccgaacatagaagggatgcagccagggctgaagattctgttgtgttgtcatatggcactgagttaattggcatgcaaagagactggaatgaagaattgcagtcctgccgggagtttcctcatggcaatcctcaagaaaggatactgcggggcagagcgctctacaaagtaacatgtgattttgttgatgctgcagtaaaaggtgcagttggtgtcatcaatagatgcatacccccaataaatccaactgacccagaatgttttcatatgtatgttcacaacaatattttctttagttttgctgtcgactccgactatgaagacatttcaaaggaccacaagccagattgccaaaatgggtccagcagaagcaccaaggtttcctccccagatgtgataactaagccagatgcaaaccatggcaaatctgctgaggtagttgattcaaaatctgaagaggcacaactcgcagatagtgagcaggcgacatatgcttctgcaaacaatgacttaaaaggaactaaggcttatcaagaagctgatgtttctggccttcacaatcttgcgatggcaatagttgattacagaggtcacagggttgtagctcagagtataatacctggtattcttcaaggagacaagtccgattcccttctgtatggttctgttgataatggcaagaagatatcttggaacgaaacgttccattctaaggttgttgaggctgcaaagcagctccatttgaaggaacatgtggtattggatggttctggcaatcctataaaattagctgctacagtcgaatgcaagggtattgttgggagtgatgacagacattacattttggatctgatgagagtgactcctcgagattctaactacattggacaagagcaccgcttctgtgtgttgagacctgaacttatagcatcatttgttgaggttgaatccataaaacaatcgttgaagcaaaaggttccagatgctccagttgcaagtacttctgatgctaaggctacctctgttgaaggagatgacaagtctgaagaaagctctgttcatacacacgaggaaaatgacaactcaagctccgagattcttttcaatccgaatgtgtttacagagtacaagcttgctggcagtgcagaggaaatcgctgctgacgaagagttggtaaaaagggctggtacatatcttgtagatatagtgatcccaaagtttgttcaggatctttgttcccttgatatctcccctatggatggacagactttaacagatgcattgcatctccatgggataaatattaggtatctgggcaagattgcaggcatggtcaaacatttaccacacctatgggacttgttttctactgagataatagttagatctgcaaagcatgttatcaaggatatactgagacaaagtttggaccatgatattgcgccagctattgctcatttcttaaactgtttcgttgggaaagttttaggtgcttccacaaagagtagtcttagcaacgcacagtcaaaaactctgaagggtcacgaaaatagccaaactcaaaagtctactaaaggccctaaactgagccatgctgccgtttcaagaaaaagcttatcaacttattctcatctaacctctgatggaatttggtttagcattaaggaatttgcaaaatcaaaatatcagtttgaagtgccagatgaagctaggctttcagccaaaagggtagctgttctccgcaacctatgccgaaagatgcaaagaatcttatggaagcagggaaagtcaggatggctgagggaacattgaatgaggcatatgcattgttttctgaagccttttcactgcttcaacagattactggtcccatgcacaaggatgctgcaaattgttgccggtaccttgctatggttttgtaccatgctggtgatacagccggtgcaattgtgcagcagcatagggaactcatcataaacgagagatgtcttggtcttgatcatccggacacagcccacagttatggtaacatggccttgttctatcatgggctcaatcaaactgaattggcactgcggcacatgtcccgtacactgctgctgctaagtttggcgtcaggacctgatcatccagatgttgcagcaactctcataaatgttgcaatgatgtaccaggatgccagtaatatgaatactgctcttaggtatcttcaagaagcccttatgaagaatgaacgacttcttggccctgaccatgttcaaacagccgtatgctatcatgctcttgccattgcattcagttgtatgagcttatataagctttcaattcagcatgaaaagaagacctatgatatactggtaaaacaattaggggaaaatgactcacggactaaagattcagaaaattggttgaatacatttaagcttcgagaagaacaggtcaacgcccagaagcagaaggaccagggagctaatgcatctgataacgctgttaaattcttgaaggcaaaccctgcatttttacaagcaatgaaggctgctgcgctccaatcaggtgacaggtcagcaaatgtcaacaggtccctcaatgctgcagtagttggagaaggtgtaccacgactgagaggagtggatgagcgagctgctcgagcgaccgcagaagctcggaagaaagctgttgcaagaggcctgaatgtccgtaatggccctgcggcaaaccatgcgtctgatgaactagctcagattctcaaactcatcaatactgcttcggggtcttccacttcggcatctgcaaaaaccgaggaatctgcctctgaagggcaggcaacaaatggatctgttcaaaacggagctgcaaccgatgcgaagtctgcagatatcaacgtgccacctgcacctgccaaccaaccagttggattgggggcaacattggagttgaagaagcagaaatcaaagcaaaagtcgtagaaaacccgtgcctggaatttcttttatgactgcagttttggactttagggtgatttgtttttttacatttatagaaattccacgttcacgtggtggaagagttcatttgtttctgttggaggttcttaggagagttcaataatcattacgagaaagaagacaattgtttggaatcatcattgatagaccactgatgagataatggctaatccttaagctaataaatctgtagccggtacaacctgtttaatttttttttgtgcaagattagtatgctaatttgttgtccaacggaggtgttgcgcttatttctgttaatttttttagttcttctggtggtgcgtgactttgtgtgcagaacgattttttagtgatgcgcgtgccggcgtttgtgcagggttgtgttcgatatttcattttcagcatcgcgctgcccatgtgcaattg

SEQ ID NO: 5431 - DNA, 978 bp, Zea Mays
agaacgacgaagtcgacatatgtgaccatcaggaacaagaatgggagatgactttgcaatacatagctgttttaagcgttgggctgactatctacttgcgattctctacatatgaggactccgaggatttggagaaagacctaaagctgttgctgtctccagtaagagtaggcgcagacgccttgtcatgggcagctaagaagatagagccaaacaaggtgggcctgccaacgtctccttccacgacggcggtgaaagaccgggttcttcaggccgcggcgaagcacgagtcgcagccatcggatgccgacgagtcgtcggtccaaacagccgaggcatgacacgcgccgaaagcttgggagccagtcgagcggtcccgccgaatcctcaataagagcactcggtgggcgctccctggtaatttgtgaagtccatgtcgtttatgatgtaaagcactgtaaagcggttgtaaattaattgcgtgagcagcatctgtaagttgacatcaacttggttggttgtgtgtgtgtagattatagagaaagaggtgtcaatgtaacgttaattcctgagcctgtctgcgatcttgcccgtctggtactgctactctgcttgcttgcttgtttggcacgcgatcaaggtgaattaagtaaaaatggtccgtggtccaagtccagccccacaacttggctgtcaggcgtagtgtaacctttgttggtacggaaatgaaatcctggagtacggctgtttttaaccaccatagtgcctgccgaaatgctgctcggtagtaaacgggtacagaatttaatcccgcatcatttggaagctccaccccaatagccacagcccacaggccccagaagacgaaaggaaacgatgcgctcgctgctcgcataggatcaaagggacgggaatcccaatgtcttgttttcaaaattttatcgtattttcttaaaaacagtataaaaaacatagaaa

SEQ ID NO: 5432 - DNA, 1144 bp, Zea Mays
ccatcatcagtagctagctgttcgaagctttcagccgatcgagcaccatcgtcacagtcagtagtagccaagcatatttctttctccgagtgatttgcgctgagcgatcagttcatccagagcgagcggagctgagctgagctgagcgagcttgcgttgcttgagagaccctgctgccatggcttcccaccaggacaaggctagctaccaggccggcgagaccaaggcccgcaccgaggagaagaccgggcaggcggtgggggcgaccaaggacacggcgcagcacgccaaggaccgggcggcggacgcggcggggcacgcggcgggcaagggccaggacgccaaggaggccaccaagcagaaggcgtccgacaccggcagctacctgggcaagaagaccgacgaggccaagcacaaggccggcgagacgacggaggccaccaagcagaaggccggcgagacgacggaggccgccaagcagaaggcagccgacgccatggaggccgccaagcagaaggccgccgaggccgggcagtacgccaaggacaccgctgtctccggcaaggacaagtccggcggcgtcatccagcaggtcgctcatgacagctttccgattctctgcttgcgtgcttggatctcggttccaggccactgagcaggtgaagagcgcggcggcgggcgccaaggacgcggtgatgagcacgctggggatgggcggggacgacaagcagggcgacgccaacaccaacaaggactcctctaccatcaccagggatcactagacgcgtgtatgcacacgcacttggtccgatcctgtcgtccgtgaccctgtttgcttgttcgcgagtccagtatgggtttgtgcacgttttcagtgtcatggtttccttctctacgaaatttggtgttgtaagtttgattcgcaggtacgttgctgtgttttttctgcgtcatcatgtctgtaaacgagtcgggcgggtttgagtgtcctttgttgtgataataaagttggtaaatcgtaattaatatatagcatgcgactgtcttgctatggcctagtatgtgtgttttgtagttttcatcagtgtgtgttgtgttagatataatcttaactttcgaagacaagtacgggacccaaaaaaaa

SEQ ID NO: 5433 - DNA, 1649 bp, Zea Mays
tttcgttgaagccgcatccgtcgcgtttcataatgtcaaatctctcgcgagcgaggcagacccacgggccgcggccatctcacggtggaagcagccaagcagccggcctggcgcccctccccttccgtcccgccgctgctgccgtgcctcgtgcctgccagcggcggatgccgccccgccccgctgctgaccaccgccgctgctgagcatggccgccgctcccgcgggcgctcagaaccgctgcgtcttcgttggcaacataccatatgatgcgacggaggagcagctcgtgcagatttgcgaagaagtcggcccagtcgtatccttcagattggtgattgacaaagagaccggcaagccaaaaggttatggcttttgcgagtacaaggatgaggaaactgctttaagtgcacgccggaaccttcagggttacgagattaatggtcgtcagttacgtgttgattttgctgaaagtgggaggaacactgatagaaatagagaaaagggtcgtggaggaccagggatggcatctaatgttggttggttttttttgttcaccatttagtttatgtatattctttcaatttctatgcgtattttatgtttatggatgctatcactggttttttgatggagtggcacagatagtcaaaaacggttagctgggacttctgttgttggagagacaaactttcatcagcctgttggtctcccaccggcaatacatgctgcatctgtgatggctggtgtccttggtggagctcagactgcaaatgttcaaaacggtttacctgtccagtatggacttggaaacgaccctcttactcattatttggccagaatgtcaaggcatcagttgcacgaagtcatggctgaattgaagttcctaactactcaaaacaaagaacattccaaaactttgctgcaaggaattccacagctgccaaaggccttatttcagtatagggagcagaagaagaacttaaatatggtttttattgacttgagaagtcttactacaaaataccaaagaatattatatggtggactttggacaaacataaagtttcaatgaagtgtattggacttattaaggacattacaacaatgttgtggtagtgttcgaacaagtgatgaacaagtgatggagacatgtatggctttccgattatgataggactacatcttgggggcacaaaatggtgggtaatgttgggacccaattgggcttagctcgcgaggtgttacacagattggagattgctcaggatattaggattctagctatagaagaggtttggttactgcgaaaactgaaacaggcaaacaacattgtcttgtcctcacttccttggaaaggacaatcacttgcttgaggtctcagatccactatttgaaggaaggagatgcgaatacaaggttttttccatatgtaggcttgttttagaaagaagagaaattttatttctcatttggaagatgagggcaggattgttactaaccatgaccagatgtaggagctgttggatgggttcttctccaatcttttgggggctgaaattcagagaccattcactcttaatttgccaaattgccacagaagtgcagttgatctaagcgctttagagtctcctttctccgaaagggag

SEQ ID NO: 5434 - DNA, 1202 bp, Zea Mays
gagaaaccacgcgtgtcagccagccattggatcaccaccattcgcgctgttcggcgtgcgcacccgatcccgtctccgtgcggctttgtgagtagagaagggaaggggaagcaggagcaggaggggttcgtcatcgcgtggtggccgcgccgctctgttcctccgtcccctcctccttccggctctcgctgtcacatgtcgtgtggtgtgggggcgctctgatccggatggtgcagcgccgcgggatcgcccacggccatgattgatcgcgaacgagcagttgcagtaactgcgtgaaatgctataccggagatgccattgtgcacggaggtggtttattttgaggaagagttgggacacagtttggtgaattttgttgtgtgctggtctgagagctagtgctgctgggattgaggaaatgcaagttaataatgaggcaccactagggtgcctcaagccaaatatttctcagtataactctccagagcagataggtggtgttgaagggtttcctgagaataatgaaaaaaggaatgatattgttgctgcggaaaaaatctgggaggcgactccaaaccaaggccttagcaggcccatctaccgacaagaattttatgcctggccatatatttattcagattatcaaatcgtgcgtcagccactaccttatggttttgacaaccaattttatcagataaatagggaccacggtttccctattgagaacagggttcaatatcttccattcaagatgctccctcaaggtcacccccatgatgcacagcttcaggaatttcagtattttgtggttattgactttgaagcaacctgtgacaaggtgaacaatccatttccacaagaaatcatcgagtttccatctgtcttggttaacagtgcaactggaaaactcgaagaatgcttccaaacatatgttcggccgacgtatcatcaatttttgactgatttttgcaaggagcttactggcatacaacagattcaggtggacagaggtgtgcctctaggtgaagccttactcatgcacgataaatggctagaggacaagggcatcaagaacacaaactttgctattgtgacctggtctaactgggactgccgtataatgctggagtcggaatgcagatttaagagaatcaggaagcccccttattttaacaggaacgcctggcgattctgtcgcctct

SEQ ID NO: 5435 - DNA, 2259 bp, Zea Mays
cccttcctctccagggaaggaggccagaatcccccgtcgacgcgcacgcgccgtcgcgcagagctccgcgtccgcatcggccaccgcccacccgcgccggccgccggcggcgtggatggggaagctcgccgccctgaagcgggaagcggtcggggtggactaggtgctcggcgaattcctagtttagactttagaagcagtaggtggaggtgatgcggggcggagcgatgaaggctctgcggcgatccagcacctcctcgccgccgtcttccccgcattttcattcgtggatccaccgccggtacctcctcgttacctcgtcggcgacgtcctctttgtctgcatcggcgaattcggccgcggagggttcggattcagcgtcagtggtggcagcttcctcgtcgccctcgttggatccttcgtctccgaacatggaccggggtgtaattaaatctccatggtctcgaagaaaaaggaaacgagcgctcacttgtcaacactggatttgtctattttcagcgaacgggaagtttcgtgatgggggaagaaagtttctaaagaaggttcgcagtgggctatgatttgaacagctctgaggaggacaggaataccatcaagataaagaaaaggaaagaatatgaaaaattgaggcgacagtgccaccatgttctgcattgcaatagaggaaatggtctgaatgttataaatgagttcctgaatgaggacttctctgatggggctgaaggttcagagtcaccatattccaatggtgctagtaagagggcttgtgtgatgcccagagaattgaaatctttaggcagtaaggcagaagagtcagagagttctaactgggatgttgtggaatccatagatgaagatacaagtgagttaacttctgttgatccatgcatgatagaatcagaatcttctgaatctgagtcttcatatgaagaggaccctgatagaacacctgtctctaccaatatggaagagagctgtgatcccaaacctagatttgtccggactgcttcagcaaagtcagacatttttctttcagacagaactcctgaggattttaccacatggcagcgcattatacgtgtagatgctattcgagcaaatacagaatgggttctatttgcccgtaaccaggctgaagtctctaaagagaaagcactgcagtctgcaatatctgttggattgaaagattttgaccatttggagccttacatgatttatcatgcggcacgattagttgcactgcttgaggcatatgcagtctatgatccagagatcgggtactgtcaaggaatgagcgatctcttgtcaccaatagttgcagtcatggaggaagatcatgaagcattttggtgctttgtgggtttcatgaggaaagccagacacaacttcagacttgatgaggttggaataagaagacagctgaaaaccgtctcgcagatcatcaagcttaaagattcacagctctacaggcacctgcagcaacttcaggccgaagactgcttctttctgtaccgaatggtggtggttctcttcaggagggagctcacttttgagcagactatgtgtctgtgggaggttatgtgggccgaccaggccgcgattcgagctgggattggaaggtccacttgggcaaggataaggcttcacgcccctccaacagacgacttgctgctctacgctatcgcagcctgtgtcctgcagaggaggaagctgataatcgagaagtacagtagcatggatgagatactgcgggagtgtaatagcatggccgggcagctagatgtctggaagctcctagatgatgcacaccacttggttgtcgaccttcatcacagaatctgatgcgacggcttccctcagttatgtttggtagagtatgcagacatgaaccacttttccgaggtgtatttagtaatctgttgtgtactgttcatcacccggaattatgggcatatatctagagaaccgtgtggcttcaagtgaggacgaagttatctccacttcggttaagctgataaaccattggatagcacaatggtttatgcaagccatccatagtttaacttgatgtaaaatttcgtttttttgcttccagtatctgtcctaggcgaaaacatcattttccatcaagccttttatagcaaaatttaaagttcccagattttggggtgtaatgcggagtaatatatgatggattcaaagtctttgctgcgtcattgcacacaccaagttcttcca

SEQ ID NO: 5436 - DNA, 2149 bp, Zea Mays
gcgtctccctccccacgaaacccccttccccaaactacctctgctgctctccttgatccccaattctctcttctgcctacttgcctccatctcggcctccacctccactcctcgcccccgaacatccggcgctgtccgcaccccgactcctctcgtcctttcgcggtcgcgatggtggcgtccatggcgtcgccgtaggggcgatcgatctaggagaaagtgctggagaatgtggcgtcgtaccaccagcaacaacggaggcagaagctacgcaagagcctcacctacaccggcggcgagctctcgttcactgtctgggcccgtggggatgaccccacctccacgtccgtcgaggcacagaaggaggacatgcctcttgagcacgtcttcaaaatcatcagatctgatggcaaaagtgtgtgtttatggttcctgagtcagatgatctttcttcagttttagatgtgatagatattggtataaaagataaaaactagaatgctatgtctgtcaaaggagctttcttcagttcaggcagctccatctcagtcgttgtacccattcaacgccgagctggtggcagcgatgcaggagatgatccagccgaggtgtacaagtacatgttagtggacgtcacctgccaaagatacacagtttctactgtttttcagttggagaaaatatttaagacaacattttcatcgtttgttctccatatggggcttgtttcacgccacttgaaggaaggagggaatgatggtgttaagttcggacaatacatctacacatctatgaaatgtacaaccacgatgtagagcatagagtttctaaagttgggtaagctgtttggctgttttatagaaatttgtatcaacatcaacatagatttttagtcccaaacaaattggggtaggctagatttgaaacccaacaagaagtcaccaaaaagagaaagagagataaaggggaggggaaaagcttttgagagaactaaaagagaaaatgcctaatcacggttcgggcacgtggatagcttctttccaagcatttctatccaaacacaactcctttgggtgtgtggggtgatattagaagcttcatgttaggtgtttgatactttcttgaatataggatttttgtgtgtgtggtgtagtataaataatgtccatagttgaataccaaaatgtggatattgtacagtgggagttatggctgccttcttcattgcttgatcttagttgttggttgcaatcttctaacttagagtatgatgcttgaagagatttggatgatgttggagatgtgctttggtgtagttcatctctcccgaatcaagagtctggtttatggggctaaggtagaggctgccatcgccattggattcaatgacttcattacatatgctctgagaggcattgggttctaccagaaggataacatggagatcaagaaggccaatggcaatggcacactgatccctgagcagatctttgaaaagactaggagaagttctagatgaattgatgcttggctgaagagggatgtcagatttgtacaatgctcacccacaaagaataatacatttctccaatgtccactgttttgaaaaatacctccattccaatgtttaacattctaacgatgtctgaatttattgtaaagagacacatgattgttcattgttgtaacttatgtacaatatatgcgtgtgtgaaataaagatcatcttggagcaccggcatcaatgttatcaatcttctcaaatttcaaattatcctggtctcttcgtgaaaccataaaagtttattaagtcacttatctgagtggtctaaaagtctagcatatttttgttcctttgcctgtcgagacggatcagctggcatgaataatatccggtgaatactgcaagagctattcatgatcccccgtgaactagctggtatgatataacttagtttgtgaagtgctaatgccacaaacaggaaataggatgatacttcatgtatatttttttctttcttgaaaatgaactataggatactgtttacaatccataccaagcttctgcagttatcaacatttttctatgttcaaccttgttaacatattaagacgagtttttctttcatttttcaaaaaaataaatcaa

SEQ ID NO: 5437 - DNA, 2604 bp, Zea Mays
caaagcgtctccctccccacgaaacccccttccccaaactacctctgctgctctccttgatccccaattctctcttctgcctacttgcctccatctcggcctccacctccactcctcgcccccgaacatccggcgctgtccgcaccccgactcctctcgtcctttcgcggtcgcgatggtggcgtccatggcgtcgccgtaggggcgatcgatctaggagaaagtgctggagaatgtggcgtcgtaccaccagcaacaacggaggcagaagctacgcaagagcctcacctacaccggcggcgagctctcgttcactgtctgggcccgtggggatgaccccacctccacgtccgtcgaggcacagaaggaggacatgcctcttgagcacgtcttcaaaatcatcagatctgatggcaaaagtgtgtgtttatggttcctgagtcagatgatctttcttcagttttaggtacttttctgctttaatatagctcatgcaatatgatttattttaacacatatttgaaatagaactggattgtgcatattttgtaaagtgtttgttctacattttgtaattcgtattattcatttttcctttagtttttctctttctacaactcctatctctttacaatcaaatttcagatgtgatagatattggtataaaagataaaaactagaatgctatgtctgtcaaaggagctttcttcagttcaggtactgctctgctttattagccatccagccgatggatattttctatatgtgtaccgcccctgcactttcaaacacttatgttcaatgtttacaatcacattttttcttctcatagatttactatgtggttgtggtcttagtttggcttgtaggttaatttgtatactcatgtcattttagtttttctatgttgattcagtatgtcttaatttagttaatttcaattcttgatgctaataatatggatagattgtgacactactttctggcttgagcagaaatgggtttgttgcatatagcagaatatagttgtcgtaactggcaacaatgacccctctatggatgatctgaaaactattccgtggtcatgtagttaaatatagctgaatatacattactatgttttattaatcttatttggtttttctctcaaaagaacacacctctccatctttcagtgcttggtggatcaccgtctaaacgatccaccaccagaaccgccctaccccaagatagctatgtgcaggcagctccatctcagtcgttgtacccattcaacgccgagctggtggcagcgatgcaggagatgatccagccgaggtgtacaagtacatgttagtggacgtcacctgccaaagatacacagtttctactggtacacattttatttttttcatggtgataattaattcgtagcttgcgcaaaaccaaaggttgtgtgatttttcaaggcagaaatcagtatcatgataggtgtgcttgagcttttgatagctagtttatttgaacttttatctttttatgatcatggtatattgagacagaaatattttacatgtacctttgcagtttttcagttggagaaaatatttaagacaacattttcatcgtttgttctccatatggggcttgtttcacgccacttgaaggaaggagggaatgatggtgttaagttcggacaatacatctacacatctatgaaatgtacaaccacgatgtagagcatagagtttctaaaagatttggatgatgttggagatgtgctttggtgtagttcatctctcccgaatcaagagtctggtttatggggctaaggtagaggctgccatcgccattggattcaatgacttcattacatatgctctgagaggcattgggttctaccagaaggataacatggagatcaagaaggccaatggcaatggcacactgatccctgagcagatctttgaaaagactaggagaagttctagatgaattgatgcttggctgaagagggatgtcagatttgtacaatgctcacccacaaagaataatacatttctccaatgtccactgttttgaaaaatacctccattccaatgtttaacattctaacgatgtctgaatttattgtaaagagacacatgattgttcattgttgtaacttatgtacaatatatgcgtgtgtgaaataaagatcatcttggagcaccggcatcaatgttatcaatcttctcaaatttcaaattatcctggtctcttcgtgaaaccataaaagtttattaagtcacttatctgagtggtctaaaagtctagcatatttttgttcctttgcctgtcgagacggatcagctggcatgaataatatccggtgaatactgcaagagctattcatgatcccccgtgaactagctggtatgatataacttagtttgtgaagtgctaatgccacaaacaggaaataggatgatacttcatgtatatttttttctttcttgaaaatgaactataggatactgtttacaatccataccaagcttctgcagttatcaacatttttctatgttcaaccttgttaacatattaagacgagtttttctttcatttttcaaaaaaataaatcaa

SEQ ID NO: 5438 - DNA, 2651 bp, Zea Mays
gcgtctccctccccacgaaacccccttccccaaactacctctgctgctctccttgatccccaattctctcttctgcctacttgcctccatctcggcctccacctccactcctcgcccccgaacatccggcgctgtccgcaccccgactcctctcgtcctttcgcggtcgcgatggtggcgtccatggcgtcgccgtaggggcgatcgatctaggagaaagtgctggagaatgtggcgtcgtaccaccagcaacaacggaggcagaagctacgcaagagcctcacctacaccggcggcgagctctcgttcactgtctgggcccgtggggatgaccccacctccacgtccgtcgaggcacagaaggaggacatgcctcttgagcacgtcttcaaaatcatcagatctgatggcaaaagtgtgtgtttatggttcctgagtcagatgatctttcttcagttttagatgtgatagatattggtataaaagataaaaactagaatgctatgtctgtcaaaggagctttcttcagttcagtgcttggtggatcaccgtctaaacgatccaccaccagaaccgccctaccccaagatagctatgtgcaggttcaactactcatttagatattggtacagcctgtaatagactttggtacaataggatttggttttgctattcacttagtttttagttccaaacaaccaacaaattgcatgtcctttaggaaaaatatcacatgaatatcagtaatataacactgataataaaaaatgcttcgattctatatatttttcatgttataaggttgaaaacattctgtctcacggatcagaatgtgtacaaggcgacatactgtgtttacaaatatatttaaccataataaaaacatatttggaaactgaatatcatttaagtccaaaaatgtttttgctgactgttcattaagctagagtaaagagtaaacttagcatttcttttctatatctctctttcgtgctcatgccgccgcagtctcctccatcccacctttcctacgcaggcagctccatctcagtcgttgtacccattcaacgccgagctggtggcagcgatgcaggagatgatccagccgaggtgtacaagtacatgttagtggacgtcacctgccaaagatacacagtttctactgtttttcagttggagaaaatatttaagacaacattttcatcgtttgttctccatatggggcttgtttcacgccacttgaaggaaggagggaatgatggtgttaagttcggacaatacatctacacatctatgaaatgtacaaccacgatgtagagcatagagtttctaaagttgggtaagctgtttggctgttttatagaaatttgtatcaacatcaacatagatttttagtcccaaacaaattggggtaggctagatttgaaacccaacaagaagtcaccaaaaagagaaagagagataaaggggaggggaaaagcttttgagagaactaaaagagaaaatgcctaatcacggttcgggcacgtggatagcttctttccaagcatttctatccaaacacaactcctttgggtgtgtggggtgatattagaagcttcatgttaggtgtttgatactttcttgaatataggatttttgtgtgtgtggtgtagtataaataatgtccatagttgaataccaaaatgtggatattgtacagtgggagttatggctgccttcttcattgcttgatcttagttgttggttgcaatcttctaacttagagtatgatgcttgaagagatttggatgatgttggagatgtgctttggtgtagttcatctctcccgaatcaagagtctggtttatggggctaaggtagaggctgccatcgccattggattcaatgacttcattacatatgctctgagaggcattgggttctaccagaaggataacatggagatcaagaaggccaatggcaatggcacactgatccctgagcagatctttgaaaagactaggagaagttctagatgaattgatgcttggctgaagagggatgtcagatttgtacaatgctcacccacaaagaataatacatttctccaatgtccactgttttgaaaaatacctccattccaatgtttaacattctaacgatgtctgaatttattgtaaagagacacatgattgttcattgttgtaacttatgtacaatatatgcgtgtgtgaaataaagatcatcttggagcaccggcatcaatgttatcaatcttctcaaatttcaaattatcctggtctcttcgtgaaaccataaaagtttattaagtcacttatctgagtggtctaaaagtctagcatatttttgttcctttgcctgtcgagacggatcagctggcatgaataatatccggtgaatactgcaagagctattcatgatcccccgtgaactagctggtatgatataacttagtttgtgaagtgctaatgccacaaacaggaaataggatgatacttcatgtatatttttttctttcttgaaaatgaactataggatactgtttacaatccataccaagcttctgcagttatcaacatttttctatgttcaaccttgttaacatattaagacgagtttttctttcatttttcaaaaaaataaatcaa

SEQ ID NO: 5439 - DNA, 3211 bp, Zea Mays
cactaaacaatttaaccccagataaatcccactgtaaaaaaccaacggtccagattattttatttgtctattctctcttactcaaactcatcaatcatcaaagcgtctccctccccacgaaacccccttccccaaactacctctgctgctctccttgatccccaattctctcttctgcctacttgcctccatctcggcctccacctccactcctcgcccccgaacatccggcgctgtccgcaccccgactcctctcgtcctttcgcggtcgcgatggtggcgtccatggcgtcgccgtaggggcgatcgatctaggagaaagtgctggagaatgtggcgtcgtaccaccagcaacaacggaggcagaagctacgcaagagcctcacctacaccggcggcgagctctcgttcactgtctgggcccgtggggatgaccccacctccacgtccgtcgaggcacagaaggaggacatgcctcttgagcacgtcttcaaaatcatcagatctgatggcaaaagtgtgtgtttatggttcctgagtcagatgatctttcttcagttttagatgtgatagatattggtataaaagataaaaactagaatgctatgtctgtcaaaggagctttcttcagttcaggtactgctctgctttattagccatccagccgatggatattttctatatgtgtaccgcccctgcactttcaaacacttatgttcaatgtttacaatcacattttttcttctcatagatttactatgtggttgtggtcttagtttggcttgtaggttaatttgtatactcatgtcattttagtttttctatgttgattcagtatgtcttaatttagttaatttcaattcttgatgctaataatatggatagattgtgacactactttctggcttgagcagaaatgggtttgttgcatatagcagaatatagttgtcgtaactggcaacaatgacccctctatggatgatctgaaaactattccgtggtcatgtagttaaatatagctgaatatacattactatgttttattaatcttatttggtttttctctcaaaagaacacacctctccatctttcagtgcttggtggatcaccgtctaaacgatccaccaccagaaccgccctaccccaagatagctatgtgcaggttcaactactcatttagatattggtacagcctgtaatagactttggtacaataggatttggttttgctattcacttagtttttagttccaaacaaccaacaaattgcatgtcctttaggaaaaatatcacatgaatatcagtaatataacactgataataaaaaatgcttcgattctatatatttttcatgttataaggttgaaaacattctgtctcacggatcagaatgtgtacaaggcgacatactgtgtttacaaatatatttaaccataataaaaacatatttggaaactgaatatcatttaagtccaaaaatgtttttgctgactgttcattaagctagagtaaagagtaaacttagcatttcttttctatatctctctttcgtgctcatgccgccgcagtctcctccatcccacctttcctacgcaggcagctccatctcagtcgttgtacccattcaacgccgagctggtggcagcgatgcaggagatgatccagccgaggtgtacaagtacatgttagtggacgtcacctgccaaagatacacagtttctactgtttttcagttggagaaaatatttaagacaacattttcatcgtttgttctccatatggggcttgtttcacgccacttgaaggaaggagggaatgatggtgttaagttcggacaatacatctacacatctatgaaatgtacaaccacgatgtagagcatagagtttctaaagttgggtaagctgtttggctgttttatagaaatttgtatcaacatcaacatagatttttagtcccaaacaaattggggtaggctagatttgaaacccaacaagaagtcaccaaaaagagaaagagagataaaggggaggggaaaagcttttgagagaactaaaagagaaaatgcctaatcacggttcgggcacgtggatagcttctttccaagcatttctatccaaacacaactcctttgggtgtgtggggtgatattagaagcttcatgttaggtgtttgatactttcttgaatataggatttttgtgtgtgtggtgtagtataaataatgtccatagttgaataccaaaatgtggatattgtacagtgggagttatggctgccttcttcattgcttgatcttagttgttggttgcaatcttctaacttagagtatgatgcttgaagagatttggatgatgttggagatgtgctttggtgtagttcatctctcccgaatcaagagtctggtttatggggctaaggtagaggctgccatcgccattggattcaatgacttcattacatatgctctgagaggcattgggttctaccagaaggataacatggagatcaagaaggccaatggcaatggcacactgatccctgagcagatctttgaaaagactaggagaagttctagatgaattgatgcttggctgaagagggatgtcagatttgtacaatgctcacccacaaagaataatacatttctccaatgtccactgttttgaaaaatacctccattccaatgtttaacattctaacgatgtctgaatttattgtaaagagacacatgattgttcattgttgtaacttatgtacaatatatgcgtgtgtgaaataaagatcatcttggagcaccggcatcaatgttatcaatcttctcaaatttcaaattatcctggtctcttcgtgaaaccataaaagtttattaagtcacttatctgagtggtctaaaagtctagcatatttttgttcctttgcctgtcgagacggatcagctggcatgaataatatccggtgaatactgcaagagctattcatgatcccccgtgaactagctggtatgatataacttagtttgtgaagtgctaatgccacaaacaggaaataggatgatacttcatgtatatttttttctttcttgaaaatgaactataggatactgtttacaatccataccaagcttctgcagttatcaacatttttctatgttcaaccttgttaacatattaagacgagtttttctttcatttttcaaaaaaataaatcaa

SEQ ID NO: 5440 - DNA, 2002 bp, Zea Mays
gcctgcaactctctcgtcccggcaaaggtcacaccttcctccctcgtccacatccgtgcctccagccaccggccgcctagggcggcgctcttgccaccggctgtcgagcccgccgaccttgccgccgtttccacgccgcctgacctgcccccacgacctgctgccgtcacgccatccgacctgccccaggacagcccaagcccccgcgaggccgcgacctgctggggaggagattgataggagaggtggtcggcggcgtggataccaacgacggagacatagtgattgccgcccgtcgtcccctgtttccgacacgctgaagcctcacgccacgagcgagcagagggccccaactgccagcagcaaccttaggcactggttgcttgaagtaaccaaacattcggacgcgcataaaatcgccacgcacgcatcgctggttttgccgtcgcagagcagaaggcactccgggacggcagcgtgctctgcagacgctgaaggcaggatgtggctggaagaggtgaggcggagggagcgtggagagcttcgcgctcggcggtttgaggccgccgcccgagcgtgccgcacggcttcgctcgcgctctccaatcgcaaggagtttgtcaccccacatcacggcgccgtcaactcgctccagaggggaggtacctgctctccggggcatcggatgggtcggccgctgtgttcgatgtgtggaacgcgactgaatacgaaaccgggttcatagcaaagcacaggaacatactgcttgtggacaagcaacaccagaatggccacaagttcgccatctcggcggccgtttggtatcctgtggatacggggctgtttgtcacagcatcctttgaccagtttgtcaaagtttgggatacaaattcgactcaagtcgtcatggaatttaagatgcctggaaaagtgtacactgcagccatgtctccaatcgcaacaacgcacgtgctcattgctactgggagtgcagatgttcagatggtatcatgtctttggagtggtctgcctcaagtgagtggattttgatgagtggtggctgtgacggggcaatacgtttttgggacattagaagagctggatgctttcgggttctggaccaatcaaggtctcaacttggaaaaaggccccttgttaaaagtgctctatataaggatcacacagattccttaggaccttcaccttccgcaaggagaaggacaggcatttctaagaagagttcatcagctttgcgcaaaattcaaaacccgacacatggacacatgcaacagagattgcatcctggtttgtcatctagtcaaaaccgtgctactgctcattatggtgctgttactggtttacgaacaactgcagatgggatgtaccttcttagctcaggatctgattctcgcttaagactatgggacatcgattcaggctgcaatacgctggtcaattttgaagctatgcgattgcagacaggcaagccattacaattagctgtcactgaggatccttcacttgtatttgttccatgtatggcaagcatcaaggcatacaatttatggtctggtaaaacatttcaaacattccgggggcactatgaacttgtgagttgctgctactatagtgaacaggaccaagaagatgatgacaagatcctttctgcagctgatgaggataactggagcgactgagaaaccctggagccgggaggagtgtgtcttgtatctactgacatcgatgttactgatgttaacaaataacatgtcgaggttgttaggtcttgttagcagcccctaaatgatgatattgtcttggtgtattttcaaaaatatgtacattaccatgtgaaaatttgacagatcattgaataatttgtagatttatctcaggaggatagagggatgtttgacgttcgccaaaatgttgtttagccctggagccttgttttcttcactgtgtattaatgctttacccaaaaataagaatttttctgagc

SEQ ID NO: 5441 - DNA, 2039 bp, Zea Mays
gcctgcaactctctcgtcccggcaaaggtcacaccttcctccctcgtccacatccgtgcctccagccaccggccgcctagggcggcgctcttgccaccggctgtcgagcccgccgaccttgccgccgtttccacgccgcctgacctgcccccacgacctgctgccgtcacgccatccgacctgccccaggacagcccaagcccccgcgaggccgcgacctgctggggaggagattgataggagaggtggtcggcggcgtggataccaacgacggagacatagtgattgccgcccgtcgtcccctgtttccgacacgctgaagcctcacgccacgagcgagcagagggccccaactgccagcagcaaccttaggcactggttgcttgaagtaaccaaacattcggacgcgcataaaatcgccacgcacgcatcgctggttttgccgtcgcagagcagaaggcactccgggacggcagcgtgctctgcagacgctgaaggcaggatgtggctggaagaggtgaggcggagggagcgtggagagcttcgcgctcggcggtttgaggccgccgcccgagcgtgccgcacggcttcgctcgcgctctccaatcgcaaggagtttgtcaccccacatcacggcgccgtcaactcgctccaggttgatttgacagaggggaggtacctgctctccggggcatcggatgggtcggccgctgtgttcgatgtgtggaacgcgactgaatacgaaaccgggttcatagcaaagcacaggaacatactgcttgtggacaagcaacaccagaatggccacaagttcgccatctcggcggccgtttggtatcctgtggatacggggctgtttgtcacagcatcctttgaccagtttgtcaaagtttgggatacaaattcgactcaagtcgtcatggaatttaagatgcctggaaaagtgtacactgcagccatgtctccaatcgcaacaacgcacgtgctcattgctactgggagtgcagatgttcagtggtctgcctcaagtgagtggattttgatgagtggtggctgtgacggggcaatacgtttttgggacattagaagagctggatgctttcgggttctggaccaatcaaggtctcaacttggaaaaaggccccttgttaaaagtgctctatataaggatcacacagattccttaggaccttcaccttccgcaaggagaaggacaggcatttctaagaagagttcatcagctttgcgcaaaattcaaaacccgacacatggacacatgcaacagagattgcatcctggtttgtcatctagtcaaaaccgtgctactgctcattatggtgctgttactggtttacgaacaactgcagatgggatgtaccttcttagctcaggatctgattctcgcttaagactatgggacatcgattcaggctgcaatacgctggtcaattttgaagctatgcgattgcagacaggcaagccattacaattagctgtcactgaggatccttcacttgtatttgttccatgtatggcaagcatcaaggcatacaatttatggtctggtaaaacatttcaaacattccgggggcactatgaacttgtgagttgctgctactatagtgaacaggaccaagaactttatactggcagcaacgacaggcaaattcttgtgtggtctccatcaactccagcttttactaaaatgctgatgaggataactggagcgactgagaaaccctggagccgggaggagtgtgtcttgtatctactgacatcgatgttactgatgttaacaaataacatgtcgaggttgttaggtcttgttagcagcccctaaatgatgatattgtcttggtgtattttcaaaaatatgtacattaccatgtgaaaatttgacagatcattgaataatttgtagatttatctcaggaggatagagggatgtttgacgttcgccaaaatgttgtttagccctggagccttgttttcttcactgtgtattaatgctttacccaaaaataagaatttttctgagc

SEQ ID NO: 5442 - DNA, 2054 bp, Zea Mays
gcctgcaactctctcgtcccggcaaaggtcacaccttcctccctcgtccacatccgtgcctccagccaccggccgcctagggcggcgctcttgccaccggctgtcgagcccgccgaccttgccgccgtttccacgccgcctgacctgcccccacgacctgctgccgtcacgccatccgacctgccccaggacagcccaagcccccgcgaggccgcgacctgctggggaggagattgataggagaggtggtcggcggcgtggataccaacgacggagacatagtgattgccgcccgtcgtcccctgtttccgacacgctgaagcctcacgccacgagcgagcagagggccccaactgccagcagcaaccttaggcactggttgcttgaagtaaccaaacattcggacgcgcataaaatcgccacgcacgcatcgctggttttgccgtcgcagagcagaaggcactccgggacggcagcgtgctctgcagacgctgaaggcaggatgtggctggaagaggtgaggcggagggagcgtggagagcttcgcgctcggcggtttgaggccgccgcccgagcgtgccgcacggcttcgctcgcgctctccaatcgcaaggagtttgtcaccccacatcacggcgccgtcaactcgctccagaggggaggtacctgctctccggggcatcggatgggtcggccgctgtgttcgatgtgtggaacgcgactgaatacgaaaccgggttcatagcaaagcacaggaacatactgcttgtggacaagcaacaccagaatggccacaagttcgccatctcggcggccgtttggtatcctgtggatacggggctgtttgtcacagcatcctttgaccagtttgtcaaagtttgggatacaaattcgactcaagtcgtcatggaatttaagatgcctggaaaagtgtacactgcagccatgtctccaatcgcaacaacgcacgtgctcattgctactgggagtgcagatgttcagtggtctgcctcaagtgagtggattttgatgagtggtggctgtgacggggcaatacgtttttgggacattagaagagctggatgctttcgggttctggaccaatcaaggtctcaacttggaaaaaggccccttgttaaaagtgctctatataaggatcacacagattccttaggaccttcaccttccgcaaggagaaggacaggcatttctaagaagagttcatcagctttgcgcaaaattcaaaacccgacacatggacacatgcaacagagattgcatcctggtttgtcatctagtcaaaaccgtgctactgctcattatggtgctgttactggtttacgaacaactgcagatgggatgtaccttcttagctcaggatctgattctcgcttaagactatgggacatcgattcaggctgcaatacgctggtcaattttgaagctatgcgattgcagacaggcaagccattacaattagctgtcactgaggatccttcacttgtatttgttccatgtatggcaagcatcaaggcatacaatttatggtctggtaaaacatttcaaacattccgggggcactatgaacttgtgagttgctgctactatagtgaacaggaccaagaactttatactggcagcaacgacaggcaaattcttgtgtggtctccatcaactccagcttttactaaaatggaagatgatgacaagatcctttctgcagctgatgaggataactggagcgactgagaaaccctggagccgggaggagtgtgtcttgtatctactgacatcgatgttactgatgttaacaaataacatgtcgaggttgttaggtcttgttagcagcccctaaatgatgatattgtcttggtgtattttcaaaaatatgtacattaccatgtgaaaatttgacagatcattgaataatttgtagatttatctcaggaggatagagggatgtttgacgttcgccaaaatgttgtttagccctggagccttgttttcttcactgtgtattaatgctttacccaaaaataagaatttttctgagc

SEQ ID NO: 5443 - DNA, 3709 bp, Zea Mays
atgttatccgttttctatcacattaccgtcgtaattatcatatccctctccccagttatccaagcattatgcagggacagaaactataaaacttctagcaatcttgttgacccaaacgatttgccttgtttcagttcttgatcttcttctttgccctcagctgaaaatgggagaagcaagggaaacattaggaaatcacaccaatcagcaaaacaattaaacccttgattgtgattttcagctgtgcaaatcttaattagatatctcagataatccatcaactagacaaacatacaaagtgaaccgaacaactctcaaacaatatgatatttcctaggcaactctcaaaggaaaaagtcacatagcaaatgacataatttagtacatgtaatgaattctgatgatgtatgccaagtttatcactagcgtacatgtctaaagctgactggcatccgcttgcttatacaaatccaaaatatgacattactacagtaaggcatcaccattcacaaacaagaaaatagtacctcgttgttgtggccacatttcttcttgcggcagttaacagccttggtgtgcaagcgagtatagcacctggatcagatatttgacatcaagcacttagactaccctaggttcatactgaatataagaatttccaatgcaaacacaatactatttacaaaactatctaggggggaaatcaaatggtcctttgtaataatgtttacgaacaaagcaaactaggtgcaagacagtaaacgtcaaaacacagacaaaacaagaaccagagaaacttgcagtgatcaaaagtctgaatgattggcaggccagacaaaatatatgcctcaaaagttaagctcgtaaggcgacttacacatctaattgattcatcattccagccaatcaactatgagcataggaaagcacaaatcccagaccaaactcaaaagatacttcaactgaacaaacaagttatactacctaattggttcatcacccctgccaatccactaaactgaatacaatgaaacaaagatagtggactgtcacaagtggttatatgttgcatattttaagacattcccggttgttgaaaatttaggagattagaccttcattagtatagatgcagatcattggtctcctcatacgagccaaattttcaagaaataccaacgaaggtgatggcacacaagttgatgcacacaatgataccacgcaagatgatgcacttgaaggcaaggaagatgattgtttgtgctactatgccgctccataattttattcgtgagcattctagtggtgatgtgggctttgcaaattgtggttgagatcctgattttgtgcctactatcccaatttcccaaatagatacaataaataactgaataatcagtgtcaccacatgcctcagatcaatccacttctaaatcaagttttactacaatggatgcatttcgtgatagtatagcaacgactctcacttgtgtggaattagcaccaaatatttatgcaatattttgcaacatctatttgtagtgacttgtgtgaagagtgaagacaatgattatgtaatatgttactagtttattattgctgcaaggttgaatatttgaatttatttgaaaaaatcatatagtgatttatctttgttgtattgttgaatagtcaagttcatagcaaaaatagttgcataaagatcattattctcaataaaacaattagctaaaacaaccaaatgataggaaggtcattgcagcctcaaacttcacttttctagagttggatgcacctttctggtcaaacacagtcaaaactccagaggagagcagctccagtctggagttatagagcaaagctactctgaagtggagtggagccatacaaacacaccttagttggcgtagatttttgtgaatccgcttttggctagcgataacgtcttctgggtttccaaaggcttctactcgactcctctaggccttttgggacgtgaccttcatcttgtgcgacttgccaaacgaatccgtcacaatactgccgaatgcaatggaagcttcctaccataacagtcgacccttttcacaccggtcaacgcagtaaccaaacattcggacgcgcataaaatcgccacgcacgcatcgctggttttgccgtcgcagagcagaaggcactccgggacggcagcgtgctctgcagacgctgaaggcaggatgtggctggaagaggtgaggcggagggagcgtggagagcttcgcgctcggcggtttgaggccgccgcccgagcgtgccgcacggcttcgctcgcgctctccaatcgcaaggagtttgtcaccccacatcacggcgccgtcaactcgctccaggttgatttgacagaggggaggtacctgctctccggggcatcggatgggtcggccgctgtgttcgatgtgtggaacgcgactgaatacgaaaccgggttcatagcaaagcacaggaacatactgcttgtggacaagcaacaccagaatggccacaagttcgccatctcggcggccgtttggtatcctgtggatacggggctgtttgtcacagcatcctttgaccagtttgtcaaagtttgggatacaaattcgactcaagtcgtcatggaatttaagatgcctggaaaagtgtacactgcagccatgtctccaatcgcaacaacgcacgtgctcattgctactgggagtgcagatgttcagtggtctgcctcaagtgagtggattttgatgagtggtggctgtgacggggcaatacgtttttgggacattagaagagctggatgctttcgggttctggaccaatcaaggtctcaacttggaaaaaggccccttgttaaaagtgctctatataaggatcacacagattccttaggaccttcaccttccgcaaggagaaggacaggcatttctaagaagagttcatcagctttgcgcaaaattcaaaacccgacacatggacacatgcaacagagattgcatcctggtttgtcatctagtcaaaaccgtgctactgctcattatggtgctgttactggtttacgaacaactgcagatgggatgtaccttcttagctcaggatctgattctcgcttaagactatgggacatcgattcaggctgcaatacgctggtcaattttgaagctatgcgattgcagacaggcaagccattacaattagctgtcactgaggatccttcacttgtatttgttccatgtatggcaagcatcaaggcatacaatttatggtctggtaaaacatttcaaacattccgggggcactatgaacttgtgagttgctgctactatagtgaacaggaccaagaagatgatgacaagatcctttctgcagctgatgaggataactggagcgactgagaaaccctggagccgggaggagtgtgtcttgtatctactgacatcgatgttactgatgttaacaaataacatgtcgaggttgttaggtcttgttagcagcccctaaatgatgatattgtcttggtgtattttcaaaaatatgtacattaccatgtgaaaatttgacagatcattgaataatttgtagatttatctcaggaggatagagggatgtttgacgttcgccaaaatgttgtttagccctggagccttgttttcttcactgtgtattaatgctttacccaaaaataagaatttttctgagc

SEQ ID NO: 5444 - DNA, 1146 bp, Zea Mays
ccaaacacaggcacacagccgtgtcctccggactctcggggtctcccgacgtcgactcgtcctcggtttccctccatgccctcaaggcctcaatctatcctcgggctgtccgctgtccccttcccgcgtcgaaaccctagctcgtcacctcgccgccgtgctgtccgctgtcctagtccgcggctccgcgccccatctctcttgccgtcgcatctgatgttcttctcccgcaacgcattccgcgacctggaccccatcgactcgccggcctccatggcgtcctcgaagaaggttgcgacccgtgacgagtgggagcggaagcttcgcgacgtcaagatacgcaaggaggacatgaaccgcctcgtcatgaacttcctcgtcactgagggcttcgtcgacgccgccgacaagttccgcatcgagtccggcacccagccggagattgacctagcgatcatcgcggatcgaatggaggttaagagagcagtacagtcgggtaatgttcaggaagcgatcgagaagatcaacgatcttaaccccacgattctggacatgaatccccaactatactttcatctccagcaacagaaactaatagagttgattcgcgagggaaaaacaaatgaagctttggagttcgctcaagaagaacttgcaccgagaggcgaagaaaatagaactattggatgtttctcaacgtttgaagactgcaagtgaagttaatgctgctattcttgcaagccaaagtcatgggaaagattcgaagcttccaagcttgttaaagatgttgaaatggacacaaaatcatctggacgaaagggcggcatatcctgcaatcaatgacttcaccactgctgtagtggaagatccatcaatatgaatctgctgcaaaaaggttgatgataactgagggtaggcaccaagcctgcctggtggctgcatgtggtttgccccggatctgtcaatagatcatcatctgcagcgattgagttcacccctttcaccagtgttgaagcaattaagctcaatgcaaggagttgacctgaaacgtcacctgtgttctactacctgtacatgatgtagaaagacatgtttgaaccccttttcagccagtgaaaatattggatttgatttttcatggatata

SEQ ID NO: 5445 - DNA, 2735 bp, Zea Mays
cccaaatctaccccgcgttaaatcgcaacatggctgtgccacccacactaatcacccccccaaatcgaccacccctccctctccctctcttaagatcgccggcgaggggagagccgagaggcgcagggcagcccccgccgacgcttccgctcccgctcccgccgctgccgcagccgcagccgcagccgcagccgtagcggcattttgtcgagcatatggcgctcgtgcccagcggcggcgcgggcgcttgcaaggacgaggccgcccttgggctcccgtggtccgaaatgttccgctccgcctcgcgccgccggcccaagcaggagtccgacgatgcgccgcccaagaagcccgcgctgaagacggcgggtgccaaggagatgaaggccaagccgtcgtcggtagggactggagctggggcaggagccgacatcgcagggctgtcgctggagcccgacgcgcgcctggcgctctacatcgccatggcgcacgcgggcctcgccaccgcgctgctcgtgctctacggcctttacctgctgctcgccgacttcctccgcccgctgcagtgggcgttgctctgctccgtcccgctccgcgagacgcagcgcgcgctcgtcgccttctgggagcccccgctccgtggcggactcagcgccgcactgctcgcgctgccactcgctgtgctccggtcctcgaccgcaacgctcgccgacgcgcgcgccgcgctcctgcgccgcccgctcccgtcatcgccggcgttcccgcgcctcctccgctggctcgtctccttctttttcttcctcatcctcttcgagcgcctcggcgccgccaccgcgctgctgctcctcgttttcgcgctcgcattcttcgccgcgtcccccaagctcaaacgcgctgcctcctcacgcatctccggtcggcctccctcctctcgcggcctcctattaactggaggcatcctccgccaccttaagacactagtcgctcttggtctcatgcttggtatgatcgctgggttcataactggcagcatcttcttctcctacaagattgggctagagggcaaggacgccgtcatgtccctcaagtcccatgtcgagaagagcaactactcagagaagattggcttgaagaagtggatggacgacaatgacattcctggcttggtcgatcagtattctgccaagatctatgacaccttgtgggagcaggtcgaccaattggctgtgcagtacaaccttacagatttcactagtggcttccggcatttcttgatcagccaatcagttgaccccaaaagcaaggcgctcatcagttccagaccgcacccatactcaatgaagttgcaatcaattgcgacacgtgtgagaaacagagaatgggtggagatttactgggagcttgactcattctttagggagctgttaatcacaagagaggatttggtcatcaaggccaaagagcttgctttgcagggaacagaaatcgcaaagaggcttctgtccagcagcacatcggtgctgggcggtagtgccaatttgatgttgtcaatcaccctccgcattgtctcaggtgcggctgaggttgttaatttcctgtcacaactgatggtgttcttgtgggtgctgtattaccttattactgtggagggaggtggagctacagagcaaatcattgatcttttgccagtgtcaaaacaagtaaaggaccgctgtgttgaggtcatggatcatgccatcagtagtgtattgttggccactgccaagattgccatattccagggggggctgacatggctattgttcaagttcttcaaagtgcattttgtgtacacatcaactgtgcttggattcataagtgcacttgtgccaatacttccattttggctgtcctcgatatttgccacagggcagcttctcatggaagggagatatgttcttgcactggtggtaactgtgatacacctcatgctcatggattatggcacaactaccattctggaggatatacctgggtacaatgggtatctcaccggcctcagcataattggtggcatgacactgtttcccaatgcactggagttgtaggagagcaagccgaataacatgctataagtagcatggtgatctatagaatctatctccatcttaaaaaaaacttggcagggtgcaatattaggtccccttataatgacggttgttatagcgttgaagaacttgtacacagagtttgtacttgctgatggagaggagacgagcagctagcatcagatgcaaggctaaaatgcttgtgttgccaaagaaatacttgtgtagggcttctacatgcaatgttgcatgatggttttgctcttgtaccatgccttatatgcacagctattgcagcagttgtgagctttccttgttaatatctattggatcgttccatagacttggttttgatatctgccgatgctgaatgacctctctgtccaattgaaccggaagttgtgcagtattttttcttttcttttcttttctcggtttctctctttctcagaccccactcatgtggatgtgggagcctccagcactcgatctacccatcttttgcctatagtggtgatgtagactaaattgcattactaaatcttttttggtgtaatatttttcttgttagtatatatatagcctacatgcatccagctctaataatttgagtaaattaatactaattgtttgttagtccgttttctg

SEQ ID NO: 5446 - DNA, 1904 bp, Zea Mays
tttagatgttaaagctctttcatatgagaatattgccaaaggcattgctctagggaacattgatccactcacgaaggaaccattcgagatcaatccagagtgcagtgcaccttctgttcataaggtttgtccaaccagagagcctattgcaccttcaaatgggaggaagaaactagatttgcctgtgcagaaaaatatattgaccaactatttctgcttagcatcccttgaggcaaaacggaaattcagggcgcctaaagtaacacataagcaacaaatattgaatgaagctttgcctagccctcaagctcaaggctctgctacctctgattcagttgaagatactaggttgccaacagatcgcattcaagcttctcaatgtagttctgagcatttaagctctgaacctcctcaaaatgacccaatcagtgttggctctcagtgtagttctgagcgtttcagctgtgagtaccccctcgatgattcagccaacatttcacaatgtagttcacttgatggtggtagtgatcctccttacaaggatactggcaataaagacagaaaggttgaggctggctacgacaacaaaaatagaatacctacaagtccttgcataatgggaaatttaccctggacatcagagccatttttagttccccataacgtgggaccatctataccagttcaacattatactgaaagcactgtggcctctaataataatggcattacctactggtaatctttgtggagatcaactgaggaaatctggcatgttgaagagaagaaagctttctggcatccaaaagtttgaagatgaaactttacagccgattcattctgacgatagtccaccattcgttgatgaagaaacttctgcaggtcaagatacagatgatcctgacgatacaaatataagaactgaaggaagatttggatgcaatgtttcccatgtgaatacatacagtggaattgcagaaaaatcaatggataagtttgctgcattgatatcatctttcagataccccggcccccgtgccagtggccttcgtgctcctttaaaggatgtgaaaaacacactttctgtgagatctattcttaaagctccagaaaaagacacattcagacgcacagcaaagaaaacaggtctaggccccccttcaaaaagcagatatacaagtgatgataagggaagtgctgccagcccccctgatattagcgcatttgcttataggcctatgaaaactgttgcttctgaccaaggcaaaaccacagtcggacgtttgaatgggagcagattcagagagaccgcaccgaaagcaactggagggacttctaggagccagttcaaatagaaccagtgccgttggctctctaaatgctgtggtgaaaggaaaacaacccctgatcagagcatttccgtttctgagcatcgttgaagatagttggcattgggcccccggaggacctcgaggggctgcagaggttcctttgcttcagagcccctctgtacctattcatcaacgtggaccctggaggaccgttactgcctgctagtagcagctcgttattttgagctcatcttttgtgctgctcgtcagctcgtgttcaaaccaagcctactgctcatttgctttccctgcagcagcagcagcccctactgttgcatcgaagaaagcaatctcattagcgactgcgttgaactgtagttaagatacttcttgtccatatccttgaggcatgattcgaacggcgtcattgtctcattgacttgtctttatcattcctgaaagataaaagtgaacattgaaatcaaagaaaaaaaaacagtttgtacggtaaagtttgagtttaaaattcattttcaaggtaggcaactggacacactctgagctatccaaagg

SEQ ID NO: 5447 - DNA, 2888 bp, Zea Mays
cgtagatccgcccctgatggcatattgaatattgcatgcatcgggttaacatgttgcggcattttggtgtcagaccaattcttgtatttgatggaggccttctgccaataaagagctatcaagaggggaagcgagcaaggtcaagaaaggaaaaccttgagcgtgccagggaacatgaggctgctgggaactcacgtgctgcttttgagtgctatcagaaggctgttgacattacacctagaattgcttctgaactgattgaggtactgaagaaagaaaatgttaattatattgttgcaccttatgaagcagatgcgcaaatgacattcttatctgttaataaacttgttgatgctgtgatcactgaggattcagatttgataccatttggttgttctagaattattttcaaaatggacaaatttgggcaaggtgttgaatttcagattacacgcctagagcaaaacagagagcttgactttaatggattcacaagacagatgttacttgagatgtgtattttaagtggctgtgactatctcccctcattgccaggaatgggcgttaaacgagctcatgcactcatccaaaagctgaagtgtcacgaaaaggtgatcaagcacctgaggtatggtgctgtttctgttccacctcaatatgaagaggacttcaagaaagcaatctgggcatttaagttccaaagggtctacgatcctgctacagaagatattattcatttgtcaagtgtgcctcaaagcctcattgaagatttggaatttttaggcccatggttaccacagaatattgccaaaggcattgctctagggaacattgatccactcacgaaggaaccattcgagatcaatccagagtgcagtgcaccttctgttcataaggtttgtccaaccagagagcctattgcaccttcaaatgggaggaagaaactagatttgcctgtgcagaaaaatatattgaccaactatttctgcttagcatcccttgaggcaaaacggaaattcagggcgcctaaagtaacacataagcaacaaatattgaatgaagctttgcctagccctcaagctcaaggctctgctacctctgattcagttgaagatactaggttgccaacagatcgcattcaagcttctcaatgtagttctgagcatttaagctctgaacctcctcaaaatgacccaatcagtgttggctctcagtgtagttctgagcgtttcagctgtgagtaccccctcgatgattcagccaacatttcacaatgtagttcacttgatggtggtagtgatcctccttacaaggatactggcaataaagacagaaaggttgaggctggctacgacaacaaaaatagaatacctacaagtccttgcataatgggaaatttaccctggacatcagagccatttttagttccccataacgtgggaccatctataccagttcaacattatactgaaagcactgtggcctctaataataatggcattaccgtaagttcatacttcaaaacagcaaacaagagaatttgcacagatcaaggagaccagttagatgatgactatgatgttagtactggtaatctttgtggagatcaactgaggaaatctggcatgttgaagagaagaaagctttctggcatccaaaagtttgaagatgaaactttacagccgattcattctgacgatagtccaccattcgttgatgaaggtcaagatacagatgatcctgacgatacaaatataagaactgaaggaagatttggatgcaatgtttcccatgtgaatacatacagtggaattgcagaaaaatcaatggataagtttgctgcattgatatcatctttcagataccccggcccccgtgccagtggccttcgtgctcctttaaaggatgtgaaaaacacactttctgtgagatctattcttaaagctccagaaaaagacacattcagacgcacagcaaagaaaacaggtctaggccccccttcaaaaagcagatatacaagtgatgataagggaagtgctgccagcccccctgatattagcgcatttgcttataggcctatgaaaactgttgcttctgaccaaggcaaaaccacaggtaaaactacagacactattgatggccctcctgatctgggcttgcttgcatacacatctactgtctgctgtcccgagcggagcaaacatgcaggcaaccctcctgatctaagcacatttgcatataaacctgtgaaagctgcagtcggacgtttgaatgggagcagattcagagagaccgcaccgaaagcaactggagggacttctaggagccagttcaaatagaaccagtgccgttggctctctaaatgctgtggtgaaaggaaaacaacccctgatcagagcatttccgtttctgagcatcgttgaagatagttggcattgggcccccggaggacctcgaggggctgcagaggttcctttgcttcagagcccctctgtacctattcatcaacgtggaccctggaggaccgttactgcctgctagtagcagctcgttattttgagctcatcttttgtgctgctcgtcagctcgtgttcaaaccaagcctactgctcatttgctttccctgcagcagcagcagcccctactgttgcatcgaagaaagcaatctcattagcgactgcgttgaactgtagttaagatacttcttgtccatatccttgaggcatgattcgaacggcgtcattgtctcattgacttgtctttatcattcctgaaagataaaagtgaacattgaaatcaaagaaaaaaaaacagtttgtacggtaaagtttgagtttaaaattcattttcaaggtaggcaactggacacactctgagctatccaaagg

SEQ ID NO: 5448 - DNA, 2627 bp, Zea Mays
cgaatctcgaatcccgctaatccaaatccatcgagcgggagaaccccgaattccaaaaatccccaaaacccaaccctagctcgctagcctcactgttccccttcgactcttccccttcgcacctctgattcctcgcgccctcgtcccccgctcaatttccagaagcttctagaaccgggtttccagccctaatcccgcaaaaagatgctttcttgcgcctagtagcctgggacggaggcatggacagcggcggcggggagggaggctcgactggcgggaggttccctattctgcaggcgaatagggaccccgagtcaaattgggaggtggacgttgccaaaagcctcgagcagtacctgctcaagatctgttcaggggaggtctccggcgaggacgagtcccattctgtcaactttgccgaagcggcgttactactccaaggatcggttcaagtatacagtaggaaggtggagtacttgtactccttggtgcttcacgcgatagagttcctctcacacaagaagatcaacaggaaaatgtaacagctcaatctaatcaaagcgaccctagcacgattcccagtgaagattatatatttatggggttagatgatgtcctaatggaaacaaggacgtctctggataacaatgttgaccgagatgatttacaaagaaaaattgtgaggccaccagcaaatctactggtgtttgaaggggacgttctggatagtgaagcgagtgagctagactcatatttgttatcaacatgtgatttttatggagatttccttctgctggatccttgtgatgcaccatctgtttttgactttctgcaaggaaaacattctggtaaagaaaatagtgtggctcgccaaggcagtccagcaccttctaaaagccaagccaatgttttcacttccccaaatgcaagatcagcgggcacaggctgtaaagccgcctctggaaaagtcctaggaggtctagattcaactcagaagaatcctgaccaaccttcaactcaagaaaccagtccagatgacaaacattggtctgatcctgttgaacctaactttactgatgatgttgaaaagcctcacccagacgatataggggatcctgttggagattattctgatgacgaggatccgtggaaacctttaaatccacatgaacctggcagcttaaagattcggccttacaggagagtgaaaggttctctacggggggttattggcactttgagaaagaaaactctcacatctatatttcctgtggcaaagatggttggtgtcatcatacctgaacatgctaaatcttttgaagcacagcagtctcagcaggaggaacattatggttcccaatcaccccctcgttttgaaaagtatttggcatcatttgaatttggagaagaaaattccaatgtgtttggagatctgaaagatgacaatggatccgatattggcattaattttgattataatgatccagacatgccaaacgacatagatgttgatcctgacgttccaacatatcctgacgagattattgctgcaactcccaaaggtactcatggtacacaggatgacagagatacacgtgaaagcctcgatgacttgtgtcggtcacatctgaatgctctccttgccagcattgctgaggttgaaaagcagagtgagatggatgctcgagtttcaacatggaaagaaagaatcgagattgccttggaagagcaggataaaaacccaccttttgatatcggttcatacggggagcaaatccttgacgcgctttcatcaagaactgacagcacaggaactgcatcttttagcgagattgtttgtggcagaccgaagtatgaggttgccagaacattctctgcccttctccagctggtaaacagcagaagtgtttatctggacaaaggacaagccacgaatgagttggtgtgttacacagctgagaatccattccatgtaaggctcatcagtcccaaccggaggccagagatggaggcacactttgctcggaagagagtcaagtccccactgcgaaacgctggcaaaggtggtgagtcctccctggcacgacatgagtgccccaagaagccattgcataaaaatggcaagattcaagtcaagacggcgatcaggttgactccagacgggaagcgaaggcgaaggtcagtcactcatctaatgcagccgatcaatctggaatcagcggatgaatgccaatggcagactgactcatgggcatctagagcctgatcgccaatggcagactgactgatgggcatctagagtctgattcttctaattgttgcaacttcagtggcggtttcattggcaggcaacgactgctgtgcaatcagctcccttgacgagacagtgaccatggttcctggttcagatggcgtactgctgacattaggcctagctagcgggtgtacatgtaacatgtacaatagttcattgtgctgttttgtacgtatttgtatcagctctcaagcctaatgctaacagggcaagatttgtctaccgacttgccgttttatacctaatgatattggtagattctttcctggttcaataaactagcaaagtcaagttgctggtgcttttattgttc

SEQ ID NO: 5449 - DNA, 850 bp, Zea Mays
cctaacaagtagagccggctcatatgcagccctacctcaagcctcagtccaatccgcggcccaaaaactccccccgacaaccgaacaggagcggcggcggcggcggcactaccctctccagcaatcggcatgggcacgcgggaggtgtacgaggagaagctccgcagcggtgcgcacctccaccgcgatcccaccatcaacccaggcctcggctcgccccggtgcccgcgatgcctctccctcctcaaccccaccgcgagggactgggccatcacctccgtcctgcacgacgccactgccgtggctggttccggtgccggcgctttgctcagtgctgtgcacgggtttaacacagggatcccttttgtccagaagcatgtcaaggggccgaagtggctgcagttgctcgttggggtgccaccactgctgatattctcaggtgccagtgctgtatttggtgcatatgcacttccaaggtttgttcagctgacagtgacgtcttactacgcggcatcaactggctcgcagtatgctgtttcacatatcacacggcagatcgaaagagctcattttccagaatcagcccaggaatctgagtgagttggttggcattcagtctgttctattgggggtgcaatgtacatggtatagaaggacgtttagtgctgcttttgccgtgttgcagtacagtattagttttactgtgtttcagacagcacgcagtgaataaaattatattgtctttggtctaattgtctgtattcaggtcttcggttgaaaatgtttttttttcacttagccccgtttgaatctttgagatggaattcattttgataactatagtttagat

SEQ ID NO: 5450 - DNA, 1982 bp, Zea Mays
aagcaacctcctcttcacatgcctcgtgtctcgtcaggctgcatgccaatgtagcagtgtcttcagccgacacccccatctttttcaatcctcaggcaggcgcagcgcaggcagcatccacagcctgaatccaccacaccagcaccacccagcaccgatggccggcgacgacggacgtgctccctccggcctccgcgtcgtgatgttccccttcccgttctggagccacattaaccagatgctccagctcgggaagctcctccgtgcgcggggcctgggcgtcaccatgctccacaccgacttcaacgcgcccgaccccgcactccacccggacatcaccttcgtgtccatccgcgagtccctccccgccgaggtcgtcgccaaccccgacatggtagagcagatgatgcagctcaacgccgtctgcgaggcgccgttccaggcggccctcgccggggagctgctggcgcgcggtacaacaaccggtggcccgcgcgaggtcgcctgcgtggtggtcgacgggcagtggtacaagatgctgggcgcggccacgcgtgtcgctgtccccgcgctcgtgctgcgcgccgacggcgccgccaccttactcagcatgctcgccaccccgcgcctccgcgccgacggttacctccccatcaaagagcggctggacgaggtggtgccgggcctggagcccctgcgcgtgcgggacctgatccgcgtggacggcagcgacgacgagacggtgctccgtttcatcacccgcaacgccgaggccgtgcgggcctcgtcgtcgggcgtggtgctgaacacgttcgagggcatcgagggcgcggcgctggccaagatccggcgcgagctgtccggccgcccggtcttcgccgtggggccgctgcacctggcgtcgccggaccccgcggcggcggcggccgcggggtaccaggacgcgccggaccccacctgcttggcgtggctggacgcgcgcccgccgcgctccgttctgtacgtcagcatgggaagcgtggcgcgcgtcgaccgcgccgtgttcgaggagacggcgtgggcgctggccggcagcggcgtgccgttcctgtgggtcctccgccgcggctccgtccgcggcgcggatgaggaggtgccgccggtcccggaggagctccgcgagacggtgaggcacaggggcaagatcgtggcgtgggcaccgcagagggaggtcctggcgcacccggcggtgggtgggttctggacgcactgcgggtggaaatccatggtggaggccatatccgaaggggtgcccatgctcgtgcagccgtgcttcgccgagcagatagtgaacgcgaggtatgtgacgcaccagtggggcatcgggtacgaggtcgggaagccgcttgagaggacagccatggcgaaggcggctagaaagctgatggccggcgagctggggccacaggggccaagggagagggctcggcttcttaaggcgcaggcgaagcagtgcgttgcagaaagaggaggaattagtttggctctcgacggtctggtggactacatttgctcgctgtgatgtttgatcagctttcaggtttcagcatgacgatggcgctctgaataatgaactgcatgttatatgtccgatgcaataaggaatagaatgtggacagcattttggtttacttaattctctggcaaatatatcgttggagtttatgagctaaggtctatttattagtatcacattgataattgataatggaagagaaacaacttaaatagcttctttattgtcactcttcgctacttctttttgtgtgagttctactcgcctataaattagtggaacatcctcctcttaaacacaagaaaaaaatcaatctactatattttagtgagagagctatcttagggaggctccagcatgccatgtcagcgtctagtttcagcaaacccggtttttgatgattttgcacgagtcggatagttcggta

SEQ ID NO: 5451 - DNA, 4983 bp, Zea Mays
acgcacatccactatccccggaccccgggccagtctcacctccttccctcgatcgcacgccactcccgtaggaatcccgaatccccccacccaaattcccgtctagccgtctacccgatcgccgtccttctcgctgcccgtaaaccctagcccagccctctacccccgccgtcgttgcccgtgcgctgtcgtgctcgggctgcccccgcggcgccgcgagccaaaccctagctgcctcctccagatcccgattccgcagggaagccggagaggtgagggccgccccgccgcagatggagcccgcgggggcgcgcaaggagtggcgcgccgtccccgactcctcgctccgctccaatggcgccgaggatgccgcggagcatgggaagctggggcagtcggaggaacgagctatctacgaggaaggggcgggtggactgggcgacttctgtaccatcactattgatgggagcggagggctcagcgaggacatcctgcagcagcgcctgcaaagtgtcgcacggcagcgggaggagctgcagcaagtcgagatcgagttgcgtgcgcaggccattgcacacccgcagatcatcgaggcgcaacaaagcttccaggctgctgccaaggagcatgctgcagctgtggcaaagatcaaggagcaattgcatgagcgggagcagtacattcttgaattagaaatgaaactcaatgacaaggatagagaactaaatgctctgaagattgatcatcaaacggtgtgggcaaatcaagatcttctcagagaacagaccaaagagctggcaagtgtcagaagggaacgtgacaactctgaagctgaaagagcccaacatcttaaacaaatccacgatctccaggaacttttgcgagaaaaagaaagccagttcattgcaatagaggaacagggctgctcaagagaacattctttacaaagatgagcagttgagggaagcccatgcttgggtttctcaagttcgagaaatggatgcattgcagtctcagtccctacaagttgagttacgtgagcgcatggagcaatttaatcaatattggattagttctcaacaacagtatgctgaaatgcagcggagccttctccatacaatacaacaactccagcaagaattagctgaggcaagggaacggtctggtgcacaaaaggatggcccacatgtttctagggagggatcagctgaatcatcacttgttcaaagcatagcgaacagcgtgacttcaaatggtagtgcaactgcagatgggagccagcaactgttgaaaaacaatggaagtgtggatgtctctcttaagggcaataatgcctcagctgtacctgttccatctttattgggaataggtggtccggctgcgcatattgctgcaatgcattcttttatgattcatcctcaaggcattcctcaacctttagcatcacccaactctggcattcctcagtttggcagttttcagacacagcctatgattcaaccaaactcacattggccaaatcagcaggaagtacaaattgtctcacaaccacaagatgaaacaaactatcagacatcccaatcaggtcagactgcattgcaacaagacactattaatactgatgagctgtcccccaaggcaagtgagggtggccatccagaccatcttaatgcccaggggaaacaacagcagagccctgcaagtgcacctactgaatcaactcatgaacttactgttgttgaaacaaacatagctgaacatgtaccttatgatgaacaacaaaaaaccttaaaagaacaggattcactatcaaatataaaaagccatgttggaagagttgagcctcaagagcaaaatgctgaatccaaggttgaaagagctgcatctgacaagcaatctgaacctcaatctagacagcataaaccttcaaacttccctccaactacccagcttaacttgaaaaacagtgcaacagagaatcctaatgttgtaaatcaggttgatacaatgaaatcagttacaggtggttttggttcacagttacctcgtgtacctaaggaacctgctctcctagatgagagatctctattggcttgtattgtacgtgcagttcctgctggacctgagggtggaatcaggattagctcaactctgccaaataggcttgggaaaatgttggctcctcttcactggcatgattataagaagcaatatgggaagcttgatgattttgtggctagtcgtccagagctgtttgtgattgagggagacttcattcaccttcgtgaaggagcacagcagatcatttctgctactacagctgctgcaaaaatagctgctgctacagcatcttctgccccttactcatccttactgccttctgttgctgttactcctgtggcacaaagcactcggcaaaagaggggccctgcagttgattccagatcatcaaatgcaattctttctggaaatggcttcacagatcaatttaacatcattcagggggttagtgacgtacctgtttcaggcaaagtaagaaacaccctagataatggcttcttaggtgaagttcgaactgggcagccatctgtgctcacagctgctgcgaatggagcaagacatgacaaaggtacaaataatgtcatacagggttatggtggaaagcaacaagggaggtcaactgggatggcttacctttccagaagatgaagtagttttcactcgctttgcgctgcagaggaggggcggtggctctgcagggggagaacggtggctgctgcagcagggggagaccggaggctgctgcagcaggggagaccggcggctctctaccgcagaggaggggcggcggctctgcagcagaggggcgcggctgttgcagaggagaggcgcgcagaggaagggcggcgactgctgtagcagaggaggggcggcggctatgtgctgcagagggcgaccggcggcttcaggtaagttagggtttatgtgtaggtttagatttgttaatgggcctttggttgggccgtaaagggacaagtcgaccgacttcttagcccacttattttttcagtcgtcggcaagtcgggcgacttacgagaaaagtcgagtcggacctccaagtcggtctctgaagaccgcctggacgactagtcgacgacttgaaaacagggatcaaaatcttagggcttatttgggaacacggtattttcttagttccaagataataccgtggtatttgagcataccatggtattttagaccaaaaagcgtttgggagcacatacaagaactctgtattttaaaccatggttttgccaataccatggtatttttggggtcaaaaaaactttggtctagtccaaagtttttttttgcttgcacgcagctacagtcttcttttcccctacactacaactaaaatactatgtttccaaataggtgttggattggactgatataaaatatacaatagttatgtcatggcatacattaaaccgtggtattataaacggtattataatttataaactgtggttttgagaaacaaacttctagaacaggcccttattgacataaattgcataatataagaggttagtggtcaaagtgtgatcttgaagatcaccaaagtcaaatcacgccttatctttttggaccgagtatttggttttataccgctttttagggtccctttagttgggcttttgaaccagtttttgccatagtcacaatgttcccgagtcgattgtgttgagtaagagtcgtgggtcgacacttgaaaaaatatggtagaaggagcgtgttatacctctatggtatgtgaatcgtgggtttggtacgtgaacccaattctaatgggtcaataatcccaggtcgactccatgggtcgaggttcgtgttccaaaattccaaggaccctacgtgctatgcctcactggcctagcctagtactaccttaacacaacataacaccagcccaattaccaacccattatagcaatgaagccctgtacttctgccctagactcacataggagccatagagctcatatagcagaagcatcgccgcccagcccaggacctctggaacctgcaggaggagcactgatgcaagaatccagagtgtcaccatttgctggccataggaggatctccgtcctcgtctccttacacatcgacatcgctttgctgtcatctgcgctgccttgccccaatctgagctgccctgccccaacctgcatgatcctccatcacgaacgagcactggtcgtcgtccccatctgtattggtacgatgactccctagcgtttgggacgattacctatggtgacctagacccacgatttgggatgccgaccttgggtcatggaatgcggcattgaccctgtttctgtgactatggtttttgcttttgcaaaagcaaaaagacagccaaagggggctgaaaagccacaattgcattggaccaaaagctgcttttgcctaatacaagagctgaaagcaacttcctctgcttttacctcttgtgaaggcctgcatttgactgaaaacagctcatcctctgttcggtgggcgatgctccttcctctcccgtggttggatctggcgactcctctagccttctcagtgtgaggctatccccttgaccatgtccttggtcgccatgtggacgagcgtgggccttttgccgttggtgagcatgatctcgactgccatacgggaagcgccacctcagctgggtatccatccgaaggaagaatgaggctgacggatggggccacttgtcactaagagaagttgacaataggttccccccccccccccccccccaaaaaaaacaactattgaaccaaatggctttcatctctggtacaatccataacccacaattgctttttcacagcccacatccataatccgcattagcttttcaaaagccacaactcaaccaaacaaacccttagaagccttttgcaattttga

SEQ ID NO: 5452 - DNA, 1540 bp, Zea Mays
gccgcaacggccgccggtcgtcgttggccacgtcacccgatcccggcatccccagcccgaagcatcacaacctgatcctcctcccccacacggccacaccacaattctcagaaaaaatccctcccgctcccaccaccgccgcagccctctcctcctccgcctccgcatcacattccacttccattcccgcggcccgcgccgccatcatggccaccgcctccctcctcgaggccactcgcctcctttccaccccgcgcccgccccgccgcagcctccacacccacctcctcaggaccccgcgcctctccgctctccgcgctcacctccaccgttccgcaactctcgacgcgcaggagccgacggcgaggcctggcgcgctcctggtcctcgacgcgctcaggaggtccgtggtcgactccctcgcggcgctcaagcggcccgcgctcgcgctcctgctggccggcgcgctgctcgccgcggcgtcaatgggcgggccgcacgccgcggcgctggccgcttcgggcgggcgcgtcggcgggtccgccttctcctcccgctcctcctcacctccgtcctacggctacagcgcgccggcgcccaggggcgggtacacggccgcgccctactactcgccttcgcccttcgtgtccttcggcccggccgtcggcatcggcttcgggggatcgggtttcctcgtgaccctcattggcttcgcggcattcctctatctcgccgggttcctgtccgactcgtcaggcggtaccagtgtgcttacagagacggataagaccaccgtcctcaagctacaggttggcttgctgggcatggcacgatcatttcagaaggagcttgaccaaatagctgagaaagcagatacatctactccggctggcttgagctatgtgttgacagagacaacattagcattacttcggcatccggattgttgtatctcagcttactcttcggtggatgtgaaacgtagcgtggatgatgcatcaagaggaataaaggaggcagccaaagatcaagtggttttagcaacgagtacattgtgataaccatattggttgctgctgagggagtacataagctgccggttataaatagcagcaatgacttaaagacagctctacaaaagatgggtgccataccatcaagcaaaatactggcagtcgaggtcctgtggactccgcaaaatgagaatgacacattgtccgagcgagagctccttgaagattacccgctcttaaggcctctgtagaaagataaaagttacagattgcccgtgcaaaggaagaacacgccgtagattcagttttggcggttttcttattagttatagcacagatcctgcgtttgtataataagtgtataataatttgtaattggcgtctctgatagccttcatttcagaacatggaacgtgcaaatctgcaattgtctgtcaaaaaaataaaacaggacatgctgcatttgtgcgtgtacgcgttccaccaaggatatttcaaataaaaatatttgatgaatattgcatgct

SEQ ID NO: 5453 - DNA, 711 bp, Zea Mays
aaaagtttagattgttttatcataatcagtggtagtggtatataaataactccaaactatatgtctatgtagattgtttttttaagtttttgaggagcaaaagaggtactgcgcctccgaaaacttgaccacgagatggaacccgccgcggccgccggagagtccgattcttcgccgcccccgcccccggaggacctttctactgtagagccttcaccctcctcctcgtcctccgccacggccgtcgttgctcccgaaacgcctccccctcccggggcgcaggcggtcgcggcggcgatggaggcggtggagcgggacgcggctgccatcgccgagagctacgcctccctcttcgcttcactccgcgtcgctctatcaaacgtcacctcgacgtcggcggagaacatggagtgcttgggggacgtcgtcggccgcttgcaggaatccgcacttgaagcatcttcgaaaggaaataagtacatcaattcgtgcttgaggttgaatgaggaaatgagaggcttggaaagcttagctatgcaactgaagattctacggaagaatgttgattcactagatttggctgtcagtcaattgcttcgccttccctagtcaatggatactatcaatgaaggagagatgcaaggttggaatggaaaagagatctggaggcataaatgaaggggcacaatcccaacgtccagaaagtggcag

SEQ ID NO: 5454 - DNA, 3895 bp, Zea Mays
tctactaaactcgttctcgaatatttgttgtaggctaatttatttttgaattaaaacacgtcaaataaaaaagaacggaggactaatttatattctgacagagattagtacagaaccaattatctctctaatagaaacccagtagaatcactcaatcagagaatcaaatatcatcaataatcacagaggaacgaagctcttcgaaacgggactttgccctctttctttgtgcttcacatcgcactctgatcaaagatacggcctggtccaaaagagtacacacttcctgctggcgcacccatgatgagggctgagctgaggccggagaggcggagacccatactgttccgtgctcaaccgattacggcccatcaaactacttccttcctctggtccaccagaaacgcacacgtcgcataccagaccagacctcaccttccccacccggacgccaccaccgcctgcgccctgctggctgccgcgatgctgccgtactccggtgaccaccagcgctctccgccgccgcagccaccgccacgagcggcgttctcctcctccctctccccatccgccgcgcccttccccgccgctgatccggtgggcccgggcccaggccccggccgtgatctgcccaccgccccgtccgtctacacggcgggcggggactggggcgccctgtcgtggatggagcctcccgcgagctacatggcccccgccgccacgccgccgggttataaaggcgaggccactccctatgacatatactcaaggaaccacttcagtaacttatttggtctacattctctgagatcagagagctcgaatttgacaagtgagaagcatccaggaaactggcaagaaagttcagagaccctcactaaagattttggaccatcagtgtttcatcagcagcagagtgcctttgtgagtaaattgcttgatcattcaggtgccgaagacacaggaccttatcccccacgacaagatttaaatcagtatccttttggttctacatatgacaaatacatgacacagctttcgtcatgttcaacagatacacgacctcacatcttttctacacaatatgtcaattcacctgaaatggccaatacaactgttccattgatgaatgacactattggggaaagttccttctccttttcgcattatatgaatccttgcagaatcaatcttgattattttgattccgtgtggaatgaacaaaaaggtcttggataccaaactacagataagcagcatggaaaatggagtaaccctgatgacaaggcaacagtggggaactattccctcaattctcttggagagagtcaccttaatcctgagcatttagggaatgggagaccaatgcagggatcttctgaaatgaaacatgaattgggaagtttcagttccaaggtttcttcgtctgagtctggatttgttcagcctcgtgaatgttcatctgagtttcctgaggtcaataacaccagtgttgattcaccttgttggaagggcacaccagcccagtaccagccttcgtttgggattattgaaaataatggcgctcctcctgtggtgataggaacagtaggctacattaattcacatcaaaaccagaaactacctgagttgagttttgagtatccatggcgattctgtgaacaccaagtatcaggttctgaaaatgacccttttaaggcggtcaagttgcctgaaagatgtaaaatctccaaagatcataaagttctgccaattgatgtcagggttcttaatgacatgactacacatgctagttatttgcctgacaaacagcatcccacaacacagaaatgcaatgattctggagaagattctaagaatgtgataacttcaagtcaacaggaaagttcgtgttctggcagaaaaccaatacttttgggtgaacatggtggcagtcttacaggaagcataagtgaactaatgagtaaaagtgtgatgaatcctattgctattactcctagagttcatactgatcatttaacaacaggaatcccacatggaaatattttttctgcagcggtggagaaagaagaaagcactcacaagagagtgcttctatcgacctgcaagggtggttcttcattacaggaagatgaagaggaacttctccaatcagtgattcaaaatcttacagctgccagttccaaaagaagcaaggttgaacaaaaaaatgatgatggattgagtaactccagccaaatgaaattcaaagatattaattatgtgaggaaacacttttggaggtcaatgcatgaagactcagaacaggagaatgctgattcagaatttaaggccactgtttcacaggttcttactaatcaccaggaggataaggtgctcgacaacactgaagttcctcaggcatcaatctatagaaacttgtggattgaagcagaagcttcagcttgtaaactcaaatatgagcttcaacatgctctcctgaagctcgagacagcaaaaggcctcaacgacacaataaaagcccctgactcattggaagacagtaaaggctctaactcatacattttcagtaacaaaccacagaaccatgggaaaggaaccgtttcatgcgctgcggcctttcagggccacggaggagattctcgtgacaagcaatctcctgttgtaagtaggagcattttcaatggtgttgatgctgatgtgtttgcccgatttgaagttttgcagtcccgtattgataatataaactccttgagtgagattgactgtggggagcagaaagaagcaagcaagagaccatatgcagtcgaagatactgttatggcgagactgaaagttttgaagtctcgtcctgacaatataacctctttgagtcaaggaagcactaaacaccagctagatggaagcacaaacagtgcagataatgttgatgacactgttattgctaggctgggaattttggagtcccatcctaataatgaagccctattgggacaggaaagcagcaagcgacaactggatgcgagaacaaatagagaagatgggattgatgctgctgttatggctaggctgagaattttgaagtctcgacctgataatgaaacctcaatgggcgatgccaacaaggagcagcaagacgcatgtggtgaacaattaaatggggatgaccttggtattgtgtccaatggagccattagcaacaccctgagtgagaagtgctctaagtttacgcactctgatgatcatttaggagaaaaaaactcagtaggtgtcccggacacatttggtgatggaaacagtgctagggagaaaaaggaggttggtggttcagcagatgttgctacccccatgaggtgcaaaggtacatctgatggagtgagcgtcggaagcgcagtacatggtgaagataatcttggtgaaaaccatgtgtggcttcaaactgctggggactctcatgtttgcacagaagggtctcaggaagcgcacccaatctcctctccagttgaccagtatggtggttcacctacagagtgggagcacgtgctgaaggagaatttcttccatccaggcaaattggcgaattctgacccataaactggaaagcttttgtttcagctcatgttgcctcaaaatgctgatgcttcttgtaaatatatgatacgatattatacatcccctcccccgaacctttgtctctatgttcaataatctgcatatctggtgatcaaggaaacgcactgtgcccccgatggtgctatatggaactagtctggtttgtctgcttgggtctatcatgccatagtctatctgtaaatggcacatgtatgttctggaccgagagtgaattattgtatatatttacttccagcaaatttggatattgtggactgtgcag

SEQ ID NO: 5455 - DNA, 2191 bp, Zea Mays
gggcttgtggctagccgtgcagaatacagagcgaaagagagagatggctaatattgggaatcttgttatctgttctccttttcaagctgctctccctaggcttttgggtttgtgaggcgttggctcccttccccactgcttcctcccccactgccggtcgctgtgcaagagctgccacgagacagcagattccccatcatccaaagcgaggctgagggggaggagaggaagcaggaatagcctaacaggggtatagatctcaggaagctccatgcgggtgagcttgtgcccaagcctgtgtcccggtgcgcgaggctgagcttcttgcccgttgcccgtggcgcccccgagctcaccgatgcgccgccgccgccacggcttgagctccatggctgtccagcgcgctggtgcggattgacaggcaggttgtcctgcccgttcttttttctggtgagtgcgaggtagctgcttgggcagacaagtaggagcagcggctcaaacttcggatctcggcatgggctcctttgggatggactggaaccagaaggcctccgtgttgtgggactgggagaacttgccgcccgtagccgtaggcgcgagcgggagcgagaaccccaggatggctgctgcgcctcaggctttgcattctgcctgtggcaccatctcttccagctcagagatggggtatggctcatccaagagctccgtatccgcgtcggctgatgattcttcacccaaggccaaggggaaaagcatggagctcaacttcgcacctgacaaagtgcctgacaagaacactgattcagggaaggttgacgacgccaggacctctccgtcgtcgccggtgattgccatcagcagtgcagagcccgtgcttagcctgaagcttggcaagagaacgtatttcgaagatgtctgtggagggcagagcgtcaagagtttgccgtcggatacgagtgcagtgactcctcctcctgcttctccgaagaagacgaaggtgactccaaacaagaaatcttactgtcaggttgaaggctgcaaggttgatctctcttctgctaaagagtaccatcggaagcacagagtctgtgaacctcattctaaggctcccaaggtggttgttgctggtctggagcggcgcttttgtcaacagtgtagccggttccatggattagctgagtttgaccagaagaagaaaagctgccgcaggcgcctcaatgatcacaatgcccgcagacggaaaccacaacctgaagcactttcttttgggtcatcaaggctgtcggcaatgttctatgacacaagacaacacacaagccttctgtttggtcaaggtccttatggtcaaatgagaagttgtgcaagttcttcatgggataaccctggaggtggcttcaaatttgcagagacaaaaggtccctggttaagagctggtggtgttgatgggttgcatcaaccaagtcagcaggtgtggaacaactttatgccacatggtgtccatcaagattttgatgggttcacagctttcaaaggaaccaatgcaaaggtccttcatcaaggcgttgaagcttctgcggtcgcctccaaccagaacggcgccccacaaccggaccttcatcgtgctctctctcttctgtcaaacagctgggctggtggtggtaccggtaccggtaccgaccagcacccgacggcccagctgcgccacgctgccctgagcagcagcctcgccgccagctccgtctccgtggcgcaggcctcgccagcagggctgtggcaggacggcggcgcggccctgggccaccacgactacgcccacgcgttccaggctatcaacacgccgggcggcggcggcgccgccgctcccattgcagtgggtcaggagctgcttcagctcccgcgtccgccgtccctgtacgacgacggctcctcgtcccgctacgacctgatgcgctgaaccttggggcttctggtggagcgcggggtttcgatttttgaacgaactctggatggaactcggagttttgaacgaactgctgtatgcttgctatcaaggtctgctggctcgggctcggacgctcgtgggatcgccagcagctccgtgtgcttgaataaatccacagtttttttttgtgtgacgctagctatttatttatttcacttgtgtaatgtgatgcgagtatgcgactccctc

SEQ ID NO: 5456 - DNA, 2186 bp, Zea Mays
cggccgctgcacgacagcgacctccatgcggggacggcggagccctagatgcgtcgtggctgacccccactggcgccgccactccttccggtttgacgacattggagatcaaccatgctggagctggtgggttgtggtcagagctcgtaagcaacagaggatttgaggctggtgggcctaatacaccttcgaatattgatccgtggctgatcattggggatgaatcaagtatcattgttggaactgatcggacatcatgttttgaacgtaacccagttgcacttcggatggaagttctttgtggttctaaaaaaactaatgcctgtccatcgggaggtgttggggtctataatcctggctactggggcatgaggtagcaagaaaacctttgcaaaatggacaaaggtagaatttcatttgagatccaaccaaaataacagcaactcaaggtttcaacttacaacaagtaaaagcggggtagtttggcttgatcaagtatcagttatgccaatggacacttacatggggcatggttttcggaaagatcttgcttctatgttggccaatctcgagcctcagtttctcaagtttccaggtttatcatatttgattattcttacatcatatctggagtcaagttaaacactgtatctattgcaatggtatgtgtaagattctgtacctaccatgttttaggtggcaactatgccatgggaaattatctacgaaatgcatttcggtggagtgagactgtgggaccatgggaggagagacctggtcactttaatgatgcctggggatactggactgatgatgggcttggattttttgagttccttcagttggctgaagaccttggggcttccccagtttgggtggtgaatgatggagcaagccttaatgaagaagtttccactaaaacaattgcatcattggttaaggatgttgttaatggcatagagtttgccagtggaggacctaagacaacttggggttctgttcgtgcagcaatgggacacccagaaccctttaagcttgattatgtttcaataggaaatcaagaatgttggatgctctactatagaggaaattaccaaaagttttactcagcgattaaatctgcctacccagacatcaacattatatcaagttgtgataggccaactatttcgccatccaaccctgccgatctttatgatgttcatgtctacacctcttcgactaatatgttttcaaaagctagtatgtttgacaacacaccacgtggagcaccgaaggcaattgttagcgagtacgctgtgaccggaaatgatgctggcaaaggaacactggtagcagcactggcagaagctgcatttctcattggattggaaaggaacagtgatgtggttgagatggcaagctgtgcacccctttttgtaaatgacaatgatcgcaggtggagcccagatgccatcgtcttcaactcggggcagcactatgggtgtcccaactattggatgctacacttcttcaaggaatctagcggcgccaccctccatcctacagccattcaggtctccagctacgatcagctggttgcgtctgccatcacttggcagaacgctaaagacaagagcacttacctcaggataaaggtggtgaatttcggcaatcaagctgtggatctgaacatatcggttgtggaactggccaccggcgtcaagaagtctggatcgaagcagacggttctaacgtccagcagtccgcttgacgagaactccttccagcagccagagaaggtggcgccagtgtcgagcccaatggcgaacgcggggcagcagatgggcgcttccgtggggccgtactccctcacctcgtttgacctgctgctggagccgagcaagcatgacagcgtgtaaaactgtcaactgaagaagcatgacagcggtgtacgtaaaggaggtcaaagatagaggagacaggtcagaggtcaaaattgagaccttgataccatattggattggattgtatgtatcaacaagttcaacctaaaagtttaagctgatagtgaaatgcggacagttcacattctaacaaatcccagtcaatgttgcatccaacaatactttgtacttgatgtctgaatccatttgattcagaagatagcgctttattgttttgccaatgcaaatacacatgcgatc

SEQ ID NO: 5457 - DNA, 1713 bp, Zea Mays
tcctcaccgttggactggacgtgcccttatcctcttatcccagcagccggcgcccgccgcgcgctcgacaaactgccgcgaactctcccggcctcacactccttgcgcccgccgcggcagatgccgctcgccggcattgccctcacgcccctcctcgtctcacctctcgcgccttccccgcgccgtagccgtgtagccacttccgccgcgagaaggccaagggctctccagcgagctcggtgctcggctacagccgcttccggtgaagccggtgagctgtcgcacgcgacactgctatggagggcggcgaagctacccatctactccgtagcgctaataccactcacagtagggagcgcttctgcttattatcatgcaggcttattctttaccaagcgctattttgttctcctgacagcagcagtcctcgtgatcacttggctcaatctcaggggctgatagggacaagaaagaatctgttgtcagcattactggcagccgagcaatgacacaaaatgcggcgaacttttcccttttcctcggctttgcagggctactttgggcctttgcagaagccaaggatatcagattcattttattggtgatctctgcaatcttctgtggttatgtttaccagtgtcctccattccgattaagctaccaaggactaggcgagccgttgtgtttcgctgcatttggtcctttggcaaccacagccttttacttctcaaacagcagcttaaatacttcgagcggaggagcggctcttctccctctcactaaaacagttatagcttcatctgttctcgtcgggctgacaactactctgatactcttctgcagccatttccatcagatcgatggagatctcgccgttggaaagatgtctcctctggtaagaatcggcactaaagcaggatcgcggatagtgtcgattgggattgtcatgctttacattctcttggctacgtttgggacatgcggatctctcccgccatcttgcattgtcctctgtgcccttactctgcccatgggcaaaacggtcgtggactacgtgctgaaacatcacgaggacaacgcgaagatattcatggcgaagtactactgcgtgcgcctgcacgcgctgtttgggatggcactggcctctggtttggtcttggcccgaaatggtatattagcctgacagacaggctcataggcggcgctgaaatccaggagagggtccagagcaccctggagtttcagaatcagcgagcaccctgttcctcaatttatgttctgaatctgaactacttctgattcgactatcgaacaggccgatgagaatggggcgcagtactgagcagctgcagttttgccaagaaacggtggagggaatgggccctaggagaagtagaactactacagcgtcagaactcagatgcacaccggcccgtatcggacggcaagttcggtgctcgagttcatttggttcagcgtccttgtacgctttggtccgctctcgggggcttgcttgctcgtgcacggtcagactgccgttgcgccggggtccgggggatgccagtgtatgtatgcatatggattgaatcccaagcaaggacgagtcatgcactcatgtacaagcattacttctgtgcacagacgaccatacagattatatgagatctcactcacaccttttttttttgcatttggtttagccagcgaccggta

SEQ ID NO: 5458 - DNA, 2054 bp, Zea Mays
  misc_feature (1)..(2): n is a, c, g, or t
nntcttatgacccagatgcaccaagcgccaagaataatagcactattaaggttctttcggaaatctttaggaacactgtctcctactcttctccaacactcagcaaaggagtcctcatcgtcattaatggtcagatgaccaagactgaaagggccatgatgctgtacccaaattgtcgtgctagactacaagaagtcaggagatgctgaatagtttcatcagcttggtcatggagaggacagtgctcagggtgtgaaagacatccgttttctaattttcaactgtccagtatttgtctctaatagtcaaccaaataaaaaccttgcattttggaggcgcccaagatttccataaccttttccaaggttcaaatttaatggagcctagaaagaaggttttattgcaggacttagggctagtttggaaacttaaatcccctccaggatttccagggctaattttcccctcaatcctcaggagtcccggaggggatgtaagtttccaaactagcccttagaagaaaattttcctgaagcctcatgtttccaaatatgaatgtcatcatcttgagatagggctgtgccttcgattaaattccacaactgaaagaattgttggatacctgtcaaggacaggggtgccttgatatctctaacccaaggtctgctgtccaaagcttgctccaccgtttggaatttcagagctttttcgtccactttggccaccatatgagggaccagatcagagatagaggcacccataagctacctatcagccagaaaagggcaatcttgccattacccacatgagtttcaactgcagttgcgaagaaatctctgaccagagcctgaacagggaagtccagaccaggccaaggccaagaggaatcagtttttggaaccgaagccatctagcatgtaaagcccatcccatcagttgcaggtttgggattccaagccctccaaggttcaatggcctggttattttctcccaagacataagacaacttccaccattcacttctttcctccctttccacaaaaggcccttctcaatttatcaatagccttaaccacccatttccatttaggcacattcaaggcaatgaagtccttattttgaatcaattgatctccttggtcaaacaaatatgacccccctttggaagatgggacagttccttctcaagggatgaggaatcttgaggttgaggcaaacgaagttttctcagtgtatcgtgaccagtactatgaaggtggcatctcatctgtttacatttgggaggatgaagataatgggtttatcgcatgcttcttaattaagaaagatggacaaggaaaaagagggtacatgcagattggttcatgggatgctattcatgttgttcaggttggtcctgaagaagaaggagcggcacattactgcttgaacagcactgtgatgctctcattgacaacaaacaacaagcagtctggaactttcaacctgtctggatccattagacggcagatgagtatgactcttgctgtagctgatggacaccttgttaatatggggaaaatgatagaagaaatggaggggaagctgagaaattcactggaccaagtttattttgggaagaccagagaaatggtttgcactcttcggccaccaccagaagttcttaatatgagactacctgacagctgagccagtgcatagaagtgtcaacttaacaaagaaaaacctgtatccgcgaagtgtttgacaggagccagtgtttgcagtggaattcagttaccaacagatgaatctccacaaaacgttgtgttggcgttctgtatcttctgaagaatctgatggtgttgtggctggccttgctatctgtcaaagtactaatgcggtgtttgttttgaggagtcacctcatatcggataagattgtgcatcctgagtccattttaaaacctggtgtttcttatgcttttacaaattagcttctgagaaatgaagtagtgctggataatttttttctgcttcacaaatcaaataaaaaaaagaggtgcaggaagatcg

SEQ ID NO: 5459 - DNA, 2058 bp, Zea Mays
  misc_feature (1)..(2): n is a, c, g, or t
nntcttatgacccagatgcaccaagcgccaagaataatagcactattaaggttctttcggaaatctttaggaacactgtctcctactcttctccaacactcagcaaaggagtcctcatcgtcattaatggtcagatgaccaagactgaaagggccatgatgctgtacccaaattgtcgtgctagactacaagaagtcaggagatgctgaatagtttcatcagcttggtcatggagaggacagtgctcagggtgtgaaagacatccgttttctaattttcaactgtccagtatttgtctctaatagtcaaccaaataaaaaccttgcattttggaggcgcccaagatttccataaccttttccaaggttcaaatttaatggagcctagaaagaaggttttattgcaggacttagggctagtttggaaacttaaatcccctccaggatttccagggctaattttcccctcaatcctcaggagtcccggaggggatgtaagtttccaaactagcccttagaagaaaattttcctgaagcctcatgtttccaaatatgaatgtcatcatcttgagatagggctgtgccttcgattaaattccacaactgaaagaattgttggatacctgtcaaggacaggggtgccttgatatctctaacccaaggtctgctgtccaaagcttgctccaccgtttggaatttcagagctttttcgtccactttggccaccatatgagggaccagatcagagatagaggcacccataagctacctatcagccagaaaagggcaatcttgccattacccacatgagtttcaactgcagttgcgaagaaatctctgaccagagcctgaacagggaagtccagaccaggccaaggccaagaggaatcagtttttggaaccgaagccatctagcatgtaaagcccatcccatcagttgcaggtttgggattccaagccctccaaggttcaatggcctggttattttctcccaagacataagacaacttccaccattcacttctttcctccctttccacaaaaggcccttctcaatttatcaatagccttaaccacccatttccatttaggcacattcaaggcaatgaagtccttattttgaatcaattgatctccttggtcaaacaaatatgacccccctttggaagatgggacagttccttctcaagggatgaggaatcttgaggttgaggcaaacgaagttttctcagtgtatcgtgaccagtactatgaaggtggcatctcatctgtttacatttgggaggatgaagataatgggtttatcgcatgcttcttaattaagaaagatggacaaggaaaaagagggtacatgcagattggttcatgggatgctattcatgttgttcagatgagtatgactcttgctgtagctgatggacaccttgttaatatggggaaaatgatagaagaaatggaggggaagctgagaaattcactggaccaagtttattttgggaagaccagagaaatggtttgcactcttcggccaccaccagaagttcttaatatgagactacctgacagctgagccagtgcatagaagtgtcaacttaacaaagaaaaacgtattcttctccactctaggcgtggtctgttcttgcttcgtagttaatagtctgtgcatctgtatcgacatctgttgaggtatctatgataggagcttattatcttctgatctcttgtgattagctgtatccgcgaagtgtttgacaggagccagtgtttgcagtggaattcagttaccaacagatgaatctccacaaaacgttgtgttggcgttctgtatcttctgaagaatctgatggtgttgtggctggccttgctatctgtcaaagtactaatgcggtgtttgttttgaggagtcacctcatatcggataagattgtgcatcctgagtccattttaaaacctggtgtttcttatgcttttacaaattagcttctgagaaatgaagtagtgctggataatttttttctgcttcacaaatcaaataaaaaaaagaggtgcaggaagatcg

SEQ ID NO: 5460 - DNA, 1574 bp, Zea Mays
atagatagaagaagatcttctgtgagcaaaggggccaatggaaggcaacaacccaatctcaggagttccttcgaacccttcaacgctactacaataacgcctacactgatcacgagaagcaggatgctataaacatgttcttaggtcatttccaacctcagcaagggaaacctgcattgtggaagctggactcagatcagcattacaacattgggaggcaaggaactttaaaagaagagattggaagatcattcataaagaggtcactatcagatggtaacatactgttggagagcagcttgcctgtaactatctgtaacaatgaaacagacaacacagaattgctcccagtgcaacagctggatgatattagagaagcttctgattctgcgccagagatctccatatgcgaacctaacctgtgctccagtatgaactatggcacagtgcctggaagacactccatgtcagaagagcggcagagttatttgaaaagattaggttaccctgaattgcactcttcaaatttctttgaccttgatttgttgtcatcttcaggaaattcgtttgacgaggaagtttttgagaggtcattactgatcaattcacctatggatgtgatcagtcctgaatcatctatgtcatacagtgaacaaggacacactgatgagggaagagatgacacggatctttcccgttctagcagccagctctcagacattcgggactactctgaccactttgcgcagtgggtcgtgaatggagacacgctttgctactaggccctggacttttgtcttggtgacagctcagtagatgtgacacggcaggaaatggaagtctgacggatagagcagatgaaatggctgacgactagccgggctaggtgccgtgcatctacctgcagaggcggcgtagcagaagaggtggtggacatgggagaagtctcgcatcggcatgcttgtggtcactggaaggcttgaacgatgaacgctgatattcgtcggatgcagctttcggtggggtacatgattcaatttgctatggtgaaaattttgaccgtagcttagacaataaataggcaaaatatatctgttcttttagtttagcttaccttgcgtttcccttctccatagaaaagtatcaaaaggaaaaacaatggaaaatctattaggaaaaggaaaaaacaaacaaaccataggtaaagaacacttctgttgtaaatagttagtttgctacagaagtataaatatctggtacttgttgggtttcttggcggtgtctgtttcataattgtttctgtgaaaaagctgaaagaaactcggtatgtcttttaatatgcaccatttttgcttgaggactctccatgacattgcgcagagaggagtgcaagaacttgaatgtctcatgcttctcttgcggtggacatccacgtcgatgacaaaattctagtatatggtacgtagttcattcgaaaggtgcaaggtatccaatttagttttggatatctagagttcacaagatagtacttatctgaaaaatgaaatcaaattaccattgcaaaatataaataa

SEQ ID NO: 5461 - DNA, 3537 bp, Zea Mays
ttttattcctagtatttagcctcgcggcctcgcctattgttggcacatgtcttcccgcggccgttgtttacgcagaatcctcctgttccactcctcgccaaatgtcttttgttagagttcatatgaaatttctggtcgttcaattttagatcgatttctttacggcgtattttgattgcatcgcgaccggctccggagccatccggtcataagaccgtaccaacgcatttctttggtttgaggtgcgggacggcgggcgccgaacggtcgtgtgccgtagatccaaagtcgcgggaaatctctggtcgaggagtcgatttggatccgtttatcgctagtttggtcgtcgttgatctgaaaggtggagctttggtcgattttctcttccagaagcatttgtgtttctgaggtgctaaggtgctatatctgaagcagccgacgaggagctgagtctttgattttttttttaccaatttctgtcgtcgtttgttgatctgatccgatggaggctatgacgggtggcaaattccttcaaaagtttcggctctacgaaaccagatcgaaattttatcttattggaagagacaagagcaggattcactggagggtgctaaaaattgatcggtcggagttcactgagttgggtgtcgaggaggatccaactatttacacagagaatgaatgccaagaactgcttcggcggatccatgaggggaacaggttgaccggtggactgaaatttgtcacaaaatgttacggaatagttggttttgtaaagtttcttggtccttattacatggttataataaccaggagaaggaaaattggcacaatatgtggccatgaaatttattccgttggcaagagcgaaatgattgcaattccgagtgttacagtctggcccaacatggcttattctagggatgaaaacagatataagcacctgctttgctcagttgatctttcgaaggatttcttcttcagctactcttacaacatcatgcacagccttcagaagaacataaccgagaagaacattgggcaggtttatgaaacaatgtgtgtatggaatgaatttatgacacgagcaattcgggatcatctcatgaatacctgttggactgttgctttagtccatggattttttaagcagtcaaggttctctgtgtctgggaaggatttttggctgacgcttatagctaggcgctcacgccattttgctgggaccagattcttgaaacgtggtgttaatggaaagggcagggtagccaatgatgttgagactgaacagattgtttttgaagacacatctggtggaatcccaactcagatggcttctgttgtacaacatagaggatcgatacctcttgtctggtttcaggaaacttcaagacttaatattagaccagatattatattaaaacctgatctggactacaaggcaacccgccttcattttgagaaccttgcacttagatatgggaatccaataatcatattgaacttaataaagacccacgagaagaagccccgtgaatctctgctctgtgcagaatttgcaaaggctattcattacattaacaagagcctatctgatgacaagtgtctaaaatttctgcacatggatctgagtaatctttttcgaaggaaaggcaccaatgtgcttgcactgttgagcaaggtggcatcagatgtgttggatctaactgaattcctccactgcgaaataagtacatcaacaaaatctgatgacatctcaagtgaagaaaaaactgttgccaaaccacgtgatgacagaagtagcagagatcaaactgaatgtgcagctaagttgggcgtcaacttcatgcactgggacttgctgaagcacataaaattgaattgcatgatcctctggttgatgatctgatggatttctatgaacggatgggtgatacattagctattcagtatggtggctctgctgctcacaacaagatcttctgtgagcaaaggggccaatggaaggcaacaacccaatctcaggagttccttcgaacccttcaacgctactacaataacgcctacactgatcacgagaagcaggatgctataaacatgttcttaggtcatttccaacctcagcaagggaaacctgcattgtggaagctggactcagatcagcattacaacattgggaggcaaggaactttaaaagaagagattggaagatcattcataaagaggtcactatcagatggtaacatactgttggagagcagcttgcctgtaactatctgtaacaatgaaacagacaacacagaattgctcccagtgcaacagctggatgatattagagaagcttctgattctgcgccagagatctccatatgcgaacctaacctgtgctccagtatgaactatggcacagtgcctggaagacactccatgtcagaagagcggcagagttatttgaaaagattaggttaccctgaattgcactcttcaaatttctttgaccttgatttgttgtcatcttcaggaaattcgtttgacgaggaagtttttgagaggtcattactgatcaattcacctatggatgtgatcagtcctgaatcatctatgtcatacagtgaacaaggacacactgatgagggaagagatgacacggatctttcccgttctagcagccagctctcagacattcgggactactctgaccactttgcgcagtgggtcgtgaatggagacacgctttgctactaggccctggacttttgtcttggtgacagctcagtagatgtgacacggcaggaaatggaagtctgacggatagagcagatgaaatggctgacgactagccgggctaggtgccgtgcatctacctgcagaggcggcgtagcagaagaggtggtggacatgggagaagtctcgcatcggcatgcttgtggtcactggaaggcttgaacgatgaacgctgatattcgtcggatgcagctttcggtggggtacatgattcaatttgctatggtgaaaattttgaccgtagcttagacaataaataggcaaaatatatctgttcttttagtttagcttaccttgcgtttcccttctccatagaaaagtatcaaaaggaaaaacaatggaaaatctattaggaaaaggaaaaaacaaacaaaccataggtaaagaacacttctgttgtaaatagttagtttgctacagaagtataaatatctggtacttgttgggtttcttggcggtgtctgtttcataattgtttctgtgaaaaagctgaaagaaactcggtatgtcttttaatatgcaccatttttgcttgaggactctccatgacattgcgcagagaggagtgcaagaacttgaatgtctcatgcttctcttgcggtggacatccacgtcgatgacaaaattctagtatatggtacgtagttcattcgaaaggtgcaaggtatccaatttagttttggatatctagagttcacaagatagtacttatctgaaaaatgaaatcaaattaccattgcaaaatataaataa

SEQ ID NO: 5462 - DNA, 883 bp, Zea Mays
cagctgtcaccacatactgactacatgcatgtatcagcaacaccgtcactgcgccagttcctcttgttattgcgttgatggtgaggtcgaaggaccctgccattgttccttcacccatggccagccagctgcacgccatcacccacttgtccccatcgtcgtcgtctggcatggcttcagcaacgtccccgtcgtttcgccgggcgttgagcacgggtgacctcatcgtccaggaggaccgggaccgggacgaggagcagagggcggtggtggcggcggcaacaaggtacagcgcggaagagcggcgggagcgcattgacaagtaccggagcaagcgcaaccaacgcaacttccaaaagaagatcacgtatgcctgccggaagacgctcgcagacagtcgtccccgggtgaagggccgcttcgcgcgcaacggcggcgactacacggaggcggatgcagttgcagaccaccatgtcctaggagcagcacatcagtcggagtcagagtcagagtcgccagcaacagcagccacgccggagtggtggccggcagtgcaggaggagttgcctgccgttgccgctgccggcatcaacctagcagagttctgtgccgacgacgacgagatgctggcagcctaccttggagtctcctccattagtatagctgatcatcactacagctgtcagccgtagatatacagacagctgcatgagtagaggtgctgctcgctttaatttttacatatatattatctgcctttttatttattcttaaacattgaatggagtaatggacaaccagagaaggagaataggagccaataataatctgtgtcgtggccattttggcttgatgccaaagttcacctcacacccttatgaca

SEQ ID NO: 5463 - DNA, 1176 bp, Zea Mays
ttccctgctcttgccgcggcgagctccttccctccaagcaccagcactggatgccaggccgcaggccatagctccaacgcgcttgcccacagccaggttcgtgtagccaccgtggagctcgattagctttcttccccctcgtgctgcgccggatccgactcccctggtgcaggcgccccttcccccatcagatccatggcgccatgtctcccagccggcctcctctacccaacgccaccccttcctttccccaggcgcagaaagctctcccccacgcagtccagctccaggccagacccaattcgcccaacccctgctcgcccagagctttttcgccccaaatccggccatccctgccttgccgtggagttcctcgagcagccccacctggccaccatcctccccagccgaaccctttctccatggccgccaatcgtcctactcctttcccctggtgtgctcgacgcctggtgcttcgatctcgacggcttcccctgcgagcgacacctctgctcggctccctctccctgcagcgagctcctctgtcggcgccggcccacagcagcagggagcctcccatggtgtttgtttccccaacgctcgccccatcaatagccgtcgacctcgcgcagcagcagcgacgccctccgttgcgtcgcgctcgccaagtcgggcctcacgccgtcgctctgcgcagcgtttctgcgtgtcgtcaaaacccatgcatgtgtcgtcgtcgcgcttcgcgcgtcgtttctctacaggaagccaaatcaacatgcatgcatgcacaactccacttgggtttcagccaggttgttcgctttagaaaaattgtggtttttgttttatttacgatttagtcgatgacgtaaatatgtgtatgaaaatataattgtatgaataaacgcgtgtagagaagaaactgaagtagaaaagaactcggacatttttatatttgataggaaaaatatgcgatgcgttgtttaaatgcgaaaactaagttacaaaatgcggattttgttttgggaaatgcatcgatatgtgtttatgtgaaaagtgtatttgttttatgcaacgtgatgagattcgtaattatatcggggatatatttattgatgtgacgagtagtttagaaaatgctagttgcgtggacgatgtattgttaagacatga

SEQ ID NO: 5464 - DNA, 1257 bp, Zea Mays
tcttgccgcggcgagctccttccctccaagcaccagcactggatgccaggccgcaggccatagctccaacgcgcttgcccacagccaggttcgtgtagccaccgtggagctcgattagctttcttccccctcgtgctgcgccggatccgactcccctggtgcaggcgccccttcccccatcagatccatggcgccatgtctcccagccggcctcctctacccaacgccaccccttcctttccccaggcgcagaaagctctcccccacgcagtccagctccaggccagacccaattcgcccaacccctgctcgcccagagctttttcgccccaaatccggccatccctgcttgccgtggagttcctcgagcagccccacctggccaccatcctccccagccgaaccctttctccatggccgccaatcgtcctactcctttcccctggtgtgctcgacgcctggtgcttcgatctcgacggcttcccctgcgagcgacacctctgctcggctccctctccctgcagcgagctcctctgtcggcgccggcccacagcagcagggagcctcccatggtgtttgtttccccaacgctcgccccatcaatagccgtcgacctcgcgcagcagcagcgacgccctccgttgcgtcgcgctcgccaagtcgggcctcacgccgtcgctctgcgcagcgtttctgcgtgtcgtcaaaacccatggtgagaccttgctgtcccgcgtttctcatgttcaataaaatgaccgcactaataaaatgtgtaataattgtgtatgtcgtttaatcgcagcatgtgtcgtcgtcgcgcttcgcgcgtcgtttctctacaggaagccaaatcaacatgcatgcatgcacaactccacttgggtttcagccaggttgttcgctttagaaaaattgtggtttttgttttatttacgatttagtcgatgacgtaaatatgtgtatgaaaatataattgtatgaataaacgcgtgtagagaagaaactgaagtagaaaagaactcggacatttttatatttgataggaaaaatatgcgatgcgttgtttaaatgcgaaaactaagttacaaaatgcggattttgttttgggaaatgcatcgatatgtgtttatgtgaaaagtgtatttgttttatgcaacgtgatgagattcgtaattatatcggggatatatttattgatgtgacgagtagtttagaaaatgctagttgcgtggacgatgtattgttaagacatga

SEQ ID NO: 5465 - DNA, 2664 bp, Zea Mays
cgaactcgtagggagagccagagggacacgatcacacgagactccgagaggaccggagagccggaccggagggtttctcttcccccgccgagacagacaagtactccaccacacacacacacgcgcctcccctcacgaaattcacaaacccaccggaggcacagaaatttcccagcgaaggaaaaatccagtccgaaatccagcgctccaaatccgttcgtccccaaggcgctcccccgaacccgtcccgaatcccgcaaatccccgctgaaattccccaatcctccgtgctcgccgccgccctgcgaccggtcccgcccgcctcgtgtcggagccgctgccgcggatttccgcccgagggtttcgtctcgctctcgctctctccgccctactgccgccacagattggcgcgaccgacccttcatcgagggccttcttccgcccgcgaggccggggctcctcccgcggaaattcactctcgtccagaagcggcggcgctctcctcttcatcgccgcccccgcgctcttctggtactcgagtggcgtggggtggagatccaccagggcgtggatccattcctcttcgttcggtggtttttatccttcaggcgcggaatatcaatctatagaggtgcacgaggactttatatatccccatattttcgggggttcaactgaacccccatgccccacgctaagtccgcccctggtggtggtggactggattggtggacagtgctgattttgtcgcgggcatggagcgaagtgagccctcgctgaagccagaatggctgctgcggcccacagtacctgccacaacctataagccggcgactttgccccacacagatgatcacggcagaggtgcttcgtcaagaaaccgttcatcaggacgagatcgtgatcggagctcccaacattcctcatctcggagaggttcaagctctagtggtccaaggcggaatgatcgagatggtatagggaaatcaagaggctatggtaattttggaaagcacaacaaggaaaggatacaagagaaggacctggatttccgtgaccgggagagtaggttggttcagtcagacgatcctttacgtgatggctttgagtcatttagctcatgcagatccgaaaaggacaggcttaaccgtactcgttcaaaggtggccatatcaaatcgggcagtaggagtaagtttagacaatggtaatgtatctaaaaaagataatggtgtcatctcttttgagcgggaattcccacaccttgattctgaggacaaaaatggaaagcaagacataggtcgagttccatctcctggaattagcaccccaattcagaacataccactggtagtatctgatggctggaattcagtgcttgcgatgttaggggatccaaacattaactctgtttcctcttcctcaacacatgctggttctagtaaacagactgaagtttccaactctgggagtgcgttaagcatggctgaaacagtgatgcagtcgccattaaagatttctaccacacctcagttatcgattgatgcccagaagattgaagaaagaactatgaggcagtgcattctaagacctcttacaccatcatcaaacaaaatacctgcatctagttctttggataagttattaaaatccaaaggtgcaagagctggagagtctaatggtcctatcaaggttgctccacaactgtcaacacagccatctagcaactctgttcgcactccagtcaaaactgagctcgtaaagcaatctcaatcaggcagccttcaagtccttagtcgcgagcagaatggtgctgtaaatactgctgccaaagacagcaccagcaatcctgtgagccctgttctgggtcgatcttcttcaatggaaccgatgagaaagtctattgtcagcccaaagcttaaggttggcactaatggtcgttctttgcatccgctgcaaggttcatttgctgacagaaaagcaagtgcaaaagacaagtacaagttttttgagatgttgcggagtaagtctgtaaatggttcgagcgctgctattgagtctccatcaagcctgactgatgatcagcagaactctaatcttgatttgcctttcaagtttattgaaaatgggagcagttcctgtgaagaagcaaattcttgtgagggatcacagcgacacttgtcggacaatgagaccattccaccttcagaatctcatgatgttttagatgaaggatctctgggtattcaagttgaggacaaggatgtcagctcttcacaagtacttggtggcacacaagatttatcttctaagaagccccaggaagacaatgttaatattgtgcccatcgtacctgtctatgtaaatgatggtttaatgatgcccaattctgttgatgatgaagcaagtttgccgttagaggaaaccaatcctgccgaagtgttacagcacattggagcaggggaggagaatccctgtcctgctcaagagttcgagtccattggagcaggtggggaggaagagttgaacctcctaagatctatgggctgggatgagaacgaagatgttcagcctcttcagcaggaggagattgctgattgttgcatattactgaagcgatgattactggagttgtaaatcttaccatttccaccaccttttcctt

SEQ ID NO: 5466 - DNA, 2723 bp, Zea Mays
cttcccctgaccgccgccgtcaccgccgagcacacctctagtcagcttccactggagcacgccaccccgaattttctcccggagtcgttgccctcctctcctacccccgtacactaaagctggttcgcagatccatccggacttgatcggttccttcttttatttcttgcccatagagcccaaacattattggatggactctgtcacttgctgcgacggcggcaaggaattggaataggacgaggtggggatcacgggctgcgacggcggcaagaaattggaaaaggacggcgtggggatcagggtattcgtcttgggaaaggggatggggggtctctgctcgaaggtctcagctgtagacaagtcaccgagcgacaccgcgcttggccggaaccaggtcgccgatcatgagccaggggcgtcgttggagttggagaagccaccggtgtcccgagagtcagctgcgccggcaaagcggctggacgagcagctgcagtctttctcgttccttgagagcgtcgtccctggggttgcttttcatgccggggctaacacgggcggcgaagcggggtccaggacctcgccgcagctgaccaggtcgctgtcccagagggctggtgtgggcaaggcaaaagccggcgctgccaaggtttcagaagtgagctcaattttaggtagagctagcactgctgggcttgaaaaggcagtggaggttctagatacacttggcagtagcatgacaagtttaaattccagcagtggttttgtgtcaagttctgcagcaaagggaaacaaaatatccatgctggcttttgaggtggcaaatactatagttaaaggctctaatctgatgcgttctctatcggaacctagcataaagcatctgaaggaggtggtgcttcattcagaaggtgttgaaaaccttatatccaaagattttgatgaactgctcaagatggcatctgctgacaaaagggaagagttagaagtattcacaagagaggttgttcgctttggaaaccgttgcaaggatcctcaatggcataacttggaccgctactttgaaaaactggcatctgaacgaaccccacaaagttatctgaaagaaaaggcagaatcagtgatgcagaaactggtcacctgcgttcaaaatacagttgaattatatcatgaattgcatgctttggatagatttgagcatgattgtcgtcttaaacagaaagaacaggatggcttgagttcaagaggagacaacctggatatactgaagcaggaattgaaggtccagagtaagcatgttaagagtctgaaaaagaaatcactttggtccaagaatttggaagaggtgatggtaaagcttgtagatattgtccacttcttatatttggagatatataatgccttcggtcgtcctgacagtgaagagccacaagaacctgccaaacaccataatagattgggaccagcaggccttgcattgcattatgctaatatcatcaatcagattgacaatcttgtttctcgatcatgtgcaatgcctccaaatgcaagggatacattatatcatagcttaccacctaccatcaaatctgctttccgttctaagctacaatcttttgaagtcaaggaagagcttacagcttctaggatcaaagcagaaatggaaaagactttgcgttggcttgtcccttttgctagtaacacaaatagatctgaattaaactgcaagatatcagggcagatggacatgtcccgaatggagaccttgtatcatgctgacaaggagaagaccgaagcacttatcctggagctagtcgtgtggcttcatcatcttatcagcaaatcaggaaacgccagtggaggtgtaaggtctcccatcaaatctccagtcagctcaccaacacaaaagggtgctgcaatcacactgttgtcgggcaaaacaaacaatttgccaccgattctcacccaagaggaccaggatatgctaaggggtgttaagtacaggaaatttgttccaggaataagcaaaagccaagagtttgacacaaagtcaagtcacagcaaacatagtaggttgagcaagagcaacagccactctccggccagtggcagcagaaaagacttgctcccagttaggaggtcttccatgcttccagttattgacttcgagattgacaggaccaaggctttggatctaattgacaggcttgacaacctaaaagtacaatgagcatgaagcttattgtggtcatccgcagttcttgaaaccccagccgcgatataaacagttatcgtgtatcagcagcaagaccgcccgttaggctctgcggttacaagataacaaacagtatgataagttggtgtctcagatcctgtaccgaatagaataggaaaaaatgttgtaaaaattacctgtcgtttctacctgtacaagaaatggaaagtgcagtttttaagaaaaaaaggagggtgaaagggatctaggtgttctatgttttcatggccattagactggaatggtgtgtatgaaccatagtactcccgtcccaaaatattagtcgttttagctcttgatttttatatatctatattcaaatggatgatgaatctagataaatatataaaacaaatacattgattattgtatgaatcaactaaaaagataaataaattttattttgagatgaagggagtatctttttttgcagaaaaaaataaaagca

SEQ ID NO: 5467 - DNA, 1393 bp, Zea Mays
atcagcgacaagtaacgaccgcccggaaagagagccggaaaaaaaggactggaaatcgccaccgcccgcccctatttgagcagccgcttgttccttccgcgtcctcgctgctcctcaattcgattggctccgtgccgacctccatgtcagacgacctttcctcctctttagatcgctgtatttattttttgttccctaccccagcacctagcccggaatctgcaacctcgccagcggttgctgggggttcttccccttgttcgatcggttgagaaggaaagcatcgcgagttcgccatacggatgggttccaaagcgcctttctgtctcacgctcctcttgctgctcgccgcggcctgtggacctgctgcacatgcccacgatgctgtcgagctcccgcatcatggctcagccttgaaggaacagatttcttcaaccaagattcctgcccgtctcaagagtggcagcggactatgctcggcctgtgaaaacttcacgagcgaagccgtcacttatctcggcaaggaacagacacaggacaggatcatggagttccttcatgatgcttgctcccaatcattctcctttgaacagaagtgtgtcgagctgatggactcttatgcgactctcctgtttgccaagatcacggagatcagaccggaagcgttctgcaaacggtatggcctgtgcagggacacggctcttctctccggtgtgggaagtgacagcacgtgtgtgttctgccaccatctgctcgatgaaatcatgtccaaactgaaagatccagatgcggagtttgagataattcagattcttgtcaaggagtgcaataagatcgaaggtcacgtccagcagacaatgtgaggacgaaccagaagggcgagttctgggtggcgatccactgtcggagaagtatgtatcctcggctaatgagctgccatgtcaagctgaggaagtttttgctcagcttcccaatccctgccaagtaccactacctgatgcatatcgatagcaagctctacgcgttgatcatcagggacagcccgatggccagatgcttcacatcatggaggacgacaagggagaggtggtgagagttatcatcgaagtggagggtccgtctgatgccattcatcgctgtctttgacctcgtgaaggcgtcttagccacttcaatttgattggaaatattgttgttttaagatacgggtccatggttaatgttgtatgcttctctgagaagacctgtcattccaataatttggttctggagcaacctggagctgtatactgatctagcttcttttagtaacaaatgtaagttgctcacattttctttagattgtctatagaactttgaacgaccagctcgtcccttctaatttttatttggcc

SEQ ID NO: 5468 - DNA, 1075 bp, Zea Mays
gggacctaattttagctatgtgtgtttggatctgataaactacaactaaaatggcacatacttactacacttactactgattttgttgtacagattcatctaaaatggcacatacttactacacttactactgattttattgtgaaaggacagcaacagctcaaggcagacaaagaccatggcacaaatctcacacttgtccaaacctacaagtatcatcaggaagatagcttgaaaaaatcgtgaatgagacttgtgctggttggaatggcaagtacagcatgctttgtgattgtcagtaagaatgacatcccaatctatgaggcagaagttggatctgcacccaaaaaagaagatttgtcttatcaccatcagtttattctgcatgctgcattagatgttgttcaggatctagcatggacaacaaatgcaatgttcctgaagtcagttgatagattcaatgaccttgtggtgtctgtttatgtaactgctggtcatatcctttacaaagtgacgatgacagttcttttcttgttccaaatggcatttgactgtgcatcattatgttcggttttcaaagtttggtcatggcagtgctatattttctttaactgcaactctggcacataccagattcatgctgcttcatgactcgcgtagcgaggatggaataaaaagcttttttcaagaggtccatgaactttacatcaagatattcctcaacccgctttacctgcccggctctcgcatcacatcctctcatttcgataccaaggtgagggcgctcgcgaggaggtacctgtaatacgggcatatgctggggtttcatcgtaaagcaggcacgccgatttttttgtgccatcatcatctgataacacatacgtctaatttttcttggcgttggctttgttatgaccgacctatggatcattttttttttcgagaacaaaatgacttgtctaatttttcttggcgttggctttgttatgaccgacctatggatcatttttttttcgagaacaaaatgacttggcgataatgttcaaactttaattgattgtgtcgtgcatcgcag

SEQ ID NO: 5469 - DNA, 2021 bp, Zea Mays
gtagctcgcagccgactctgttctctgtaccagcccaacccagaagcctatactcgttacgattacgagcccaccagcatctcctctgcacgggggcattccaccgagcacctcacgtgatctccaccccgcggcggcggcgcgagcaccgtctccgcctctccgctctccggcgaatcaaacccctccggcgttgcccctcggttgcctttcccctccgccacaatgcggtttgacctggatggcctgcccgtgcacttcccgtacgcggcgatctacccggagcagcacgcgtacatgggggagctcaagcgcgccctcgacgcgcgcgggcacgcgctgctcgagatgcccacgggcaccggcaagacggcggcgctcatctccctcatcacctcctactccctcgccaacccggcccgcccgctccgcctcatctattgcacccgcaccgtgcacgagatggagaagaccctcgccgagctccgcctcctcttcgcccacctcccgcccgcggcctcccgctccctcctcgcgctcggcctctcctcccgcaagaacctctgcatccacccgcaggcgtccgccgccgccgcccgggactccgtcgacaccgcctgccgccgccttacggcctcctgggtccgcgagaaggcctcctccgacccggactccaccccgctgtgcgagttctacgagacgttcgaccgggccgctgccgccggcgacctcgcctccttcatgccgcccggggtgtacaccctggcagacctccgcgcgctcggaagggagcgccgggtctgcccttacttccttgccaggcagatggtcaagtacgccaatgttgtggtgtacagctaccagtacctgctcgaccccaaggtggccagcattgtgtccagggagatgcagaaggagtgtgtggtcgtgttcgatgaggctcacaacattgacaatgtctgcatagaggcgctgagcgtcagcatccgcaagcagacgctggaaggcgcagagcgaaatctgcggcgcatctcgcaagagatcgacaggaaggttcaaggccaccgatgccaataggcttcgtgctgaatacaacagactggtggatggactggcacagcgaggaaatctaccaatatcggatgcttggctcgcgaatccgtctttgcctgatgacatcttgaaggaagctgttcctggaaacataaggagggctgaacattttcttgctgtcttgcggaggcttgtgagattccttgatggccggcttgaaacagaaaatgttgagaatgaaatgccagtttcctttgttgcctcaatccattcccaggctggaatcgaccaaaaaatgctgaggttttgttatgaccggctacactccctaatgatgacattagagataactgatacagatgagttcatgcacatacagaccatatgtgactttgccacactgattggaacttatacacggggcttttctattataatagagccgtatgatgatagaatgcctgatattcgtgatcctgttattcagctgagttgccatgatgcttcactcgcaataagacctgtttttgatcgtttcgaaacggttgtgatcacttctggaactctcagcccaatagatctttaccctcgtctcttgaattttaatcctgtcataagcagaagcttcaccatgtccttaacaagagattgtatttgtcccatggtcttgacccgaggaaggtatgagctggtcccacgcgaacttcatatttcaaaatctactgtactgtagcatgacacttatgttaagcatggcacttatgttagtctttaaatgctagcattgtcaacatattcttaggtttggaaatgctaacactgtcttgcgtatacatgatacatttttattcctgagaatcatatgacacttatgttaagcttttataacatctttagttgtttccaacatttcatattactggtagcattgtacactgtgtaaacaccaaccattccatcatcttcag

SEQ ID NO: 5470 - DNA, 838 bp, Zea Mays
acaattcaaaaattgatccgttgtttacccgagatggtgctgacatccatgtcgataaaaggataagcttcacacaggcaatgcttggtggaaaagttgaagtacctactttaaatgggaaaacagaagtgaagatacccaaaggagtccaaccagggcaagttgtagttttaagggggaaaggattgccaaatccgtcaggatatttgggggaccaatatgtccgattccgaattcatttcccctcggtggttactgaacgtcagcgcatgctgctggaagaatttgcagtagaggaagctgcgaaagaacataacacttttgtagcaggaaattggtgggagctagttgcagaaaatatgacaaagcaaaatgtcatggtcggaatcggcatcctcctactgattcacctaatgctgagcaaagctatgaattaaggcttggacccatgctcatttgtgctggggcagtggtggggcaacgtcaaacagtaaaaattctccgaagattcagcataaaacaataaaacaatgagattgtgaatctttaaagactattttcacccactagagatcacaattttgaaggtgttggttagaaggttgttgatttctatggtaaaatacattacaataatatctgctcacatagttctgaactatatgaagctgtcaattgagttgccttaattttttccccctctttcggtgtaaatgtaatgtggatgctctacagttggaatagttcaacgtgctgggtgaaattgaatgtatcttttaaattcacccatcttgtcttggatcatattaccttttttcattttccacacccgtggtcc

SEQ ID NO: 5471 - DNA, 1562 bp, Zea Mays
gcacattggcgtctcacgaataaaatcaattcacaaccccaaggaaagggagaaagaaccgaggaagctccgactgcgccggtgggggaccgcgcaccccagcggcgccaggcgtccacgggatggtggttcttgtggctactgccgctcggtggcccgggggaagcacggctgcccgggcgcgcccgccggctgcgaggggcagggcccccctccgcgtcgccgccgagcccgagcacaaggcggccacggtcagaaaaatatagattgttatcatggatgaaaccaataaggcatgacgtcagggcccaaatgtccaatgtaaatgttggtgccggaagttatggaggagatgaagcaaatggccatggagaacatttggatacctctgctaccggagaccccaacaaattagcaaaacaactttcaggatctcgttacctgcaacccgttggtgtcgtgctatttctgtgtgccctggcaactagttttttcgttttctttaaaggacaatcatctgcagttgtagctatgctggcaaaatcaggtttcacggcggcatttacactgatttttgtatctgagattggagataagacgtttttcattgctgcactactcgcgatgcagtatcaaagagcactggttttacttgggtcaatggctgctctctccctgatgactattgtgagtgttataattggacggattttccagtctgtgccagcacagttccaaacaacgctacccataggagagtattctgcagttgctctgctggcattctttggtttcaagtcaataaaagatgcattagcacttcctgataatgccaacgggaaccttcaagggaattcagaaagtggagaactggctgaggccgaggagcttgtcaaggaaaaggtctctaaaaatctcaccagccctcttgaagtcctttggaagtccttcagtcttgttttctttgctgagtggggagatcgctctatgcttgctacaattgctttgggtgctgctcagtctcctttgggcgttgctagtggagccattgctggacacttgattgcaacagcctttgctattcttggaggagcattcctggccaactacttgtccgagaagctggttggcttgttaggaggagtattatttttgctctttgctgctgcaacgctttttggtgtattctaatctatctgaagaatttgctgttaggggaaagacctcgcagttccagtttggtcttagattttgaagatgaggggcaaacccaagtaggcttggcacatgctgtatgtagatagacgttatccttatcagagatgatttcgatgtgcccaaaattctaccagacagactggaaactgcatcacatggacagcttacagaagttaccattcaaataatttgattagatttgtttaataagaagttactgttttgtgctaaggatctagtgttgacttttgtcaatcatgtgcttgtttttcattcatgggagacaatgacagaaggaatccccaggatgaattgttctgaaaaacaactccccgttaccaaaa

SEQ ID NO: 5472 - DNA, 2180 bp, Zea Mays
gggaaacaactctctgcaaaaagaaaagaaataaaaaaaaagaaaatacacacgctaccctactactactaccactgccatgctcactttctccatttcttccctttttctcctcctcgtctcccttctctctctcctgcgtccatcctctctctctcatctcatctggttgggtggagtggagataagctagagaggtgagctctgtgggatcggagcgagagcaataaatagaaattaaggtcggggccgcctccatggcggcgtttgcaggcgccctcgaattcctcccctgaacccattcgatccgccccctagctctctctcttcctcctccgccctctttatatagcgatactacttgtgtagcgggcgagggtgaggtgaggtgaggaagaaagagagccctcgccgcgtgcttaggccccccccaagacgccgagagaggaaagggattaggcagcaagaggaggcgctccgctctcggattagaggcgagcttcctatttccagcaaaggcaaggagaggatcagctagctagctgctaggaggccggagggagagaaagatcggaggaggagctgcaaaggctagcttttctttggtgcggctggtgctggtggtgaactggtctcggtgctcggtggtgcgtggtgtggtgcacactgcacactctccctctcgcgttcgtcttgatggtgggtggtggtggcagctgcctcgcatggctgggttctctctgaggggcggcggaggcgggaggggcggtgaccggggcggcgatcacccgatcggcgccgacagcctgttcctgtacgcgcgaggggcggccgccgcggctgccgacacggcggccagcggcggcggtgggggcggcgggatagggttccagctctggcacccgcaccagcaggcgacggcggcggcggtgccgcacacgtcgcagttcttctcctccggcgccgtcgccacgggcgtcgtgctcggcttctcctcgcatgacggggccggcgggatcggcggtgcgggtggcgccggcgctggcggcggcagggccgggaccagctgccaggactgcggcaacaacgccaagaaggactgcacccacatgcgctgccgcacctgctgccggagccgcggcttcagctgccccacgcacgtcaagagcacctgggtccccgccgccaagcgccgggagcgccagcagcagctcgccgcgctcttccgcggcgccgccaacagcaacagcgccgccgccgccgctgctgcggccgcgagcaagcgcccgcgggagctcgtccggtcacttggccgcttgccgtccgccaactccgccatggtcaccacgaccacctcctcaggcgacggcggcggcgggaggttcccgccggagctgagcgtggaggcggtgttccggtgcgtgcggatcgggccggtggacgagccagacgcggagctcgcgtaccagacggcggtgagcatcggcgggcacactttcaaggggatcctgcgtgaccacgggccggcggacgacgcggcggtgggccagctgccgccgtcctctgcggagtaccaccaccagctgacggcggggcaagcgagggaagggtcgtcgcccgcggggagcagcgaggcggcggccacggtggccacgtcggcggcggtgctgatggacccgtacccgacgccgatcggcgccttcgccgcaggcacccagttcttccctcataaccctagaacctagcttaagttagctagctttgctgcttccattattcgtatcggtgctagtagcttaattcctttgatggttccatttacttcttccaacaaattaaagatgatgatgaacatgagctaagtagtcatcgtcatcgtcgcaatcaaattcgagacaagaagagaagagattttaattgttactgcatactactactacaacgtgcattcgagccgttgatcgatgaacactagtgcatgatcagcaatgtgtggatcatatataatgttattagctagtagagctagtgtactgttacttgttgagcaatcttgttttgggtttcattaataatttggctaccttaatgcaatgcaaagataagaattttcaagtgtagcttccttcttcattcattccacaaatgatgggagctccatttgacatgcagtagtcctg

SEQ ID NO: 5473 - DNA, 2188 bp, Zea Mays
ggagtggagataagctagagaggtgagctctgtgggatcggagcgagagcaataaatagaaattaaggtcggggccgcctccatggcggcgtttgcaggcgccctcgaattcctcccctgaacccattcgatccgccccctagctctctctcttcctcctccgccctctttatatagcggtagcctcccacctctcatctcctcatcaccccccaaaaagcagcttgcttgcttgcttgcgttctctaccacgacttatgctcgatcgtaaactaacctcagcaccgtcctccagcagatactacttgtgtagcgggcgagggtgaggtgaggtgaggaagaaagagagccctcgccgcgtgcttaggccccccccaagacgccgagagaggaaagggattaggcagcaagaggaggcgctccgctctcggattagaggcgagcttcctatttccagcaaaggcaaggtgagtagcactggtagcagtactgatgagtgagtgatggtgcggtggagcactgcagcggcaggagaggatcagctagctagctgctaggaggccggagggagagaaagatcggaggaggagctgcaaaggctagcttttctttggtgcggctggtgctggtggtgaactggtctcggtgctcggtggtgcgtggtgtggtgcacactgcacactctccctctcgcgttcgtcttgatggtgggtggtggtggcagctgcctcgcatggctgggttctctctgaggggcggcggaggcgggaggggcggtgaccggggcggcgatcacccgatcggcgccgacagcctgttcctgtacgcgcgaggggcggccgccgcggctgccgacacggcggccagcggcggcggtgggggcggcgggatagggttccagctctggcacccgcaccagcaggcgacggcggcggcggtgccgcacacgtcgcagttcttctcctccggcgccgtcgccacgggcgtcgtgctcggcttctcctcgcatgacggggccggcgggatcggcggtgcgggtggcgccggcgctggcggcggcagggccgggaccagctgccaggactgcggcaacaacgccaagaaggactgcacccacatgcgctgccgcacctgctgccggagccgcggcttcagctgccccacgcacgtcaagagcacctgggtccccgccgccaagcgccgggagcgccagcagcagctcgccgcgctcttccgcggcgccgccaacagcaacagcgccgccgccgccgctgctgcggccgcgagcaagcgcccgcgggagctcgtccggtcacttggccgcttgccgtccgccaactccgccatggtcaccacgaccacctcctcaggcgacggcggcggcgggaggttcccgccggagctgagcgtggaggcggtgttccggtgcgtgcggatcgggccggtggacgagccagacgcggagctcgcgtaccagacggcggtgagcatcggcgggcacactttcaaggggatcctgcgtgaccacgggccggcggacgacgcggcggtgggccagctgccgccgtcctctgcggagtaccaccaccagctgacggcggggcaagcgagggaagggtcgtcgcccgcggggagcagcgaggcggcggccacggtggccacgtcggcggcggtgctgatggacccgtacccgacgccgatcggcgccttcgccgcaggcacccagttcttccctcataaccctagaacctagcttaagttagctagctttgctgcttccattattcgtatcggtgctagtagcttaattcctttgatggttccatttacttcttccaacaaattaaagatgatgatgaacatgagctaagtagtcatcgtcatcgtcgcaatcaaattcgagacaagaagagaagagattttaattgttactgcatactactactacaacgtgcattcgagccgttgatcgatgaacactagtgcatgatcagcaatgtgtggatcatatataatgttattagctagtagagctagtgtactgttacttgttgagcaatcttgttttgggtttcattaataatttggctaccttaatgcaatgcaaagataagaattttcaagtgtagcttccttcttcattcattccacaaatgatgggagctccatttgacatgcagtagtcctg

SEQ ID NO: 5474 - DNA, 1680 bp, Zea Mays
tccggtgtttctccacatgagttgcaagacattcgataccagggacccacggaccggcgacgtgctggcccacgtagcagaggcagacaaagctgatgtggacctggcggtgaagtccgcccgggacgccttcgagcacggcaagtggccccgcatgtcaggctacgagcgcgggcggatcatgagcaagctggcggacctggtggagcagcacacggaggagctggcggcgctggacggtgccgacgccgggaagctgctgctgctgggcaagatcatcgacatccccgcggccacgcagatgctgcgctactacgccggcgccgccgacaagatccacggcgacgtcctgcgcgtctccggcaggtaccagggctacacgctcaaggagcctatcggcgtcgtgggcgtcatcatcccctggaacttccccaccatgatgttcttcctcaaggtcagcccggcgctcgccgcgggctgcaccgtcgtcgtcaagcccgccgagcagacgccgctttccgcgctctactacgcgcacctcgcaaagatggccggcgtccccgacggagtgatcaacgtcgtccccgggttcggccccaccgccggcgccgcgctcgcctcccacatggacgtcgacagcgtggccttcaccggctccacagaggtgggtcgcctcatcatggagtcggccgcgcggagcaacctcaagacggtctcgctggagctcggcggcaagtcgccgctcatcatcttcgacgacgccgacgtcgacatggccgttaacctgtcgaggcttgccgtcttcttcaacaagggagaggtttgcgtggcgggatcgcgcgtgtacgtgcaggaagggatctatgacgagttcgtcaagaaggccgtggaggccgcgcggagctggaaggttggagacccgttcgatgtcaccagcaacatgggccctcaggttgacaaggaccagtttgagagggtcctaaagtacattgagcatggcaagagcgagggagcgactctgctcaccggcggcaagcctgccgccgacaaagggtactacattgagcccaccatctttgtcgatgtcactgaggacatgaagatcgcgcaggaagagatcttcggccccgtcatgtccctcatgaagttcaagacggttgatgaggtgatcgagaaggccaactgcaccaggtacgggctcgccgccgggatcgtgaccaagagcctggacgtcgccaaccgggtgtcccggtcggtgcgcgccggcaccgtgtgggtgaactgctacttcgccttcgacccggacgcgcccttcggcgggtacaagatgagcggcttcggccgggaccaggggctggcagccatggacaagtacctgcaggtcaagagcgtcatcaccgcgctcccggactcgccatggtactgagttgagccagggaccgatggaaccccatcgatctcttcttgtgcagtgtacatgcgtcatgcgtgcgtgctcacacagctgggttgctgctttgtgcttgtgttcgtctctggtttgtggctcatgtgtgttagtctgcaccctatccttctgtacgtagctgccggacatgcaaatagtatgttaagtacaccatataaactcttgttttataaattcaagtttagcttggagccttcactccttcagccttg

SEQ ID NO: 5475 - DNA, 2171 bp, Zea Mays
cttttccctgtttccccgtccggagcgaggcgaggggtgagggtgacgcaaccgagcgccgccaaccgcgaccgccttcctcacctgtgtcacctccgccgccatcctcacttcgatcgcctctgccgtcatcctcagcttgtcctgtcgcactgcttgtgccgcaccagcttgttgccttccgcgcccggctgcgccagccaggctcgtccggccctcgcgccgcttacttctattttgcccggccccatagaattcgaaccgcaaatgagacaggcgctactgcagccgtgggaaaggaaacgcaaaacaacgccaacgccgtcttctcttcctggaggcgggcctgggaaggaggtggagcgcagctggctccgctagggtttcccctgttctcggtggaggcgccgcgcctccgggacacgggctgcgtcaggctcgttgatgcaagggaggtcaagccgtctgtgattctcttcctgaagttctatcccgatgccgtccatcacgcactacgtgctggatcgcctcctagagacacggtcgcctgttcatgtccagaaggtggttcccaagcctccgcccccgcctcctgacaaggccacaccggtgccagtgtctactgccaggacacggtcgtcgctggcatcactctatgccacgcctgagaacaccaccctgccggacttgccttcctcgttcccgggaacctggtcgccatacctcatcaaccataagaggcggggagcctcccttgccaggaccttctctcagggtgatgctgggagggaggtcagccagccaaacctccctgtgatgctgcctgctttgccgagagggtgtgaacccactcaagtccaggagcccgagtttgtgtttcagcaagcaggcaatggtcaagctgaaggtgaaagtgctgtagaagaggctttgaatggcaaaagtgtaatgctacagaaaggcaaggggtctgttatagctgaaatagagcaggagcagcctgagtttgagttttgtcaaagtcttgaagcattagtgaagcctgttaatgttagaaggcctttgaatggtgaggcacccaaaatttgtgagagtgacacctttgaatggcggaagcctagttcacctcttggaacctctgttggtacaccaggtgcagaattctacgatgcatttgaagaaatatccagtgacggtggaactcggtcatcgcgaggcatggatgatgacctccgtgaaatgaggttaagtctgttgatggaaattgagaggaggacacaaacagaagaagcacttgagatctggcaacaggaatggaagaacctgagtcaccacctatctcttgttgccttatcactaccatctccaagtatagctgaggattctgattgtttaaaggtggatcctggagctgagttgtgccagcaaataactgtttcacaacttgtggctgctgctattgctcggggttttgctcgtgctgaagttgaatcagagatggaaactatgattgcgacaaagaactttgagattggaaggctgtcggatagggtccagtactatgaagctgcaaacagggaaatgtctcaaagaaaccaagaagctatcgagatgtcaaggcaacaacgcaaggggcgtaagaagcgacagaagtggttctgggcttcagttgggcttgcagtcacccttggcgccacagccattgcctggtcttacgtaactccgtcgcagccccaggccagtgcagatccaagtagtgctgccagccagtaagctactaagtaagctaggatgaagacatactcctcgttccagaagcctaacaaagatctagctatactcctatagagggaaaaaaatgctgtataagttttctctttggtgatcggccgtgatcgccgccgcaatcttgatctgtcgcttcgtttgtagaagcgttgtatggcccatctcgtagatggttgagcaaataacacaatggatgtgggcgtgtggctatggttagtgaaccatgcccgtagcccactcaagcggagtttattttgtcaagttcactttattatttatttatttatttttgctcttccgaaatatgatggatcatggaagtcgtctgccgagcggaccggaccgactggttctggggcctgtggctgtggtctgtggagagg

SEQ ID NO: 5476 - DNA, 2742 bp, Zea Mays
gtctgtactctttagctcttcagttgctgatgcaaggctttcaaaagtttaacagtctcacttgatgcaaaagcaacacaatcactctaaaggtttggatcagtcatttcagagcatgggttcgcggtttccatcccatcagctaagcaatggcttgtatgtctctggccgacctgagcaacctaaagagaaggccccagtcatttgctcctcggctatgccgtacactggcggggacataaagaaatctggagaacttggaaagatgtttgatctccatagaaaatctggtccattgggtaatccgccttcaaggaatacttcctttggtggtgctgccgccaactctggaccagtttccaatgctgtcggtcgctccaactactctggttctatttcgtctgcagttcctggcactggaggatcttctaggacaaaatctaactctggacctctcaacaagcatggagaaccaacaaagaggctatctggcccccaatcttctggagtaaacccgatggcccgtcagaactctggccctctacctcctgtacttcctacaactgggctaattacatcaggtcctatcacatctggtcagttgaattcgtctggtgctcaaaggaaagtatcaggccctcttgattctagtgtatcaatgaagatgcgtgttacctcttttgcacacaacccagccgtcacaaatatcaatgtgggagatggttactcgattaggggcagcattccgaccacaataatctggttggtcgcgttgctctttttggttgggtttgtagctggtggcttcattctcgctgccattcataatccgatcttgcttatagttgtggtggtgatatttggctttgttgctacactggtgatctggaacatctgctggggaagaagaggtgtgattggttttatcagtcgctatcctgatgcagaccttagaaccacaaaagatggggagtatgtgaaggttactggggttgttacttgtggaaatttgccccttgagtcctcgttccaacgggtgccgcgatgtgtgtacacttcaacttgcttgtatgagtacaggggttgggattcgaaagctgctaactccacacatcaccgatttacctggggtctcaggtcaatggagcgtcatgcagtggacttctacatctccgatttccagtctgggctgagagcgttggtcaggacagggtccggtgcacgagtatccccatatgtggacgagtctgttgttatcgacataaacccagacaacaaggacatgtcgcctgagttcctgaggtggctccgcggaaggaatctctcgagcgatgaccggattatgcgcctcaaagaagggtatatcaaggagggcagcaccgtgagcgtgatgggtgttgttcaaaggaatgagaacgtgctgatgatcgttcctccggctgaacccatctccactggctgccaatgggccaaatgcatcctcccgaccagcctcgacggtctggtcctgagatgcgaggacacgtctgacctggatgtggtaccagtctagttggttccggcgcggaggaggagaaaaagatgccttgactcgatttgagttggtttctgtgggttgttagtgttggagggaaaaaaatgtgcaaatgcagggtgtgattatgggctaagtaaagttacaatgtcagtggtcggtcagctacctggagattggtcgtacagtatgtcatgtgtaatttttgtcgtctcgttttggttgagccatgggtggtgcttgtaacaaaaggatggcttggtgtcagtactacctaccctaccatggagcctgtttggagattcagtggtctggtttcccattcatattttgttcttttttcttttggcgtagggttccgacaatgccctggaagcctgcagtttccttctgtacccagatctacatggaaatcgcttacctaaacttgagaggcatatttccggtggtgagaaaccaatgtaaaaaaaagttgattccaattcgtgttgacgcgtttccgaagcttaccggaggacaaaatctattgccgtgggtcgttgagatgctcagagtcacatgatattccaagttttacagcgtacatgcatgcacgaccatcaatcacatccataccgaccggccggtgtgccgcactgtcaacgttaggtcagtggttagcaacacacaagcaggctgcattgcatttgcattaccgttggacttggacaggaattagggaacaaccgggggttgccgcccaggaaccttattagctggtagcatggtcctgtctgtcacaatcttgtgccttcgtagcatcactcatctaccaaccacaacttagaagacaagtctggatggatctagcaaacgacacggatatgacacaactgctgctagcggagcgtgccaagttgctgaaatgaaaatcttgcaccaacatcaacaagctacgcgatcttcaaaactttgtcgcatgtatcatgaaagcaacaacgagagttgaggaatcatttaggtcaggtccgcgcttcttgtttttctatggtttcttggataaacccctaccaaatgcaagcacgtaaagaagccgtttttcttagggcatgttgggtatatctctgttgtacactatagcagctctaaaactttagattggagcaactatgttgttgagttttagtgacatttaggtaaaataaatggttcgtagcttttagaacaaa

SEQ ID NO: 5477 - DNA, 2750 bp, Zea Mays
ctccatcaccacaaattctgcatgttttgagttgctgatgcaaggctttcaaaagtttaacagtctcacttgatgcaaaagcaacacaatcactctaaaggtttggatcagtcatttcagagcatgggttcgcggtttccatcccatcagctaagcaatggcttgtatgtctctggccgacctgagcaacctaaagagaaggccccagtcatttgctcctcggctatgccgtacactggcggggacataaagaaatctggagaacttggaaagatgtttgatctccatagaaaatctggtccattgggtaatccgccttcaaggaatacttcctttggtggtgctgccgccaactctggaccagtttccaatgctgtcggtcgctccaactactctggttctatttcgtctgcagttcctggcactggaggatcttctaggacaaaatctaactctggacctctcaacaagcatggagaaccaacaaagaggctatctggcccccaatcttctggagtaaacccgatggcccgtcagaactctggccctctacctcctgtacttcctacaactgggctaattacatcaggtcctatcacatctggtcagttgaattcgtctggtgctcaaaggaaagtatcaggccctcttgattctagtgtatcaatgaagatgcgtgttacctcttttgcacacaacccagccgtcacaaatatcaatgtgggagatggttactcgattaggggcagcattccgaccacaataatctggttggtcgcgttgctctttttggttgggtttgtagctggtggcttcattctcgctgccattcataatccgatcttgcttatagttgtggtggtgatatttggctttgttgctacactggtgatctggaacatctgctggggaagaagaggtgtgattggttttatcagtcgctatcctgatgcagaccttagaaccacaaaagatggggagtatgtgaaggttactggggttgttacttgtggaaatttgccccttgagtcctcgttccaacgggtgccgcgatgtgtgtacacttcaacttgcttgtatgagtacaggggttgggattcgaaagctgctaactccacacatcaccgatttacctggggtctcaggtcaatggagcgtcatgcagtggacttctacatctccgatttccagtctgggctgagagcgttggtcaggacagggtccggtgcacgagtatccccatatgtggacgagtctgttgttatcgacataaacccagacaacaaggacatgtcgcctgagttcctgaggtggctccgcggaaggaatctctcgagcgatgaccggattatgcgcctcaaagaagggtatatcaaggagggcagcaccgtgagcgtgatgggtgttgttcaaaggaatgagaacgtgctgatgatcgttcctccggctgaacccatctccactggctgccaatgggccaaatgcatcctcccgaccagcctcgacggtctggtcctgagatgcgaggacacgtctgacctggatgtggtaccagtctagttggttccggcgcggaggaggagaaaaagatgccttgactcgatttgagttggtttctgtgggttgttagtgttggagggaaaaaaatgtgcaaatgcagggtgtgattatgggctaagtaaagttacaatgtcagtggtcggtcagctacctggagattggtcgtacagtatgtcatgtgtaatttttgtcgtctcgttttggttgagccatgggtggtgcttgtaacaaaaggatggcttggtgtcagtactacctaccctaccatggagcctgtttggagattcagtggtctggtttcccattcatattttgttcttttttcttttggcgtagggttccgacaatgccctggaagcctgcagtttccttctgtacccagatctacatggaaatcgcttacctaaacttgagaggcatatttccggtggtgagaaaccaatgtaaaaaaaagttgattccaattcgtgttgacgcgtttccgaagcttaccggaggacaaaatctattgccgtgggtcgttgagatgctcagagtcacatgatattccaagttttacagcgtacatgcatgcacgaccatcaatcacatccataccgaccggccggtgtgccgcactgtcaacgttaggtcagtggttagcaacacacaagcaggctgcattgcatttgcattaccgttggacttggacaggaattagggaacaaccgggggttgccgcccaggaaccttattagctggtagcatggtcctgtctgtcacaatcttgtgccttcgtagcatcactcatctaccaaccacaacttagaagacaagtctggatggatctagcaaacgacacggatatgacacaactgctgctagcggagcgtgccaagttgctgaaatgaaaatcttgcaccaacatcaacaagctacgcgatcttcaaaactttgtcgcatgtatcatgaaagcaacaacgagagttgaggaatcatttaggtcaggtccgcgcttcttgtttttctatggtttcttggataaacccctaccaaatgcaagcacgtaaagaagccgtttttcttagggcatgttgggtatatctctgttgtacactatagcagctctaaaactttagattggagcaactatgttgttgagttttagtgacatttaggtaaaataaatggttcgtagcttttagaacaaa

SEQ ID NO: 5478 - DNA, 2764 bp, Zea Mays
gtggtggttgtttaatccactgcccatagtggtcgaaatcatttgttgctgatgcaaggctttcaaaagtttaacagtctcacttgatgcaaaagcaacacaatcactctaaaggtttggatcagtcatttcagagcatgggttcgcggtttccatcccatcagctaagcaatggcttgtatgtctctggccgacctgagcaacctaaagagaaggccccagtcatttgctcctcggctatgccgtacactggcggggacataaagaaatctggagaacttggaaagatgtttgatctccatagaaaatctggtccattgggtaatccgccttcaaggaatacttcctttggtggtgctgccgccaactctggaccagtttccaatgctgtcggtcgctccaactactctggttctatttcgtctgcagttcctggcactggaggatcttctaggacaaaatctaactctggacctctcaacaagcatggagaaccaacaaagaggctatctggcccccaatcttctggagtaaacccgatggcccgtcagaactctggccctctacctcctgtacttcctacaactgggctaattacatcaggtcctatcacatctggtcagttgaattcgtctggtgctcaaaggaaagtatcaggccctcttgattctagtgtatcaatgaagatgcgtgttacctcttttgcacacaacccagccgtcacaaatatcaatgtgggagatggttactcgattaggggcagcattccgaccacaataatctggttggtcgcgttgctctttttggttgggtttgtagctggtggcttcattctcgctgccattcataatccgatcttgcttatagttgtggtggtgatatttggctttgttgctacactggtgatctggaacatctgctggggaagaagaggtgtgattggttttatcagtcgctatcctgatgcagaccttagaaccacaaaagatggggagtatgtgaaggttactggggttgttacttgtggaaatttgccccttgagtcctcgttccaacgggtgccgcgatgtgtgtacacttcaacttgcttgtatgagtacaggggttgggattcgaaagctgctaactccacacatcaccgatttacctggggtctcaggtcaatggagcgtcatgcagtggacttctacatctccgatttccagtctgggctgagagcgttggtcaggacagggtccggtgcacgagtatccccatatgtggacgagtctgttgttatcgacataaacccagacaacaaggacatgtcgcctgagttcctgaggtggctccgcggaaggaatctctcgagcgatgaccggattatgcgcctcaaagaagggtatatcaaggagggcagcaccgtgagcgtgatgggtgttgttcaaaggaatgagaacgtgctgatgatcgttcctccggctgaacccatctccactggctgccaatgggccaaatgcatcctcccgaccagcctcgacggtctggtcctgagatgcgaggacacgtctgacctggatgtggtaccagtctagttggttccggcgcggaggaggagaaaaagatgccttgactcgatttgagttggtttctgtgggttgttagtgttggagggaaaaaaatgtgcaaatgcagggtgtgattatgggctaagtaaagttacaatgtcagtggtcggtcagctacctggagattggtcgtacagtatgtcatgtgtaatttttgtcgtctcgttttggttgagccatgggtggtgcttgtaacaaaaggatggcttggtgtcagtactacctaccctaccatggagcctgtttggagattcagtggtctggtttcccattcatattttgttcttttttcttttggcgtagggttccgacaatgccctggaagcctgcagtttccttctgtacccagatctacatggaaatcgcttacctaaacttgagaggcatatttccggtggtgagaaaccaatgtaaaaaaaagttgattccaattcgtgttgacgcgtttccgaagcttaccggaggacaaaatctattgccgtgggtcgttgagatgctcagagtcacatgatattccaagttttacagcgtacatgcatgcacgaccatcaatcacatccataccgaccggccggtgtgccgcactgtcaacgttaggtcagtggttagcaacacacaagcaggctgcattgcatttgcattaccgttggacttggacaggaattagggaacaaccgggggttgccgcccaggaaccttattagctggtagcatggtcctgtctgtcacaatcttgtgccttcgtagcatcactcatctaccaaccacaacttagaagacaagtctggatggatctagcaaacgacacggatatgacacaactgctgctagcggagcgtgccaagttgctgaaatgaaaatcttgcaccaacatcaacaagctacgcgatcttcaaaactttgtcgcatgtatcatgaaagcaacaacgagagttgaggaatcatttaggtcaggtccgcgcttcttgtttttctatggtttcttggataaacccctaccaaatgcaagcacgtaaagaagccgtttttcttagggcatgttgggtatatctctgttgtacactatagcagctctaaaactttagattggagcaactatgttgttgagttttagtgacatttaggtaaaataaatggttcgtagcttttagaacaaa

SEQ ID NO: 5479 - DNA, 2040 bp, Zea Mays
atgtcagcgtcttacggatccgaagactaccgcggcggcggcggtggcggaggctacggtggcggcggtggaggaggatatggaggtggcggtagtggaggctacggcggcggcgggggtggaggtggccgaggcagtggcggcggagggttcggtggtggaggacgaggaggtggtggaggtggccgaggcggtggcgggcgcgggggtggacgcgaaggagactgggtttgccctgacgcgagttgtggcaatgtgaactttgcgaggagggctgaatgcaataagtgtggagcaccttgcccaagtggaggtggtggcggcgggggtgggggttataatagatctggtggaggtggtggaggatacaaccgtggcagtggtgattatggttctggaggtggtggtttcgaccgagatggtggagactataattctggtgggcgtggtggtggaagcgggggtggaggaggctacaatcgaagtggtggcagtgaccgtggttttgatgaccaccgtggtggcagaggtggcagctatgggggacgagatcaggagaaccaaaggggtagtgaaggtggctacagtgctggtggctatgggcaagctcctccacaagctcctccttcgtatggtggtcctgcgggtgattatgcagcacctccgagctcctatggaggcaacaatgcttatggttcagattctgcagtgccgcctcctaatagctacagtggtggcccaggctcatacccaccaagctatggtgccccgcctccacaccaatatggtggtgccccaggggggcaagggggtctgcctcctacatatgatggtggatatggtggtcggtccatgcctgggggtggaggatctgggggtgcaccaccgccttatcatggtggcggcagcggttatactggtagtgctgaccctgaaccagctggaaaagttaagcagtgcgatgaaaattgtgacgagacatgtgacaacgcaaggatttacatctcaaatttgcctcctgatgtcactgttgaggaattacaagagctatttggaggaatcggccaggtcggaaggatcaagcaaaagcgtggttacaaagatcagtggccttggaacataaaaatctatgctgatgactctggaaaagccaaaggagatgcttgccttgcttatgaagatccttctgctgctcattcagctggtggattttacaataattatgacatgagaggttataaaatcagtgttgtgatggctgagaaatcagcacccagagcggcaccctcatatgggcatggcggtggtcgtggtggtggccgcggtggtggtggacgcagggataattacagagatggcggggggcatggacccaatagaaaccagggtggtggttcacgttcacgaccatactgaaaacaaaacaattgttgttactgtgattgtcatctatgagaaaccatttctattcctgttatacagatttgtactcatacaggctcataagatggatataagctccaaatgctggtaggtttgtgatgttatttcagccggtggatcactcatgtaagctttggattttgctgcgaagaacaggttgcagccccatcacttgtgccctaactcatcgtccccagcaacacgatatgacgtgtgttgaagtggtgatctataagtagaaaaggagctgaattgagtgaattgttgcttcatctgcccccgtgatgcctctcgaattgggactgggagctcgtgacttacagcacttgccacgaatgggaaaccctctgctccaaaggaagcagttcaagcatatcgacgtgcttgcagggtcatcgctaaaaataatgtctcgaccacatgctaagattggaggttgttgtccgattatatatgttacaaaatattacatatgtgatcaatccaaggggtgtaacagttttctcaaagggacacactccttgggatacgctccttcacttgtatataagtgtaatgatctctggaatacaatcagtggctgtcacattctctcca

SEQ ID NO: 5480 - DNA, 2179 bp, Zea Mays
catattccatatatctatccctgttcgcatcacgactcgcgagctcccggtcccaaaccctaggcctagggggcgacctgacccgatgtcagcgtcttacggatccgaagactaccgcggcggcggcggtggcggaggctacggtggccgaggtggcggcggcggtcgtgggcgcggaggcgggggaggatatggaggtggcggcggtggaggaggatatggaggtggcggtagtggaggctacggcggcggcgggggtggaggtggccgaggcagtggcggcggagggttcggtggtggaggacgaggaggtggtggaggtggccgaggcggtggcgggcgcgggggtggacgcgaaggagactgggtttgccctgacgcgagttgtggcaatgtgaactttgcgaggagggctgaatgcaataagtgtggagcaccttgcccaagtggaggtggtggcggcgggggtgggggttataatagatctggtggaggtggtggaggatacaaccgtggcagtggtgattatggttctggaggtggtggtttcgaccgagatggtggagactataattctggtgggcgtggtggtggaagcgggggtggaggaggctacaatcgaagtggtggcagtgaccgtggttttgatgaccaccgtggtggcagaggtggcagctatgggggacgagatcaggagaaccaaaggggtagtgaaggtggctacagtgctggtggctatgggcaagctcctccacaagctcctccttcgtatggtggtcctgcgggtgattatgcagcacctccgagctcctatggaggcaacaatgcttatggttcagattctgcagtgccgcctcctaatagctacagtggtggcccaggctcatacccaccaagctatggtgccccgcctccacaccaatatggtggtgccccaggggggcaagggggtctgcctcctacatatgatggtggatatggtggtcggtccatgcctgggggtggaggatctgggggtgcaccaccgccttatcatggtggcggcagcggttatactggtagtgctgaccctgaaccagctggaaaagttaagcagtgcgatgaaaattgtgacgagacatgtgacaacgcaaggatttacatctcaaatttgcctcctgatgtcactgttgaggaattacaagagctatttggaggaatcggccaggtcggaaggatcaagcaaaagcgtggttacaaagatcagtggccttggaacataaaaatctatgctgatgactctggaaaagccaaaggagatgcttgccttgcttatgaagatccttctgctgctcattcagctggtggattttacaataattatgacatgagaggttataaaatcagtgttgtgatggctgagaaatcagcacccagagcggcaccctcatatgggcatggcggtggtcgtggtggtggccgcggtggtggtggacgcagggataattacagagatggcggggggcatggacccaatagaaaccagggtggtggttcacgttcacgaccatactgaaaacaaaacaattgttgttactgtgattgtcatctatgagaaaccatttctattcctgttatacagatttgtactcatacaggctcataagatggatataagctccaaatgctggtaggtttgtgatgttatttcagccggtggatcactcatgtaagctttggattttgctgcgaagaacaggttgcagccccatcacttgtgccctaactcatcgtccccagcaacacgatatgacgtgtgttgaagtggtgatctataagtagaaaaggagctgaattgagtgaattgttgcttcatctgcccccgtgatgcctctcgaattgggactgggagctcgtgacttacagcacttgccacgaatgggaaaccctctgctccaaaggaagcagttcaagcatatcgacgtgcttgcagggtcatcgctaaaaataatgtctcgaccacatgctaagattggaggttgttgtccgattatatatgttacaaaatattacatatgtgatcaatccaaggggtgtaacagttttctcaaagggacacactccttgggatacgctccttcacttgtatataagtgtaatgatctctggaatacaatcagtggctgtcacattctctcca

SEQ ID NO: 5481 - DNA, 2710 bp, Zea Mays
atggtattgacacgtgggtccatctcagaggcaaaacaaactattaccaaacggctcctataagcccgtccctctccgatccctcggcccgcgctctctgctcccatccccgcctcgtccgttaccataaatctagcttgggctctaatctaaccgagggaacaggtgggatatgaggaactcggtgtcggagcggagcttcctcatcgagagcgacgatgacgacgatgccgccgtggaggacgggaagcggcgcggccttggcggcggcggcggcggcgacgacgacgacgacgggtccgactcctcgtcgccgtgcgacagcccgcgggtggtggcggcgcggtgcagccagccgagttcgtacacgcagcaatggccgcagagctacaggcaatccattgacatgtacagcagtgtgcactctcccaacctgagcttcttgggcacgccatcactgagccggttgtccaactcgttcctcacaaactcattccgggggaagccacctgagatcatctccagcttaatcaagccattactgccgacaagcattgcttccgccagcgatgaccagcagcagcagcagcatgaggacgtccggaagagctcccattacctgccaccatcacgcaaggcgtcgtcgctgcagaggatccccgaggaccagagacctatggttgggggccatgaggtgggtccctaccggcagtgctcctatacccaaggggtcatgaacggagtgaatgtcttatgtggtgtggggatcctgtcaacaccttatgctgtcaagcagggtggctggcttggactggtgatactagcggtattgggtgcactggcttggtacactggcatacttctgcgccgttgcctggacagcaaggatgggctcgagacttaccctgacatcggacatgctgcctttggtactgctggccgtatcatcatctcggcatgttgcattgagtatttgatcttagagagcgataacttatcaaagttgttcccaaatgcacacctaaccatgggtaacttgactctggattcacatatgctatttgccatcttgactgctcttgtcgtcatgcctaccacttggcttcgtgatctcagctgcctcagcttcatttcagctggtggagtcattgcatctatcgtcattgtctcctgcttgttctgggtgggacttgttgatcacgttggcacagtcgagagtgaagggacggcactgaaccttcctggaatccccattgccatcgggttgtatgggtattgctactcaggccatggagtgttcccaaacatctactcttctctgaagaaaagcaaccagttccctgctgttcttttcacctgtatcgctctgtctactgttctgttcgctgctgctgcaatcatgggatacattatgttcggtgaatctacagagtcccaattcacactgaacttacccccaaatcttgtggcttccaagattgcggtctggactacggtgacgaatccaataaccaaatatccttggacttctacttcagctttctgtgtgcatttgttcccatacttaacaagtaacattacatgatatcttactttctctaatcacatgtaactccatgtagccatctaggtttgtgctaatcaaacatattttaaattttgactagaaatatctataaaaagtattatcttaaataagcagagttatttggttttaataaagaatttagcaatgtcaatgttatttttctcgttctatataaattttggatattcatggtcaaagttaaaaaatatttgacttaggacaaatatagatatacctgcattgttattttagtgagtcctatagttctcctccccaaactttgctatcaacatctaacagttaatccagttttcatgaataaatgtagtttcaatcgttctgtgttgtttaataatgttttatggatcgcatgctatgtccttaactaatacctacatatgcgctgaccatgactcctctagccctgagtttggaggaactgctacctccaaataagcagacatacccgaacataatgatgcttagatccgctctggtggtatcttcccttattattgctctgtccgttccattttttgccttttcaggacttgtcatgtcactggtcgggtcttttctcaccatgtttgtggcctatattctaccatgtgcctgctttttgtctatcctcaggagtaaagtgacctggtatcaggtagtactgtgtgtgttcatcattgtcgttggactttgctgtgttggtgttggcacgtactcttctctttctaagataatacaaaagtaccaatgaattgtgccctagaattatgtatgatgtgtccatgtgttttcgaatagccagttttcttttctgggatggtggcgctggtctggaagggggagggggatgtcattctttgtaaattttttgttggcatgagaggaagtggaggaatttgataaaatagggcaggttgtgttatcgaaggagtattttgtctgaaattgttctcgtgacggtaggtgctgctgggaacgaccttctgttgacgctgccattttcgtttgacccatattgtctcttgtcttattttctcgcatgctggtgggggtgggctatttgtttgatggagccatatatgaataatacaataagtttcgaatacaaaaaaatataacaaa

SEQ ID NO: 5482 - DNA, 1047 bp, Zea Mays
ccccagagctgcagtagtctgacagagattgctcacacacacacacaccaaaaacagattcgtcctcagcagctcgccgctcataccatgtctaatatttaccatcgtatcgtctccatggtgctgcaccaattcaacgctcctccttattataggtcagcttagtagttggtggtgactcgatcggcgagatgggcatggtcgcttccatgtgcacggagcccatcaagcggcaccgggtggagagagacctcgacggcaaggtggcggacgcgctccgggagcggacgaggtcccggcagaggaccttcaggtcggtgaacagcatcaccatgcgcctgcccaggttcaaggaagggctcagggacgtcaagaacatcttcgaccagtacgacgaggattcagatggcacgatcgacagcgaagagctgcagagcttcggaagcagagtccgggtgcacatgtccgaggaggagatgagcaacctgcaccggtactgcgacatcgacagcaggaagggcgtccagttccaggagttcgtcgtgctcctctgcctcgcgtacctgctcttcgggccagacgtcacacgacgcgtacgtacgtttcggagttcgagtccggcaagctcaattacgtcttcgacgagctcatcgacgcgtacatcttcttcgacaaggacggggacggcatgctgcggaggagagacgtcacccacaggatgaacgaggcgtcgcaccaggagaggacacccagccacataacagcacagctattcaaggagatggatctgaacaggaacgggaaggtgaacctcaaggagttcctctactccatgatcagatgggctggtctcgggaccgaagacgatggcagcgatgaggcctcaccatgatgtaacttttttttttcttttcttttggtctgcattttaacagttgaataagtaaaatgtatgttgacaattgaaagtaaaaataaaaaatatcatgaagaaaatcgaaggtccaaatctgattcgataaacctcgttattatgtaataatcgat

SEQ ID NO: 5483 - DNA, 1591 bp, Zea Mays
ttttctttttttgattgattcgatttctccacacgtgctacacctacacgacgcagaattgcagccgaatccatcggagcccacggccgcacgcccgcagcccggccagcggccaccgcatcgcctcgtatgctccgcgcttgcacacgcgtcggcggcgcgggcgcgggcggctgcggccgacgagaacgcctcatggcctccctcatccccttcctccctccctcaccttactccactcacctcccgcgccagccccagtcccagccgccgacagccgctacccagcccgccgcagcggcgcgcccatcccggttccgcctcctgttcgcgcgcgccgcggcgcagcggcagcgcgactccgagccggcgccggcggccgaggagaggcggtcgctggccgtcagaacgggggagctgttcctggggctggcggcgctgctgctgcgcgggaccggggccgagcgtagcggtggggccgcggtggaggagatggaggcgagggacggggtagtgtgggagcagcgcccccaggacgtggacgcggagcggcggcgacgggagctcactagcccaggtttcagcttctccgccgcggggctgctcttcccctaccacctcggcgccgcgcagtgcctcatggaccgcggatacatcacctgatcgcatctgggaacacaatgcaagatgctctgcaggtgaccaaagttctagctgacaactgccgaagtaaaggcacggcgtttcgccttggggctgtactcaaggatgtccttgttgagtttctcccagatgatcttcacattagatgcaatggaagaattcgtgttgctattactcagctatcctggaggcctagggccttgctggtggaccaatttgactccaaagaagatgtcattaatgcagtaattacatcctcctttattcctggatacttagcacccaggccagctaccttcttccgtaataggctcggcattgatgggggccttacattgtttatgccgcccacttctgctgcagaaacagtccgaatatgtgcttttccagccagccgtttgggattgcaagatattgggatcagtcccgattgcaatccagagaacagggctagcccaagacagctgtttaactgggctctggaacctgctgctgatgaaactctagacaaattatacgagcttgggtacctggacgcagctgtatgggctgagcagaattatgctgagcttatcgccaagaatgatcaatcccttgtcgctgattgaattgagttcagtttgcccagaagtaattttggtatccaaagctgagttcatgagaatccatgcctgtaatatattgtaaagatagcaccgtcattgtcgaaggtggcattgttctgcattggatttgggtgtttatgccagcattttcgtagctgtgacaatagtgtagaacaggttgctagcatggccataaaaactgatcagcataatcaaatgtatagattatagatgatgaggtttgacctgagcctaaaacagggggataatggtcctatttgtttcagttttttttttagtttctggccgttagaagttgctgc

SEQ ID NO: 5484 - DNA, 3141 bp, Zea Mays
ccgctcctctagtctccacaatccagtccttctccagtctgcccgctcattctgtcgaacacctcgtcctctacatcctcatcgacgtcttcccaattcaaaactcctaaaccctagcccttcttcccgacaccaccatccatccaaaatcactgggtgatgcggaagaggtagcctccgccgatggcctgctgcttcgtccgcgtcgctgcggcgccccgcctcctcatctaccgcgccgccgctccgcggcagctcccgtcgccgctcaacgtattcaggaagggtttttccgagcagtcagttctgccagtcacagattcgattgagtgtttccaaggaccatcagtgccgaatactccacggattccactgtatgatgacagcgtatcctcaagcatattggatacattgtcgaatccgactgggggtgtccctcatgctgatccttcaaagagcagaataatgctagttgatggaacgtcgatgatgtatagatcctactacaagatattagcacagctgcagcacggccagttggagcatgctgatggaaatggggattgggttttaactatattcaaagctctatccctgcttcttgacatgctggagttcattccatctcatgctgcggttgtgtttgaccacgatggagtcccatatggtcattatactgccatgccatctaaagaatgtcacatggcaaaaggtatgggtgtatgatgtctcaaagttgatgggaacatggtagaaggtaatctgtggctgtcaattagcatcttggggatgcatcagaggtcttggactgagcctcaatccactaattgtgtttcatggcatggagccctggcttgcacataagcaatgttctattatacatttatacttcattccttggtcaagaaagtgttgggtagagagaagtagaaatggtataggagtgttgggtaaccagttttagaatatgcaatataggctttgtaaaaaaacttgacctgcgggggtaagaccgcccccacggtattatattaagaagaccttctcacgcaggtcgagaaaacccccgaaccctgccccacccatacatagcggcaccgtagcccatgtgagaacgaccacaaccgtggccgagccttagacttgtgctttggcgtgggacaaacgaggtgatttatttaaccacagccgggaaattcgctcccacggggagtcgaacccaggacctgaggagtgctactcaaaccacctagccaactcggctagaggccctttagcactgcctacttttattttctaagaattttatgtcacttagtttcttggttcttattatcttcctagctatactttacttaaaaatgtgtagtatattggaagcaacaaacatacgagtcatcaagggcatcttcgatgctccaacttgggaggtcttagagatactttgcttacacattggaaagagagcataccaacacttattcatttaggttttcattagccacttcttagaagatacctttgcttatggagggttgggtaccaattgattgttttcagctgttgtatcatgttactctcatcttttgaatcctataaagaaacattaccattttttctcccctttaggaatgacctttcgtcatatgttgtaccctgcttacaagagcaaccgcactccaacacctgacaccgttgttcagggcatgcaatacttgaaggcatccattaaggcaatgtcaataaaagtaattgaggttccaggcgttgaagctgatgatgttattggcaccctggccataaacagtgtttcggctggttacaaggtacggattgtctctcctgataaagacttcttccaaattttatcaccttctttgcgtctgctcaggattgctccacgtggatcagggatggtttcatttggagttgaagacttcgtcaagcgatatggaccattgaaaccctcgcagtttgtggatgttgttgcactttcaggagacaaagctgacaatatacctggagttgaggggattggagatattaatgcagtaaagctgatatctaagtttggttccttggataatctactgaaatccgtggacgaagttgaggatgaacgaattaaacaggcaatgtgctttgatttctcactcggaacaggcaatcctttgcaaaaacctggccacgctgcgttctgatcttcctcattatatggttcctttcaagacagccgaccttgtatttaagaagccacaggatgatggagagaaattcataaaactcttacgagcattggaagcatatgcagaaggttcctcagtaaatccaatcatcagaagagcagcctatctttggaacaaacttaaatcatgatgacactgatgttttcagcgttgaataaaaaggaattttgtcaaggctgagagtttgggttcaaagcttggtgtcgtagtgctcaatactggcggcattgacttctgtggactcggcggccagctacactcacatcgcaacgcaaaatcaaattgttgctggcagaagtgcataaattgaaggtgccgatgcttaagcaaagcagctcagtgtttatacctcggaacttagctctgtagataagaaatgcacaacattgcccatgtattccgccttttttgagaggaaagctcgtggaatctatttgattttttttctctgtactaccaattacaaagggttgtaggtggagctgtggaggccagagcgggcaaccgtgtggcttaacattctaccacgcctagcactctagcaggtttcatgaagtctactacggtggtgaatcagatcgcacaactgttgtgttgtaggagcgagtatgtgctcgttttgtcgcacaaagatgttgtaaggctgagtccaatccttgtcgatcctgactgttgatgccggcggtcggtaccgagcaaactggctccaatgccggtcggtttgattggctggttggtgggcttgccaatcgatctgaggcctagtttgttttgtggtgattaaagtttagtgagtcacttttagtttctaaagaaacaaacatggtaactaaagtggtgtaactaaacttaagttctttagccacaagggagtgactaaaaggactaaagtagg

SEQ ID NO: 5485 - DNA, 3219 bp, Zea Mays
ccgctcctctagtctccacaatccagtccttctccagtctgcccgctcattctgtcgaacacctcgtcctctacatcctcatcgacgtcttcccaattcaaaactcctaaaccctagcccttcttcccgacaccaccatccatccaaaatcactgggtgatgcggaagaggtagcctccgccgatggcctgctgcttcgtccgcgtcgctgcggcgccccgcctcctcatctaccgcgccgccgctccgcggcagctcccgtcgccgctcaacgtattcaggaagggtttttccgagcagtcagttctgccagtcacagattcgattgagtgtttccaaggaccatcagtgccgaatactccacggattccactgtatgatgacagcgtatcctcaagcatattggatacattgtcgaatccgactgggggtgtccctcatgctgatccttcaaagagcagaataatgctagttgatggaacgtcgatgatgtatagatcctactacaagatattagcacagctgcagcacggccagttggagcatgctgatggaaatggggattgggttttaactatattcaaagctctatccctgcttcttgacatgctggagttcattccatctcatgctgcggttgtgtttgaccacgatggagtcccatatggtcattatactgccatgccatctaaagaatgtcacatggcaaaaggtatgggtgtatgatgtctcaaagttgatgggaacatggtagaaggtaatctgtggctgtcaattagcatcttggggatgcatcagaggtcttggactgagcctcaatccactaattgtgtttcatggcatggagccctggcttgcacataagcaatgttctattatacatttatacttcattccttggtcaagaaagtgttgggtagagagaagtagaaatggtataggagtgttgggtaaccagttttagaatatgcaatataggctttgtaaaaaaacttgacctgcgggggtaagaccgcccccacggtattatattaagaagaccttctcacgcaggtcgagaaaacccccgaaccctgccccacccatacatagcggcaccgtagcccatgtgagaacgaccacaaccgtggccgagccttagacttgtgctttggcgtgggacaaacgaggtgatttatttaaccacagccgggaaattcgctcccacggggagtcgaacccaggacctgaggagtgctactcaaaccacctagccaactcggctagaggccctttagcactgcctacttttattttctaagaattttatgtcacttagtttcttggttcttattatcttcctagctatactttacttaaaaatgtgtagtatattggaagcaacaaacatacgagtcatcaagggcatcttcgatgctccaacttgggaggtcttagagatactttgcttacacattggaaagagagcataccaacacttattcatttaggttttcattagccacttcttagaagatacctttgcttatggagggttgggtaccaattgattgttttcagctgttgtatcatgttactctcatcttttgaatcctataaagaaacattaccattttttctcccctttaggaatgacctttcgtcatatgttgtaccctgcttacaagagcaaccgcactccaacacctgacaccgttgttcagggcatgcaatacttgaaggcatccattaaggcaatgtcaataaaagtaattgaggttccaggcgttgaagctgatgatgttattggcaccctggccataaacagtgtttcggctggttacaaggtacggattgtctctcctgataaagacttcttccaaattttatcaccttctttgcgtctgctcaggattgctccacgtggatcagggatggtttcatttggagttgaagacttcgtcaagcgatatggaccattgaaaccctcgcagtttgtggatgttgttgcactttcaggagacaaagctgacaatatacctggagttgaggggattggagatattaatgcagtaaagctgatatctaagtttgcttgttggaagaacaggtctggcgcagtggtgagaagccatcccactaagccaatggtcctgagttctttgcaaaaattgcaggggttccttggataatctactgaaatccgtggacgaagttgaggatgaacgaattaaacaggctttgatttctcactcggaacaggcaatcctttgcaaaaacctggccacgctgcgttctgatcttcctcattatatggttcctttcaagacagccgaccttgtatttaagaagccacaggatgatggagagaaattcataaaactcttacgagcattggaagcatatgcagaaggttcctcagtaaatccaatcatcagaagagcagcctatctttggaacaaacttaaatcatgatgacactgatgttttcagcgttgaataaaaaggaattttgtcaaggctgagagtttgggttcaaagcttggtgtcgtagtgctcaatactggcggcattgacttctgtggactcggcggccagctacactcacatcgcaacgcaaaatcaaattgttgctggcagaagtgcataaattgaaggtgccgatgcttaagcaaagcagctcagtgtttatacctcggaacttagctctgtagataagaaatgcacaacattgcccatgtattccgccttttttgagaggaaagctcgtggaatctatttgattttttttctctgtactaccaattacaaagggttgtaggtggagctgtggaggccagagcgggcaaccgtgtggcttaacattctaccacgcctagcactctagcaggtttcatgaagtctactacggtggtgaatcagatcgcacaactgttgtgttgtaggagcgagtatgtgctcgttttgtcgcacaaagatgttgtaaggctgagtccaatccttgtcgatcctgactgttgatgccggcggtcggtaccgagcaaactggctccaatgccggtcggtttgattggctggttggtgggcttgccaatcgatctgaggcctagtttgttttgtggtgattaaagtttagtgagtcacttttagtttctaaagaaacaaacatggtaactaaagtggtgtaactaaacttaagttctttagccacaagggagtgactaaaaggactaaagtagg

SEQ ID NO: 5486 - DNA, 2266 bp, Zea Mays
acaaaaaggcacgccccacccagtccagtccccaccaagcaggcgccacccgttcggtccgtacaggaggggtccaccatgccgtgctcctcttcgtcgtccaaccccttccactccctcgcctccgccttccccttcctctcctccacatccccacccccatccccacccgcctcgcccgcgcccgccgctccccacctcgccgtcccgctcctcctccccgtctcctcggcttccgagtcccgccgcggggcgcagccgctgccgggcacgcggatggtcggcgcgggcgcgaccggcgggggtaacatggccagcggtggtggggggcccgcgttcgtgggccaggtgttcaccatgctcgacccatccgggaacgggctcatggccgttaccacacgcttcgagctcccgcgcttcctcaccaacaggactcctatgtggttcaaaaggatgctatcaccgtcgaagaagactgaaaatagtccagtatttaggttttttatggatctgaatgatgcagtatcctatgtaaagcgactaaatgtgccaagcggcatggtgggggcttgtcgccttgatgtagcatatgaacatttcaaggaaaagcctcacatgttccagtttgttccaaatgaaaagcaggtctgtgctaaaatttctcagcctacctataacttaagcatgccattagagattatatcgtttccctttcaggtccaggctgccaataagctattgaagtcacttccacaaaggggcagaaggaaaaaacttgatggggttcctgtttttagtgcgcaaaacttgaatattgcagtggcaacaaatgatggaattagatggtacacaccatacttttttgataaaaacttgttggacaatatccttgaagcttctatggatcaacatttccattcgataatgcaaaatcgccatacacgtcgtagaagggatattgtcgatgatagtttaacatcagaaataattgaagaaagtgctgaaagcttgcttgagcccccagaggttcaagaattaatgaatgagattggcccagctggtataccattaaatgttgtaacgaaagctgcagagattcagtttcttgatgttgttgataaagtccttctaggaaataagtggttaaggaaagcttctggcatacaaccaaagttcccttatgttgttgattcatttgaagaaagttgccagaataatcaagaaactcaatcttccgagccaagtggtgataacagcagctacagaaatcacaataatgaagatcataatcactttccgtttagcaatctgcttccaaatatatggccagggcatgacagaaagttcaaatcacaagagagtgacaataagtttagcagatatgatgccgacgtgaagagtaagttacaagcaaaccctcttcttccgaaaatcaccatggttggcatctcaatgggtgatggtgcacagatgagcaaagccaacttaaagaagacaatggaagacttgacaaaagagttggagcaaacgagtgaagaaaatatgttcggtgatgaaaaagacccactttttgttgccaacgttggtgactactcaaggataacaaagattagctctgcatgaggctcgttgaccaacaggcgacagcaagggtgttgtactgaactgctaacgaagtctacagtccatgatactgatcttagagggctctactgatataatgatgcaaatcggaggtcatcagatcatatggacattcgactgtcgaccgttctgactttagaggctatccaacgtcaacagttacaagccaatctaaattttcggatatgatttgccaaaaggatgattgtaaatagaaaagtttgcagaatgtccaccatgcagttaggcgtgaagatctgaagcaacatgttgttggatttctaagatcttagctcgtaacagctgtagagtatggtggtatatagcttcaggattgagatgggggtcacaggagtctgtcaggtgagcagagtcgaataaattgatgtgggtagcatttttcttcactagctgcgtatcggatctgagtgtgtatggcgagagttacggtaaatgttggttcgcatataggtccttggattatttattgtacgcgatatggtgaaaggaggttgtagctaacatgttgtgtctccgatcatcatactgacattattgtctctcatgatcttatacttgcttataaatagaacttaaaactttattttgagttgacagcatg

SEQ ID NO: 5487 - DNA, 2295 bp, Zea Mays
tcctccagtattcaggttttaatcaaacaaaacaaaaaagctctgtcagtttctagggaagaagacattcttgctgaggatgaaataagcaaatctgaaagaagagcaaaggaacgttatactcaaaatctggctgaggaaaacttgaaagcgatacgtgctttctcttctaagcttttggaagtactttgttctatattcttgatgtcttcgaatgatgctattggattattgcagcctgcgataagtgagatagcttccatatcagacaaaaacgttgttgggaaattcttccttgatgcaataagaaagttgttggatgctacaaaggctgttaatgcagagcctgtggatgatagttcaatggaaattgaagccgattccaacaaaaatagcatgaagagcttcattgatgcctggtttagctgcaaagtctatcaatgtgttgttcagttatgtgaaacctgcaattaaggacagcgactctttgattcaaaagagagcgtacaaggtcctgtcaatgctgctcaaggatgctgaatttattgaaaagaatctggatgtcctgtcagaattgatgatttcgtcactaccatgccaatttccctcgaaacgttacagactcgaatgcctataccaccttattgtttacattttgaaggattcatctatggttagaaagagagaaattattagttcattcatcactgaaatacttcttgcattgaaggaggccaacaagaaaaccagaaacagagcttatgatttgcttattgaaattgcccgtgcctgtgaaaatgctggaaatgacgaggggaaggagggcttgcaccagttctttggcatggttgctggtggtctggccgctggtcaaacgccatatgcaattagtgctgttgtaactgggttggctcggttgacttatgaattctcagagcttatcggagtcgcatacaatctccttcctcagactttcttgcttatgcaaaggaacaaccgggaaatagtcaaagcgaacttaggttttgtcaaagctttagttgctaaatctaaagctgacatattgcatgaacacttgactggagttgttgagggcctgctgagctggcaaagtgatacaaagaattcctttaaagctaaggtcaagtcactcatagaaattcttgtgaagaaatgtggtttagacgctgtgaaggctgtgatgcctgaggagcatatgaaattgctcacgaatattaggaagattaatgagcgaaaaatgcgaaaggcaaaatcttctgaggatggggatgccatgtctatggcctcaggagctacaaggcaaagtaggtggaatcacacacaaatgttttcggactttggaagtgatgatgaatcagatggtcctttttctacccaacatactgctacttctcgatctcgtactgaatcaaaagcttcaactcggttgagtcggaggcgccaaggagataagaaactactagacaagttcattgaccattcaactggcgaccccctagatttacttgaccagaaaacggtgcggttggctctcaaatcagcagcagggaaaaagagggctgcacccgatgacgacgacgataagttcgaggtggaccctgaaggccgtataatcgtgcgcgaagagcgggagaagtggaaaaagaagccggcccctcgtgacgacgaggaggctgatggaaagagctctgtcagaagccagtccatcaagaagaggaagacatccggctctggctgggcctacactggtcatgagtacaccagcaagaaagccagtggtgatctgaagaagaaagacaagatggaaccttacgcgtactggccgctggaccgtaagcttctcaaccgcaggtcggaccgcaaggcgtctgcgcgcaagggtatgtccagtgtcatgaagatcaccaagaagctcgaagggaagagtgcaagcgccgcgctttctgctaaacggtcgggaaaaacgaagcacaaaaagaacaaataagtgggtagtggcgaagcttcctactttataggagccgaccagatgatttttttggagaaatttgctaccattttttttggtgggtaggggtggatttcggtctgtacagttcgggaattcagaacaccgtagttcttgtcttttcggataagttttgtattagaaccttgacactttggtgtttgtattagactggatcgtgattcgttctgattgtttggtgactagtaaatcttgtgttttgttgtgcacttgtgctgactaccgaaaaacattgagaaaaaaag

SEQ ID NO: 5488 - DNA, 1064 bp, Zea Mays
tagagaccggccggacgatggcagcagcagagcgcgaccgcgagcgatggatcctgcccggcgcgacggcgctggtcaccggcgggagcaaggggatcgggcacgcgatcgtggaggagctggcggcgctgggcgcgcgcgtgcacacgtgctcccgcaacgccgcggagctggaggagtgccgccggaggtgggcagagaagggcggcggcctgctgcagcaggtgaccgtctccgtctgcgacgtcgccgtgcgcgccgacagggaggcgctcatggccaccgtcagggatgtcttcggcggcaagctggacatcctcgtgaataacgcggcgcaggtggtcttcaagccggcggtggagtgcaccggggaggagtacacgcggatcatggcgaccaacctggagtcctgcttccacctcagccagctcgcgcacccgctgctccgcgacgcctccctcgccggcggcgggagcgtcgtgcacatctcctccaccgcgggcctcctcggctttcgaggggcggtgctttacagcactgcgaaaggcagcaagctcggaggccgtcgagcaagaaacttcacggattccgctgcggcgggccggcgagccggcagaggtggcgtccgtggtgtcgtttctgtgcatgccggcggccgcctacgtcaccggccaagtcatctacgttgacggtggccgaaccataagagcttgacgatgaccagcatcatcatcatctacgtctacgtggaatctaacaaacgcactccatccacaaacctagctacagtggcccgggatttcacatatatgtagccacacacatgcatgacacatgtgtgtgtgataaataaaagaattctttatgcgtgcatatcaccaacgacaaaagtaaataacaagcaggaaagaaaaaataaataaaaccatggagaaatcttgtttcatgcgcacaggcttgggccggggcaaaaaacccgtaacccgaagccgaaatacttgaacctgaacccgaaatacccaaaatccgaattttgttcgggaatttcgggtagcaacttgcaa

SEQ ID NO: 5489 - DNA, 942 bp, Zea Mays
gaaatatatgcaaaactacaaatctttgttcagttgttcacataaactgacataaaaatcacttgaaggtaaatgttttcactgatgcaccaagccaataccttctgcaaatatcacgcgcttcgaatatttcgcctaactgtttctgaattagtatagctgaacaagctcaatttagcatgatgtcttacagaatagtgccacatgtatctcatataaatgcagagaagtgccagtatcaacaatgtcacctgggatctactttcgtacctgagctgcgtggatacttcttggcaactgaaaatttctattttacatcaaaggatttgtccacccttagaaaaaaacatcctaataggtcagatgaagatttttcacggtattgcttctcgatggcatatattgtggctctactgcatgacagtcttggtgtatcactggatgataagaggattgagtattcaaaccaggttggagacattcaggttgaatgggctctaggagctttcatcacactgattcaaaatgcaagtttaaagccattacacaccgctgtggaatcaacccatagcaatagaccattgtttgctgtgctgggaatgtttcttttatgtggagtactttttgtatcaagatggaggaagcacaagacgaaagtcatatacgacttagagaaaggccggtacatcataacacacatcagctgatgctgaaccttgtgcagaagaactatatttatacgacaggaatagatgttgtgttgtacaacaatgtaccagttcaattatttgttttattttaggtagcagagctgggtgggtagagcatgaaatatagcacaaatgcgtatagaagaatgtgtagaacaagttgccatgtgttaattgaattattttggtgaataattatacctgttttgtttatcttatgagctccacattt

SEQ ID NO: 5490 - DNA, 1735 bp, Zea Mays
aaaaaactaaaaagtgggggaaggagaggattcggcaagttccggcctcatccgctgctttcctcgcaactatcggatcttgcgaggcatcgtcctcctatcctataatcgcatttcgaatcgcaaacggagacttcgcccctcttcacagattctaatcgaatttgccaatctgcaagctaacgtagtgattttctgtggtggtggtgatgtgcgatcgcaggaacaatcaccaatcaccatccttaagaagatgatgcgatgcactgtaacgggcggcgggtgcgttgcttcgtggattggtgatcggaggtcgccggcggtcaaccccttcagcgtgcggatgtcgacgggcaacggtgggtggtgcggcggcctgaggtcgcgggcggcggaactctccggcctcgagatggcccatctacgtggcggcatcggggggctcttccgcgcgagcccgcgctatgggcgcttgcaagccacggccgcagttgaccctgaagatattccactggagaaggttcaagttaaatcctcaggacatgttatgccatatgttggtgttgcttgtttgggggctattctgtttggttatcatcttggtgtggtcaatggtgcgcttgaatatcttgcgaaggatcttggaattgctgaaaatgccgtcttacagtggacatctgcttattgctcaggatgggtggttagcacatccctagctggtgcaacactaggttcctttaccgggggatctttggcagataaatttgggcggacaagaacattcatcctggatgcagccccactggctgtaggtgcattcttgagcgcaacagctcaagatatccgcaccatgattattggtcggttgcttgctggaattggtattgggatctcatctgcacttgtacccctttacatatctgagatatcaccaactgaaattcgtggaacacttggttccgttaatcaactttttatctgcattggaattcttgcagctttgttagctggattgcctttggcaggaaatcctgcctggtggaggacaatgtttggaattgctgtagttccatccattttgctggctgtaggaatggccttttcgcctgaaagccctcgatggctattccagcaaggaaaggttattcaagcagaatcggctgtaaaaagactatatggaaaagaaatggttaccgaaattatgtatgatctgagagctagtggccaaagttcttctgagaccgaagctggctggtttgatcttttcagcaagcgttactggaaagttgtgagtgtgggggcagcactgtttttgttccagcagcttgctggtataaacgctgttgtatattactctacatcggtgttccgtaatgcaggcattacatctgatgttgctgctagtgctcttgttggagcagccaatgtttttggcaccatggttgcatcttctctaatggacaagcaaggaaggaaaagccttctgatgacaagcttttctggaatgggtgcttcaatgctactcctagcattgtccttcacctggaaagctctggcaccttattctggtattcttgctgttgttggcactgttctgtatgtgctgtcttttgctctaggagctggtcctgttcctgccctgcttcttcctgaaatatttgcctccagaataagggccaaggctgttgcattatctctaggcatgcactggacttctagattctatatgtaatcc

SEQ ID NO: 5491 - DNA, 2450 bp, Zea Mays
tatgaatttgtgttagctgcttgcagcacagttgttcttaaaataggttcatgggaatgtatgcttagccagtgttgttgttacacaaaccctggattggaagcttcatgccttcgatgttctgtcagaatttgatgctaacaatgaagcctctggtagccccatgctgcaatttgagtggttagttgggatgcaatacaagccaatggagctgtcaaagtcagattgggcttcaattagaaaatcacctccgtgggccattgattcttggggactggggtgtttaatatatgaactcttttctggtgcaaagctggctagaacagaggaccttcgaaatactgcttcaatcccaaagtctctacttccagattaccagaggctcttgaattccacacctactcgtagactaaatccttcaaaacttattgacaacagcgagtttttccagaataagttagtagagactatccagttcatggaaattcttaatttgaaagacacctttgagaaagacagctttttccggaagcttcccaatatagctgaacagcttccccgtgagatagtcctgaaaaagctgctccctgtcttggcttcttctcttgagtttggctcagctgctgctccagccttaactgttttgttaaagatgggttcctggcttcctacggaccaatttagtatcaaggtcttgccaactattgtcaagctttttgcctccaatgaccgagctatccgagcatgtcttttgcaccacatagatcagtttggggaatcaatgtctgctcaaactgttgatgaacaacaactggattttccgatactgatggtactatccgtgaactgacattaaagtcaatgctcatattagcaccaaaactatctcagcgtacaatctcaggatctctcttgaaatatctctctaagctacaggtgaagttcacttttggatttgaaaaggtttatactgcagttatgatagacactgctttctgtgacaggtggatgaagaacctggaatcaggacgaacactacaattcttcttggcaatattgcaagctacatgaatgatgggactaggaagagagtactgatcaatgcattcacagttcgtgcactacgtgataccttccctccggccagagcagctggaatcatggcactgagtgtcactggttcatactacgaaatgacagagattgcaactcgcatcctgcctaacattgttgtcctcacatttgacccagatagtgatgtccggaccaaggctttccaggctactgatcagttcttgcaaatagcaaagcaacaccatgaaaagcttaatacgggagacaacagggtggctgaaagtactggtgttaagttaaagcctggaaatgcaggtttacttgggtgggccatgagttctgttacacaaaagggtaaaccttctgaccacgccccaatatctactgcaaatgctaataattctcaagcatcaacagctttgactgccgctccagagactcaggcttccacaccagcgtatgcacaatccacatccagctcccttgatcaagctgcaccagcatcagcaaggtcttcagaagatgggtggggtgagcttgaggatgacaatatccatgaggagaatagtgataaagatggatgggatgatgtagacccgtttgaggacaagccatcaccatctcttctatccaacatacaggctgcacagaaacgtccagtggcgcaaccaaagcaagctgttgcaaactcatctaaatccaacccactaaaagcgccaaaatcagaagacgatcctctatggggtcctatagctgctgcaccacccaaaagcgcagcaaaacctgcagacatcaagccatcaacatcacataacgatgaggatgacctgtggggttcaatagcggcacctcctccaaaatcatctggaaagcctttgaagccagctgcagcgaatagtgacgacctatggggtgccattgcagcacctccaccaggaaccaaagccaggcccttagcctcatcaggtaagggccgaggaacaaagcctgcgcaaccaaaacttggtgctcaaagaataggaagaacatcctcaactggaatgtgatggcttatgatatcaaatgttgtacaagagtgcgaagttttcctttttgtcccccatgctttgagtctgaccaggatgtcattctttgtaaactagcaaaaggtatcaatatatggacacaattttgacaaatgtattaatattgtttcaccattgtgtattaaaatagacacatacgtttttttttgtttttgtattttttgtacatcacagctgtttcgagtaaatattattaatatatttgcccctgccttattttggcttgattactttgacatttcctttttgttgggataaaacttgtcggtgtagcgctgtatagaacttaca

SEQ ID NO: 5492 - DNA, 3759 bp, Zea Mays
aaatatttgtgcgctctcttccaggtgggccctttctctccccttctcccctcaccggctcaccctctcccctcgacgatacatttcacctccccggatctatctcgccgcgtcggcgcgctggtcacccgacgaagctaggaggcagtcaaggcggacgaagcgctgcaccaaatttgacgggggatcgagcacaggaggcgtagtggaaaatgtttaagtttctcaaggaggtggtcgcgggatccggatcggggctcaaggacttcccctacaccattggtgagacatacgcatccgcctggggttcatggacacaccaccgcggtacctccaaggatgatgggtcacctgtgtcaattttttctctgtcagggagcaaccctcaggacagacacatggttgctggccgtaatggtgttaagagattacgaacggtgcggcatccaaatatcttatcctttttacacagtactgaagcagaagttgcggatggacctgccatcaaacacacgatttatattgtaacagagcctgttatgccactttctgaaaagctcaaggaactgaatcttggtggtacacagagatatccaaagctgtgagctttctcaataatgattgcaaacttgttcatgggaatgtatgcttagccagtgttgttgttacacaaaccctggattggaagcttcatgccttcgatgttctgtcagaatttgatgctaacaatgaagcctctggtagccccatgctgcaatttgagtggttagttgggatgcaatacaagccaatggagctgtcaaagtcagattgggcttcaattagaaaatcacctccgtgggccattgattcttggggactggggtgtttaatatatgaactcttttctggtgcaaagctggctagaacagaggaccttcgaaatactgcttcaatcccaaagtctctacttccagattaccagaggctcttgaattccacacctactcgtagactaaatccttcaaaacttattgacaacagcgagtttttccagaataagttagtagagactatccagttcatggaaattcttaatttgaaagacacctttgagaaagacagctttttccggaagcttcccaatatagctgaacagcttccccgtgagatagtcctgaaaaagctgctccctgtcttggcttcttctcttgagtttggctcagctgctgctccagccttaactgttttgttaaagatgggttcctggcttcctacggaccaatttagtatcaaggtcttgccaactattgtcaagctttttgcctccaatgaccgagctatccgagcatgtcttttgcaccacatagatcagtttggggaatcaatgtctgctcaaactgttgatgaacaagtttttcctcatgtagcaactggattttccgatactgatggtactatccgtgaactgacattaaagtcaatgctcatattagcaccaaaactatctcagcgtacaatctcaggatctctcttgaaatatctctctaagctacaggtggatgaagaacctggaatcaggacgaacactacaattcttcttggcaatattgcaagctacatgaatgatggggtctgtctcaaagatgcaactattgtgttatttgtattcctttaattatccttttccatgttaggtactaactagatatactgaatatgttgtgttagggaatttcattgaaaatagcttttagagatattaccaaacatgccagtatgctgcatcggagcgcgcgacatcatctgttccaatacatattggtatcggatatcggaccaggctagacacacactattctaacccatgtgcaccaatcctccatgtgcaccagatatgtcctcatacctattatgctcggggaagtgtagggacggattggggaagagaggacggaaatttggaggaagaaattttctccttttaatattagatatagatatagatgtcagttgtgtatatgtttttttttgagtttcttatgctctggatgtccatttgattgaaatctgctttaaacacaaaaaggtacaaatatgaacacgtccattttctgtataggcttctgcttctgtgttcaaggtttatgtttctgttgaagacacttttttcacagctgacctgactggtactcctgattaagggtattcaacactatctattgctgcagaaacatgattacagaacagaaaagatattacgaaaaccacttctatctaggattaacctgtaatcctgtatatatatgaaaaatagaactttatccatattagcctggagatggattttatttgttaattctagcatagtgtttgcctatttgctgacaaggctttgttatataacagactaggaagagagtactgatcaatgcattcacagttcgtgcactacgtgataccttccctccggccagagcagctggaatcatggcactgagtgtcactggttcatactacgaaatgacagagattgcaactcgcatcctgcctaacattgttgtcctcacatttgacccagatagtgatgtccggaccaaggctttccaggctactgatcagttcttgcaaatagcaaagcaacaccatgaaaagcttaatacgggagacaacagggtggctgaaagtactggtgttaagttaaagcctggaaatgcaggtttacttgggtgggccatgagttctgttacacaaaagggtaaaccttctgaccacgccccaatatctactgcaaatgctaataattctcaagcatcaacagctttgactgccgctccagagactcaggcttccacaccagcgtatgcacaatccacatccagctcccttgatcaagctgcaccagcatcagcaaggtcttcagaagatgggtggggtgagcttgaggatgacaatatccatgaggagaatagtgataaagatggatgggatgatgtagacccgtttgaggacaagccatcaccatctcttctatccaacatacaggctgcacagaaacgtccagtggcgcaaccaaagcaagctgttgcaaactcatctaaatccaacccactaaaagcgccaaaatcagaagacgatcctctatggggtcctatagctgctgcaccacccaaaagcgcagcaaaacctgcagacatcaagccatcaacatcacataacgatgaggatgacctgtggggttcaatagcggcacctcctccaaaatcatctggaaagcctttgaagccagctgcagcgaatagtgacgacctatggggtgccattgcagcacctccaccaggaaccaaagccaggcccttagcctcatcaggtaagggccgaggaacaaagcctgcgcaaccaaaacttggtgctcaaagaataggaagaacatcctcaactggaatgtgatggcttatgatatcaaatgttgtacaagagtgcgaagttttcctttttgtcccccatgctttgagtctgaccaggatgtcattctttgtaaactagcaaaaggtatcaatatatggacacaattttgacaaatgtattaatattgtttcaccattgtgtattaaaatagacacatacgtttttttttgtttttgtattttttgtacatcacagctgtttcgagtaaatattattaatatatttgcccctgccttattttggcttgattactttgacatttcctttttgttgggataaaacttgtcggtgtagcgctgtatagaacttaca

SEQ ID NO: 5493 - DNA, 2474 bp, Zea Mays
ctcttaatatgttgtacagattagccatggtcgattgtcagttcgctataccagtagtgattgactgatttttgtcactttcgtttttagggagtaggaacactagattcgtagactgtcgggccgcatcatcgccgatatgtggcctcacccgtgatataatcccttgcttgggttgggtgaacggtgaaaaagcgggagcggccgatcgggagctgctgggagctagttgggagccaaggcgtcgtcgtaggttgccgtctcgctgccgcccgccggccacagttgctgcggtgccgtcggccatatctgacggctgaccccttaccggcagttatcctcgtccctcacgcttccattcctgcgcctctcgaatctcgatggagggccgcctcttcgataagcccttgaacccgaataagctcctcaaggagcaattcgtgagcaacctgacggggtcttccctgctggagatcgcggcgctctccactgtcgttccggcattggtagttctcagaaagtggagcagcagagataattctaggaaggagtcagcaaagaaaaatgatgatcaagttcatactgttcgtaaagattggatgcagtacttctctacactaggtgtagattatctcactgttgtattgccaattattttggttttcacagtcttatcggaatgggtttttatgtgtgctatttctcttgtaatcctgatatccatttacatcatgtttaaaaggtctcagtttcatcttaaagatggattcagtcagctgcctttgctcagggcagacatatcttcttaccgtgtctcagtggttctggtgacatgtttgtgcatattagctgtggacttcaaaatatttccaagacgctatgctaaggctgaaacatatggtagtggcatcatggatcttggagtaggatcttttgtagtggctaatgcactggtatctagacaagcacgaaatatagcctcaatgagtttcaaggcagttctttgttcgataagtccactcttatctcttggctttgctcgcattatatccacatggggtgttgattatcaggtccatgtaggagaatatggtgtgcattggaacttctttttcaccctcgcagctgtctctatccttacatccgttgtcagaattcatccaaaacattgtggcttagttggtctgcttatccttgctggataccagatttggctgtcttctggattgaatgagtacctcatttctcacaaaagaagtgctgatataatcacccagaataaggagggcatttatagcatccttggatactggggtatgtttctaattggtgtttctttgggtttctatctgttcgttgacactagttcaaagggcaagaaccggaacactcaagtcatgcaaatctgggttcttgctgcttctttttggattttggcaatcatctttgatagctacattgagagagtttctcgtcgaatgtgcaacttcgcttatgttatgcttgtttttggccagaattttcagaggacatatattggacttctctttaacaatatgaactttatctgacagtgcctacaaattaacctataatgaggccaaagaaaggttttatctatcctcacattagctgggtttgcctcatataaaaagaacttggttcttgaagatgcattcaatgaaaatatgcttggctccttccttctggcaaatatccttactggtctggttaatctctcagttaacacgctctctgcctcttccttcactgccttcatgattctgtcagtatacgcctttactttatgcatggttactggccttacccatttttgtggtgttaggatgaaattctggtgaattgtaagctaccatttgatatgatgtattcattcattaacttgtcaacaaactggtagctagcttgcttgaaatataatactacgtctgttcttgaatatttgtcgcccggtagtttatttttcaactaaaacgtgacaaataaaaaagtctgaataatttttagggaaagaagccaaattgctatcctaattagttgatccagttattaactctgcctagactcgggagcttacttctttcatgtgtgttcaaggttctttgtgtctcatcagaaacttcctagtttccttcatttcatggtacaacgtgtctgctggtattaatcaataccgctatttacttttgacctaaagacgacacatccacccacggtatatgtgttgacgaattgaagatggtctgtcaagagtttgctgtttcagtatttaatgtcagtcagaatcaggcttgaagtaccataggttcatactgctacagttacccacttgtcacagataaaacagtgggtccaggaaagcagtgctgtagtcgaatgttacttgctggatttctgcagatgacagagagaatttgagcactatgacattcatgacagatagtacatactcg

SEQ ID NO: 5494 - DNA, 2678 bp, Zea Mays
ctcttaatatgttgtacagattagccatggtcgattgtcagttcgctataccagtagtgattgactgatttttgtcactttcgtttttagggagtaggaacactagattcgtagactgtcgggccgcatcatcgccgatatgtggcctcacccgtgatataatcccttgcttgggttgggtgaacggtgaaaaagcgggagcggccgatcgggagctgctgggagctagttgggagccaaggcgtcgtcgtaggttgccgtctcgctgccgcccgccggccacagttgctgcggtgccgtcggccatatctgacggctgaccccttaccggcaattcgtgagcaacctgacggggtcttccctgctggagatcgcggcgctctccactgtcgttccggcattggtagttctcagaaagtggagcagcagagataattctaggaaggagtcagcaaagaaaaatgatgatcaagttcatactgttcgtaaagattggatgcagtacttctctacactaggtgtagattatctcactgttgtattgccaattattttggttttcacagtcttatcggaatgggtttttatgtgtgctatttctcttgtaatcctgatatccatttacatcatgtttaaaaggtctcagtttcatcttaaagatggattcagtcagctgcctttgctcagggcagacatatcttcttaccgtgtctcagtggttctggtgacatgtttgtgcatattagctgtggacttcaaaatatttccaagacgctatgctaaggctgaaacatatggtagtggcatcgagtttcaaggcagttctttgttcgataagtccactcttatctcttggctttgctcgcattatatccacatggggtgttgattatcaggtccatgtaggagaatatggtgtgcattggaacttctttttcaccctcgcagctgtctctatccttacatccgttgtcagaattcatccaaaacattgtggcttagttggtctgcttatccttgctggataccagatttggctgtcttctggattgaatgagtacctcatttctcacaaaagaagtgctgatataatcacccagaataaggagggcatttatagcatccttggatactggggtatgtttctaattggtgtttctttgggtttctatctgttcgttgacactagttcaaagggcaagaaccggaacactcaagtcatgcaaatctgggttcttgctgcttctttttggattttggcaatcatctttgatagctacattgagagagtttctcgtcgaatgtgcaacttcgcttatgttatgcttgtttttggccagaattttcagaggacatatattggacttctctttaacaatatgaactttatctgacagtgcctacaaattaacctataatgaggccaaagaaaggcaaggtgttaggtgcatattattagatgcattcttatatgctttaaatattttgtaatctttcagtcagtatgtcgtacatgtttccacttgatataatgtgcacagaatggttcaaaattccactattgattgctttgcctgctaatgttactgttttatgatttgggagcaactttgccatattatcagacccatggatagtagcaagggggtttgcaaagccatgaaatttactacttacccaagtaaataaacctgctttcctatgagtaccaacaatgggtttgtctggtttttttctttagttgtttggtctattatttttgttcacgcttcaggttagcttcactgttcatgctgactgattgtccaatataggttttatctatcctcacattagctgggtttgcctcatataaaaagaacttggttcttgaagatgcattcaatgaaaatatgcttggctccttccttctggcaaatatccttactggtctggttaatctctcagttaacacgctctctgcctcttccttcactgccttcatgattctgtcagtatacgcctttactttatgcatggttactggccttacccatttttgtggtgttaggatgaaattctggtgaattgtaagctaccatttgatatgatgtattcattcattaacttgtcaacaaactggtagctagcttgcttgaaatataatactacgtctgttcttgaatatttgtcgcccggtagtttatttttcaactaaaacgtgacaaataaaaaagtctgaataatttttagggaaagaagccaaattgctatcctaattagttgatccagttattaactctgcctagactcgggagcttacttctttcatgtgtgttcaaggttctttgtgtctcatcagaaacttcctagtttccttcatttcatggtacaacgtgtctgctggtattaatcaataccgctatttacttttgacctaaagacgacacatccacccacggtatatgtgttgacgaattgaagatggtctgtcaagagtttgctgtttcagtatttaatgtcagtcagaatcaggcttgaagtaccataggttcatactgctacagttacccacttgtcacagataaaacagtgggtccaggaaagcagtgctgtagtcgaatgttacttgctggatttctgcagatgacagagagaatttgagcactatgacattcatgacagatagtacatactcg

SEQ ID NO: 5495 - DNA, 2736 bp, Zea Mays
ctcttaatatgttgtacagattagccatggtcgattgtcagttcgctataccagtagtgattgactgatttttgtcactttcgtttttagggagtaggaacactagattcgtagactgtcgggccgcatcatcgccgatatgtggcctcacccgtgatataatcccttgcttgggttgggtgaacggtgaaaaagcgggagcggccgatcgggagctgctgggagctagttgggagccaaggcgtcgtcgtaggttgccgtctcgctgccgcccgccggccacagttgctgcggtgccgtcggccatatctgacggctgaccccttaccggcagttatcctcgtccctcacgcttccattcctgcgcctctcgaatctcgatggagggccgcctcttcgataagcccttgaacccgaataagctcctcaaggagcaattcgtgagcaacctgacggggtcttccctgctggagatcgcggcgctctccactgtcgttccggcattggtagttctcagaaagtggagcagcagagataattctaggaaggagtcagcaaagaaaaatgatgatcaagttcatactgttcgtaaagattggatgcagtacttctctacactaggtgtagattatctcactgttgtattgccaattattttggttttcacagtcttatcggaatgggtttttatgtgtgctatttctcttgtaatcctgatatccatttacatcatgtttaaaaggtctcagtttcatcttaaagatggattcagtcagctgcctttgctcagggcagacatatcttcttaccgtgtctcagtggttctggtgacatgtttgtgcatattagctgtggacttcaaaatatttccaagacgctatgctaaggctgaaacatatggtagtggcatcgagtttcaaggcagttctttgttcgataagtccactcttatctcttggctttgctcgcattatatccacatggggtgttgattatcaggtccatgtaggagaatatggtgtgcattggaacttctttttcaccctcgcagctgtctctatccttacatccgttgtcagaattcatccaaaacattgtggcttagttggtctgcttatccttgctggataccagatttggctgtcttctggattgaatgagtacctcatttctcacaaaagaagtgctgatataatcacccagaataaggagggcatttatagcatccttggatactggggtatgtttctaattggtgtttctttgggtttctatctgttcgttgacactagttcaaagggcaagaaccggaacactcaagtcatgcaaatctgggttcttgctgcttctttttggattttggcaatcatctttgatagctacattgagagagtttctcgtcgaatgaggacatatattggacttctctttaacaatatgaactttatctgacagtgcctacaaattaacctataatgaggccaaagaaaggcaaggtgttaggtgcatattattagatgcattcttatatgctttaaatattttgtaatctttcagtcagtatgtcgtacatgtttccacttgatataatgtgcacagaatggttcaaaattccactattgattgctttgcctgctaatgttactgttttatgatttgggagcaactttgccatattatcagacccatggatagtagcaagggggtttgcaaagccatgaaatttactacttacccaagtaaataaacctgctttcctatgagtaccaacaatgggtttgtctggtttttttctttagttgtttggtctattatttttgttcacgcttcaggttagcttcactgttcatgctgactgattgtccaatataggttttatctatcctcacattagctgggtttgcctcatataaaaagaacttggttcttgaagatgcattcaatgaaaatatgcttggctccttccttctggcaaatatccttactggtctggttaatctctcagttaacacgctctctgcctcttccttcactgccttcatgattctgtcagtatacgcctttactttatgcatggttactggccttacccatttttgtggtgttaggatgaaattctggtgaattgtaagctaccatttgatatgatgtattcattcattaacttgtcaacaaactggtagctagcttgcttgaaatataatactacgtctgttcttgaatatttgtcgcccggtagtttatttttcaactaaaacgtgacaaataaaaaagtctgaataatttttagggaaagaagccaaattgctatcctaattagttgatccagttattaactctgcctagactcgggagcttacttctttcatgtgtgttcaaggttctttgtgtctcatcagaaacttcctagtttccttcatttcatggtacaacgtgtctgctggtattaatcaataccgctatttacttttgacctaaagacgacacatccacccacggtatatgtgttgacgaattgaagatggtctgtcaagagtttgctgtttcagtatttaatgtcagtcagaatcaggcttgaagtaccataggttcatactgctacagttacccacttgtcacagataaaacagtgggtccaggaaagcagtgctgtagtcgaatgttacttgctggatttctgcagatgacagagagaatttgagcactatgacattcatgacagatagtacatactcg

SEQ ID NO: 5496 - DNA, 3052 bp, Zea Mays
tctcacacctctcctcctcctcctcctccctctccattttccaatcccccgatcgagcaaccaccagcccggcccgtcttgctccatgcataaggtctccgcccgccatgccgcaccgccgccgagcccttaacccgacgctgcccccgccacctcccgccgccaccgcgttccacctcggcggggacgaggcgcggctgccgctcctcgcggactacgcgctgctccaccagcccgccgcctccgccgtcgacgcgccggcgtcgtccgagtggagcgccgggagcgccttcaccgccacctccgacgcggccaccaccaccgcctcctccaccgccacggcgccgccgggctcctcccagtcccagctgctggccgccggcggtagggacagcgacacgtgggtccgccgcgccagggagggctactacctccagctgtccctcgccatccgcctcacctcgcaggccttcctcgccggcgctcctcccgcgcccgacctcctcttcggctgcagccccgtcgtcgtcgccgaccaccacgccgctgctggcgacggcgcggatgattcggaggccatctcctaccggctctgggtgaacgggtgcctgtcgtggggcgacaagatcgcgcacgggttctacaacatcctgggcatcgacccgcacctgtgggccatgtgcaacgtcgcggaggagggccgccggctgccgtcgctggcggcgctgcgggcggtgggcgccagcgagtcctcgctggaggtggtgctcgtcgacaagggcgccgactcggtgctcctcgacctcgagcgccgcgcgctcgacctcgtccgcagcctcgccgtcctcgtctccgaccacatgggaggtgcgttgcgatcggaggatggggacctgtacctgcggtggaaggcggtgagcaagaagctgaagaagaggcagaagtgcgtcgtcgtccccattggcggcctgtccataggcttctgccggcaccgtgccattcttttcaaggtacttgcagacttcatcggcctgccatgccggattgcgcaaggttgcaagtactgctctgcgcctcaccgatcatcttgccttgtcaaagttgacagtgagagaagatacgtaagggaatacgtcgtggaccttgtagttgagccggggagcatcagctgcccggactcatccatcaacggccagctgctgtccaccgtgccttcacctttcaagacttcgtccgcagtcggctcagggaactacacaacaccagtcgcagcctggaaccaatcaacagccggtgaacgtcgcaacatggtatcatcgaatccccagtgctcagttgctaggtgccgcgttgtggagaacagctctgctcaggtagccagaagcaaagaagacttggtgccgaagtgtggacagatcacacagaatggaaactgtaatggcgtatcagtgttacaagtgtcgatgcagttgaaggcaatggacatcggtgctgagaacggcaacaaggagaacgtccctggtgctgatcttccgaaacccatgagcattgagccgccttttgccgtagattggctggagatatcatgggaggagctcgagctcaaggaacgcgtgggcgccggttctttcggcacggtttatcgcgcagactggcatggttcagatgttgcagtaaaggtgcttacagaccaggatgttggcgaagcccagctgaaggaattcctaagagagattgctattatgaaacgagtccgccatccgaatgtggtattgttcatgggtgcggtgacaaaatgcccacaattgtcgatagtgacagagtatttgcccagagggagcctcttccgactcatcaacaaggcagctaatggagagatgctggatctcaagcgtcgtttgcgcatggcactagatgttgcaaaaggcatcaactatctccactgcctgaatcctcctattgtgcattgggatctcaagacaccaaacatgctggtcgaccggaactggtccgtgaaggtaggtgactttggcctgtccagatttaaggcaaacaccttcatatcatccaaatcagttgctggaacaaatggatggcgcctgagtttctgcgcggcgagccatcgaacgagaagtgcgatgtttacagcttcggcgtcatcttgtgggagctcctgacgatgcagcaaccatggagtggcctaggccctgcgcaggtagtaggagctgtagcgtttcagaacagaaggcttccgattccgaaagataccagtccagaacttgctgctctagtggaagcctgctgggatgacgatccaaggcagcggccttcgttttcgagcattgtggatacgctgaagaagttactgaaggctcttcttggaggttcatgaggactcttgctggatgtcttggctgccattgtgtcctccatttttctcttgttttctcattccttttctgtctttgtccatgctaaactacggaaaggaataaggctgtttgccttaggaatggagatgagatagccgaagcagcacaagtgcattgctgcctcgagtgggctaggtcacttatctttttatcctctcttgcctttgtacagcgattcctagtgctaatagaaattgctcgtttgcctcatgggagttggtgatctgaatatctgctatccctgaatgttctaattggtcctattattggttgtgcaataagactggatatatgtgctctggtctctaggagaaaggaaagacagttttgacgccaaattagaatagatcacgggatatagatagagtttctatacaggtctcgaacagaactcagttgagatctgagtggctagagtgagcaaaacaactacggggaactaatagttagggaaaactatcttcttcctgtccaacagttcaattgtgattttgtccttgttttctttttttactatgtagatttatcctcactattttaaaatgaatcctccatttaccctggtttcgatgtccgttaaatgagcatagataaatgacaaaggcaagagttggggggcc

SEQ ID NO: 5497 - DNA, 793 bp, Zea Mays
atgattcagcttgattcgttcagtacttttgattcgggtgacagtaaaggaactatcattgacagcgggacaacactggcatatcttccgagggaagtttataggactttgctgactgcggtatttgataagcatccagatttggccgtacgtaattatgaagacttcatctgtttccagttttccggaagtttagatgaagaatttcctgtaatcacctttagttttgagggagaccctacactgaatgtttacccacatgattaccttttccagaacgggaatgatttatactgtatgggattcctggatggtggagtacagaccaaagatgggaaagatatggttctcttaggagacctggtcctctcaaataaactagtagtttatgacttggaaaaacaagttattggatggacagactacaactgctcctccagcattaaaattgaggatgacaagactggctcagtgtacactgtcgacgcacaaaatatctccgctgggcggaggtttcaatggcacaagtccttaattctgttgttagtgacatcaatctggagctgtctgatgttatagcccagccctggaatctaggactaaaacatggggaaatgtattctctttaacaaaaatagctgagttcagaagttcaacaaagagtgcaaaaatattatacagattgccccttgtgacttgcacgtaaattatagcaacctatcgagctaccaaaatgacttgaacttaagttggctgatgtcagggaaatacttgctgaacatgcgattcaaca

SEQ ID NO: 5498 - DNA, 2704 bp, Zea Mays
gccttttcctcctcaacccgacacgctctccgcgccgtcgtcgaccaatcgaatggaggcggagcagcaaaagcagcagccccagcgcccgcgccgaaaggggctgaagcggaagctggaggacgaggcatccgccgccgtcgccgccgccgccacatccgcagcagcatccgccgccgccgcctcgctcggcagcgcgggcgccgacgatgacaacgaggaggaggacggctcggcgggcacccccgagatctgctgccgccactcccacgcggctcttgcccgcgaggtccgcgcgcaggttgatgccctcgtccgctgcgcctcctcgtggcgccacgccgaccgcgccgccgccaagcgcgccacccatgtcctcgccgagctcgccaaaaacgaggaggttgtcaacgtgattgtggagggcggtgccgtggcggccttggtgtgccacctagaagagcctgctgtggcggcgccaacgcaggaggaacaacaactgcggccgtttgagcatgaggttgagaagggcgctgccttcgctctgggcctcctagctcctgaacatcaacaacttgtagttgatgctggtgcattacctcctctagtgaaactcttgaaaaggcagaaaaatactacaaattcgagggtggttaatagcgttatcaagagagcagctgatgcaattaccaatcttgcacatgagaatagcaacattaaaactagcgtcagaatggaaggtggaatcccaccacttgttcaattgctagaatcacaggatcttaaggtgcaaagagcagctgctggggccttgcgtactttagcctttaaaaatgatgaaaataaaactcagattgttcaatgcaatgctttgccaactttgatcttaatgctgcgatctgaagatgctgcaattcactatgaagcagttggtgtcattggaaatttggttcattcatcaccaaagatcaagaaggaggttcttaatgcaggggcactgcaacctgtgattggattattaagctcatgttgtacagaaagccaaagagaggctgctttgttgctagggcaatttgcttcggccgactcggattgcaaggtccatattgtgcaaaggggtgcagtctgtccactaattgaaatgctacagtcggctgatgtccaactccgggagatgtctgcttttgcacttggcaggcttgcccaggacacacataaccaagcaggtattgaggactatgtatctgacttcattaaagtaggaggtgtccaaaagttacaagatggagaatttattgtccaggcaacaaaggactgtgtggcaaaaacattgaagaggttagaggagaagataaatggacgagtgttgaaacacttgctttatttgatgcgagtaggagagaaatctgtgcaaaggcgtgttgctctagctcttgcacacctttgtgcccctgaagatcaaagttcagtttttattgataataatggtctcgacttgcttcttgatcttcttatttccatgagttcaaaacatcaacaagatggctcagcagcattatacaaattggccaacaaagctgcagcactttctcccatggatgctgcccctccatctccaacacctcaggtttatcttggtgagcaatacgtgaatagttcaacactttcagacgttactttcttggtagaaggaaagcgattttatgcacacagaattgctttgcttgcttcttctgatgcatttcgtgcaatgtttgatggcgggtacagggaaaaggatgcaagggacattgaaattcctaatatcagatgggacgtctttgaactcatgatgagatttatctatacagggtcagttcaggttaccagtgaaattgcacaggatcttcttagagctggtgatcagtatctcttagaaggcctcaaacgcctatgtgaatatactattgcgaaggatgtgaatctagataacgtatctgacatgtatgacttgtccgaagcctttcatgccgtgtctctgagacatacgtgcatcttgtacattctggaacattttaacaagatctgcaccagagccggttctgcacagctgatccagcgtgttattccagagctccgcaatttcctaaccaaggcactgagttcatcaagaagcccaagtacaaccgacgacaggaacttgcagacttgattttgagtcccaattcattgacactgacaccgtcatctgaccaaagttgctggacatcctgtacagtgaagtttctggcgctgcgcatttgatggcatctgttgtggtacatggtggccggctcctcaaaattaacatcagcagcttaacaaacttttgtaagatttagtggaggatatgggtaaagagaacccgcgtcttagtcatgcctcgaccagcttacactgggataggctgtagttgtgaatggtcttggccgtaattcgtcggtctctgctttgtttctgagttgtgtttgtttcaagttcacagttcagtgtatgcctgcatatgtttaaagtatgaagcttgagcaagttagaaattagcccctgtagtgataaagctgtctgtgtagatccaccgattggagttaccgaaacaactatgtaacatcatagatgacattagatgcatgataattgctggtaaagcttggtcaaaatatgaggtagaaccactgatcatcactta

SEQ ID NO: 5499 - DNA, 1675 bp, Zea Mays
tatcttatcttaaggctatctgttcgtatgataaaaaaaagtattccttttgaaacaaaaaagaagacaaaatgaatggatcaaataaaaggagaaaaaataaataaaaatagcggttcctccgcgggtaacgggcatcccgccatcgctctgcacttctgcagtctgctctggcttataataaccggcaccttctccttcctccgatctcctcgcctccctcctctctcccagatccgtctcccggcgtcagacgcgcatctccagcaatggcggacgagaagcttgccaagctgcgcgaagccaccgccggcctcacgcagatcagcgagaacgagaagtccggcttcctcagcctcgtcggccgctacctcagcggcgacgaggagcacatcgagtgggccaagatccacacgcccaccgacgaggtggtggtgccgtacgacaccctggagtccccgccagaaggcactgaggcgaccaagaagctgctcgacaagctcgccgtgctcaagctcaacggcggcctggggaccaccatgggatgcaccggacccaaatcggtcatcgaagtgcgcaacggatttactttcctcgacctgattgtcatccagatcgagtcactcaacaagaagtacggcagcaatgtgccgctgcttctgatgaactccttcaacacccatgacgacaccttgaaaattgttgagaaatacacgaattcgagcattgaaatccacacattcaaccagagccagtaccctcgtgtggtagctgacgagttcttgccatggccgtccaagggaaagactgataaggatggctggtaccctcctggccatggtgatatcttcccatcattgatgaacagtggaaagctcgatttactactctcacagggaaaagagtatgtgttcattgcaaactcggataacttgggtgctattgttgacatgaagatactgaaccatttgatccacaagcagaatgaatattgcatggaggtcaccccaaaaactttggctgatgtaaaaggtggcacactgatctcctacgaaggaagggttcagcttctggagattgcacaagtgcctgatgcacatgtgaatgagttcaaatcaattgagaaattcaagatattcaacaccaacaatctgtgggtgaacttgaaggccatcaaacgccttgttgaagctgatgcactcaagatggagatcattccgaatcctaaggaagtcgatggtgtgaaagttcttcagctggaaacagcagctggtgcagcaattaggttctttgaccatgccattggtatcaacgttccaaggtcccgcttcctaccagttaaggcgacatcagatttgcagctagtacagtctgatctatataccttggttgatggcttcgttacacgtaattcagccagaacaaatccatcaaatccatcaattgaacttggtcctgagttcaagaaggttgggagcttccttggtcgcttcaagtcgatacctagcattgttgagcttgacagcttgaaggtttccggtgatgtttggttcggttctggaattgtactgaaggggaaagtgaccatcactgcaaaacctggcgtcaagctagaaatcccagacggagcagtgattgggaataaggtactggcgcagcgtgatgccaaagtaaa

SEQ ID NO: 5500 - DNA, 1683 bp, Zea Mays
gactggtggaccagacccagcgaccgaacccgactcgatttcccaactccaaacctccttgcccctccgtgactcgccttcctctcctgactcctccgccttggcccgccgtctctcgccgccccggccccaacccctctcggactaggtgagggggccggctgcccagcgtcgtcgccggcgagatcttcccaccgccgctggcaatggctgccccgcacgacgaggccgcggcgtgggcggaggaggcggcgcgccgggtctgggccggcgccgtgccgctccaggtccacctccacgacgccgacgtcaccgcgctacccccgccgccgcccttcctgactttgggaccaagaattgggtatttgcccctcttgatacctgttataagggctcatttcagcaatgcactcccacctggtgttgacactgtttggtttgaatataaagggctgcctttgaaatggtatgtaccaattggtgttctttttgatcttctatgtgcagatccagaaagaccatggaatctaatagtccattttaggggatatccctcagaaatcttgtcaccatgcgagggtgaagatagtgtgaagtggagctacatgaattccctgaaagagcattctctctctctattcaggccaccttcatcattactgggaacagtaagagtgtgatgaatatgtcgcatgctgatcaagtcgctctgtgggaatctgtaatgaaaggtaacttagatgggtataaaaatatctccaccaggcttaagcttggaccatttgaagatgatgtgttagtacggacagcctccgtggagcggcaacgtcaacaaaattctgatgaacctgaatctcctggatctagcaaaccgtgcagggtccctgttcgattatacgtacgcaatgttcaagaagaccttgagtacatagaacatgcagttcctgtcagtgactgggaaaacgtgtcctacataaatcggccatttgagactcgcaaggctgaaggtagaagctacatcaccctggaacatgcgttgcaaacattgcttccggagttcttcagctcaaagcccccaggcagcgctgacggctcccaacacgcaggcgcaatggacgcagccgcagacagttcagatgccaccaactcttcaagtcgttctcaggaggcagagcaagccctggcaagtccagcagaggcgggttctgccaagagagcgaaagtgaagctggtgagggtgcaaggtgttgagctcgacatggacatcccgttcctgtgggtcgccgaccacctcaagaaccccgaatactacgtccacatctgtgtatacgtcggcactagaaaacaatagagataagagtacatggggaaattgttagatactgcgttaggagtgtgtcccagaaatcattttctttgttctttggttattacatgtgctatcctgtgtgcagatacagacgctgaaatttgtaacccttttggatgcacagtcatggaaggatggaattggatggtgaaccattttgtgtgtgtgtgtgtgtgtgtatccgatcgacgtattgcaatatatatcctgcctggagcatagcagaattctttcgttgtagaacaaacacatgagctctgaacctgaccattctgatggtcgctgtcgctgacatgaatgactgaatgccatct

SEQ ID NO: 5501 - DNA, 2575 bp, Zea Mays
catcgtgctgcggtgtccgagtcacatcgtcttcccggaaccaacaagtcgttgggtctgaccgtctgccgtggccgtaccgggccgccctgttcatcgggtcaaatccttcgtcttcttcctcgtcgcatcctctccacctaatccacaatccggaacctcaccgtggagaaccccagatcaaaccctttccccgcccattccccttcgcacttccactctcccagtcctccggtgcgattcgtttcttccttacttccctgcccgcccgagggagaagacgaaatcgggcgaggaatccggccgccagggtttcttgatccgggcgcgtgattcgtcgtgcccaggcaccagtgagaaatcaaatcaagaacacgccagcggaagtgagacgagggcgcggggaggaatcaagatcgcttctttgagctgccagttcccccgcgccaatgccggatccggccggcggcgccgggctggcatgttccctctaactgcccctgtccgccgccgcggctcccgatgctcgtgtggtcttcgggagcaggagagggagcagcggccgtcgtgggcggcggctaggagcgaagatgcagatccggctgtcgccgagcatgaggagcatcaccatctccactagccatggcctgctagacttgatgaggctcaaggtcgccgcgcgacacttttcctaccgcaccgtcttccacaccgtcctcatcctcgccttcctcctgcccttcgtcttcatactcaccgccatcatgacgctagagggcttcaacaagtgctcctcactagattgtctaggaagacgtttaggtccgcgccttcttgaggcttgtgagggatttatatgtgatgcttgataaagtaaattctgaggaagcacctcttgacttgaaggttccagaaacttttgatgaatttatctgggacatgaagaataatgattatgatttaaggtcatttgcttttaagctgaaggctacgatggagagcatggataaggaattgaggtcatcaaggctatcagagcagttgaacaagcactatgctgcaattgctattcctaaaggcctttattgcctttcattgcgtttaactgatgaatactcctcaaatgcccttgcaaggaaacaattaccgcccccagagttggtgccttgtctttcagacaactcctatttccattttgtgttagcatcagataacatccttgcagcctcagttgtggtcagatcaacaattagatcatcactgaagcctgagaggattgttttccatgttattactgataaaaagacctatcctgccatgcattcatggtttgctttaaattctctcagtcctgctattgttgaggtgaaaggtgttcatcaatttgattggttaacacaagaaaatgttcctgtacttgaatcaatagaaactcagcgcgctgccagagatcgttaccatggaagtcgccgcccaataaccagtgctaatgatagcccaagggtttttgctgccaagcttcaggcaggaagtccaacatatactaatgtgctcaatcatattcgaatatacatgcctgagttgttcccaagcctcaacaaagtcgtatttcttgatgatgatgttgttgtccagcatgacctatcaccactttgggatattgatctatctgggaaggttaatggcgctgttgagacttgcagaggtggagatagttgggtgatgtctaagaggttcaggaattatttaaacttttctcatcccctcattgcaaaaaactttgatccttcagagtgtgcttgggcatatggtatgaatatttttgacctgaatgcatggaggaagacaacaatcaaagacaaataccatcattgggtcaaggagaacctgaagtcaaacttcacactttggaggctgggaacattaccaccaggccttatagcatttaaaggccatgttcacccaattgatccatcatggcatctgttaggtttggggtatcaggaaaagacagatatcagtagtgttgaacaagcagcagttatacattataacgggcaaagtaaaccatggctggagattggttttaaacatcttcagccattttggacaaaatatgtgaactactcaaatgaattcttaagaaactgccatataatggagccacagttgtagattgtcgtgacaaaataaataaaaagcatatatcaagtgaaattaaattcgttattttggaagtcaacatcagagagtttatgaagggtaactggggagctcagtaacccccctccatggtcatatgcgttgatggtgaatatccaatgaacagagcatctttcccctcataggaccccttcccttttaatttattccatttgtatcatagctcatgaaattatgatattgtttaggatggttcttttgtattcgatggagcaatatatgagttgaattgatggtagtcccatcattattgtaattgattaagagtatacacagttcatgtgaaaagcatggattttgattatgcaaagcaaaccttgtatacttgttacttatttttagattctctcaa

SEQ ID NO: 5502 - DNA, 1348 bp, Zea Mays
aaataatgttacaaatggaaaagtgagaagcaacttctttggactaaaaaaatccaattttctccgcgacgaaggagaggcatccctcccttccgcgtggtgtgctctctgttcctacgccgtttcctctcccgactctctcctcgccggcgacgccgcggagtaggtgcaacagaaactgctcgaggcggaggcggagcctgcggctgcacagacatgggtgatcacgaggcgcgcggtgatgacttcgagaagaaggcggagaagaagctctcgggctggggcctcttcggctccaagtacgaggacgccgccgacctcttcgacaaggctgcgaactccttcaagctcgccaagaactggagcagagctgcatcagtttacatcaagattgctaactgtcatttgaagggagatagcaagcatgaggctgcctcagcgtacgtcgaggcagcaaattgctacaaaaagttttcacctcaggaagctgcgcaagcgctaaaccagtctgttaatcttttcttggaaattggtaggttgaacatggctgcaagatacagcaaggacattggtgagatatatcagcaagaacaagatttagagaaggctacagattacctggaaagggcagctgacctttttgacagtgagggacagtcgtctcaatcaaacaccatcaaacagaaagttgcagaaattgctgctcagttggaacagtacccaaaagcaactgagatatttgaagcgatcgctcgtcagtcaatcaacaacaatcttcttaagtatagtgtcagaggaattcttcttaatgctggcatctgtcaactatgtagaggtgatcctattgccatcacaaattcattggagcgataccgaaattgacccgactttctctgggacacgtgaatacaagcttttagctgatcttgctgcatctatggatgaaggggatgttgccaaattcactgatgcaatcaaagaatttgatagcatgacacgtctggatccttggaaaaccaccctgctgctcagggcgaagaacgagctgaagaaaaaggaggacgatgaggacgaccttacataagtattgtagtaaaaagaaatgaacgtcaatttgggttctactgttgatgtgactgccagtttcgttgacttgatgccagagtgaaaattagtaccgagatgcttgtttctggggttctgttcttttcaaatctttagaccttatttcctattgtacttctatacctcgtattaataatctaagcggtttccaatggattgtatcattgttctgctattgtagctttatcaagttaattcaattgttagaataattggatgagtg

SEQ ID NO: 5503 - DNA, 1710 bp, Zea Mays
cggagacggccacacccgccaccaatcctcctgctgcaatacgtgccatttctttcttcgcttgtctcccgcgaaaaaatatctacagcggctggacctacatgtcacagactctaatgcagtgcgggaggctacatataattagctgatgcagaaaataagaggagattgttcatcgagctgtcttgtccccctcttggcctcttctttccggcgatgggcgccggcgtcctcctcggcgacgccgccggcctgggggcccacctcgccgtacgccgccggaggacgcgcctctaccttcgcaactgggcctccaagcccctgcgcccctcggtctggctcggcgtggccgcctgtgtttcacagaatcgcgaccgccgtggccacgtgaccaggttctccgcctccgcctcgagcggcagtgacgagcccggggagctgtccgaggatgaggcgcagagggagtgggaagcggagctgaatcgccgactgaaggaggccgaggagatggaggagttggagcgcaccgccgagcagctgcaaagccaggccgccgccgaggcccccgaggagtcggaggaggagaagcgcgagcgtgtccgccgcgagctccagaaggtcctactcctacccttaacctttagtaaccagagctcgccttccttcacacactcactagtcattcacttcacacgccaattcttcctcaccaaacacaaataccactactacacactcctcctccttcaagttccacatgttctctaccatttgtgacgcacatgcacctggttctagttttagcgctgtttgcaggagggtgagggtagagtgagacaaaatcattttgttgcgcgagctttgcaggtagcgaaggagcaagcggagaggagggagacggcgaagcaaatgtttgagttgggtcaaaaggcgtacgggaaaggaatgtatggacgatcaattgaattcttggaggctgcgctcactatcatacgtccctcctctctactcggtggcgagatccaaatttggcttgcaatggcatatgaagccaataggaggcacaaggattgcattgcattgtacaaagagttggagagtagccaccccatgatcaacatcaggcgccaggcagctgagcttagatacattttagaggcacccaagttgaagatatcaaatgacgaggtggtcacaataccacaaattgggagcagctgggattggtatgctggaacatggagtgacaaaatcaaggaacaagaggacaagaaaaggaagatgagtgctgctagcaaccaagttcaaccttctccaaacatctttggagacctctctttcttgcgaccgccaaatgaatggaagaagagtgcatgggtggttgttaccttgtggatccttttgataggaacagcaatctatctgcaatcatgaatggctcctgcagctctgaaacaagccattcacatctctgcgaggcactggtccatggttcaacagaacccagagatgtcgctaatatggccgtgtctcagactgttgcatttgttgtttttttttgctgcagtgtaaatactaactactgtaactagcaatacaagcagatgccatctagttcaattgattagaaatcaatctgtctgctcatatacacttgatgatattgcatctggagttgatttgatattaccgtggtaggagtttattcta

SEQ ID NO: 5504 - DNA, 4381 bp, Zea Mays
ctacccacgcgggcgggagcaggaggtcctcttctccgcccgctttgcgctgccttgtctgcgctcgattccccgcggcctcctccctctcacacacgccttccctctaggctccagcgccgcaccacgccaccagggcgggcagcccactcctctcgctgctccactccacctctatcctacgcgctctttctgccgccgaatcagcactactcatcacccggccagggaagagagatattttctgctctggccctatttctggagggcgggagggggaggcggcgaggtgacgtgacggttgcgactggcgccgaagacttgcgtgagtggtaactggaacggaatctttctcctcgactgctcggtgctggcctcgcccctgttgcggcgccgctcgtgtccccctgttgctgcgggcgctggtcggctcgtttgacctcgtctgcgtagattcgtcgaagaggtgggccgtggctgtggctgaggctgagtggggcgagcccggaggacttgagaagcgatgcagagggaggtgggcccgcaggtggcccctccgctcttcatccaccaccagatccagccgatgcctccccacgccgcggccgccgtgaagaagcgcggccagccgtgtccggccgccgcggcggcgcccgcggaggccgctgcggggaactggaaccccaggctgtgggactgggacagccgcgcgctcaccgccaggccgtcggccgatgcactccgcctcgccggtggccagccccagccccagccccagcaggcggccgaggtgcaccgtcagggggccggaggaagcggcgcgctgaagctccagctcggcccgcgggaaggctccacggccccgacggacgccagcccgacggctcccgcggcgtcgctgtcgccgtccccgcctgcttcggggcaggacctggtggtcaggccgagcaagcgggtgcggtcaggatcgccaggcagcgcgggcggtggcggtggcggggctgccaacggaggcgcgggctacccgatgtgccaggtggatgagtgccgagcggatctgaccggcgccaaggactaccacaggaggcacaaggtctgcgagacccacagcaagaccatcagggccgtcgtcgccaaccaggcgcagcgcttctgccagcagtgtagtagatttcacccactcgcggagtttgacgagggtaagaggagctgccggcgtaggcttgctgggcacaaccggcggagaagaaaaacccagccagcagatgtttcttcgcagttgctgctacctggaaaccaagaaaatgcagcaaataggacgcaggatattgtcaatctaattacagtgattgcgcacttgcatggttctagcgtcggtaaagtgcctagcattcctcccataccagataagcagaatctggttgaaattatcagcaaaataaattcattcaacaatatgacctctgcggacaaatctcctccatctgaagtcgttgatttggatgctttgcaagagcaacaagtgcaacggcaggattctgtggggaagacgaccaacggaatcgacaagcaaactgtgccatcaaccatggatttgctaggagtttttccaactggccttgcaacttcaacacctgagaccaatacatctcagtcccaagggagcagtgacagcagtggtaataacaagagcaagagccattcaacagagccagtaactgttgtaaattcacatgataaatcaacccgagatttctctgctgctggtttcatgagaagcaacagcacacacgaaagccaacctcatatatacaagcagacagaacaagaaaccagaccatacttgtcactgcagctgtttggcagcactgaggaggattttccacctaagatggactcagtgaataagtacttatcttctgagagtagcaatcctctggatgagagatctccttcatcctctccgcctataacccgcaagtttttccccatacactcggttgatgaagaggttcggcaccctcatattacagattatggggaagatgctacgatgggtgaagttagcacaaatcaggcatggttggcaccaccacttgatctcttcaaggattcagagcgtcccatcgagaacggatcgccaccaaatcctggttaccagtcctgctatgcctcaacatcttgttcagatcattcaccttcaacctcaaactcagatggacaggatcggactggtaggattatttttaagctgtttggcaaggaacctagcacaatacctgggaaccttcgtgatgatatagtaaattggctcaaacacagccctactgaaatggagggttacattcgccccggttgccttgtactatccatgtacctattaatgccgggtattgcatgggatgagcttgaagaaaatctcctccagagagtaaactcattagttcaaagttctgatttggatttctggagaaaaggaaggtttttagttcgaaccaactcccagttggtatcatataaagcaggaatgacccgtttatcgaaatcgtggagaacatggaatacccctgaattgacccttgtgtcaccaattgctgttgttggtgggcagaagacctccctcattcttaaaggccgcaatctatctattcctggcacacagatccactgtacaagcatagggaagtacatatccaaagaagttctgtgctcagcatatccaggtaccatatatgatgattcaggtgttgagacatttgacttgccaggacaaccagatcttattcttgggcgctgctttgttgaggtagaaaacaggttcaggggtaacagcttccctgttattgttgctagttcaagcgtttgccaggagttgcgaaatctagaagttgagttcgaggattcgcaggttcttgatgtttcttcggatggtcagattcatgattctcggcagccaaagacatcggttcaagttctgcacttccttaatgaactcggctggctctttcagagggcttctgcctgtacatcgtccaccagatctgatgtgtctgatttggatttgattcggttttcaaccgcacggttcagataccttttactgttctgtagtgagcgcgactggtgctctcttactaaaacacttctggacattcttgccaagagaagcctggccagcgaggaactatcaaaggagactatggagatgctggctgagattcacctcctgaacagagcagtaaaaagaaagagtaggaacatggtgcacctacttgtgaagttcgttgtaatttgccccgacaattccaaggtttaccccttccttccgaacttgcctggccctggtggtttaactccgctgcatcttgctgcgtccatcgagaatgcagaggatatagttgacgccttgacagacgaccctcaacagactggtgtaacctgttggcagacagttctagacgacgacggccaatctcccgaaacatatgccaagttgaggaaccataattcctataatgagctcgtagcgcaaaagctggtggacatgaagaacaaccaggtcacagtaagggttaacggcgatgggattcgtgcggatcggttaggaaatgatgttggtgaccgcaaaagatctggggttcaggcgctgcaaataagatcctgctcccagtgtgccattctggagtctggtgtgctaatgcagcccgtgcggtcaagggggttccttgctcggccctatatccattcgatgcttgctatagcggcagtatgcgtctgcgtctgtgtattcatgcgagcgttgctgcggatcaattctggtaaatccttcaagtgggagaggctggattatggtacgatataaactgcccgcccgccggggaagacctgagcctcgtggtaattattgagttagcaagcagttggtggccttggacggtatggagattgttctatgcagggttcggtggcataaggtagtatcgtcgttggacagttccttttacctcatgtgaaatggaagtgttaacatgtgaggagccggagatgtcagatgttaaatactggtaccgaaggtggatgagcttgagcagagctggcacatctgatggagatgttttagacgtaatcacagcccggggggataagaggatgctctagcatgaccgtatcttgtatctactttagatatatatatagtagtagaatggggtaaatgaaaaggaggcttgcgtatgggtctgtatcgaccattttgacttgtagctacaaagaaatgaagcggatctgaagtgtacctggatctttttgttttgttttgttttgttttgtttttgctggactggacgtccagcataggttcccgttctgaagaacctttttg

SEQ ID NO: 5505 - DNA, 1420 bp, Zea Mays
ccctaccaaaaaaaaatccaaagcgagcagatcccccgcccctaaccgactcccctcgcttccattccattaatggccgccaccaagagccctccaacacacacctgacctccccttcccccctctctccgccgcccgttccccgcgcctccccgtccgccccggccccgccgccgccttctccttcgccggccccgccgccgcgtcgcccttctaccaccaacaccacccgtccctgagctactacgcctactacggcaagaaactggacccggagccgtggcggtgccgccgcaccgacggcaagaagtggcggtgctccaaggaggcgcaccccgactccaagtactgcgagcgccacatgcaccgtggccgcaaccgttcaagaaagcctgtggaatccaagaccgcctcgtcgtcgtcgcccgcgcacccgtcgccgccccagctgtccaccgtcaccaccaccgcgcctctcgagccccttgcagcggcggggggcaaggtccacggcctgtccctcggcggcggcgctgctggctcgtcgcacctcggcgtcgatgcttcgaatgctcactatcgttatggtagcaagtaccctctcggagctaaaccggacggcggcgagttgagcttcttctcaggagcgtcatcggggaacaactcgaggggcggcttcaccatcgactctccatcagataacaactcgtggcactccgccctggcgtccagcgtgcccccgttcacgctgtcgacgaagagcggggactccggcctcctgcccggcgcctacgcctcctactcccagtcccactcccacatggagccgccgcgggagctcgggcaggtcaccatcgcctcgctggcgcaggagcaggagcgccagcagccgttcagtggtgggatgctcgggaacgtgaagcaggagaaccagaaccagccgctgcggcccttcttcgacgagtggcccgggacgcgggcggactcgtggccgccggagatggacggcgcgccgcgggccggcaggacctccttctcctcctccaccacccagctctccatctccatcccgatgcccagatgcgactgacgaggaaccgtcgatcgggcggccactagacggtggacgctcacgctcactagtgcgctgtcgcctggagtggagatcgatcgtcacgccgccgccgcctacgccctcgtcctacctatttgttttgccgtagtgtattgtaccgacctcattaagaacagaacagaacagaagtctctgtgtaagagccggctccttcctgttcctatggtttgtactagtagcgtgctttgtatttgttgtacccctcaagaccgagaatgaaacccgcccgccgtcagtctgtctttgcgttttagtagatgatgcgagtgtttcgtgtgcatttcc

SEQ ID NO: 5506 - DNA, 1423 bp, Zea Mays
ccctaccaaaaaaaaatccaaagcgagcagatcccccgcccctaaccgactcccctcgcttccattccattaatggccgccaccaagagccctccaacacacacctgacctccccttcccccctctctccgccgcccgttccccgcgcctccccgtccgccccggccccgccgccgccttctccttcgccggccccgccgccgcgtcgcccttctaccaccaacaccacccgtccctgagctactacgcctactacggcaagaaactggacccggagccgtggcggtgccgccgcaccgacggcaagaagtggcggtgctccaaggaggcgcaccccgactccaagtactgcgagcgccacatgcaccgtggccgcaaccgttcaagaaagcctgtggaatccaagaccgcctcgtcgtcgtcgcccgcgcacccgtcgccgccccagctgtccaccgtcaccaccaccgcgcctctcgagccccttgcagcggcggggggcaaggtccacggcctgtccctcggcggcggcgctgctggctcgtcgcacctcggcgtcgatgcttcgaatgctcactatcgttatggtagcaacaggtaccctctcggagctaaaccggacggcggcgagttgagcttcttctcaggagcgtcatcggggaacaactcgaggggcggcttcaccatcgactctccatcagataacaactcgtggcactccgccctggcgtccagcgtgcccccgttcacgctgtcgacgaagagcggggactccggcctcctgcccggcgcctacgcctcctactcccagtcccactcccacatggagccgccgcgggagctcgggcaggtcaccatcgcctcgctggcgcaggagcaggagcgccagcagccgttcagtggtgggatgctcgggaacgtgaagcaggagaaccagaaccagccgctgcggcccttcttcgacgagtggcccgggacgcgggcggactcgtggccgccggagatggacggcgcgccgcgggccggcaggacctccttctcctcctccaccacccagctctccatctccatcccgatgcccagatgcgactgacgaggaaccgtcgatcgggcggccactagacggtggacgctcacgctcactagtgcgctgtcgcctggagtggagatcgatcgtcacgccgccgccgcctacgccctcgtcctacctatttgttttgccgtagtgtattgtaccgacctcattaagaacagaacagaacagaagtctctgtgtaagagccggctccttcctgttcctatggtttgtactagtagcgtgctttgtatttgttgtacccctcaagaccgagaatgaaacccgcccgccgtcagtctgtctttgcgttttagtagatgatgcgagtgtttcgtgtgcatttcc

SEQ ID NO: 5507 - DNA, 2298 bp, Zea Mays
cggggccgtttcctcgccttttcccttgccgtggacgcgtgccgcggtcgtcgccggccgcgggaggagatcgattccacgcggcggacttggtctacagtctactaatctattctctatctctagcagtggtaccatttggcggcgatcgccgtgctattgcttgggccttggactgagtaggtttggaggtagcgatacgagacactcgcccccgattcccctcccgttgccgaagcctgtgttgcagggatcgttcgcggaagcggtttttgatcggagagagagaaagagagagcgagggagggaggtggggatggacgcggcggcagcggcggcggcgcagatggagaggcactcgtcggcggcggcgcagatggagaggcactcgtcggcggcggccttcgtggagggcggcgttcaggacggctgcgatgacacctgcagcatctgcctcgagaccttctccgacagtgacccctccgcggtgaccagctgcaagcacgagttccacctccagtgcatcctcgagtggtgaggactcgctctgtctgtctgactgttattgcttcctgctgttcctgtttctccgtgtttgttttcgtttccgcgcagttgttctatcgatccgtgctgaatgcgatgcgcggcagctagtctgaatccctcgcaagatctgctctgaatcacccgtttgcttggcttgatactacctctgactctctgagcatcgtgattgtattggatcctacaggtgccagaggagctcccagtgccccatgtgttggcaggcaatcagcatgaaggaccctacgagccaagagctccttgaggccgtcgaggaagagcggaacgacgtgcaggaaaaccacgcgcgcacaaccaccgttttccgtcacccgctgctcggagatttcgaggtgctctgctgacatagatctgatgttcacattcagagtggaagcttgcttccagtgatggcattggcgtgccagttgcccagttgccatgccagctgtttctatgcatgatcgtgtgctcgatcagtttctgcacagatatgatgcctgatgccaacaccgtttcttcgattccaggtaccggtggatgcagacgacgccgagatcgaggagcggatcatgcagcacctggccgccgccgcagccattcgccggtcgcaccgccacgccagaagagaaggccgccgcagcagcagggcggcggcagctcatggccatggccacccacaaccacaaacacaagtcctgttctttccgtctgctggcgaggccactcctggtggttctggttccccgtctccgcatccgcggcaagaacatgctgcttcttctgtggtttctcctccgccattgcccgccgttgcctccgcagaaggaacggatgcagacagtactgcctcggttggtggcgctgtcgggccagatgacaggtttccaggagccagtcttcgcctgtcaaccacgatgaagctggaccatctgctgacgcgcagtcattctcagacacgatcaaatctaggctgcagtcagtctctacaaagtatatatcactcccagtctcctacatttccactcctcctaagaacaccagatgcatgcccctgtctaattctaaaccgtcgcttgacttacatagccatacattcattgttctcaaatctcaacgatggatggcaggtacaaggactccataacgaagagcacgcgcgggtggaaggagaggtggttcgcgcagagcagcgccatgtcgaatcttggctcggagatgaggagggaggtcggtgctgggatcgccgccgtttcccgcatgatcgagaagcagctggagacacggccggatgggagtgggacagcgccgtcgcctgctaccgcttcgtctccagctcacgcccaccctggttcggatgcaagtagtcagggtcagggagctgctgttcccgctacacctgcagccgctctgaataacgctacgcctgcagctgctgctgctctgaatgacgcctcgtcgtcttcgacagcttgaacgcgcgccaggatcatgttcagtgagtttgcactaggtgtggttttcaagtgctttagatgcttgcaatgcaatgcgtcgcgtgtatagtcagtttgtcaattagcctcattggtagccagtgaaacagatagtggatgccaagctactgttcgatcagtgaatgtttcagaataaagttggatacttggatgcgcacaagaacacccgagagaccacatatgactgacttacctgtaggtataaatagctaaa

SEQ ID NO: 5508 - DNA, 2272 bp, Zea Mays
aatcccctccgtccggccgtcccctgcctccctcccggccgcttccaaatccacccgccatccgttccgccgtcgccgcgatggacgccgcggaggcctcggaggtgcaggcgcggctggccgcggccgtgcacgcgctcaaccacgacgcgcgtcccgaggcgcgcctcgccgctaaccaatggctcctcgcgctgcagcggtccccgcaggcgtgggcagtcgccacctccctcctggccaccccagacccgctcccgcccgccgatctcctcttcttcgccgcgcagatgctccgccggaagatccagtctccgggccccgcgctcctcgggctcggcctggcgtcgcagctcctcgatgcgctgctcctggccgcgcggcggttctgcgccgccccggcaccgcgccagctgctcacgcagatctgcctggcgctcgccgcgttggcgctccgcgccgagggcggcgtcgacggcctcttcgcgcgtatgccgcacctgccgccccccgccgtgctggagctgctcaccgtgctccccgaggaggctgcgcaggaccagggcggcgacacgggggttgacgccgccgcgcggtgccggtttacgcgcgagctgctcgcgcacgcgccatcggtgcttgagttcctccaccggcaatccgagaaggcacccgccgatgacgacggggttcccctcgacgagcgcaaccgcagaatcctccggtgcctactgagctgggtccgcgtgaggtgcttctcagagacgccggcagcctcgcttgccaggcacccacttctcacttttgcgttcaactcgctgcaggtgtccttctcgtttgaggtggccatagaggttatgactgagcttgtcagccagcaccaagaattacctgaggcctttctgagtaagacaccttatataagggaggctcttcttctaccagctttagccaacagaaatgagaaaattattgctggtcttgcctgtttgatgtgtgaagttggccaggcggcacctgctttggttgcagaagggggtagccaagcacttgctctcaccgatggacttttgaggtgtagtttggcacatttcattcttggtattgatgtgaagtcagccaaaagaaatgtggtacaagagttgtttgtgcctgtgttttcttcgctgctggatgctcttttatttcgtgctcagatggacactgatgagcatggttctgatggagcaccttgtatacctgagagactaacacagttcaggatgaatttggaggagctcctcgttgatatttgtttgcttctgggtgcccctgcatatataaacaggctcttttctggtggatgggacttttcaagccaaacaattccttggaaggaggtagaagttagaatgtatgcactcagcatggttgctgacacgattttacaagatgaaggctcctttgatttttcaatcataatgcattttgtgaacattttgtccagtagaacacctgttgaactgaatggaaatttgtttttggtgtataaatcgttcggtgatgtcgttggctcgtactcaaagtggttatcgtcttctcaatcctattttgcgcgtcaggaatttcaaaatccgtatcatcaaatgcttgctccttagcattgcgcaaactttgtgaggatgctccttcattcatccatgaaccacagaaccttgaaattcttttctggattggtgagggcatgaataaagggaacctgcagctagaggatgaggaagagataattagtgcaatcacacatgctttaagttctataagtgaaaaagagttgaagaaaagttcactggccaggttactttgttccagttactctgcagtggaaaagattattgacattgatagagatcaattgctaaggcaaaatccagctgcttatacgcaatcattggatcttgctgtccgtggtctctacaggatgagtgctttgtttcatcatttggcaacatcagtcacatctggtctggtcgatgatgatataattatagttcttcttggaatattctggccacttcttgaaagtcttttccgatcatctcatatggagaatgtgcatttatctgcagctatatgccgttctctttcttctgctatacattcttgcggacaccactttcatattttattacctaaagttatggagtgcttatctgcaaatttcttgctatttcaaaggcacgactgcttcttgaggacagctgccaatgttattgaagagtttggccacaaagaa

SEQ ID NO: 5509 - DNA, 2967 bp, Zea Mays
atggtagcagcagtgagggtcgacgccaggggctggtacaccggtcctggtatggttgtccctggcgtcgtcagccatgcaactggtgatgaagatggcgcaacacaactggaattacctgaggcctttctgagtaagacaccttatataagggaggctcttcttctaccagctttagccaacagaaatgagaaaattattgctggtcttgcctgtttgatgtgtgaagttggccaggcggcacctgctttggttgcagaagggggtagccaagcacttgctctcaccgatggacttttgagatgtgtagcttttaccagtgaagattgggaaattgcagagtcaaccctgcaattttggtgtagtttggcacatttcattcttggtattgatgtgaagtcagccaaaagaaatgtggtacaagagttgtttgtgcctgtgttttcttcgctgctggatgctcttttatttcgtgctcagatggacactgatgagcatggttctgatggagcaccttgtatacctgagagactaacacagttcaggatgaatttggaggagctcctcgttgatatttgtttgcttctgggtgcccctgcatatataaacaggctcttttctggtggatgggacttttcaagccaaacaattccttggaaggaggtagaagttagaatgtatgcactcagcatggttgctgacacgattttacaagatgaaggctcctttgatttttcaatcataatgcattttgtgaacattttgtccagtagaacacctgttgaactgaatggaaatttgtttttggtgtataaatcgttcggtgatgtcgttggctcgtactcaaagtggttatcgtcttctcaatgtaacattaagcccttactcctattttgcgcgtcaggaatttcaaaatccgtatcatcaaatgcttgctccttagcattgcgcaaactttgtgaggatgctccttcattcatccatgaaccacagaaccttgaaattcttttctggattggtgagggcatgaataaagggaacctgcagctagaggatgaggaagagataattagtgcaatcacacatgctttaagttctataagtgaaaaagagttgaagaaaagttcactggccaggttactttgttccagttactctgcagtggaaaagattattgacattgatagagatcaattgctaaggcaaaatccagctgcttatacgcaatcattggatcttgctgtccgtggtctctacaggatgagtgctttgtttcatcatttggcaacatcagtcacatctggtctggtcgatgatgatataattatagttcttcttggaatattctggccacttcttgaaagtcttttccgatcatctcatatggagaatgtgcatttatctgcagctatatgccgttctctttcttctgctatacattcttgcggacaccactttcatattttattacctaaagttatggagtgcttatctgcaaatttcttgctatttcaaaggcacgactgcttcttgaggacagctgccaatgttattgaagagtttggccacaaagaagaatatggggctttatgtgttaggacttttgaaattcttagctctgcatcttcaatatcagctctgaattcttcttatacctgtgatcaagaacctgacctagttgaagcatatacctactttacatctatgtttattcgctgctgtccaaaggaagccattgtggcatctagctccctgattgagttatcatttcaaaaggcagctatatgctctacagcaatgcaccgaggagctgcacttgcagcaatgtcatatatgtcgtgttttcttgagactgcccttgctgctgtgctagaatctcctgagtgcatccctaacgggtcacctggtgtggccctaatccaaatcttggcacgctgtggtgaaggtctattatctaatgtgctttatgctttacttggtgtatcagccttgtcaagggtccataaatctgccacaatattgcaacaactggcggcattgtgcagtttcagtgagggaacgacatggaaggctatccttagttggaattctctttgtgggtggctacaatcgacggtgaaatctttgccttctgagtatctaaagcaaggggaggctgaaataatagttccatcgtggctcaaggtgcttcaggatgcaggctcagactatcttcacagcaggactggtgataatataagaagccatcaaggttacatgcaagggaagggtggtagaactcttaaacgtataatcagagatttcgcagaaagccaccggaatgttccaatccccagtcctacatgatatggatgtgtcacgagtcttgcactctttactgatttgaggatgtccagtccctccagtagcttggagtctgactctagagagggggtccttgtggaactgatgtccgtcccgtctctgctggcatgctacatgttggttccatctatagttcagcaagaggaagaggctatttgattgttccggacatctggttcggacttggagagtcttctctgtatagcaaggaagtcgcaccattgttctgctgactaattgggggttgaatgcaaagtctgaagccgcatgtcatggttcgagatccaattttgttttgatagacatactgtgaaattcattgtgccggtaagctatatgaagacaaaatggggggatggaatgcaacctgtacataccattctttgctggttggggcaggcgatgtacgaacattcatatgcagcagtgttactgctcgaatctggagttaaacatgggcagtaatgctaggcatttatcaaacttctatcatgtcagtcgaaactttgaacaagtgtacataatcaaatatattatcagatatcataattttatggcatgactattatgttatgaatgtacgtagtatattatctgataccc

SEQ ID NO: 5510 - DNA, 1745 bp, Zea Mays
tctgcgctctgacattcgcctcggcctctctcggccggcctcttcgtttcctcctcccagccgaccggccagccagccagacccacccaccgccgatccccacgcaaggggaacaggagaggaaacaaacccagcctcgtacgcggaaggcctgcctggtgatcgacgatcgtcgtgctcgtggtggcgggtccggcgtgcgagcgagcgagcgcggcgcgcatggcgagcgacggcgaccacggcggcgcgctgcagaagccgctcttgccgaaggcgcccaggagcgggggctggttccggaaaggtacgagcacggcgcgcctcggcgccgccgctgccggcacctcgtccaaggccgcagcgctgcggccgccgcaccacgtgcccgcgctactctgcacgctcgtcgtcgcgctcggcaccgtccagttcggcttcaccagcgggtactcgtcgccggcgcaggacggcgtcacgcgggacctcgacctctccatctccgagttctcggtgttcggctcgctgtccaacgtgggcgccatggtcggggcgatcgccagcggccagatggccaagtacgttggccgcagagggtcactgatgattgcggcggttccgaacgtcatgggctggctcgcgatctccctggcaagggacacttcgtttctgtacgtggggaggttgctggaaggattcggtgtcggcgtcatctcctacgtggtgccggtatacgtagcagagatatctcctcagaacatgagaggagctcttggcgccgtgaacccgttgtctgcaacctttggtgtcgtgtttgccgatgtgcttggcttgttttttccttggaggcttcttgcgttaataggaaccttgccctgcctactgttgatacctggactgttcttcattccggaatctccaagatggctggcaaggatgaatatgatggatgagtgcgaggcttctctacaagttctgaggggggtggacgctgacatcactgtagaagcgaatgatataaagatagctgtagcatcggcaaacaaaagtggtgcaatgagctttcaagagttgaaccagaagaaataccgcacgcccctaattctaggaatgggcctacttgtgttgcagcagctgagtggaataaacggtataatcttttatgcaggtagcatcttcaaagctgcagggctcaagaacagtaacttggacacatgtgtacttggagctattggggttcttgctagtgttgttacaaccaagatcttggacagagctggacggagaatccttcttattatttcttcgtctgggatgactctaagcttgctcacggttgctgttgtattttacatcaagggcaacatttcacatgactctgacttgggtaacaccttaagtatggtgtctttgattggtgtcttggcttgtgtcactgcttactcctttggtatgggtgccattccatggatcataatggctgagatccttcctgttagcatcaatagcgtggcaggaagctttgccacccttgccaactggctgacatcctttggaataacaatgacagcaaatttgcttctaagttggagtgctgcaggtacatttgccttgtacatgatggtgagtgctttcacggtcgtcttcgtcatcctttgggtgccagagacaaagggaaaaaccctcgaggagatacaatgtcctggaactcctcaaagtcctccacgttgcctgcatctcctcct

SEQ ID NO: 5511 - DNA, 1933 bp, Zea Mays
tctgcgctctgacattcgcctcggcctctctcggccggcctcttcgtttcctcctcccagccgaccggccagccagccagacccacccaccgccgatccccacgcaaggggaacaggagaggaaacaaacccagcctcgtacgcggaaggcctgcctggtgatcgacgatcgtcgtgctcgtggtggcgggtccggcgtgcgagcgagcgagcgcggcgcgcatggcgagcgacggcgaccacggcggcgcgctgcagaagccgctcttgccgaaggcgcccaggagcgggggctggttccggaaaggtacgagcacggcgcgcctcggcgccgccgctgccggcacctcgtccaaggccgcagcgctgcggccgccgcaccacgtgcccgcgctactctgcacgctcgtcgtcgcgctcggcaccgtccagttcggcttcaccagcgggtactcgtcgccggcgcaggacggcgtcacgcgggacctcgacctctccatctccgagtcactgatgattgcggcggttccgaacgtcatgggctggctcgcgatctccctggcaagggacacttcgtttctgtacgtggggaggttgctggaaggattcggtgtcggcgtcatctcctacgtggtgccggtatacgtagcagagatatctcctcagaacatgagaggagctcttggcgccgtgaacccgttgtctgcaacctttggtgtcgtgtttgccgatgtgcttggcttgttttttccttggaggcttcttgcgttaataggaaccttgccctgcctactgttgatacctggactgttcttcattccggaatctccaagatggctggcaaggatgaatatgatggatgagtgcgaggcttctctacaagttctgaggggggtggacgctgacatcactgtagaagcgaatgatataaagatagctgtagcatcggcaaacaaaagtggtgcaatgagctttcaagagttgaaccagaagaaataccgcacgcccctaattctaggaatgggcctacttgtgttgcagcagctgagtggaataaacggtataatcttttatgcaggtagcatcttcaaagctgcagggctcaagaacagtaacttggacacatgtgtacttggagctattggggttcttgctagtgttgttacaaccaagatcttggacagagctggacggagaatccttcttattatttcttcgtctgggatgactctaagcttgctcacggttgctgttgtattttacatcaagggcaacatttcacatgactctgacttgggtaacaccttaagtatggtgtctttgattggtgtcttggcttgtgtcactgcttactcctttggtatgggtgccattccatggatcataatggctgagatccttcctgttagcatcaatagcgtggcaggaagctttgccacccttgccaactggctgacatcctttggaataacaatgacagcaaatttgcttctaagttggagtgctgcaggtacatttgccttgtacatgatggtgagtgctttcacggtcgtcttcgtcatcctttgggtgccagagacaaagggaaaaaccctcgaggagatacaatggttcttccagtgagctctagcatttcatctttatatgcaaatagcgtggcacatcctctaggatctataagaaaatatagtgaaatatagcataatcaatgtcatttagcaattttagtgtttaaatggaatttgctattgttttcgtaagaaaaactataaatattgaaattttataaaaatattactcaaatatatgtacgaggatgtaaaagaagatgtccctagatccattacttaacatttgttgaatcaatcgaggatcgaaatagtcgaccaacgaatgtgtatagaagccaataaataatttttgcacaaggtaa

SEQ ID NO: 5512 - DNA, 2568 bp, Zea Mays
tctgcgctctgacattcgcctcggcctctctcggccggcctcttcgtttcctcctcccagccgaccggccagccagccagacccacccaccgccgatccccacgcaaggggaacaggagaggaaacaaacccagcctcgtacgcggaaggcctgcctggtgatcgacgatcgtcgtgctcgtggtggcgggtccggcgtgcgagcgagcgagcgcggcgcgcatggcgagcgacggcgaccacggcggcgcgctgcagaagccgctcttgccgaaggcgcccaggagcgggggctggttccggaaaggtacgagcacggcgcgcctcggcgccgccgctgccggcacctcgtccaaggccgcagcgctgcggccgccgcaccacgtgcccgcgctactctgcacgctcgtcgtcgcgctcggcaccgtccagttcggcttcaccagcgggtactcgtcgccggcgcaggacggcgtcacgcgggacctcgacctctccatctccgagtcactgatgattgcggcggttccgaacgtcatgggctggctcgcgatctccctggcaagggacacttcgtttctgtacgtggggaggttgctggaaggattcggtgtcggcgtcatctcctacgtggtgccggtatacgtagcagagatatctcctcagaacatgagaggagctcttggcgccgtgaacccgttgtctgcaacctttggtgtcgtgtttgccgatgtgcttggcttgttttttccttggaggcttcttgcgttaataggaaccttgccctgcctactgttgatacctggactgttcttcattccggaatctccaagatggctggcaaggatgaatatgatggatgagtgcgaggcttctctacaagttctgaggggggtggacgctgacatcactgtagaagcgaatgatataaagatagctgtagcatcggcaaacaaaagtggtgcaatgagctttcaagagttgaaccagaagaaataccgcacgcccctaattctaggaatgggcctacttgtgttgcagcagctgagtggaataaacggtataatcttttatgcaggtagcatcttcaaagctgcaggtaagctgtgcacttgtttactggcttgtggttttcgtctactagttgagcatcataactttagcaatggattttttactccttccaaatttgactggagcagtagggtattacggaactgtttagctgtttactgaataaaaagcgtcagtctctgtttggcaatatgcattttttacacatataggaatagtgtagtagattacaaatatcaaaagagttaaaatggagtaaagtgatcttacttttctcaaggcctagcgcattatagtatgtttttttaaaaaactaatgtattagtccccttgtaagttgtaacatggtttatcattctctgctttgatgaatgttgccattttattgtttgttccaagttctcctctgcatttgtctacaacagtgccggttaaccttgttttgactgtgagttctaacaatcaaagctctccagggctcaagaacagtaacctggacacatgtatacttggagtgattgcggttcttgccactgctgttacgaccaagatcttggacagggctggacggagaatcctccttatcatttcttcttttgggatgaccctaagccttcttgtggttgctgttgtattttacatcaaggacaatatttcacatgactctgacttgggtaacaccttaagtatggtgtccttggttggtgtcttggcttatgtcactgcctactcctttggtatgggtgccattccatggatcataatggctgagatccttccagttagcatcaagagtgtggcaggaagctttgcgaccctagccaactggttgacatcctttggaataacaatgacagcaaatttgcttctgtcctggagtgctgcaggtacatttgccttctacatgatggtgagtgctttcactctcgtctttgtcatcctttgggtgccggagacaaagggaagaactctcgaggagatacaatggtccttccagtgagctccagtatttcatctatatatatgcaaatagcgtggcaaatcctccaggatctataaaaagatatagtgaaatatagcagaagctatttcatttagcaattttatagtttaaatgaaattggctattgattctgcatgaaaacatgtaaacaaggaaatttgatgaacataatactcaaatatatgtacagggatgtaaatgaagatgtctctcgatccattacttgacattcgttaaatcaatcgacataccgaagaaccaaaacatgtgaccatagaaggtgaataagagtcaataaaaaaatctttacacaagacaatcagcttgctttctaaatcttcacacaatctcccaaaacacaaaaacttacaaactgtatgctctcaaaccaacaagtgattagatatactcggtgatgaccgacaaacacagcaaaataatagaaccaaccaaaaccaagtacatgggtgaaacttaataaaaataaaaaa

SEQ ID NO: 5513 - DNA, 2112 bp, Zea Mays
gcataagataaataagcgacacacgttcaggttctttgttgtagttgacgatgtatgggatttgaaagcatgggacataataaagtctgcattgatcgaaaacactaatggcagtgcagttctaacaacgacaagtcgtcagatctgggaacatgagaactggaggccatctggggatgacaagtcggattctgacgcagagcagttagagcctcatttggacgtcacaacccccgcggatgtcctcccagcgtcttccccgagcaagagcaaggtggtggcccatgtggaactccgccacgacgacccagattcctctgcatttggaatcccgcaagtagcaggggatactcaacctgagctccgccttttccccgaggcggatgcggatcttaaagggttcttctacgaaaacctatttggatcggaagacaagtgccctgatgatctgaaagatatatgtaaagatctcatacaaatatctgctggtgtcctatcagatgcctatgagaccgtggaagagctcagaggttacgagatcagtgcagaacgcttagtttgggcgtggatagctcaaggtttcgtaaaggagactcagggacagaatgatttggagaaagtcggaaagaagtaccttattgaccttataagcagaaagatgatcgaagcagtggaggttcatgctgatggtatggccctctcatgccgtgcgtacgatttgttgcatggcttgatcgtttcattgtcaacagaagaaaaattcgttgaaattctaaatgactcgcagtcgcaggagagagcttcgaatccgaatacagaagttcaccggctgtccatccaaatccagagaaataatatgctacaccccctgccaaaagcttggatgaaacaagtgcagtcacttgttgtctcgtctgataccgtgccagacctctcagattttcagggtcttcatgccatggacttaggaggctgcgattcattgcaggttgatcatctcaagggtataagtaaaacaacatctttgatatatctggccataggaggaaaatatatcgctgacgtcccgaaagaagtttcttggctcaaaaagctgcggacattggatttaactgcaagtggtctgagtgaattgccacgatgtattttaacgctaactaatttggagcggctatttgttaatagccatatgaagattcctggtaagatctcaaaaatgtcaggtttacaagaactgggcgacatcaatattgttaagccagagttacttaaaaggctccgtaaattaagtaagttaagggttctcagaattgccatgtggtcttgggatgagggttctaagagctctgttaaactatggtgggagaccctgcactcattaatcgggtcctgcaaaaaaattgagagtctctgcatactgaccttctgctcccttgatttcatggatggttccggtgatgataataaatggccgcctcaaactctcaaaaacctcgagataagtcacagcgcatttctggataagctcccaagttggtttgactcactttccaccatctcctcgttgacaatcgaggtcaacaagttatcaaagaacatcactgacactctggcaaagctgtctgctctaagatccctttccctgacatccatagaaaagccagaaccagaagtacgctttgtcatcggctctgctggtagattcgagaatctagaaagcttaaagtttgtgtgtaatgaaatggtaaatttgcttgaaagaccggaatcgaatgctacccaacagttaacagggcttactatcgtgtttcatgcttcacgaacagaacgcagccgaaacaaagatttcaggtttggtttggacaaactgctgtccctacagcacgttcgtgttgaaataaactgttccaatgcgacgcagcggacggtgaaaaatgcagaagctgcaattggggaagaaatatcaaaaatacgcagggatgacgggagtcagccaatcctggaaatacgaagactccaggaagaaagtatgatagcagggaaggaccaaacccaggatgctaataagacaccgtcttcttcggtatcctcacaagctccacgaaaataaag

SEQ ID NO: 5514 - DNA, 1208 bp, Zea Mays
ccgcgggatccaggcccgctgatggaactgagatctcgcgcggggtttcgttcatgggatcggggaattcccctgcttgatccgctgctcgagctgagaaccagaagacattccgccccaagaagagcgctccatcaggcagcaagggagcacagctccgtaagcacatagatgccactctcggcagtggaaaccttagggaagctgtgaggttgcctcctggagaggatatcaatgaatggcttgctgtgaataccgtggatttctttaaccaagttaatatgctgtatggcacgctcacagaattctgcacacctgagagctgcccaacaatgacagctggcccaaagtatgagtacagatgggctgatggtgtgcagataaagaaacccatagaggtatcagcaccaaaatatatggagtatctgatggattggattgaaggccagcttgacgatgaatccatatttcctcaaaaacttggcacaccattcccaccaaacttcaaggaagtagtgaagacgatattcaagcgcttgtttcgtgtttatgcccacatataccactcgcatttccagaagattgttagccttaaagaggaggcccatctcaatacctgtttcaagcacttcattctgtttacaaatgagtttggcctgattgacaagaaggagctggctccactccaggagctcattgaatccatcatcgttccttactgagactacggtgtagtaaacgtggatatagagctctcagtgcagatggctgtgaagtgtccatccgtgacagaacttcactgcatagagctatatgtgcatgtacctgtgtgtttctaaatgatcatgtattggccatgtaagtgtgcctgttatcagttatagaagggtgatgatgatcatgtactgcaaaaagagaaagcacaagaatgtgttggattgatgtatgcagtgtttattttcctcctggttgtggaaccgtcagtttgtctgcttattgctagacattctctccgttctataaattgtaggtcgttttaattttgctccaactttgatcaagtttacatgcaaatatttcgacatgcaaaaccaaataaatgtattgtcaatgctcaaacgatttaatgtaactactctcatgtactagatgtttgatcgaatcctttataaatttagtcaaagttaaactagtttatttgtgtttta

SEQ ID NO: 5515 - DNA, 2594 bp, Zea Mays
cgcaaacccccgaaatttcaaaacccgacactcgaaagcgggcgtctccatttcccactcgccccctcctcgattcgatccagctggacgccgctccccgacgacgaggacgcccgtggagctctagaatcaagccatgcgacgggacgacgccggcggcgtaaccggcttccacgacttgtttgactcggtgcgccgctccatctccttccggcccgccgccgcagccccggaagcccccgcgggcccattcgtcgcgggggctggggggatcggtgtgcggatcagctcttgcctccggaagtcgcgggggatggggctgctcggtctcatcaccaaaaacccctcgccgccgcgccgcatgctaccgccgatgcccgatgagtcgggcggcggcagcggaggaggtgggggcgacgacgcaggcggagaggagaacccgccgatccggtggcggaagggggagctcatcggggccggtgcgttcgggcaagtctacctcgggatgaacctggactcgggcgagctcctcgctgtcaaacaggttttgatcggcaggagcaacgcgacacgggagaaggcccaagctcatattaaagagctcgaagaagaagtgaaactgctcaagaacctgtctcaccccaacatcgttaggtatcttgggactgttcgtgaggaagacacgctaaacattttgctggaatttgttcctggagggtctattcagtcacttttggggaagctcggttcattcccggagcctgtcattaagaaatacactaagcaaattttgcaaggattggagtatctgcatagcaatgcaataatacatagagatataaagggtgcaaacattcttgttgataataaagggtgcatcaaacttgctgattttggggcatctaagcaagttgcaaagttgttctgcagatatatggagtgtagggtgcacagtcattgaaatggccactggcaaaccaccatggagccagcagtatcaagaagttgctcttctatttcatgttggaactacaaaatcgcatccacctatacctgaacatctatcgccagaagccaaagattttctgctaaagtgcctgcagaaggaaccagagctgaggtctactgcaccagacttattaaagcatccttttgtcactggagaattggatgacctgcagccactcaatcatgctgcacgcaagaactcttttaatgagattccttcagatgatatgccaaatggcttgggtttgaataagtcttccaactggtccactatgaactccagtaaatcatccaaaatcaagcccttatgggagggtggctgtgatgatgatgacatgtgtgagtttgctgacaaggatgactatgcaggagttggatctagctataatcctatgtcagaaccatttgataactgggaaaacaagtttgacataagcccagagcaaaattctcatcaaccaatggaatttggtgaattggccaaacatgttgaaagcagcataactgggaatgattttacgttccctgttgggggaagttgtgaagatgatgatgtacttacagagtcaaaaataaaggcatttcttgaggagaaggctcttgacctgaaaaagctacaaacacctttgtatgaggagttctacaacactgtgcatggagggagttttcagggagctgatcaaacttccaagggaaaactcccaattagtccaaaatttccccctcgaggaaagtcgcctccatgcaagacacgtgtaggtgcatgtgatacttcgaatgacacagctcctgaaagctgcagcaagcaatttccaagaagcagtgtggtggatagcagccgaattttgagagaaattgcttctcctcaactgaatgagtttgcggataaaatccatcttgatgcccaagatagcccaagcatcagcttcaccgaaaggcagaggaagtggaaagaagagttggaccaggaacttgagagggagagagtgctgagattagctggctgtggtaaagcaccatccccaaacagaggttccaacgtgaaaaaggagtatcatgctgaccattgaacaaacagcagcgttcatcgtctctttatttcatcccacagaacacaactggatagtaactacacaatgccacagactggcagcaacatgagtacagcctgcagcgcctcaccattcgcggtattggccaagctatgactgcagatccatctcgtacaagtggcagatttacgttgaagtggactggtacataggggcactcgtcgcgaatatcaggatcattgtcgctgctaccccggaggacggcgtgctgacagtttcctgattttaaggccgcgtttgtcattctttttgatgcagtgctatacatgcgacttcggttatatttggtttctattgagaaaaaaatagtgttgtaaaaattttgtgtttgtaagcgagcttggcgtggggtttggttttgtatggagcttgtttgtgaaagcgtgtaataagatagctatgcaaattacaggtcattctgctggctgaatgaatctgagcttttcggaagctacaactgatcttctgctgtta

SEQ ID NO: 5516 - DNA, 5136 bp, Zea Mays
ggagtagctgctcttcagcaacagccactttcttttgtccgtattccaagtgtcgagcttatctgataatcacacacgtactttaaccaaacctgcaaagtgaagccagtaatccctctcatataccaccaaaaatttcccattgttttagctttctccatttctctgcagcagcctaccagagtagtgaggactgaggagcgagcagagtccaccaccactaccaaacacgcagcgcagtggtgctctctagtcctctcttcttccactccgctcttcccccgtcgcacgcacgcgtggtcatcggattcggccgcgtgccggcgagatccgggccgtcgcagcacggtccggcagacgccgcaatccgcgatcctgtcgccgcgggagctgcattggcgccccacgcggccgttccggcgtttcttgggaggttgcggcggggggaggagctcgtgtccgggatccgccagatccgagaacgtcggcggtagtagcagtggcgggggtcgccatggaggcccacgcgccgctcgacttcgcgctcttccagctctcccctcggcgtcagcggtgcgagctggtggtgtgcggcaatgggcggacggagaagatcgcgtcagggtcggtgaagccgttcgtggcgcacctgcgggctgtggaggaacaggcgtcggctcagccaccgccgccggccatccggctgcagctggaccggcccgccccgtggtttagtaagggcacccttgagaggttcgtgcgcttcgtgagcacgccagaggtgctggagttgacgagcacctatgatttagagatgtcgcagctggaaggggctaggaagatatatgcgcagggaggtactggagacgctacctcaggtggaactgctgaaaatgttacaggctcagcagcggcggtggcagcagatattacaaagaaagaacttcttagggcaatcgatgtgcgtctaagcacccttaaacaagatctggctgcagcttgttctcgagcatcctctgctgggttcaatccgaacagtgtatctgagcttcttcttttcgctaaccattttggtgccagtcggctgagcgaagcatgcacgaaattcatgtcactttgccagcggcgtcatgacatcagtcctcaaaccgcacagccagcagtttcatcacactggaaggtctttgatgatgggaatgttcgtggttcttccagttcagacatgtctatagatgagccacaagttgatctcggtgaatccaacaacaaatctacagtcggtggaagtggctctcaggtccacagactaagcaacagccaaggcttagaagtcgctgcagaacagcaacccaagccaaccatcccacaggccatagataaacaagaagcagaaacagacgcgtctcccgcacctgctgcaggagggctttcaaggcgtctgagtgtgaaggacaggataaacatgtttgagagccagaaaaaggagcagactccaagttctggtaacagcaactcagcaggtactggtagggtggttccagggagaggtgagcaccgcagggttccttctggggcctccatggagaagttagttagaaggtggagcagtgttagcgacatgagtattgatctcagcaacaatgagagcgttaacataaatgacaaaaaggacaatggaactcctgttgtgactccaacatctactgatttggaggccaactctaaagcaaaagctgatgtggactctaatggacagaaggatttagtcacatcacactcctggccttatcaaaaggataatgtaccaatggatccgactaccacagatttgtgcccaccctcaactttaagtaatacacttgctcctcatagtgatggtgcaggaaacgacatggttataaactctagcattgagagtgagtcatcctttgggaaagaagcgggggttattcaaggactcacaaggatgtcaaatcatgctacttcaaatgtttccactcgaaaccatctaaaatcttctgcaaagccagttgaggaaggcttgctgaaaaataaggatattttaaccagcacatcgttagaggagcatgttcgcatgatagataaggaaataacagctgttcctcatgaagtattagttgcaagtgaacagattccccagaatgatattagaggtctccatacaaaagatattcacactgaatctgaagtgactggaaggaaggatcagccttcacgatcatttggaaaggtatctggtggtgttaatcctaaaccaaaaacatcatccaattcccgagctaatgttaaaggctcatctggtagggctaatgtcaaaggctcatctggtagggatgagattacctttacagaaactgagttccgtgatgttagtttgcagcggaatcgtctaccacggaaggcagaggatgtagggagaaaggttacaggtggttctgattcagattcttctggtcgccagggaacaaatttgagcaggcaatcatccattaccatccaggaactaaacttccaggctagagtgatgggaccaggaaaagggaaccaagatcggcatggcgaattgcaaatgaaggctaatgagttggagaaattatttgctgaacacaagttaatatcatcccgacgaggcaaacctacagatgtgcaggttgatagcacacgtacggtgagtgagtgagcttctgaagatggtgagtaatcaaggatttaacattagcacaccacaaaaacttggcattctaagcttagaagagtcgagagggaagttttatgagcattatatgcagaagagggatgcaaaactgaaggaagactggaaactgcagaggggggagaaggaagcaatgttaaaggctatgcatgagagcctagaacggagcaaggctgagatgcgagctaaattctctcagtctggagatgtttctgactcaacttatgtttatcattgttctcagaagattcctccttcgcgatcagcaagaagaaataatgatcagggggttgactcattcttggttgaagaggaattgaatagtgactacctatctggtgacggttcttccaggagtgctgattctaggaagcattttccaaataaagttgcttccacccaaaaggcatctgttggtcctatccataagcgttcttcaaggactgcaagctccggttatggcaatcgcaggaatctaccagaaaatcctatcgcacagcctgtccccagtttctctgacttaagaaaagaaaatacaaagccttcacctggactcagtagagcggctgcaagagttcagcaaaagtcttttgcccgtagcaagagcattattgaagagtcaaagagtatattgaaagaagatcaatcgaggaggtcacaatctatgaggaagagccaaattccggatgagttgaaggacatttcatcagggaatgaggatatttacaattgggctccatcaagaatttccaagaatcaatcagagggagcttttgcttacagtgcccgtagaacgggtccaccaaagccatttcttaggaaaggcaatgggactcaccccgttataggtatagctggatttcaggctgcagcggctatgatggcgaatgccctccagaatggtgacagtggtgattttgaagatcaccaagatgattctcctgatgatgccaaagaagaagaagaatatgaaagtattgaagaaaattttagagaaagtgactttcctgctgattctgacagtgagaacccaagagttagtcatgaatttggaaattcagatgacccagggtcagaaaatggcgatgctaacttttcaagtgaagcacccgcaattggtggtactaagttcactgcttttacaggaaacgttcatgatccagctagtgatgttccagcaccctggagttctcgtcttccacagctgtccccttacatgaatgataatacagatggtgacacattcgctgattcaccgtgtggaagtccaccatggaattctcattcacttgatgaaataacagatgctgatgtatctcggatgcggaaaaagtggggcagtgcacagatgccttttgctggtgtcagtgcatctcaacagccacgcaaagatgtttccaaaggattgaagaaactgtggaaatttggtaggaagactagagggggtgatggtttagtaaatgattgggtatctgcttccactgcctcagaatacgatgaagacatggaagatgggcgggatctggtagtaggatcttctgatgatttcaaaaagtctcgaatgggttatcttgcttcatatgatgattttgttgaggatgaggtttttgctgaacaagaacaatcactacgcagctcaattccaaacccacctgcaaatttcagaccgagagaagatcaactgactggaagagcgccacgttctttcttctccctgtcaacattccgaagcaagggaggtgatgccaggctcaggtgatcctcagaaagtcagaagacaccagaggtggagtgtataaaatatcttccgaggttaggtatgagtatcaaattttcagggcggtacgcggctagcttgtgattataaatatatatctatatgttgtgtatctatggcaattcatataagctaccagttgagccccccattgttactgtttgattattctttttccgtaatattctttgacctcctgtgtagagttggacttagagatctttttgcagtctgttcttccaactggcccaaaactactgtatttttcgttgtttttgtgatatatatgtatctccctcttgtttcttcattcacatatatcacaaattcaagatatatggtaattttggcaattgtagcatggaaactgggcttattcaaggcacccgcaaagtcacttgttttagtgtgatgagtgtatctgtctttgatctatgtatatatattttttagaaaacttcatcgagttttttttgaaactttgccttatttactagtgactgcaccacacatatctttgttgtaagtttcagccattttttggagtatttatggccgtacagctggagctcatgtacttggttttggctgatgaccgcataccagtgatggtcctctgcctcgc

SEQ ID NO: 5517 - DNA, 2331 bp, Zea Mays
acacgtttctttaccctaaccttttcgctgctccagcgaggcatacagccgccgccgtttcttcattcttccttgcagcgccgacgctccatcttccgctccctcccttgctcgcgctcggcacgtaggcgacggtggcagcgctcagcctcgggctctcagcgacggcgtcagcggcttcccctctcgccagtcgcctcgtcctccgcacaccggccggtggccctgccaaagaggcaacggagagggtttccagaacagagtatacagagggcaaggctgttatgagcaacaaggaggagaaagaatgccaaatgaccaaagaagagaagaggcggaagaagagggagaaacataaggacatgggtcagagcggcgattatgagggtaaggctgttatgagcaacaaggaggagaaagactgccaagtaaccgaagaagagaagaaacggaagaaggggaagaagcataaggacaagggtcagggcagcaattctgatagctcatgtgccaggaaccatagcattgagatggagcaagctgatgtgtcagccaagatggctgaagactcctgcttggagcatgcagaggctgttacgagcaaaagctctgcgaagaaacacaggaagaaaaagaggaaagataaagaggttgaaactattggccagaagcagatactcgatgctgatgaaaatgttgggtcagaagatacgaagaggaacagcagagaaagggaacatgataggaagtcaaagaagcacaaacgaaagcatcaggatgacgagactgcctcaaatggttcttctggtaatcaaattgttttaggggaagataagaggacggaaaaagagtatttagttaccttggatttggaagaggacaataaatctgatatgtcaaagattgggaagaagacagatagcaagaagaagaggagaaaagagagaaatgatggtgttgacctaagacaaaatacactagttggagagggcaagaatggtaagaataacaaagagaaaaaaatgtgtgaggatgagaatggtggcggtgaaagagagaaagaaaacatgggaaagcagaaggataagtgtagacgagtgagcttcactgatcatgtggaggtgtttaatataggtggtagtgatgatgtagagggtgatgggagtggtgaaactgaacttgtgcatggacgacggtttagccctgaggaagatgcaaagctaatggaagcgatattgaaatatgcagagttgaagcaattaggagagaaagggttacagatgattggggaaagtaataagcatccagagaccaggggttgttgggctgaaatagcattacctcatagacccaagaaagccaaatacgcgcgtggaaaggttttacttcaaaggagtgctgaacgtaaatggaccgctgaggagtatgagataattcgacggtttgttgaaaagaacggccgaaattggaagggacttggagtcaggatgagtaccaaaacttgtttgatttggtaaatctggacatgcgtgtgaaagcccatcaaaacatcaatactggtcaccgtcatataagagataacatttcttgggaggctatcagtgaaaaattaaccactcgtagagccgaagaatgctgcacgaaatggtacgggcaattggcatcgccgctggttaaacaaggaatctgggcagatacagatgactacatgttagtggaagcgcttcaaaatgtcgatgctgtttgtgctgaagatgtggactgggagaaccttctcgagcacaggtctggggagctttgccgtcatagatggaaccagatgattcgcctgatgggtgaccacagatataggcctttcattgagcaagtggaagtgcttgcaaggcggtactgcccagagatgcttgcgtacaggaaaccagtcgcaggtggatcctcggccgacgaacctgctggagcctctgacttgtaatatgggatctttagaaacgttagcagcatatggttctagagctgccaagggtgtcgtcagcactctgatctcaacaaactttggtattgttgagggcttatgtatcttctggatttgaaatcacggatgttttatcgcccaactaatcatgatttggggctcgattagagaacgactaggaatcaggccgtccagttagaactaatagtctgattaagtgttggatgactgttgaaaatgcaatgtgaacttagcagctgtgcacttgcacttttaccttggacttggaaattgccgttgccttcttggctttcaaccttcccagctgctgttaaaaaacggaacctattacccccggt

SEQ ID NO: 5518 - DNA, 3483 bp, Zea Mays
cccaagccacctctgcttctcctccgtctcgtcgtcggccatgacacccgccggtggcgccaaccactccccggcgccgcgtagcctggtattcgccttctacctcaccggccatggcttcggccacgccacccgcgccatcgaggtggtgcggcacctgatcgcggacgggcacgaggtgcacgtggcgacggccgtgccggagttcgtcttcaccgccgaggtgcggtccccgcgcctccgcatccgcagggttatcctcgactgcggcgccgtccaggcagatgccctcaccgtcgaccctctcgccacgctggataagtaccgtgaggcggcagtgttaccccgcgagttcatcctcagggccgaggctgagtggcttagctccatcaaggcagaccttgtggtctcggatgttgttcctattgtgtgcaaggtggcttcagatctgggtgtccgctctgtatgcattgggaattttagttgggacttcatatatgctgaatacatcatggaggctggatatcatcaccgatctattgtgtggcagatagcagaggattactcccattgtgacatattacttcgactacctggatatggcccaatgccggcttttcgcaacgtcattgatgtgcctcttgtggttagaggattacgcaaatctagatctgaggtgaggaaggaactaggaattgaggagaatgctaaggtgctcgtttttaattttgggggtcagccagcaggatggaaactgaagcaagaatgtctccctgatggttggatttgtttggtctgtggtgcctctgattctcaagatgttccaccgaacttcattaagcttgcgaaagatgcttacacacctgatgttatggcagcatctgactgtatgcttggaaaaattggatatggaactgcaagtgaggctttggcctgcaagctaccattagtgtttgttcgcagagattacttcaacgaagagccatttttgcgaaatttgcttgagcactaccaaaacagcattgagatggtcagaagtgatttccttgctggacactggaaaccgtacctacttcgtgctctcacacttcaaccatgctacaatggcccaataaatggtggtgaggtggtttcccagattctccaggacactgctattggaaacaaatgtatttctgataaagctagtggtgcaagaagattgcaagatgccatggtctcaggatatgtacttcaaagggttcctgggagagatgcaggcattcctgactggtactctgtgtccgaaaccaaaactggtggcggtccgacctcacaaaatgttgctacaaaggaaagtgcagcattatgtattgaagacattgagatactccatggggaccttcaaggattaacagatacagtggactttttgaagagcttatctgaacttaatggaaatgatttgaagagccctaagaagcaagacctagagagaactgctgcatctgttctttttgactgggagacagaaatatatgtagcaagggcacctggacgtttggacgtcatgggtggcattgctgattattcagggagtcttgttttgcagatgcctcttcgggaagcttgccatgttgctgttcagagaaaccatcccagcaagcagaagctttggaaacatacaaaagcaagacagcttgttaacggaggcttggtacctgtgatacaaattgtatcatttggttctgatttgagtaaccgtgcaccaacttttgatatggacctgtcagattttatggatgatggtaaaccaatatcctatgagaaagccagggagcttttctgtcaggatccatcccaaaaatgggctgcctatgttgctggaacaattctagttttgatgactgaacttggtgcccagttcactgacagcattagcattctggtttcatctgccgtgccagaaggaaaaggtgtttcatcttctgcatcagtggaggttgctacaatgtctgctatcgccgcagcctatggtttaaacatcataccaagggatcttgctttgctttgtcagaagttggagctccttgtggagtaatggatcaaatggcatctgcgtgtggagaagctaacaaactccttgcgatggtttgccagcctgccgaagtgaaggaattggttagcatacctactcatatacggttctggggtctagattcagggatacggcatagtgttggcgggggagattatggatctgtgagggtaggcacttacatgggacgaaagatgatcaagtgtacagcatcagatttagtttcagaatccttgacttcagggtcccctgctcagtctgattgttataaagaaaatggtgtgggcgtactgaaatctgaagctgcactggagtatttgtgcaacctaccacctcacagatatgaagctgtttatgcaaaagacattccagaggtgattagtggagaagcattttcagagaaatatggagatcacgatgacacagtgacagttattgatcctaaaagatcttacagtgtgaaggctcctactagacatcccatatatgagaacttccgtgtcgaggccttcaaaacgttattagaggcaggtaatacagacgagcagctgtcagcccttggagaacttatgtaccagtgccacaacagctacagcgcatgtggcctcggttctgatgggactgacagactagtcaacctggtacgagaagtgcaacacaggaggacatccgaaggcggaagccctagtctgtttggcgcaaagatcaccggcggaggctccggcggcacagtatgtgttgttgggaagaactgcgccaggagcagtgaagagattgcagagattcagcacagatacaaggctgagaccgggtatctgcccattcttttcgacgggtcgtctccaggagctgggaagtttggttacctgaagatccgacgtcgttgtccctagtggctgattgggaaacgaagaacttcagttcgagctttgtcacatatcactcaattgttaagaacctcactccaactctccaagccattgtagaacatagaggcgtattgccacttgcgatgattcgtcgttcacacacaaaatattatcatgtgctacaccaattctggaagctactagaggaaaatgtgaggaatataaagaaactcttgttgagcagatgtagtctagtggtctccgtgtgcttgctgcagtgtaaccaaactccaagtagatgtgctctgggctctggcatgtggtatgtgatgaagtcgaggatggtttcttgccgtttgatgaccagtgtagtcgttggttaacttgtcagtcgtaaactgatgttgtcagttaggagcggataaagtttgtgtgtgttgtcagtgtatctgtgtgtaagtttattggacagaccgaaagatacaccacgaacccagatgaagtaggtaatagtcgtatgtgaagtttttatcatta

SEQ ID NO: 5519 - DNA, 1793 bp, Zea Mays
cctccctccttcccctctcctagtctcctttcgcctccgaattccgatcaccaaaaaaaggcctttcttttcttttcgtcgccctctcggtgctctgcttcgctgcgtcgcccgcccgtctctaaaagccttgtgtggatcgtggacgccgacgcggccgcagcagcagccacgggacgggagtagaggcgcagagagagagaaagagagaaagagagagaggttgtgctcgctgcctgccgctgagagacggatgaagaagtgcccatcggagctggagctggaggctttcctccgcggccgggaggacgccacggcggcggcggcggcggcggtggccgagcagaagcctacgcacgacatcgctgcgctggcgccgttcggcgccggtggcgtgttcccctccagcgatctgtccgccttcagcttcgctgactcgaacaccctcaatggaactggaaacatccataatcacctttggtcccataaccacaacgtcaggcatcccgcagtctccacgacgatcgagtcgcagtcgtcgatctgtgctgcagcagcaagtccaacatcggctaccaacctgtacctgaaagagagccaggctctgggcggcacgagtggttccgactccgacagcgattcgctgctggacatcgagggtggcccgtgcgagcagagcacgaacccacaggacgtgaagaggatgcgacggatggtgtcgaaccgtgagtctgctcgacggtccaggaagaggaagcaagcccacctagctgaccttgagacacaggtcgaccagctgcgaggcgagaacgcgtcgctcttcaagcagctgacggacgccaaccagcagttcacgaccgcggtcacggacaacaggatcctcaagtcggacgtggaggccctcagagtcaaggtgaagctggcggaggacatggtggcgcgcggcgcgctgtcgtgcgggctgggcagcctggggctgtcgccggcgctgaacccgcggcaggcgtgccgcggccccgacgtgctgtccgtgtccggcctggacttccccggcgccgacgacgcctgcttcacggggctgtccccggcggagcagctgcagctccagagctcccccctgcagagcatcgccgccagcctcgagagcctggacaaccggatggccagcgaggtcaccagctgcggggggcccggcgtcgacgtctggccgtgggaccaccactccaacggcggcctgtccaagtgaagccggagacgccgggtgggagtggggtgagactcgcgccgctcgccgacggcacctatcctgtcctagtgtatgcgtatatcgatatgcatggcgggcgctagctatgaccatgagccgccgttatttctgtgttcgctggagtggtgaaagtgaacggacttgagtttttcagagtccctcgtctccgtcggtacatttactagttctgtaatagaactgactagcttaagctcgtgctactacatatatatatgtatgctgagagactgaactcgaagcataatcatgctaccatattatgtcatcattacatttctatctctagtctgattgtgttaggtgctgtgattcagatgagggccggtttctatttctagtctgagtgcgttaggtgttgtgactctatgagacacatgcaagggaagctcaggtaagtgaacagagagccacatactattctgaatatttcatatcagtaaaatctctgaaaactcccatgcactgtacattcttgtctgtatacattttctccttttttttaaca

SEQ ID NO: 5520 - DNA, 474 bp, Zea Mays
atggaccaatggggtagcgaaacgcgtcctgacaatttgttccgatcctcttatggttacgacccgcctgccgtccgctgccacacagcagcggagttagtgactacgcaatcggtcgagctcgtcgtgaggctcttccgctcttggtcggtggtgctgtttcgcgtcctgggaaaaatggatgcggaggcggcgagaaggaagcaggtggcgcctccgcaggagaagaggaagcgcggccggctggagctgcggcggatccaggaccggacgagccggcaggtgcgcttctccaagcgccggagcgggctgttcaagaaggcccacgagctctccgtgctgtgcgacgccgaggtcgcgatggtcgtcttctcccccgccggccgcctctatcactacgcctccctaggcaccaggatcaagccacgaagcatcttcttctcagaggcaaatgtaggaatggcttatacactc

SEQ ID NO: 5521 - DNA, 1029 bp, Zea Mays
cagcgagatctcgatcaaacagcttctctgatctcgctcagaagcgaggacatcagacattattgcaattgtatttgcacagcagcgagatctcgctcagaagagactctgaagagataacgagctgcgcttcttcgtcctcgatcaactagcttctctggtcgcttccatatggagagagctgcgtcaagctgcgctagcctcctagcacaaagggatgcgggcggaaggccgtggagaaggtggccaagcgcatcatgggcaaggaggtgaacaccgcggctgcctccggggagaagacgccgtgggtgccggacccagtcactggctactaccgcccggcgggtggcgccaaggaggtggacgcggcggagcttcgcgccaggctgctcaccaagaggatcgccaactgaatcaatctagctgcagagcagtgcggctgagattatttagcgccagttcatctcttgggcctagagcatgacggtgctgtatctttttgaggcataactagcttcaagttcggaccgtctgaataaagttatccctgcataaacagggggttagagaagtggactcacatatccagtttctgtattgaagcaaacaatattctggtgaccttgagcatatgcaaagcactgtagcaaagtgagcactgaaacagaaatgaatagcaaaatattatcacatcaagcaaccttccatgggggtgctctgcaagcgcctgcttaaagtggttccagaaaatgacttagtaaaacaattaaatatgcctacttgatggcattgctcaacattgtttatataccattctccaacaaaacgcttgacgtacttgagcgtgtcgggatgactgattgtaaaccgtgctcaactcatgtgaacactcaggtgaaactctcaacagcttagggctggccaatcagcacatacggaaataattttagggcttagggttggccacaagaaactactatcatgtatcatacaaagtacttttttctcgaacacgtaggagagctacac

SEQ ID NO: 5522 - DNA, 1646 bp, Zea Mays
cacccctccctcacccgcgtagccctgcccggaccgcgctcaccaatgccggcctcccacgcggtctgtacacgccagcgcgcatcgtgcaccagttccacggctccagccactcaacgacccccggttccccggtctcggactctcggtctcgcacgctccctccccatccccaattcggtttcgctccgccccggctgccgcacccatggcctcctcctcctcgctcttctcgccgtgcgccctcaccgccaagctcgggatagggcacgcgtcctatggctccggacgccgcgccaacttgcgccggcgcggccgcctctcggttgtggccgtacagacgggcccgcagaagccgtctccgtcgtcgtcccaggccgccgcggcggaggatgaggcggatgcgctgcagaagcttctgaagagggagtacaagtacgggttcgtatccgacttcgagtccttctccatccccaaggggctgtcggaggccaccgtccgccgcatctcggagcttaaggcggagccggcgtggatgctggacttccgcctcgccgcctaccgccgcttcctcaccatggtcgagcccacctggagcgacaacgagtacgcgcccgtggacctgcagtccatttgctactactccgcgcccaaaaccaagcccaagctcaatagcctcgacgaggtcgacccggagctgctcaagaccttcgaccgcctcggcatcccgctcaccgagcagaagcgcctctccaacgtcgccgttgacgccgtcatcgactccacctccatcgccaccacccaccgcgaagcgctcatggccaagggcgtcatcttctgctccatctccgaggccatccgcgagtacccggaccttatcaggcgttacctgggcagcgtcgtaccgccaggcgacaactactatgccgctctcaactcagcggtgttcagcgacgggtccttctgcttcgtgcccaaagacacagtctgccccatggaaatctcgacctacttcaggatcaacgacaaggagaccggtcagtttgagaggactctgattgtggccgatgagagaagcacagttagctatttggaaggctgcactgcaccagcttacgactcgaatcagctccatgctgcggttgtggagcttgtgtgtgaggagggggcagagatcaagtactccacggtgcagaattggtactctggtgatgaggagggcaaaggaggcatttataactttgtgacaaagaggggacggtgcaaagggcatggttcgaagatctcatggacacaggttgagactggatctgctattacatggaagtacccaagcgtcgagctcatcggggacgatagtgttggagaattctactcggttgcgcttacaaaggattgccaacaagcagacacagggacaaaaatgatccacaaggggaagaattcacgcagccggatcatatccaagggcatatctgcagggaagtcaaggaattgctaccgcggcttggtcctgatgaaccctagtgcggagaatgcttataattcttcacagtgtgactcattgctgatcggggataatgcggctgcgaacacctatcccaccattcagtagtaaggaaagaagggaaagctagaaatgtctg

SEQ ID NO: 5523 - DNA, 2041 bp, Zea Mays
cacgagtgacggcagcataggctgatccgcaacagatccgcatatccttcctcccttccgtatccgccgatcaaccggccacaaaaactctctcacttacatttgcgggcccattgaacgtgcggcccactttcattgagagacgaacacgcgagtagagaatttctcctgcctgctcacgaccgccctctcgccggtcgccggtcgccgctcgcaacgcaagtcggaagaggaatctctccaagctccaatcctccgatcctgccccaacccaagtcccctccaccaggccgcacacctccgccgcccggcgcgaccttgcatccaccagcctgccctctccttcgcgtgaggcggccccggcgaccgcgtcggcagtgcaagaccagaccgaggcttctcccgttggaaggttccagccatggcgagcgccgatctgctgcggaaggaggaggagttctactcctccctctttgattccgcaaaaggcgacggcgtcaagtcgcgctcgcaggtgattgagaggaagattgaatccctcgaggacatggccaccaaggtcagcaaccggagatcaagaagatggttgaacgaccgcttgctgattgagcttgtcccacgccttcatgttgaagaaatcaaaggcctctttgctcctccaccatggggtgaggagctgcccttgtcagcattctgcaggacaagtgttagtgactgggaggccttcaggagcatcgacatggatgctgaggcaagattgatgcaacacatgaaacgatcatccgaaaaacaaaggactcatgtcgacgaagatgaattgattgctctgaatgcttggcgtcgtataggtcgccaaacaagagaagctattaagaaaaaatttctacctgatctacttcaaatatatgaagtattgccttctttgctttagtttaaccccctctttttccataaaaaccaggctcattctcttcatctcctccacaattgattgaagtgataatatttgatgaaagctaatctgtttttcttgcaaacaagacatgagagttcttggttatgtatttatatatatctgaatctgctatctttctcgcacatgctaattcatcatgcataccacatctaatttgttatttgtagtttcaagcctcaatattatgcgaagtctatgagacaggataaattttattgaatagctttctaaatttacagtatcgacaatatcaatttagtgctatgcttataaaagcaaagatgtcgttgttatgacttatatctgtatgatgcctaggttttgtttggaaaataatgttcagaaaaggtgcattgtgggtctctttgtctgctgcccttgtttccaccttgtgtaaatatttttcctgtcttcaaaagttggcatcagttttgcagttttcttatgccactgctaacaacttctcttccagtctatttgacttggcgtgtcagttgtttatactatcagcttttgcgtttcatgtttgcaggaacaggttagggccttcattgaaggtactggtgacagcgacgtgcttgtgctgaatgtccaggacccgttccagaggctgcttctgcacggtgtttgtgagttctataacgtaacctcaatgaccacaagcagtgtaagggacgggaagccatggaagagcaccaccatcaagaagaggcatgtcaccggtcttcctccgagaatcacattagttagcttcctgaggatgaggaagaattagtcgtcccagtaacatgtggatgtgagggtcctacactaattcgcctggatgtgtactaaaaagacaaatttgttgctttaggtcgcatctagcatgtaatcaaatgtaaaatatccatgtcaaatgtaaaatacattgcaagaccttgttccagatgaagaaactcaaaaaaaaaaaaaacccgatatgtattagatgaaacattccagtgacgctgctctgttagcatatatgttgcgcataaacaaccatacttaaaccacactcttagctgacactgtattataaaa

SEQ ID NO: 5524 - DNA, 3298 bp, Zea Mays
cagacgacgccaccgtcacgccccaccaccaccaacctatcccccaccgcgtcacgcgcctccacctccccagatcggcggcgaaccggggggcccggacaggcggcggagagctcgaggcgtcatggcgaagtcgagcgcggacgacgccgagctgcggcgcgcgtgcgccgcggccgtggcggcgtcaggcgcgcgcggggaggaggtggccttctccatccgcgtcgccaagggccgcggcatcttcgagaagctcggcaggctcgccaagccccgtgtcctcgctctcaccgttaaacaatcatcaagaggcgaggcgaacaaagcttttcttcgagtattaaaatattcatctggggcagtgctcgagccagccaaactttacaagctgaaacatctaacaaaggttgaggttatttccaatgatcccagtggttgtacatttgttctgggatttgataaccttaggagtcagagtgttgccccaccacaatggacgatgcgtaacattgatgacagaaatcgtctacttttttgtattctgaatatgtgcaaggagatactcagttatcttccaaaagttgttggaattgatattgtggagctagctctttgggcaaaggaaaacacactgaccatagataatcaagtgagtacccaagatggtcaagaaacatcagttgctactcaaaccgagaggaaagtaacagtaactgttgaaaatgatctcgtgtcccaagcaaaagaggaggaagaagacatggaggcacttcttgacacgtatgttatgggaataggtgaagcagatgcattctctgagagattgaagcaggagcttgtggctttggaggctgcaaatgtatatcaattactggaaagcgagcctttaatagaagaggtcttgcagggtctggatgctgctagtgcaactgtagatgatatggatgagtggctacggattttcaatctgaagctgaggcacatgagagaagatattgcatcgattgaatcacgtaacaatggcttggagatgcagtctgtaaataacaaagggcttatggaagagctagataaattgcttgagcgtctgcggattccacaggagtttgcagcatcattaactggaggctcatttgaagagtcacggatgctgaaaaatgttgaggcatgtgaatggttgacaggggccattcgcagtcttgaagttcctaatttggacccatgctatgtcaacatgcgcgctgttagagagaaaaaggcagagctggagaaactgaaaacaacttttgttcgacgagcatcagagtttttgcggaactacttctccagtttggtagacttcatgatcagtgacaaaagctacttttcacagcgtggacaattgaagcggcctgatcatgcagaccttaggtataaatgcaggacatatgcccgacttctgcagcacttaaagagtctggacaagagctgcttaggtcccttaaggaaggcatactgtcattcccttaatttactactacgacgagaggcacgcgaatttgccaatgaacttcgtgcaagtacaaaagcaccgaagaatcctgctgtttggcttgaaggttctggcggctctggtcataatggaagcagttctgatacttcacaggtctcagatgcatactcaaagatgcttacaatatttatcccgcttcttgtggacgagagttccttttttgcacattttatgtgctttgaagtacctgcacttgttccagctggttctcctaatgctaataagagcaaatccggaggaaatgacccggatgatgatctgggtcttatggatccagatggcaacgatctgaaacctgacagtacctctgctgaactgggtacattgaatgaagctcttcaagaattactcgatggaatccaggaagacttctatgcggtcgtagattgggcttataaaattgaccccttgcgttgcatctcaatgcatgggattacagagcgttacctttctggacagaaagctgatgctgcaggatttgttcgcaaactacttgatgacttggaatcaagaatatcagtacagttcagccggtttattgatgaagcatgccatcaaattgagcgtaacgaaagaaatgtgcggcaaactggaattctagcctacattccaagatttgctgtccttgcatcacgtatggaacaatatatccaaggacaatccagggatttaattgataaagcatacacaaagctagttagcacaatgttcgcaactttggagaaaattgcacagagtgatcctaaaactgctgatattgtgttgattgagaattatgctgctttccagaacagtctttatgacttggctaatgttgtgccaacgcttgcaaagttctaccatcaagccagtgaatcatatgaactagcttgcactcgccatatcagctcactcatttatctgcaatttgagaggttatttcaattcaaccggaaagttgacgaattgacttacactattgctgctgaggagataccgtttcagctgggattatcaaaaactgacctaaggagggtactgaaatccagcttatctgggaggctcgttcatcccacggtgtcaccatgagaactgacacagtgtaaaactgtgcagattgataagtcaattagcgccatgtacaggaggttgcaaaagacactgacctccgacgagttgtttccttcgctgtgggacaagtgcaagaaggagtttttggacaaatacgagagctttgttcagatggtaacacggatatatgggaatgagccgatcatgtcagtcaacgaaatgaaagacgtccttgctggtttttagatacaagtacacagcaccatgtatgatttcagagaaatagctatgtattccattcattccattgaattctgcacccacttgcgttactgtgttaggcgccctttttgggttatgtgtgtgtatgtggatgtcctctgtatagaagtgaacgcggcatgcttcccctaatgatgttcctgtgtcgcatcgagccgtcagtgacaatgcaaactgcaaacccggagtaccggaaggaacatgttcatgtttatgacgtcatttgtccaattgccgttccattcacggtcaagaaggtcatgtcttgccaagttcgctttgtttcctggtctgaggtctcattgctactttcggttgttcagctgaagactgaagtgcaagctatcacgtgtcgggctccagttcgttagtgtggccccatatgttgcgggcttcccagcttagaaacat

SEQ ID NO: 5525 - DNA, 1930 bp, Zea Mays
atagcacgaaatggttttgccttcgcttttgcttatgcgtacgcgcggcgaatcacggcgcccaccttccaaccggacttgagtcacttgactccgccgcgggattccccgccagatctcattctcgccccaaccctaaccgccgacggtggccatgatggccaccgagcccttgtccccggggaatctcgtcgaggacgtcgaaacactacccctggactcctcctccactctcgcggctacgacggacccgctgctccgcccacctcccccctcgtccaccttctctcccaccgccggtgagaaccatggcgcgtttctggacgaggaggatgaggacgtggtggatgacttcacgcctccgctggctccccatgccgctacggccgcgacgaagtcccgcgaggcgtcaccgtggttcgctgagatcactgtctccgagcctaggaagcacgcggagcccgcgaccggagccgtgggcgtcattcccggctcggccagctacgtctcctacctcatcgccactcaggtgcccgacggaggcgagttccgcgtgcgtcggcgattccgtgacgtcgtggcgctcgccgaccgcctcgcggagacccaccgcggcctctttgtaccggcgcggcccgacaagagcatcgtcgagggccaggtcatgcagcggcacgacttcgtgaaccagcggtgcgtcaccctccagcgctacctccgccgcctcgccgcgcaccccgtcgtcggccgcaaccccattctccacgccttcctcaccgagcccagcggcatccccacttccgacggtgagtctcccaggtggagccctgcgatgagtgctgctacgtccatggctgcttccgctccagtgacgcctaccaagagtgggagagacttttttggggtgttcaagggcctgaagcagacagtgacgaatgggtgggtggcggtaaggccgcctctagtggaggaggagattgacacaaagtaccttgtgcacaaggccaagcttgaggacttggagaaacatctggtgacagcatctcagcaggcagaggcatttgttaaagcttttgacgatctaagatcaacgacaggtctcttgggaatgtcattcatcaaactggctatgtttgaaaaggagcaggctgcgtgtagttctcagaaaagacgagctgctgacatcagtaattttgccagtgctgttattagagttagcagatcacagacaaaactaaacactgaaattgtaaaacatctgatctatatttcttgcatacccgggcaggaaaacttgaatctgtatcagcgagaggaatggatcaggagagatcaaggtatcaaaagatagaagaattgaaagaaacagtaagagccacggaagatgcaaaaacacgtgcacttaaagaattggaacttatcaaggaaaataacatgaatgaaattaaaagatttaacaaggaaaggcgccaggatttggtggagatgctaaaaggctttgtattggatcaggccacatactcggatcattttgctaccatatggacaaaggtagcagaagaaacaaaaggatatgcaaacagcagcagttgaagtaggatgtacatattcaggtgaatttgagctgttactgtgcagcgtgaatagctacactcattgagaatcatgcgactggcttatacacaaacaggaccacactcttcattcccgaaggatacatttctatggatttttctggggattggtatctcaagttgtgtacctgaattttttcagaaaatatagcaataccattttccacggcttcgtttccgcagccttggcttcatacagggtttacattttcgttttgtactttcaaaaaacttttttgttgaccaaagtttgaattttatattttcaaatttgaaatcgaatacactacaaatcg

SEQ ID NO: 5526 - DNA, 1933 bp, Zea Mays
atagcacgaaatggttttgccttcgcttttgcttatgcgtacgcgcggcgaatcacggcgcccaccttccaaccggacttgagtcacttgactccgccgcgggattccccgccagatctcattctcgccccaaccctaaccgccgacggtggccatgatggccaccgagcccttgtccccggggaatctcgtcgaggacgtcgaaacactacccctggactcctcctccactctcgcggctacgacggacccgctgctccgcccacctcccccctcgtccaccttctctcccaccgccggtgagaaccatggcgcgtttctggacgaggaggatgaggacgtggtggatgacttcacgcctccgctggctccccatgccgctacggccgcgacgaagtcccgcgaggcgtcaccgtggttcgctgagatcactgtctccgagcctaggaagcacgcggagcccgcgaccggagccgtgggcgtcattcccggctcggccagctacgtctcctacctcatcgccactcaggtgcccgacggaggcgagttccgcgtgcgtcggcgattccgtgacgtcgtggcgctcgccgaccgcctcgcggagacccaccgcggcctctttgtaccggcgcggcccgacaagagcatcgtcgagggccaggtcatgcagcggcacgacttcgtgaaccagcggtgcgtcaccctccagcgctacctccgccgcctcgccgcgcaccccgtcgtcggccgcaaccccattctccacgccttcctcaccgagcccagcggcatccccacttccgacggtgagtctcccaggtggagccctgcgatgagtgctgctacgtccatggctgcttccgctccagtgacgcctaccaagagtgggagagacttttttggggtgttcaagggcctgaagcagacagtgacgaatgggtgggtggcggtaaggccgcctctagtggaggaggagattgacacaaagtaccttgtgcacaaggccaagcttgaggacttggagaaacatctggtgacagcatctcagcaggcagaggcatttgttaaagcttttgacgatctaagatcaacgacaggtctcttgggaatgtcattcatcaaactggctatgtttgaaaaggagcaggctgcgtgtagttctcagaaaagacgagctgctgacatcagtaattttgccagtgctgttattagagttagcagatcacagacaaaactaaacactgaaattgtaaaacatctgcagatctatatttcttgcatacccgggcaggaaaacttgaatctgtatcagcgagaggaatggatcaggagagatcaaggtatcaaaagatagaagaattgaaagaaacagtaagagccacggaagatgcaaaaacacgtgcacttaaagaattggaacttatcaaggaaaataacatgaatgaaattaaaagatttaacaaggaaaggcgccaggatttggtggagatgctaaaaggctttgtattggatcaggccacatactcggatcattttgctaccatatggacaaaggtagcagaagaaacaaaaggatatgcaaacagcagcagttgaagtaggatgtacatattcaggtgaatttgagctgttactgtgcagcgtgaatagctacactcattgagaatcatgcgactggcttatacacaaacaggaccacactcttcattcccgaaggatacatttctatggatttttctggggattggtatctcaagttgtgtacctgaattttttcagaaaatatagcaataccattttccacggcttcgtttccgcagccttggcttcatacagggtttacattttcgttttgtactttcaaaaaacttttttgttgaccaaagtttgaattttatattttcaaatttgaaatcgaatacactacaaatcg

SEQ ID NO: 5527 - DNA, 1123 bp, Zea Mays
gagcaacgtcacctatcctttctgcctccctcactttcccatgtcagcaacccaacccacatccaccggaagatgagagctccagctccagctgctcctattcccgcgctgctctcccgctgctcctcgcctccctcctcggccccgcgccgcctcctctcctcctcccgcacgccagccgcctgctgcccgcctccggcagtcgtccgctctgtctccgtcgatttgctggcggtcgccggggagccggctgtcgcaggcgccccctccgcaacgccgtgccgtcgcctcatcctcctccgtcacggggacagcgccaccgggggccgcttcaccagagatcatgacagacctctaagcaaggctgggagagctgacgcaatcagcgtctctaataaactccaacagatgggatgggtacccgagcttattctctgcagtgatgcaatgcgcacaaaggagactcttaagattctgcaagagcatgtccatggattgtctgaagcagtagtgcactttatcccaagtttctactcaattgcggcaatggatggccaaactgcagagcatttgcaaaaggcgatttgtgaatattcgagtgatgagatcttaactgtgatgtgcatgggtcataataaaggatgggaagaagccgcctctatgttttctggcgattcagttttgcttgagacatgtaacgctgcgttgctagaagctgcaggcaaatcatgggttgaggccttttttgtggctggtctgggaggatggaagctccatggaatttggtttttacatgccactgaagctttcggtctgaaggtatcaacatggttagatagatgagatgagatgaatgaattcttccacggtccatgagttatatcggttctgcttttgcactaagcaaaactgaagacctcgcatttcactcccttcacccagaaacctaaagtgtctgctatttatgtttaaatatagagtataaaatacaaagatatatgtgttttgttggttagatgggtgtgaacgtgagtttagagccattaaaccgggtttgacctgtatgattttagtttttttatcatttaaatgtgaggaaacagtgatggagccacatggtatg

SEQ ID NO: 5528 - DNA, 3609 bp, Zea Mays
ccgacaagcaaccacgcgcgaagaaacgcagacattcccctcgtcgtctcaggctctccgcagtccccacacatcagctgccgtagcaacgttcccgggaattccccaaaatgcccctcgaccccgactcctcgtcgccgccgccgccacaccgcgactggttcttcccgccggcgccgccgttcctcgcctcctccaggtcccggacccccagtgcgcccttcccctccacctaccgctcctccaagccctactcagcctaccccctcgccgaccgccgaccgcctcctaccccacgctcccgctcccgctctccgcacccaccgccggagcagcagcagaagacgccgacgccgcctactcctacgtccgcgccgcgccgccgtgaccctcggtacgccggcgtccgccgcgaagatgcccgtacggctgcctccgagcaagcggcggccccgatggccgcgccagtgcacgggaggaagcccgcagcgtcggcgatcgctccacggtggtcgggggtgctctccgtggcggttattttactgtgcctggcctcccttctccgcaggaacttctctttgcacgaccaggtttaccttctgcaggagcagctggctgtagctactgcaaaacttcagtcctgcactgtagattcttcattgaatacaagcatcattaatctgttctatcaggatgctgctaacagtaccacgcagagcagaagccttaagaacctttccttgcttatctcgctttcggtattatacgcaccactcctcattctcaagtacgtggaccttgtgtcaaagataaggaggtcacgtgactctgaacaagttccaataaacaagcggttcgcatacagggtcgatatatttttgtcacttcatccgtatgctaaaccattggtcctacttgttgctacgttgttactaattgctcttggtggactggctctgtatggtgtgacggatgatagcttatctgattgtctttggctgtcctggaccttcgtcgctgactcagggaaccatgccaatgctgtgggtcttggacccaagctggtttcagtttcaattagtattggtggaatgttggtttttgctatgatgcttggtcttgtcactgattcaatctctgagaagtttgattctttgaggaaaggaagaagtgaagtcatagaacagagccacactctaattcttgggtggagtgataaattgggatctttgctgaaccaaattgccattgctaatgaaagcttgagaggtgggaccattgtagtgatggctgagagagacaaagaagaaatggaagcagatattgctaaaatggagtttgacatgaaaggaacagctgtaatatgtagaagtggaagccctttgatacttgctgatttgaaaaagtttcaaaggcgcgggcaattgttgttttagctgaagaaggaaatgctgaccagagtgatgcacgagcactgcgaacagtcctgagtttaactggagttaaagagggactaagtggtcacatagtagtggagcttagtgatcttgacaatgaagttctagtcaaacttgttggtggagatcttgtggaaacagttgtggcacatgatgtgattggacgattgatgatacagtgtgcacgtcaaccaggccttgcacagatatgggaagacattcttggttttgagaactgtgaattctacattaaaagatggcctaaattggatggaatgcgatttgaagatgtgctgattagctttcctgaagctgttccatgtggcataaaagtggcatcttatgggggcaagattattttaaaccctgatgattgttatgttttgcaagagggtgatgaggtgatagtaattgcagaggatgatgatacatatgctccagcaccattgcccaaggttaaagaggctgtttacatagacattgttcatcctgaaagaaagcctcagaagattcttctttgtggatggcgacgggatatagatgatatgattgcggttaggagagggtatctgcctaaagattttgttgttccaaagtctccagaaagaatattgttttgtggttggcgccgtgatatagaagatatgataatggtacttgatgctttccttgcgccaggatcagagttgtggatgtttaatgacgtccctgaggttgacagagaaagaaagctaattgatggaggtttggacttcagtcgcctcgataatattactttggtgcatcgtgagggaaatgctgttattcgccgtcacttggagagccttcctttagaatcattcgattctatcctgattttggcagatgaatctgtagaagattcagcaatccaagctgactcaaggtcacttgcaactttgctgctgataagagatattcaggcaaaacgtcttccatgcaaggaatcattgatttcacatgttccccgagggaccttttctgaaggttcttggataggggagatgcaacaagcatctgataaatctgtcataatcagtgaaattttggaccccaggacaaaaaatttgttgtcagtgtcaaaaattagtgactacgttctttcaaatgaattagtgagcatggcattggcaatggtcgcagaagatcggcagataaataatgtcttggaggagctcttcgctgaacaaggaaatgaaatgcaaatacgaccttctgatatgtaccttagagaagaagaggaattaaatttctttgaggtcattctgcgagctaggcagaggaaagagattgtcattgggtaccgtcttgaggcagctgagcgtgccataatcaatccaatagacaaagtttcaaggcgaaggtggtcacccaaggatgtttttgttgttatatccgagaaagaatgaggtttatcagatcacagttgacacaaaagcaagctcctgaccagtgaccacacctaatgaagaacaggcagctgcgccgcagcacacacacacacaccgaccagcgcagagagctatttgattcagatgcgcatttggctgattcagatgcgcatttggcagaaggcaatcgctgagcgcgaaggagtaaaagcatgatcagatattcagatcttggatcagtctagactgacaccttaggtcgccctttacaaatatgacttaaaaaggatgtgaacagagtagtacagcacatgctttggaagtttggatattcttgtccgtgtaacttcccacatgaacaacgagcaaagcatcgcctgcatgcatcaattaatggcttaaagctattgagtgctgatactgagcagttttccagtgagcctgttacaccctcccatagagcgtagacgacagcgatagttcagcattctgtacattgcataggcgcattctgttgccagtccatgtaaacaacatgagatgtcggccagtccatgtaaatatgtaatctggaagatcatctgtaggtactgttgcggtgttggatcttgtgaagaatgcagagagcaatgccgaagcgtgtcaccttgcctcattgtacttgagcagatatatattatgtccaacaagtctatgcttcacaacgaatactcaaaatctttgattcataaactcaacaaaag

SEQ ID NO: 5529 - DNA, 1816 bp, Zea Mays
cccacactcccaccgtactcccaaacaaaacattctctcatagtctcatctcatgtgcacggaaaggcatctattgcctttctcccaacccgccaaaccctacttgccaccgccaaacttccgccttcgtccgcgccggcgccgctctatcgctctaaaataacctttccagttccaccgggactagctgaaaggagagggaacggagggggatggcgtcgccggacgacgagataagccggctcttccgcatccgccgcacggtgtatgagatgctgcgcgaccgcggatacggtgtccgcgacgaacaaatcaagctcgaaaggcacaagttcatcgaacgctacggcaaccccgtccgccgtgacgagctcaccttcaacgccacaaagttgaacggcccatcggaccaggaactacgtcgagaagatgaagaacgagaacgtcttcgccggcatactcgtcgtgcagcaggcgctcagcgccttcgcacgcagcgccgttcaggaggtctcccagaagtaccacctcgaggtcttccagctgccccggattcagattacagacccgatagcaagatactatgggatgaagcgtgggcaggtcgtgaagatcacaagagccagtgagactgctggaagatacatcacctaccgctacgttgtctgagttttgctacattctcatggcttaagcttccgcaccaagcgaaaatgacctctacttgctaatcctgctgtgtactcggaatatctgttgccctggtgcccttccttgagaactgatctcgggctgttctggcgatagtaataggccgctgttccttaagctgtgttccatctcattttaggccctgttcggttgcagataggtgtgatattggggggtgatattggatcgtgatccaaatgtttcttcacaaattattagggtcataaattatttttagttaaaaaatgaataggaatagggtctgatcctaatccgatctttatgttttatagtttaaaatttagagtctattattacctattattacctctagttgtacagttatagaatattggaggggttaggtggggattaaatccctttctgtttaaaattgaatatggagatactcctctaaccgaataagctctagtgaatgattgtgctgttttttaaagacatgccctacatgtactaggagtgtgcataccactctagtcataccattccaatccttctcaatgtgaaccccatggacttttatttggttgtccattttaaaacccattaattcagcacaaaccaaaatttcatcaaccttaacattttcactgctccaacgagggcacacaaccaaagccatttctagggctaaaataggatggatattagttgatcctatgtcttactctaatgtattttagttggatatatgatctaatatgaatagtttgaaataggacggatacagatacagtggcatgatatttattcgggcggataagtgacatacggatgttatttggtcggatatcagatagttgttggatatttgttcgggcagataagtgacatatacagatgttatttggtcggatatcagatagttgttggatatttgttcgggcagataagtgacatatacagatgttatttggtcggatatcgaatagttgttggataatacatgaattgcttatcattcattatattttatttcttatatagccttaagcccctacatgaaaatgataaagttaagtattgattatgttggaactcggataaatagagtgatttaacgtgtaactcatacaataagtga

SEQ ID NO: 5530 - DNA, 1002 bp, Zea Mays
cacagttgaaacaacgacctgttcctcgtggttctggtggttcacgtgagtacatgggaagaggacctccaccaggaacaggtcgttgttttaactgtggaatggatggtcactgggcaagggactgcaaggctggtgactggaagaacaaatgctaccgctgtggtgaatcgggccatatagagagaaattgccagaacagtccaaggaatctcaggcgtgataaaagctattcacggtctccatccccacgtggtggacgtggccgcagccggagctacagcagaagccggagctatagccgatccagatccccatctggatctcccaggggtggacgccgtgaacgtgacgagaggagatctaggagtcttagctacagcaggagcgcaagccccaggcgttctgtctcacctgcaaaggaaaaggagcgcagtcgcacacccaatggcagtaggagcccaaggagccccagcccaagggctgaggtgagcccaccactgaaggataatggtgcacgcaatggctcagaccatgaaggcaaccctggtggtggagagaacagcaagaggagtcggagcccatctgatggctaccgtagccctgtggccaatgggcgcagcccgagcccgagggacgatcggagcccaagccccaagggcaacaacgaagatgacgagcgccgtggttcacctagaggaagtcagtcccccctgaactgagaaattctgatcaaatttgggccgcacgattcggttgtaactgttatattttagtttgagacaacaaactgtatttgctcatttctcatacagtcaggtttatgctttttgagctagaaaacatgtgtaagaatttgttaccttcaagctattcctggtttgtgatatggtaatacttgaactatttagcttgccaaatctgaatacttttaactatcaagtatcttgagttagtttgtctgttttgctaagctgcagcatttctcactaacgctttcgg

SEQ ID NO: 5531 - DNA, 1913 bp, Zea Mays
ggccgatctggaacggctgatgggccagctccgcgtttgggccgatgggcttaaacggcctagccagcaccaggcgagcagcgagttggattcagagtcagagcaaccctatctcttccccactccgctcctcgctcaccctctcaccaaatccttctcctccgcgccgccacagccgggcgcgcctctcgatcgagatccaggagatatgcctcgttatgatgatcgccatgggaatacacgcttgtatgttggaagattggcccctcgcacccgttcccgcgacctagaatatcttttcagcaaatatggaaggtaagagccgcactctgtctgcacagagagttattctgaagttcagagtgtgctaacttttattatgagggtgagacaccagttctgtcctagtatcacgagcagtttgtgctaacactgtggttgaattttgtggtacacagctacacatcaatcctgctaaactacactagcaaatatagggtcctttcctattttgttgatgatatgtggtttatgaaggttttgtgttgcttgaagtcattctgaggtttttgtggatggggtcatacaagtcttttttcttggtgtatgctctgttacatcactaagcacttcatagatgtttgacctccgggcctgtttgacttgaatgatcttgttgaaggttttcggttttttacccaaccatggaggtctgtggtggaagggtgcccttggtggaattggtggccattgttccgatatttgtggaggactttggtgaagggcgcccttggtaatacgtgaagtggagttgaagcgtgactatgcattcattgaattcagtgacccccgtgatgctgatgatgcgcagtacaacctagatggcagggaagtcgatggaagccgtattattgttgaatttgctaaaggagttcctcgtggttctggtggttcacgtgagtacatgggaagaggacctccaccaggaacaggtcgttgttttaactgtggaatggatggtcactgggcaagggactgcaaggctggtgactggaagaacaaatgctaccgctgtggtgaatcgggccatatagagagaaattgccagaacagtccaaggaatctcaggcgtgataaaagctattcacggtctccatccccacgtggtggacgtggccgcagccggagctacagcagaagccggagctatagccgatccagatccccatctggatctcccaggggtggacgccgtgaacgtgacgagaggagatctaggagtcttagctacagcaggagcgcaagccccaggcgttctgtctcacctgcaaaggaaaaggagcgcagtcgcacacccaatggcagtaggagcccaaggagccccagcccaagggctgaggtgagcccaccactgaaggataatggtgcacgcaatggctcagaccatgaaggcaaccctggtggtggagagaacagcaagaggagtcggagcccatctgatggctaccgtagccctgtggccaatgggcgcagcccgagcccgagggacgatcggagcccaagccccaagggcaacaacgaagatgacgagcgccgtggttcacctagaggaagtcagtcccccctgaactgagaaattctgatcaaatttgggccgcacgattcggttgtaactgttatattttagtttgagacaacaaactgtatttgctcatttctcatacagtcaggtttatgctttttgagctagaaaacatgtgtaagaatttgttaccttcaagctattcctggtttgtgatatggtaatacttgaactatttagcttgccaaatctgaatacttttaactatcaagtatcttgagttagtttgtctgttttgctaagctgcagcatttctcactaacgctttcgg

SEQ ID NO: 5532 - DNA, 1932 bp, Zea Mays
agcgagttggattcagagtcagagcaaccctatctcttccccactccgctcctcgctcaccctctcaccaaatccttctcctccgcgccgccacagccgggcgcgcctctcgatcgagatccaggagatatgcctcgttatgatgatcgccatgggaatacacgcttgtatgttggaagattggcccctcgcacccgttcccgcgacctagaatatcttttcagcaaatatggaaggtaagagccgcactctgtctgcacagagagttattctgaagttcagagtgtgctaacttttattatgagggtgagacaccagttctgtcctagtatcacgagcagtttgtgctaacactgtggttgaattttgtggtacacagctacacatcaatcctgctaaactacactagcaaatatagggtcctttcctattttgttgatgatatgtggtttatgaaggttttgtgttgcttgaagtcattctgaggtttttgtggatggggtcatacaagtcttttttcttggtgtatgctctgttacatcactaagcacttcatagatgtttgacctccgggcctgtttgacttgaatgatcttgttgaaggttttcggttttttacccaaccatggaggtctgtggtggaagggtgcccttggtggaattggtggccattgttccgatatttgtggaggactttggtgaagggcgcccttggtgtaatcttattgactgttgtagatgaagttgcaagttgatgcatttgagtacttgactcatgtcagcagcttactgtttgtggaaactatttgcgcagaatacgtgaagtggagttgaagcgtgactatgcattcattgtattcagtgacccccgtgatgctgatgatgcgcagtacaacctagatggcagggaagtcgatggaagccgtattattgttgaatttgctaaaggagttcctcgtggttctggtggttcacgtgagtacatgggaagaggacctccaccaggaacaggtcgttgttttaactgtggaatggatggtcactgggcaagggactgcaaggctggtgactggaagaacaaatgctaccgctgtggtgaatcgggccatatagagagaaattgccagaacagtccaaggaatctcaggcgtgataaaagctattcacggtctccatccccacgtggtggacgtggccgcagccggagctacagcagaagccggagctatagccgatccagatccccatctggatctcccaggggtggacgccgtgaacgtgacgagaggagatctaggagtcttagctacagcaggagcgcaagccccaggcgttctgtctcacctgcaaaggaaaaggagcgcagtcgcacacccaatggcagtaggagcccaaggagccccagcccaagggctgaggtgagcccaccactgaaggataatggtgcacgcaatggctcagaccatgaaggcaaccctggtggtggagagaacagcaagaggagtcggagcccatctgatggctaccgtagccctgtggccaatgggcgcagcccgagcccgagggacgatcggagcccaagccccaagggcaacaacgaagatgacgagcgccgtggttcacctagaggaagtcagtcccccctgaactgagaaattctgatcaaatttgggccgcacgattcggttgtaactgttatattttagtttgagacaacaaactgtatttgctcatttctcatacagtcaggtttatgctttttgagctagaaaacatgtgtaagaatttgttaccttcaagctattcctggtttgtgatatggtaatacttgaactatttagcttgccaaatctgaatacttttaactatcaagtatcttgagttagtttgtctgttttgctaagctgcagcatttctcactaacgctttcgg

SEQ ID NO: 5533 - DNA, 1880 bp, Zea Mays
tgaaaaccacaattaatttattaagtgcctttaaaggatacatggcgatgtggcatttgcaatacacatgctgggaaaggatatgaagctacctatgaaatacttcctaggctctgccaaattagatttgaccatggtgttattgatgaatacttatactttgactcacccaacgaatttgggttgcctaatggacaaatggtgctggagcatgcaaaagttgttcaaaaaagtgtttatgaacatctacatgttatacacgagggacatctgagaatcattttcacaccagaactgaagataatatcgtgggaattttgttcaagacgtcatgaggaatacaccactcgtaagactatagcaccacaggttaataatcttctgcaagttgtccagaaataccaagctgttgtcactgaaagtggatcagccgggatatcaaataatgatgcacaaaccatctgcaacatgtttgtcactgcatcacaacaactggcaaaaaatctagagcatcacaccttaaatgaacatgggctctctaaaagatatgtacgctccctgcagatatcggaggtggtgaatcacatgaaggacttgattgagttcagccacaagaacggccttggtcctaaagagagcctgaacagctattctaaaaccatggcgaagtttcagaatatgcatgattcaagacagctcatggctgctgctaaccttgccaataaccagagcaacaccaaactaatggggaccaaagaagaagcaagtgcttctgcgaccaaccagactcctggtgtcggagccatcggcaataatgctcttcagcatgccacacctctaaacagctaccagaatatgctcagaagctccagtgcaaatccagtcttgctgcagcaggaggcatcgagtgtcttcaaaggtcctacagcaatgcacagtggcatacagctggaagcagccagatccttccgtggacctaaccaagtgcagttccaacaccctgcggcgattcagcagcagcagcctatgccgcagcagagcaatttccagggctttggtggtgttaacccacagtaccagcaccatgtgcttaatcagcttctgcaggaagttaagaacaataaccacgtgaaagcacagcaactgcctccagatgcacctaaagcgagcggcggtcttgcaccaggagttgctattcccaacgttgctgctgctggggagcagggacagcatatcaacagtaatacccgtgaccataacggcgcggtgaagggtgctgctccagctggtactggcccaagcaatgtgatcaacaacacagccagcatgccccccggcagaaacaacagcttcaagtcggtgagcagcagtccagctgctgctaccggtggcattgcggtgaactcgaaggtcgacgactccttccatcaactggaggacctcgacctcgacggcttgatcacaaacgaactgatggagagcgggttgttcggcgccggacaagggtggtgagcatgtcccaccacgcctcacactactatcgagttccttcaccgaaagcgccaagcaacaatataagctttgccacccttctctttctggagtttttgtgttgacagtttcagatgatcgtgccatatacaattatgtaaggtagcgagttggatttggcttgggagtcgggaacggcgcaatctatagagctgttagcgtgtgcgtatgacatgttgctgtggttatcattttcatgctatggaggagtgtcgattatagtctcctgttgtctggcacggcgtgagtgtgtgtttcccatggttctatgaaatcaaattatagaagaaacaagatctaatgtttaggaatcgattctctatggttca

SEQ ID NO: 5534 - DNA, 1902 bp, Zea Mays
gttggtctctgccaagtgccaactctacctgatgatcgataacgattctttcatttgttcaagttcttagtttgctcagttcatagttcagatctattagtctaacgaagctacctatgaaatacttcctaggctctgccaaattagatttgaccatggtgttattgatgaatacttatactttgactcacccaacgaatttgggttgcctaatggacaaatggtgctggagcatgcaaaagttgttcaaaaaagtgtttatgaacatctacatgttatacacgagggacatctgagaatcattttcacaccagaactgaagataatatcgtgggaattttgttcaagacgtcatgaggaatacaccactcgtaagactatagcaccacaggttaataatcttctgcaagttgtccagaaataccaagctgttgtcactgaaagtggatcagccgggatatcaaataatgatgcacaaaccatctgcaacatgtttgtcactgcatcacaacaactggcaaaaaatctagagcatcacaccttaaatgaacatgggctctctaaaagatatgtacgctccctgcagatatcggaggtggtgaatcacatgaaggacttgattgagttcagccacaagaacggccttggtcctaaagagagcctgaacagctattctaaaaccatggcgaagtttcagaatatgcatgattcaagacagctcatggctgctgctaaccttgccaataaccagagcaacaccaaactaatggggaccaaagaagaagcaagtgcttctgcgaccaaccagactcctggtgtcggagccatcggcaataatgctcttcagcatgccacacctctaaacagctaccagaatatgctcagaagctccagtgcaaatccagtcttgctgcagcaggaggcatcgagtgtcttcaaaggtcctacagcaatgcacagtggcatacagctggaagcagccagatccttccgtggacctaaccaagtgcagttccaacaccctgcggcgattcagcagcagcagcctatgccgcagcagagcaatttccagggctttggtggtgttaacccacagtaccagcaccatgtgcttaatcagcttctgcaggaagttaagaacaataaccacgtgaaagcacagcaactgcctccagatgcacctaaagcgagcggcggtcttgcaccaggagttgctattcccaacgttgctgctgctggggagcagggacagcatatcaacagtaatacccgtgaccataacggcgcggtgaagggtgctgctccagctggtactggcccaagcaatgtgatcaacaacacagccagcatgccccccggcagaaacaacagcttcaagtcggtgagcagcagtccagctgctgctaccggtggcattgcggtgaactcgaaggtcgacgactccttccatcaactggaggacctcgacctcgacggcttgatcacaaacgaactgatggagagcgggttgttcggcgccggacaagggtggtgagcatgtcccaccacgcctcacactactatcgagttccttcaccgaaagcgccaagcaacaatataagctttgccacccttctctttctggagtttttgtgttgacagtttcagatgatcgtgccatatacaattatgtaaggtagcgagttggatttggcttgggagtcgggaacggcgcaatctatagagctgttagcgtgtgcgtatgacatgttgctgtggttatcattttcatgctatggaggagtgtcgattatagtctcctgttgtctggcacggcgtgagtgtgtgtttcccatggttctatgaaatcaaattatagaagaaacaagatctaatgtttaggaatcgattctctatggttca

SEQ ID NO: 5535 - DNA, 2893 bp, Zea Mays
gcggcggcggctccggctgccacaccaacagacaggcaagggctaggcaaggcgcaagaagaggaggggaagtcgaaaataatttagcagcggaagcggaagcagcagcacgaggttctggctaaattattttaatgtctttattatcagagattccagtaatgtgccttgcctcttttatgtgattgtacaaatcaatgaacggaactcatccctggacctccatgtccgggggtgcatgttctaaccttggatatgccagagacatgaatggtaatgttccaattagcactacaaattcctctggaccaagcattggagttagctcgttggtgactgacgccaactcgtcactttccggtggtgcccagttacagccaagtactagcatgaatggtgattcattgatgcgtgttcctgcatcaccaatgtcattttcatccaataacatctctggctcttcagtcattgatggttccatcatgcagcaaagtccaccccaagaacagatgcagaaaaggaggtcttcaagtgtaacatcacaacatgtgatcgatgctggtggtgcattgcatgctcagaagaaatcaaggactgatgttagtcagggtgatatcatgcaacatcagctgattcagcatctgatccatggtcagaattctcttcatttccaggggcaacagaacccacagcttcaagcttttatccagcagcataaactagcacaacttcagcaacggcagcagcagcatttgttgcaaccattttctcagatgcaacaaccccaagttggtattcctcggcagccgcaacttaggccgccattggcacagactggaatgcagttaggtggtcctgttaggactcctatcgagaggggtgtttgttctcgcaggatactgcagtatctatttcacaagcgtcatcgcccagagaataactctataacatactggaggaagattgttgaagagtactttgcacctcgagcaagagaaaggtggtgtgtctcttcttatgaaaacagagggaattcttcagctgctgctccacagaaagctctggatacatggcgatgtggcatttgcaatacacatgctgggaaaggatatgaagctacctatgaaatacttcctaggctctgccaaattagatttgaccatggtgttattgatgaatacttatactttgactcacccaacgaatttgggttgcctaatggacaaatggtgctggagcatgcaaaagttgttcaaaaaagtgtttatgaacatctacatgttatacacgagggacatctgagaatcattttcacaccagaactgaagataatatcgtgggaattttgttcaagacgtcatgaggaatacaccactcgtaagactatagcaccacaggttaataatcttctgcaagttgtccagaaataccaagctgttgtcactgaaagtggatcagccgggatatcaaataatgatgcacaaaccatctgcaacatgtttgtcactgcatcacaacaactggcaaaaaatctagagcatcacaccttaaatgaacatgggctctctaaaagatatatatcggaggtggtgaatcacatgaaggacttgattgagttcagccacaagaacggccttggtcctaaagagagcctgaacagctattctaaaaccatggcgaagtttcagaatatgcatgattcaagacagctcatggctgctgctaaccttgccaataaccagagcaacaccaaactaatggggaccaaagaagaagcaagtgcttctgcgaccaaccagactcctggtgtcggagccatcggcaataatgctcttcagcatgccacacctctaaacagctaccagaatatgctcagaagctccagtgcaaatccagtcttgctgcagcaggaggcatcgagtgtcttcaaaggtcctacagcaatgcacagtggcatacagctggaagcagccagatccttccgtggacctaaccaagtgcagttccaacaccctgcggcgattcagcagcagcagcctatgccgcagcagagcaatttccagggctttggtggtgttaacccacagtaccagcaccatgtgcttaatcagcttctgcaggaagttaagaacaataaccacgtgaaagcacagcaactgcctccagatgcacctaaagcgagcggcggtcttgcaccaggagttgctattcccaacgttgctgctgctggggagcagggacagcatatcaacagtaatacccgtgaccataacggcgcggtgaagggtgctgctccagctggtactggcccaagcaatgtgatcaacaacacagccagcatgccccccggcagaaacaacagcttcaagtcggtgagcagcagtccagctgctgctaccggtggcattgcggtgaactcgaaggtcgacgactccttccatcaactggaggacctcgacctcgacggcttgatcacaaacgaactgatggagagcgggttgttcggcgccggacaagggtggtgagcatgtcccaccacgcctcacactactatcgagttccttcaccgaaagcgccaagcaacaatataagctttgccacccttctctttctggagtttttgtgttgacagtttcagatgatcgtgccatatacaattatgtaaggtagcgagttggatttggcttgggagtcgggaacggcgcaatctatagagctgttagcgtgtgcgtatgacatgttgctgtggttatcattttcatgctatggaggagtgtcgattatagtctcctgttgtctggcacggcgtgagtgtgtgtttcccatggttctatgaaatcaaattatagaagaaacaagatctaatgtttaggaatcgattctctatggttca

SEQ ID NO: 5536 - DNA, 3797 bp, Zea Mays
ctttcccctccgcttccgcagacggccaggccaacgcaaccgctcctgccatccgcaccagtccccccctcccctccctcccggactcacccggccgccagcggggtttggccgcttcctcctcctctgcggcgggagcgggacaacagacacaggggcacagaggaaccggcgcggggcggcgcaatgggggacgctgcggcggcggggaccctgcacaagagctacttcgacgtgctggggatctgctgcccctccgaggtgcccctcgtcgagaagctgctgcggccgctgcccggcgtgcgcaccgtcaccgtcatcgtcccgtcccgcaccgtcatcgtgctccacgacgccgccgccacctcgcccgcgcaaatcgtttccggggcgatagctctcaaggactactccgaggctgggttcatcgtgttcctgttcactacggccgaatggctggagaccagggcgagccacaaggcgactgctgggatgtcgtcgctgatgagcatggcgccacagaaggctgtcgtagcagagacgggggaggtggtggcggctcaggacgtcaaggtgggcacggtgctagccgtcaaagccggggaggtcgtgcccatcgacggcgtggtcgtggacgggcggagcgaggtcgacgagagcaccctcaccggggagtccttcccggtcgccaagcagccggagtcccaggtctgggccggcacgctcaacatcgatggctacatcgctgtcaggacaactgccatggcggacaactctgccgtcgctaagatggcgaggatggttgaggaagcacagaacagtaggtcccgaactcagaggctgattgatacgtgcgccaagtactatacgcccgctgttgtggtcatggctgcgggggtggcggtggttcctgtggtggtgagagcgcacaacctcaagcactggttccaactggccctggtcctgctggtgagcgcgtgcccgtgcgcactagtgctgtcgacgccggtggccaccttctgcgctctcctgacggccgcgaggacggggctcctcatcaaaggaggggacgtcctcgaaaccctggccaggatcaagattgccgcctttgataagacagggtctcgagcattgagagcagatcgagccacccaatggcgtctgtgctggttgattatgcccagtcgaagtcagttggacccaaatctgataatgtcgccgagttccaaatcttccccggtgaggggatttacggtgagatcgatggggaaggtgtgtatattgggaacaagaggattttgtcaagggcctcatgtgaaacagttcctgacatgaaagatatgaaaggagttaccgtcggatacgttgcctgcaaagggcagttaatcggagtattcactctctcggattcctgccgaactggatcagatgaggccatcagggagctgaggtcgctgggcatcaagtcagtgatgcttactggggatagttctgcagcagcttcatatgcacagaaccagcttgggaacatacttgatgaggttcactctgagcttcttccagaggacaaggtgaggatcgtcgacgagctcaaggcaaagcatggcccgactctgatgatcggcgacggcatgaacgatgccccagcgctggccaaggccgacgtcggagtctcgatgggggtatctgggtcagcggttgcgatggagacgagccacataaccctgatgtcaaacgacatccgccggatcccgatggccgtccagctggcgcggaggacgcaccggacgatcgtcgtcaacatcgtcttctcggtgatcaccaagcttgcgatcgtcgggctcgcgctcgccgggcatccgctcatctgggcagccgtcctcgcggacgtcggcacatgcatgctggtgatcatgtacagcatgctgctgctgagatcggaatcgaacggcggccggaaggtgaagaagtgctgtgcctcgtcgcagcatgggtcacactcacacgccaggaagaagcattgtgtctcccaccactgttcagatggcccgtgcaacaagtcgacggcaggctgttccaaggaatcgccgtctgctggtaagcatgcttgcagtgatcatggccatgcccacacccactgcaaagagccgagcaaccaccggccggaaaggcatgcctgtcatgatcacggccacagccataaccactgcaaagagcccagcagccatgtggttacagaaaagcatgtctgccatgaccacggcaacacccatagccactgcgaagaggcaggcaaccagctgctgcttgtagagagccacggttgcaatgaccatggccatgggcatagccatgaccgctgcaaagagctcagcagcccgcgcttcaccagcaagcacgagtgccatgaccatgagcatagccactgcaaagagcccaagactccgtgtgctgacagtgaggctgcttgccatggccatggccatggacacgaacatcggcactgcgaaggggacagccactcacacgctacaggtgagcatggctgccatgaacatgatgcgcacagccactgcgaggagcacggccattcagacaccgctgttgagcatgcttgcgagcatgagtgccatggtgagcaccaaactgtgcacgctgtggaaacacaccactgccatgaccacgaccatgagcacggacagcatgagcttggggagatcgaggaacctgagaaggactgccacgaccacagccaccactgctgccatgagcctcacggcaaggacaaggtcgcggccgagccagttgaagaggtcacgatctcaatcgctgccctgcccaaagacgaaggccaccaccacagcgaggaacaacacaatggggagcactgcaggaaggcgaaagactgcggcggcggcggcggcgctgctcccaccgactgcgctgcgagcaagaactgctgcggcgtcaaaggtggagacgcctgctcgagcgtgcaggccgcgcgtgctagggagaccggcccgtgctgccggagctacgtgaagtgccccaggacggcggcggcgagcaggagcagctgctgcggccacagcatgctgaagctgcccgagatcgtggtagagtagtagtagtactgtagtagggtggaaattccaccgtgggagaagggtgtgcacatatgaacaagcaactgtgaggtgagtgtgactcgccggcgtaaatgtagactaagatcgccggtgcagggtgtttgatctagtagtctagttactatataggtttgctggagaaaaaaatgatgtaggattttgactgagcagagcagggggtctgaaaggtggaaggaagggctctgcttggttttcctgcacactgctcctctgtttgcgtcttctgtggcggcggcggcaatggagactgtcacagacgaaggatgtcatgtgactagtgccggccggggccaacactaatattcaggaactatccatatccatttcggtcccttttaaaatgggagtttctttttctatctcctacgttttctattttagaataaattgatttatgtgactgcgattgcgttttagaataaattgatttatgtgactgtggctatgaaattactgggttctaaaatttctgtgctacggcccgatcgtgaaaaaaaaatactgggttctaaaacggcccttcgaccttaggggccgatacagaattagagagtaggaagagccaagcaatttatcaatactataaagtgaaggtatatacacacgcgtagatgtgtatataga

SEQ ID NO: 5537 - DNA, 4125 bp, Zea Mays
ttcccctccgcttccgcagacggccaggccaacgcaaccgctcctgccatccgcaccagtccccccctcccctccctcccggactcacccggccgccagcggggtttggccgcttcctcctcctctgcggcgggagcgggacaacagacacaggggcacagaggaaccggcgcggggcggcgcaatgggggacgctgcggcggcggggaccctgcacaagagctacttcgacgtgctggggatctgctgcccctccgaggtgcccctcgtcgagaagctgctgcggccgctgcccggcgtgcgcaccgtcaccgtcatcgtcccgtcccgcaccgtcatcgtgctccacgacgccgccgccacctcgcccgcgcaaatcgtgaaggcgttgaaccaggcgaggctagaggcgtccgtgcgggcgtacggcggtgggtcggacgggaggcaggcagccggcagcaagagatggccgagcccgtacgtcctcctctgcgggctcctcctcgtcgtctcgctcttcgagcgcctctggcctcccctcaagtggtgcgcgctggcggcggcggccgccggcctgccgccgatcgccctcaggagcttcgcggccgcgcggaggctcaccctcgacgtcaacatactcatgctcatcgcagtttccggggcgatagctctcaaggactactccgaggctgggttcatcgtgttcctgttcactacggccgaatggctggagaccagggcgagccacaaggcgactgctgggatgtcgtcgctgatgagcatggcgccacagaaggctgtcgtagcagagacgggggaggtggtggcggctcaggacgtcaaggtgggcacggtgctagccgtcaaagccggggaggtcgtgcccatcgacggcgtggtcgtggacgggcggagcgaggtcgacgagagcaccctcaccggggagtccttcccggtcgccaagcagccggagtcccaggctacatcgctgtcaggacaactgccatggcggacaactctgccgtcgctaagatggcgaggatggttgaggaagcacagaacagtaggtcccgaactcagaggctgattgatacgtgcgccaagtactatacgcccgctgttgtggtcatggctgcgggggtggcggtggttcctgtggtggtgagagcgcacaacctcaagcactggttccaactggccctggtcctgctggtgagcgcgtgcccgtgcgcactagtgctgtcgacgccggtggccaccttctgcgctctcctgacggccgcgaggacggggctcctcatcaaaggaggggacgtcctcgaaaccctggccaggatcaagattgccgcctttgataagacaggtacgatcactcgaggggagttcagcgtcgaggagttccaggcggttggcgagcgcgtcactacgccacagctcctttactgggtctcgagcattgagagcagatcgagccacccaatggcgtctgtgctggttgattatgcccagtcgaagtcagttggacccaaatctgataatgtcgccgagttccaaatcttccccggtgaggggatttacggtgagatcgatggggaaggtgtgtatattgggaacaagaggattttgtcaagggcctcatgtgaaacagttcctgacatgaaagatatgaaaggagttaccgtcggatacgttgcctgcaaagggcagttaatcggagtattcactctctcggattcctgccgaactggatcagatgaggccatcagggagctgaggtcgctgggcatcaagtcagtgatgcttactggggatagttctgcagcagcttcatatgcacagaaccagcttgggaacatacttgatgaggttcactctgagcttcttccagaggacaaggtgaggatcgtcgacgagctcaaggcaaagcatggcccgactctgatgatcggcgacggcatgaacgatgccccagcgctggccaaggccgacgtcggagtctcgatgggggtatctgggtcagcggttgcgatggagacgagccacataaccctgatgtcaaacgacatccgccggatcccgatggccgtccagctggcgcggaggacgcaccggacgatcgtcgtcaacatcgtcttctcggtgatcaccaagcttgcgatcgtcgggctcgcgctcgccgggcatccgctcatctgggcagccgtcctcgcggacgtcggcacatgcatgctggtgatcatgtacagcatgctgctgctgagatcggaatcgaacggcggccggaaggtgaagaagtgctgtgcctcgtcgcagcatgggtcacactcacacgccaggaagaagcattgtgtctcccaccactgttcagatggcccgtgcaacaagtcgacggcaggctgttccaaggaatcgccgtctgctggtaagcatgcttgcagtgatcatggccatgcccacacccactgcaaagagccgagcaaccaccggccggaaaggcatgcctgtcatgatcacggccacagccataaccactgcaaagagcccagcagccatgtggttacagaaaagcatgtctgccatgaccacggcaacacccatagccactgcgaagaggcaggcaaccagctgctgcttgtagagagccacggttgcaatgaccatggccatgggcatagccatgaccgctgcaaagagctcagcagcccgcgcttcaccagcaagcacgagtgccatgaccatgagcatagccactgcaaagagcccaagactccgtgtgctgacagtgaggctgcttgccatggccatggccatggacacgaacatcggcactgcgaaggggacagccactcacacgctacaggtgagcatggctgccatgaacatgatgcgcacagccactgcgaggagcacggccattcagacaccgctgttgagcatgcttgcgagcatgagtgccatggtgagcaccaaactgtgcacgctgtggaaacacaccactgccatgaccacgaccatgagcacggacagcatgagcttggggagatcgaggaacctgagaaggactgccacgaccacagccaccactgctgccatgagcctcacggcaaggacaaggtcgcggccgagccagttgaagaggtcacgatctcaatcgctgccctgcccaaagacgaaggccaccaccacagcgaggaacaacacaatggggagcactgcaggaaggcgaaagactgcggcggcggcggcggcgctgctcccaccgactgcgctgcgagcaagaactgctgcggcgtcaaaggtggagacgcctgctcgagcgtgcaggccgcgcgtgctagggagaccggcccgtgctgccggagctacgtgaagtgccccaggacggcggcggcgagcaggagcagctgctgcggccacagcatgctgaagctgcccgagatcgtggtagagtagtagtagtactgtagtagggtggaaattccaccgtgggagaagggtgtgcacatatgaacaagcaactgtgaggtgagtgtgactcgccggcgtaaatgtagactaagatcgccggtgcagggtgtttgatctagtagtctagttactatataggtttgctggagaaaaaaatgatgtaggattttgactgagcagagcagggggtctgaaaggtggaaggaagggctctgcttggttttcctgcacactgctcctctgtttgcgtcttctgtggcggcggcggcaatggagactgtcacagacgaaggatgtcatgtgactagtgccggccggggccaacactaatattcaggaactatccatatccatttcggtcccttttaaaatgggagtttctttttctatctcctacgttttctattttagaataaattgatttatgtgactgcgattgcgttttagaataaattgatttatgtgactgtggctatgaaattactgggttctaaaatttctgtgctacggcccgatcgtgaaaaaaaaatactgggttctaaaacggcccttcgaccttaggggccgatacagaattagagagtaggaagagccaagcaatttatcaatactataaagtgaaggtatatacacacgcgtagatgtgtatataga

SEQ ID NO: 5538 - DNA, 1264 bp, Zea Mays
tcgagagcgagccaaaaactcgaactgttcaaaccccgccagcccttccgctcccacgacccaaccccactgcccggagcccccgagccttctcgaatcttgcgagaaccccaggggcgaggagcagatgtcggcgaggctacgggtggcggagctccgcgcggagcttcagcgccgcggcctcgatgtatccggcaccaagcctgctctcgtgcggaggctggacgccgcaatttgcgaggcggagaaggccgtggtggctgctgcgccaaccagtgtggcaaatgggtatgacgtagccgtagatggcaaaaggaacggcgggaataataagaggaaaaggtccggggatgggggtgaagagggaaacggcgatacgtgtacagatgtgacaaaactagagggcatgagctatcgtgagctgcagggattggccaaggcacgtggagttgcggcaaatgggggcaagaaagatgttatccagaggttgctctcggcgactgctgatcctgctgcagttgcagatggtggtcctcagggcgaaaaggaagtcataaaaggtggtgatgaggaggttgaggtgaaaaaggagaagatggttactgccacgaagaagggagctgcagtgctggatcagcacattcccgatcacataaaagtgaactatcatgtcttgcaagtgggcgatgaaatctatgatgccaccttgaaccagactaatgttggagacaacaacaataagttctatatcattcaagttttagaatctgatgctggtggaagctttatggtttacaatagatggggaagagttggggtacgaggtcaagataaactacatggtcccttcccaacacgagaccaagcaatatatgaatttgaggggaagttccacaacaaaaccaataatcattggtctgatcgcaagaacttcaaatgttatgcaaagaaatacacttggcttgaaatggattatggtgaaactgagaaagaaatagagaaaggttccattactgatcagataaaagagacaaaacttgaaactagaattgcgcagttcatatccctgatctgcaatattagcatgatgaagcaaagaatggtggaaataggttataatgctgaaaagcttccccttggaaagctaaggaaagctacaatacttaagggttatcatgttttgaaaaggatatccgatgttatttcaaaggcggacaggagacatcttgagcaattgactgggaatctaccaattgagattttg

SEQ ID NO: 5539 - DNA, 1992 bp, Zea Mays
gtcaagcagaagcagaagcgctgaagcagcgcgtttgcagactgcaaagacccctgtgaatttgtgatgtactgaggtgttgtccagccaacagtccttgctcccaagattcttccgtactcccccctccatcggaccatcctctaccatagatctcccgaactccgccgtaatcgggacgaatcccgcgcgtgctcttgctccctgtcgttctccgcggccggcgcgagctgccggtggttcgttgccgtcgacctcgtctggccgctcctctgccctgccagctgccggattcctgctgctggactggattgctgcgcgtggagtcgtgagtatagctccatctatcctgactgatacggatcgacctctcctctcgtgggtttttgggttttcatcagttctatcagaggagtgcttatggatgattgcatggctgtagctagctaggccctgctttcctgtttgtaaagatacatcatggcaccacgcagtagggctccatctagaaggcctctctggttcattgtcttggttgcctttgtctgtgtagtagccattggagcctatctttatactccacagcattacacagcctgttatctggtaccatcagaagcctgcaattctcggcctcctccagaacctgctagggtatacactgatgatgagattgctgctcgtgttatcatgagagacatcattcgggctcggccagtgcagtcaaagaacacaaaaattgctttcatgttcttaacacccagtttattgccatttgagaagctatgggaaaaattcttcatgggtcatgaagacagatacaccatatacgtgcatgcatcaagagatataccgagtcattcaagtccaatattcgctggcagggatattcgaagcgaaaaggtgatatggggcacgatttctatgcttgatgctgaaaagaggctcttggcccatgccctacaagatcctgaaaaccagcattttgtcttgctttctgagagttgtgtgccacttcataacttcgattatatatatagttatctcatggagacaaacgtcagttttgttgactgctttgatgatcctggtccacatggagcaggtagatattctgagcatatgctacctgaaattgtgaagaaagattggagaaagggtgcgcagtggtttacagtgaaacggcagcatgcgattcttattctcgcggacaccctttactatgggaagttcaagcgttactgtaaggaaacgaatggcataactgctattcagacgagcactacttgccaaccctctttaacatggttgatccgactggaatctcgaactggtcggtgacgcatgtcgactggtccgaagggaagtggcatcccaaagtctacagggctgcggacacaagcttcgatctgctcaaggacatcgcgtccatcgacgagagcgtccacgttagcagcaacgcgaagcatgtcgcgcagaggaggccgtgcgtgtggaacggcatgaagcggccctgctacctgttcgcgcgcaagttctacccagaggcgctggacaacctgctgaacatattctcgaacttcaccatcatctgagcgagcggtggatcggggaggggtttccgtcctccctcttgagtgctgcggcatcagcggccgcccgccgtggtaactggtgaggccgtccggccgtctacttggtgacgggaatctagtagctgaaggaagcaggaacacggttaccggagcacgcagatctgggagatcgggattcagatgttgccacctgcttgctcatcctgccgcactcgtgtgatctcgctctagtagatcgctggtgtttttgcaggtgtagacattggctaggctggtgttggatgcacttctgttggtgttgatgaagaactgtgattaatttaataataatacgtacgtactaagttgtactcctccgtcccaaaatataactagttttagactaaccatacatcta

SEQ ID NO: 5540 - DNA, 4543 bp, Zea Mays
acggcgctcggagcgagcgggcggactgccacctgcatccttgccagaggtcgccccggaacccaagtgtcagcagcggacctgtggactgtgatgtcgcgagcgcgcgcgtgtgtggataacgattttgaccgatctaaacgggccaaatggatctatcaggtctttgacccacattatttcaaggaaagctagcggatcgctcgacggaatccggaaggcggaagccaccgaggcgagcggcgagcgcacgcaccggcacaagcaccacaccgccgctaccgactcgaccatcactcacccaattcgtggaggtgagagatggcggcgtcgggatcgggaggcaacgagcccagcggacggccctggactgcaaccagcacgtggacccccggtcccgccggcggggccgtggcggacgctgtctcgtttgagacctccgacgacgacgcggaggcgtcaccggcgggcgtcgtgctctgccacccgtcggccgactcggaccgcgacatgactccctgcccctgcgaggtcactgttagtttcaggggaaagtatgagattcacagggtatatgtgcgaagcacggctcggatatatgaactataccactctcctgatgcaaagggtaccagcaaggattatctatgcactgtgcgttgtggacttgctgttaaagaaacacagtgctgtggtgaagaaagtatgtcacagtggactggcagtgctttaaacagtgacaagcgtgaacatgaggcaaaaagtgtaagcagtgcaagtgatgaagatagttgggttgatgtcaagattccagaatctcctgcaggaaataaaacaccagaatctcaagaaaggagtgtgattcgaacctgccgagaaaatactctgccacactatgaagctactgctgagatgactgatgtgaacccatgtgtatctcttactgtacgtcttctatcacttcagtcgaagacatccgtgcacattgaggaaatctacatatttgctgatcctgttgagcccaccgatgatgtttcagtaagaggtcctgtaaacatgggaggtagttctttgctggcaatgcttgttcctggccttatgcaaatgtctaaatcaaggaatttgaaaatcgatgacagttatttttctgacggatcaaggaatcaagaaagcagcaaatgtgaaagctttacacaggaagcagggccatgtagcacaaatgattcaaaacatacgtctgcaggaatagaaaatggaatgaactctacagtcggtgtttcagcatctgatgataaaagcagccaaggtgaattccatttcaaggacccagattctcttccactccctgtacaaacattagaaagtacacaagcgccttcagtgaagaaccagcatgaattaaacacaggttatcttgctaatcccatcatgagtgaaaaccttactccttctaatcatattgagagaaagctggacactctgctttcgaaggtagagaatatggaattattttgctctaggtttgaggacagcatgataaagccccttggtagcattgaggcaaggcttcagcgactggaggaacagtttagttcgttcgctgttgatattcagtctttgagagattattctgcatttaggtcagcaccagatggtatgcctaatacaaagagctcacaggaggaagcacataatgatgctaatgatagaagtacttctacatctgacaggaagccaggtttagttgtcagggcgccagattttgtgtcagatgattcatgtggttgtaatgtgataactaatggaagccgtgttaattgtcatgggcctaatgtggtgccaagaatacttgtgaaggcccctgattttatttcccaacctgagttaacggatgaaaacctccatgacggacatgctctatcttctgaaaaggagtgtaagacttccccaggtttagttgtcaaggttcctgaactcccagatgatgatgatgatgatggagtcgaagataagaaacaggcagaagtttgtggtgatggtgatgatcacacaaggtctgatgatactctaaggaaaagcacagctggcaacaccaagagcaaaaaatctgtatctatcaatggcgcgttggcatccgcattggaggcattactcacttctaccataggaacatcatattcaaaacctactatttgtgctaccagtaatttaagtgctgaaaatattaatggtttcttcagttgctccccttgtcctgaaaaaactggcgagatgtccactaaagatggttcagctgtccaaattctgggtacatctggtgatccaaatttggtcggtgccttcatatcttctcaggaaattgatacagctccacataattctctctcaaaggaaatgttggatagcaaggttgagataaatgaacagaactgtgacatcaatacagaaaatgtggcatttgttgcaatcacagaaccattggatgttccctcacaggctgatacagttgaggaatctattaatgatggaagttgggtgaatagacaaaactatggttctaatttgaatgcaatgccttatgccatgaacgttgaacctttggatcctcctaagcctcctacagtttctgaacctgttgatagtggagttcaggtgaatgaagatagaccttccatatccttggtggagtttcttgcagcaaggaatgctagctcttgtaagaatggtacttctgaggtatgccttggtaatgttgccgctgaaaaactgtcttttgagagaacatcggctggagctggtaaaaactcgaaaaatatcagtcagcttctagtgaagaaagctcttgaggttgatgcggacaagatattttttttgtttagtgtacccattgggccaaaatttgaaggatcaagcagtcccacccccagaactagtgggcacaatattaataatacagaagaagctgtctcagataaggaatgtggcgtgaaggataccaagaatggatttaggccctctttggggatggactctatattttctcagtaccatgctacagattctaagaaaaatttgagtgagaacagcagttcggaccggattctagatgagagtttctcaaaacagaatggagaacaatctcggtcaagtctgagtagtatggtgtcatttagtggagcatctgccacagaacccgttgttccagggagtggcacatcggaaaattacgtggaagatcttacaggcgttagagatcgtcctgttgcaacactaaattctggggaagagctccaaaaggtctgtgatttactttatgagtttaaggatgaaatgttgagggcctccgtagcgaagtgtacaaataagagcagcccgtcacttgaagctttgcttgctgaatcatctgattctgaagcgcaaatctctgatctggagggtactgacagtggtgctggcattggctccggtcgactgtttagtacactctcatcttcagatgacgatgatgcttctgctgcggacgagcctttagttgatgttgctgacctgactacgccaccagagcgatatacttctgtccccagcgacgagcctctggttgacatagctgacctgacaaacccttcagggatagatgcttcttcagtgaatgagcctccggctgatgtggttgatctgctacatacttcaaacgagcctttggtcagtttggatggtctgccaaaccatccagagatgtgttttggtgggagcagtggagaacataccgacagtcttatttaaaggataaggccatgcggtactgatagttcagagatgagcggaacatataagtccatgcggctgatgtgaacgacagtctcatataagtgtgttccaattctgagcattgcaggagaaagcaaagttactacttaccagacgcgcctatattggtaccatttcagtttgaagtgatgtcacattgtcaccagacctgagttacaatcatgatgaacaacatctagaccagaccagacaagtgacaggttaagctcggaacatgctgtgttcttttactttcgatggaacacgccatgttccttccataagtaagcgaacagaagaacaggcggcgctctgttcacatgtgagcatgactgccacctgctgcgcgcctgcgctccgtgtatagaacacgggctagccctggtcctggcgaagtcgtcccgccattaatacgagacacggcccggcccggcccgtgcggcccattagtgggtccgactccgtcttcgctctgtctaggttcaaggaataggttataggaatccatggattcgcattcgcatccccgcgagatcacaaacacaaagagacacaagagaaacaatagtggataaacttttctcttgttatttagtatgagaaggtagatgcttatgatatacaaaagtagagccacttatggatatgtttgatattgtgcacttaaccatcgtatggtttcttaatattataccattttgtcttctctttataatagtatataatactatatgtg

SEQ ID NO: 5541 - DNA, 759 bp, Zea Mays
atcacagtccacaggtccgctgctgacacttgggttccggggcgacctctggcaaggatgcaggtggcagtccgcccgctcgctccgagcgccgtcggaggaggaggggggcgaggaggcggcgcggcgcgagacgccggaggagacgcggaagcggctggaggagctggacgcgctgctggaggggctggtcgagcccaagatgcggccgccaacgccacctcctcctccggatccgtacctggaccgagccacgatgataactgggcggggatcatcagccgacgagctgccagagttttctccgacatacgtggcgttctcgacgcttggactcgtcatcctcaccatcttcaccaacgtcatgttcaacctgtacataaaaccctccgtggacggcgtcgatccaccgcctgaaagaatccagagaacggccctagtcaatccagcagacaggccgtccgaatagttttctgcgcagcacaatacacacagtatacggttttgatgatgaagacatgtgtcccaggtgggaatggactatttaattgtgtggacagtgggtggactcacacattattactagcgtcatactgcttctctcaagtgacccattatccggtgggattacatgactgcgagctctgatgtgtgtcttgcatgctagctcctccatctttgctttaaagttacacaagatggcagctgcattttgtgatcgggtgttcttctttgtttcctttttatcctctccagtcc

SEQ ID NO: 5542 - DNA, 2769 bp, Zea Mays
atcaacggagcttagcctgggcagcagtgagcagccgccttcccctgtgctgcggatcgctacactacaccaccactcaccactcagttactcaccacacatccatccaactatccaagcccacagtgaggcagtgagcagcatcccctctcctgtagggggagtctgtagtagcaacctgttgtcgatcctactcatcagtcatcttccctgcgcaaagcctgcagctttaccaccgccgccgccgccgccgcctcctctccttcgaaagcgcgcctcctgctagctggctgtcctgagctcgggcctgtcccgcgcacgcaatcgcgccctgcctagcaagctagacaggcgccgccagttattgcaccgggtgcgatatcgcgctagccgcggagtgcggagtagtgggcggcggataggctgcgccgctactccttcgtgcgtgtgtggggaggattagtaactgtagaggaaggcaggcacgcaaaaggacgccctcgcctccgcctcccgcccgcgcactcacgtgattcatacttgcggccttctcgctcgctcccttcttcatcaccacccctctcgcgccgcagcgggcgggcaactactatatcaagcaccaaattaaacccacccagctcctctctcgccccttcgttcctgggagaccgtaccggccggccgcgggagatggtcgaggcgccggccgtcgtggtggtggtgcgggcgtacgacgccgcgcgcgaccgcgtcggcgtggaggaggtggagcgcgcgtgcgaggtcgggtgcagcggcggcggcaagatgtgcctcttcacggacctcctcggcgacccgctctgccgcattcgccactcgccggactccctcatgctggtacgtgtacacgtgcgtacgtgctgtgctcgcgcgctctctgtctgctctatacacccacgttgtggtcgtggctgcctgcggctaagcacaggcccagcggccggccggccagatgcagcaggtgtgagatgagccgctggggctggggctgggctcgcccgacctagcctaccacctgtcctgcgcccgtccccccatgcctcccgccctcgtctccttccgcctcgtcgtgtttcgttttcgtttcgtttcgtttcgtttcttctcgttccggttccggcgccccgtacgtagtacgacgtgggtcccggccggacggaggaaacaggaaggaactcaactgaaattaatggactgcccgcgaaacgcatgtctgaacggccgggatatgcattggaaaagcaggtcgcagagacagcaaccggccccaacagcacggagatcgccggagtcgtccgcggctgcgtcaagaccgtcgtctctgctggcaccaccaccacccagcaggctaataaggacgaccccatctacaccaaggttggctacatcctcggcctccgcgtctcgcccagccaccggaggaaaggggtggggaagaagctggtggatcgtatggaggagtggttccggcaaaggggggccgagtactcgtacatggcgacggagcaggacaacgaggcgtcggtgcggctgttcacgggccgctgcggctacgccaagttccgcacgccgtccgtgctggtgcacccggtgttccggcacgccctgaggccgtcccggagcgcggccatcgtggccctggagccgcgggaggcggagctgctgtaccgctggcacttcgccggcgtggagttcttccccgccgacatcggcgccgtgctatccaacgcgctgtcgctgggcacgttcctggcgctgccgtcgtcgccggcgcggtgggagggcgcggaggcgttcgtggcggcgccgccggcgtcgtgggccgtgctgagcgtgtggaactgcatggacgccttccggctggaggtgcgcggggcgccgcgcctgatgcgcgccgcggcgggcgccacgcggctggtggaccgcgcggcgccgtggctcgggatcccctccatccccaacctgttcgcgccgttcgggctctacttcctctacggcctgggcggcgccgggcccgacgcgcccaggctcgcccgcgcgctgtgccgcagcgcgcacaacatggcgcgcgacggcgggtgcggcgtggtggccaccgaggtcggcgcctgcgagcccgtccgcgccggggtgccgcactgggcgcggctaggcgccgaggacctctggtgcatcaagcggctcgcggacggctacggctccggcccgctcggcgactggaccaaggcgccggccagacgctccatattcatcgacccgagggagttttaggctgataagtagtaaatacacttaggcctagctttagggtttttttttggttctccccgggtcgtcgtccgttggatcccgtatccgacggctcctagtagctagctctagagaaggtcccacccttttgtgtttcgtttcaaaacatgtggtaacgcgcgcttgcttaggcgtaatttctgctagcgaaccgaattagttaaccttttcgatcttttgattgatgcatgtgaaacacacagctgctacaccctttttagttgttgtaactcgttggtggaccagggtggagaccagggccagtaccttctcctttttgggtccatcagagattaagctgagaccgcgttgagacaacgatctggacaggagctgagaacatgatttcccacttctgcctctttttttttttttgccacaaaaatcaaacaatagcgctactggcaccatacgaaa

SEQ ID NO: 5543 - DNA, 2656 bp, Zea Mays
tccaaaaatgctttgactattcaactaattttttcaggccaccagtccaccaggggtccacggcgcgccattagcgaaccgcgacctattcgccgtcgccaatcgccaatcgccaatctcctctccatctcgacatccgcagggcgttcgacgaaatgcgacgcaaacgccttgcggcgcgcgcccatgtggccaggcgtctcccccccgcacgctcctcctcatccggcctcgcgagcgcgcgagggagacgtcgctgtgccagcgcgaggcggacgtcacctcacctccccgccccgcgtagcttttctgacccggatgctacgctgcgtctccactactccgcctcccgccctgccgtccatgtcacgcctcggctccttcctttcgcctcccgactcctgcctgctgccccttgtcctcttccccacctcctccggaatctggccgcgcacctactcgtcgccctctcgttttcccgtctccgctttctttatcctgcgggcggagcgggtagggtggggcggtcgttgctctcggatcaagagaaagggaggaaaaaaaaacagcgctttctttctgtggccggcggttcgcccgtcgctcactggctgaagcggctgcacccgcgccctcttgctgtgtggccactggccaagcgggacacggaactcgagctccgtttggggattccggatcacttcgaggctaaagggattctgatcatcacttaagctcaagatcatgagttggttaaacaaaatttttaagggttcagtaaacagagtttcaaggggtcactatgatggagactggcatgaaggtcattcatctgatcacaccagagatacttacgatgacagtgataatgaagatatagatcgtgccattgcattatcgctagctgaggaagatcataataagggaaagtcggtggctattgatactgactataatctggaggaagatgaacaacttgcacgggctctgcaggaaagcctgaatgcagagtctcctcctcgacagaatgttcctattgaggatgtgccagtgcctcaatggaatattcctgttgagcgggtgcctcctcgacagtatgttccagcaaatgaaccaaccccacatgtttacccacggggtggatccaggatttgtgctggatgccaaaacccaattggccatggacgtttccttagttgtatggattcagtttggcatcctcaatgcttcagatgttttgcttgcaacaaacccatatcagatttgctatgcatgatgatcagccataccacaaatcctgctacaaagagttttttcatccgaaatgcgatgtttgcaacaactttattccaacaaatagagatggcctcattgaataccgagcacatcctttctggatgcagaagtactgtccttcccatgaagatgatggcactcctcggtgctgcagttgtgaacgaatggagccaagggagatcaagtacataacattagatgatgggaggaaactctgcttggaatgtctcaattctgcagtaatggattctccagaatgtcaacatctttacatggatattcaggaattttttgaaggtttgaacatgaaagtagaacagcaaattccattacttttggttgagaggcaggctcttaatgaagccttggaagccgagaaaaatgggcaccacctaccggaaaccagaggtctatgcctttctgaggagcaagttgttagaacggtgagttctttgttgcttttctctgctgatttgactactaccgcaggtaaagtataagggatggatgtactgagtgatataattcgtccagatcttaaaaagaccacagattggaccaggaaacagaatcttagatatgattataggaccatacaagctgtctcggcggtgtgaagtgactgcaatccttatattatatggtctgccaagattacaaactggttccattcttgcccatgagatgatgcatgcatatcttcgtctcaaaggattccgaaaccttagtattgaggttgaagaaggcatctgccaagttctatcccacctgtggttagagtcggaaatcatcgctggttctagtagcaacgttgcatccagttcagaagcatcatcatcttcgtcatcctcagctcctacctcttcaaagaagggtgcgaagaccgaattcgagaagaagcttggggcattcatcaagcaccagatcgaaacggattcttccgaggcatacggaggtggttttagagctggctatccggctgttgagcgctatggcttgaaaagaacccttgatcatatgaagttgacagggtctttcccatattaaagcaacagaagtaaaggagggggctttcttccagttgtgaggatacactccacattggaggttttggtttgggttatacataactgatatgcataccaaacgaggggaattgtctgtaaatcaggagaaccctctgctgcgcggaaacttattgcaaactgtctttttataggaaaacgatacatgcaagttttcagacagggaacttgagaggatcatatgtaatttttgggcacttgtttttgactcctttggttatcaaaaacaaggcaacataataagattgaaatttatcttcatctttaaattcatc

SEQ ID NO: 5544 - DNA, 2837 bp, Zea Mays
tccaaaaatgctttgactattcaactaattttttcaggccaccagtccaccaggggtccacggcgcgccattagcgaaccgcgacctattcgccgtcgccaatcgccaatcgccaatctcctctccatctcgacatccgcagggcgttcgacgaaatgcgacgcaaacgccttgcggcgcgcgcccatgtggccaggcgtctcccccccgcacgctcctcctcatccggcctcgcgagcgcgcgagggagacgtcgctgtgccagcgcgaggcggacgtcacctcacctccccgccccgcgtagcttttctgacccggatgctacgctgcgtctccactactccgcctcccgccctgccgtccatgtcacgcctcggctccttcctttcgcctcccgactcctgcctgctgccccttgtcctcttccccacctcctccggaatctggccgcgcacctactcgtcgccctctcgttttcccgtctccgctttctttatcctgcgggcggagcgggtagggtggggcggtcgttgctctcggatcaagagaaagggaggaaaaaaaaacagcgctttctttctgtggccggcggttcgcccgtcgctcactggctgaagcggctgcacccgcgccctcttgctgtgtggccactggccaagcgggacacggaactcgagctccgtttggggattccggatcacttcgaggtcacgaggctaaagggattctgatcatcacttaagctcaagatcatgagttggttaaacaaaatttttaagggttcagtaaacagagtttcaaggggtcactatgatggagactggcatgaaggtcattcatctgatcacaccagagatacttacgatgacagtgataatgaagatatagatcgtgccattgcattatcgctagctgaggaagatcataataagggaaagtcggtggctattgatactgactataatctggaggaagatgaacaacttgcacgggctctgcaggaaagcctgaatgcagagtctcctcctcgacagaatgttcctattgaggatgtgccagtgcctcaatggaatattcctgttgagcgggtgcctcctcgacagtatgttccagcaaatgaaccaaccccacatgtttacccacggggtggatccaggatttgtgctggatgccaaaacccaattggccatggacgtttccttagttgtatggattcagtttggcatcctcaatgcttcagatgttttgcttgcaacaaacccatatcagagtatgagtttgctatgcatgatgatcagccataccacaaatcctgctacaaagagttttttcatccgaaatgcgatgtttgcaacaactttattccaacaaatagagatggcctcattgaataccgagcacatcctttctggatgcagaagtactgtccttcccatgaagatgatggcactcctcggtgctgcagttgtgaacgaatggagccaagggagatcaagtacataacattagatgatgggaggaaactctgcttggaatgtctcaattctgcagtaatggattctccagaatgtcaacatctttacatggatattcaggaattttttgaaggtttgaacatgaaagtagaacagcaaattccattacttttggttgagaggcaggctcttaatgaagccttggaagccgagaaaaatgggcaccacctaccggaaaccagaggtctatgcctttctgaggagcaagttgttagaacgatcttaaaaagaccacagattggaccaggaaacagaatcttagatatgattataggaccatacaagctgtctcggcggtgtgaagtgactgcaatccttatattatatggtctgccaaggtaaattattttagggctagtttggcaacctaattttcccaaggaaaaatgaactaattttcttggggaaatggggttgccaaactagcccttacctttaattttttcctcgattgttttattgaggtcatcattcaaggtttctgccacttccactgtgaatgaacctttaatggatcctgaaatcgtgatgttcttatgtttgaagcatagctaggtagatctacttacttcttgtttatatgatggttacacagattacaaactggttccattcttgcccatgagatgatgcatgcatatcttcgtctcaaaggattccgaaaccttagtattgaggttgaagaaggcatctgccaagttctatcccacctgtggttagagtcggaaatcatcgctggttctagtagcaacgttgcatccagttcagaagcatcatcatcttcgtcatcctcagctcctacctcttcaaagaagggtgcgaagaccgaattcgagaagaagcttggggcattcatcaagcaccagatcgaaacggattcttccgaggcatacggaggtggttttagagctggctatccggctgttgagcgctatggcttgaaaagaacccttgatcatatgaagttgacagggtctttcccatattaaagcaacagaagtaaaggagggggctttcttccagttgtgaggatacactccacattggaggttttggtttgggttatacataactgatatgcataccaaacgaggggaattgtctgtaaatcaggagaaccctctgctgcgcggaaacttattgcaaactgtctttttataggaaaacgatacatgcaagttttcagacagggaacttgagaggatcatatgtaatttttgggcacttgtttttgactcctttggttatcaaaaacaaggcaacataataagattgaaatttatcttcatctttaaattcatc

SEQ ID NO: 5545 - DNA, 5020 bp, Zea Mays
ctctctcctcgcctctcctcttgtcgtcctctgctcctccgcggcgttgctgcttcctcgccacgccatacctgcgcgaacccctcccaatccgatcccctctcgtcttcgtttccttcccctcgccggactccgtctttcgccctagtatggaagagagctgaggctgttcggtgcccacgtcgggagttagggccggaggtgtggccgatcggcggggacggagtgagtgtaatgagcgggccacaggagcgtaacatgagggatctgtacaatcgcactcgccacaaagattttccggctctagaggaatcagccgaagggcgcagcggaggacgcccgtcgggatcggagcaacgggaactcgcctctaagatggaggacaaggctgtggtaaggaaaagattggtatcaagcaataacactcatgccaaagtagaatctggcacctgtaatgtctgttatgccccttgctcctcttgtttacacccacatattcgggttgtggattcgaatgttgaatgtgcatcctctcagacatgctccacaaggtcagaagtaaaaaacaattcactcgttcgtaatgagaaagggctttgtagtaaaggagaaaacgatgatgagtttagtgcaacctcaggtcatgtttccgactctgtggttgcaagagcatccattgcagacgattcatcagaggttaacatgccatcaaaacgcaggaggctgttaaatgaaaacacaagactacctagagcagaataccttgaagacagcaactcatgtgttactggtatatcagcagaaggcaaacttcatgtggataagaaaaaattatcaacttctgcatccagtcgagatttgactgctaaagattataaagtcaacagcatggctaaccacagcaaactaagaaaccaatgtattgatgaatcaaagaaaggatctgatggtcgtgacatgcatcctagctcatctggtagattttcccctgtagattcttctgttatgacaaaaaagatgctgcgaacccagtcttctgtcagtgcattgagcagattatctcctaacaggcaagctcatgaatttgggaaagcactggataatttatctcatcaaccttgtgagaaggcttctcttttgaagaataatgaacaactacgatgtgggcaattgaacccttgtatagctggtgaaaacaatcatggcacactggcaggctacagtaataggcatgcggacaaagatgttttctcattgaaggatctagacaatggtaccttgtgctcaaaagatgaaatccaagaacatggtggcatccattctaatgatgatgttaagaagaatgtgtgtggcgaacaagctttggatcaagattgttcaagggatatatccagtgacagaaagttgaatatacaacatgatgtgacagactgtgggaattcagaaggtttgatagatgttaatgtttgtgatatatgtggagatgttggtagagagtatcttttagctacatgcaccagatgccttgagggagcagagcatataaggaaagaaccaaaggacagaaagtcgaagcaagcctaagacattgcaaattgttgtgcctgattttgatgctctggaagtcacacacagcgcattgacagctgatcggtgtgatggtaacagtaaaaggttgcatttagcttcgactgatacacaaacacggcaactaaaggataccaccccagctgctcaaaggttggatgtgaagaacaaaaaatcattaagtgttacaaaccgtaacaaactgcaagttcttacatctgatttagacacacgaccacacaattatggaacatcaacatctggagtctataccaataaaagtcaaagttcagaatttttgttaaaccacaaaaagctgcgagtttctactgacatgcagtcgccactctcaagcgaaggcctacggagtccaccaatatcatgcaagagacatgcagagagtatgtcgtcccctaagcctaggatcgtcaaggcgggtacccttggaaaacaagatgtcatctctcgtgcgaactcatttaagaaatctaacaagggaggtttaagttcagttgataatattccagtgagaactacccaggctgtcaaaagttctgactctcagacattgtcacggtcatattccttggggaacatggtgaatgctaaagctccagttccttcaccaagaggctttttatccaagcagctatccttcaacagcaccaacaacggaccaaaggtcaaacagttggctgatggggtgtctagcaagttaagacctgcagaacattccccaagagatcctagagataagaaatccatcaaaaagattgtacaatcaggatccttcaaacacgagggttcagattccatagttgctggatcatcaaaaaaaaagcaaacatttcatttgtctcaagatgaaaaaccaggagtactgaaggtaataaaggaaaataatttaacagaaagaagggcttcatttagcttgaaaaaacgaaacattccttcatctccaaggcctgacagctgtatgaagtcaggggaaagaaaaaatgatcaggatatttcaaggtctggaacaagcatacttaaaagtagcaaaaaacctggatatgctgaaaagaagcagaacaatgatttgtccagaagtgataatggcaaggaagatgttaccgtgcatccaaaaacaatggaagtttctggtaaagatgcttacgtagtgaagacatctgatccaccagttcaaccccaatgtgccaaaaaggatagaccaaatgatgttgaggatgacgatttactcatttcagtgaataatgttaacatagcgccaaatgagcatgccgaggtggttcccacaacatttgctgccatgacttatgaatcagatttgcaagatgttccaagagaaagcacctctgatgattcagctccaaaagtggtatgttgccaacaaaagcttttggaaaacacaggagatgattctggtaaaatcgtagaggtggttcaagattcaggagatatattgtctgtgactccacatggtcttcagatggcacacaatctatacccccctgacaataaattgcataaaccagatttgaagaaggaagcttttgctgatcaatcttccgctcttgggaattgtttaaaagattttgttattccagagcagtcttacatctggcagggtgggtttgaggtttcaggacatggaaactcccctgaaatgttcgatgggtttcaagcttacttgtctacttgcgcctcatccaaagtacgtgaagtaggtgaacaattacctgacaaaattcagctagcagaagtcccacggcattcctcatggccactgcaatttaatgaagtaaatccaactgaagataatattgctctttttttctttgctaaagatgttgaaagttatgaaagggcatatggaaaactcttggataacatgcttcttggtgatttgtctcttaaagcaaatattggtggcactgaacttctcattttcccatccgataaattgccagagaggattcaacgttggaatggtttacctttcttttggggcattttttatgcccggaaagcaagtagtccactagagcttcctacaaataattgtccattagaacaaatcaatgaacctgttatccagcatgatattggttcgcctaaggcacatcagcctttgggtatagatttgaatgagtgccctaatgattatatatctgatctgtctctttcacttggatcagagagtgagaagtctggtgcatctttagatcgtaatattgtattagagtccaaacgtgaggatagaagtctgaatgcaagtgaaatacatcatgaagaaactgcaggcacaagacaaattataccggggcatccttctgttgcttcctgtggaactaatcttcccacaatctcaacaggaggtcatgacatgattcaggattatctggctgctgctaaaggtagcacaggaacaccaggtggaaacaaaatggagaaaacagatcagaatgaaactctgttccgtttttcgcagcaactaggtgcaactagatcaatctcacatgagatagaacttaataaacatggtcttttgccctcgcactgtcatttgagtggatcaaagatatgtgatgatcaaaccaaatcaactccaaattcagatatgggtcctttggattttgacatcaccaacaaaaggcagaagacttatgggaaacactcttgcatttttggagatgcaatgacacctatgaaatgcttgtccaagatacatcccttaccggctggacaggataatccatgcgatgttttacagcattgtcatcggggcccttcagatcctgcctctcttaaaaaacctttacctgatcatttcatccacgttctttcatctgacgacgaagattccccagaacctagtactagcttaaataaggcatcatcgaaggcagatgagggctcctccattttatgctcactttccctatccatggtggcaacgaagcgtaatctttctggttcagatattgtagatgatgaaccactgtctctctctcttgggctccctagtgttgtcggtgggagagcagatcaggagatgaagcaattcctgccggagaagccaggcataaacacttaatgcccctttagatttgcgagtgtacagttttgtgcagctgtatggagtttagacagggtagaagtatggtatagctgttaaattatgaatatttttcatttttttctctctcactgttatatgcatctgctgccgttgttagtgataatggtgtgatgatgttactatctgccatatctatgagatatatggtgttagtttcttgagatattatgggtatgacataaaaggatagatcaaaatgtgaatgtttgtgaattcattttgtcatggtttaacttgcattttctatcccgtggcaagtcttgggtgtatcctatcctaatttgc

SEQ ID NO: 5546 - DNA, 1461 bp, Zea Mays
ctccccagtccccacacctccaaagcccaaccactcttctccgatcgattcgaggccgccgcgcctccgccaaccgtaccgctaccgaacaggagagaggatgccgcgccgggaggtgtcgctgcccgacgccttcaatctcgtcctcggcaaagatcgggacaactggcctcccgcagcgggcctcctcgtggccgcctactacggcgacatccgccgcctcaaggggcgtcctgaaatagccaaattcttgctttctaaaggagttcgtgttgatgtggaatcaagtgtcttgaccccactgattattgctacctttagaggatatctagtatcgtgaagattttattggagcacggtgcagatgctggagctaatgtgaatggttttggatctatcttataatcccttggcaagagctgcagagaaaggtttgactgaagctatcaagtgcttgttggaagctggtgcaaatccaaacgttcctgacacagctgccaatagaattggctgctgagtatggtacatgggaagatgttgaacttctattccctgtcacttccaaaattccaacagtggcagattggagtgttaatggagtaattagtaatgtacacatggaagtcacacaactagaggatgacgaaattgtcaataagaaaaagtccgagctgaaacgacaaggagctgatgcgtttagcaaggaggattatctaaacgcgtcagtattctacacacaggccctgaaggttgatcagttcgacgcaacactgttctcaaacaggagcctttgctggcttcgcctgggtgatggaaagaaggctttgctcgatgctatagagtgcaaacatctgcgtccgaattggggaaaagcctactaccggcaaggagctgccctgatgtctctggaggtgcagcaacagaagattacattacagattaagaacctctgctgttcctcatctgctacctaagtcagtactatgcacttgctttgctcaggattacagcagtgcttatgatgcgttctctcatggcttggagttggacccagaaagcgaagagatggagaaaatgctttgggaggcgatggacctgaagtagtagttgatgtcttggatcgtaagaagatgacttgagaactggaatctcttcaattttggtgtcgtagaattgacacgaacactcggatggttgcctacttttgcattgacctaagtttgctagtcctgaaacgatgctgcctctttttttctgtcgtgtgtaattcacggagggtagcggcagtttagagaccaccgcaggctgctaactatctttgatatgatcgtggtagccgcagctacaacgcttctgacgccctgttaactgaaacgatgtgttcaccgagatgcctttgccgacatgcttggtcccccttcacatgtttttgcttggctaactcgtgttgtttgatcggag

SEQ ID NO: 5547 - DNA, 2038 bp, Zea Mays
gcgcctccgccaaccgtaccgctaccgaacaggagagaggatgccgcgccgggaggtgtcgctgcccgacgccttcaatctcgtcctcggcaaagatcgggacaactggcctcccgcagcgggcctcctcgtggccgcctactacggcgacatccgccgcctcaaggggcgtcctgaaatagccaaattcttgctttctaaaggagttcgtgttgatgtggaatcaagtgtcttgaccccactgattattgctacctttagaggatatctagtatcgtgaagattttattggagcacggtgcagatgctggagctaatgtgaatggttttggatctatcttataatcccttggcaagagctgcagagaaaggtttgactgaagctatcaagtgcttgttggaagctggtgcaaatccaaacgttcctgacacagtgagatttgcttcttgttacatgcatcactatagtgatttgcttgattttatatcttccatagcgtaatctaatacacatatgcaatgctggtaacacaaaatatgatgccatacaagaatgttcttatgacagtacaaggtctgtgtgggaagtaaacaataagatgtggtcggactgctttgcttgcttacttattttctgcataagcttattactgttttggcaagtcttatgttttagttatgttaggaatacatatggttgcaacataataggcttccttgacctgctatgacaggagtgaattaataatctttgcgttggtctgtgtatggaatggacttagaagtgattgcgttctggatctataagtagttaagtactttgttagcgtttactttgattgtgttcaggatttagtgttcttgctgctggagcaatgttcttcaaagattaatagtttttaggcgcttactctgattttgttcacttcaggatttagtgtagctactgctggagcatagtccgtcaagaattaataatatttagttggagaatgctcaatttgctattctttttattttaaaattttctatacttcatcaatatgtttgtttgctcaacattttggtaggctgccaatagaattggctgctgagtatggtacatgggaagatgttgaacttctattccctgtcacttccaaaattccaacagtggcagattggagtgttaatggagtaattagtaatgtacacatggaagtcacacaactagaggatgacgaaattgtcaataagaaaaagtccgagctgaaacgacaaggagctgatgcgtttagcaaggaggattatctaaacgcgtcagtattctacacacaggccctgaaggttgatcagttcgacgcaacactgttctcaaacaggagcctttgctggcttcgcctgggtgatggaaagaaggctttgctcgatgctatagagtgcaaacatctgcgtccgaattggggaaaagcctactaccggcaaggagctgccctgatgtctctggaggtgcagcaacagaagattacattacagattaagaacctctgctgttcctcatctgctacctaagtcagtactatgcacttgctttgctcaggattacagcagtgcttatgatgcgttctctcatggcttggagttggacccagaaagcgaagagatggagaaaatgctttgggaggcgatggacctgaagtagtagttgatgtcttggatcgtaagaagatgacttgagaactggaatctcttcaattttggtgtcgtagaattgacacgaacactcggatggttgcctacttttgcattgacctaagtttgctagtcctgaaacgatgctgcctctttttttctgtcgtgtgtaattcacggagggtagcggcagtttagagaccaccgcaggctgctaactatctttgatatgatcgtggtagccgcagctacaacgcttctgacgccctgttaactgaaacgatgtgttcaccgagatgcctttgccgacatgcttggtcccccttcacatgtttttgcttggctaactcgtgttgtttgatcggag

SEQ ID NO: 5548 - DNA, 1878 bp, Zea Mays
cagcggcaaccgaccgacggaacgaagcagccggtcgcggtgccgatggacaagcgcggcagcttcggggggacctcgtccgacgacgcgggggcgccggggccgggaccggggcgcacgacgaggtccgccgcttctccaaggccgtggtgctcggcgtcgtgtacgcgtcggccatcggcgggatggccacgctggcgggcaccggcgtcaacatcatcctcgtcggtatgtggtccacctacttcccggagcaggagcccatcacctttagctcctggatgtccttcggcctccccatggcgctcatcctcttcttggcactctggatcacactctgcctcatgttctgctccaacaacacgggaaaggcactctccggttacctggacagaagccatctcagaagagagctcagcttgttaggtagtacagtatctaataagcatttctgtttctatctagtaaagctttcctttctgaagctttgtcgacaagatcttctttattttactcgcaattaaaagtataccgctgactgaacatggcattcatcattcaatatctttcccaccatttaggaaacgttacccaacatttgggtcagacctcggcacgtttaaattccatgtttcagaacaattcactcatccagtgcaatccaggggactacttatctgaagaaactattcttctgaaccatgcaggtccaatggtatttgcagagaagatggtcttggcagtgtttgggggtctaattgtgctatggatgactaggaaccttacagctgacataccagggtggggggctctcttccacaacaatgtcggagacggaacagtcaccatcatgatggccacgctactcttcataattccaagccggaagaacaagggcgagaaactgatggactgggacaagtgtaggaagctccagtgggacattatcctcctcctgggggcaggattcgccatcgctgaaggcttcaggtcaagcggcctgaccgacatcctctctgacgggctccggttcctgaagggcgcagagacggtggtcattgtacctgtggcctgcatcgtcagcggtgtcgtcacagagttcacgtcggacgacgcgaccacgacgctgctgctccctctgtttgctgaattggccaaggcgatcgatgtgcacccagcgctgctcatggtttctggagcagttggggctcagctttcgtacttgttacctactggatcaccgtcaaacgtaattgggttcagcactggccacattaccatcaaggatctcgtcaccacagggcttcccctgaaacttgtcggaatcgcggctctgacagtcttgatgccaactctaggatcacaggtttttggcacaaacagcaagttctaggagcggaatgcatattggacggttcattcctccaagcccacgttctaggagcggaatgcatattttggaccgttcattcctcgaagcccagttgtatatatgtacagtactttcccttatcttgtatctacggcctagtcaaggttagtgggagggtaagggtatactctttgatctgtacaaggtcaaacattgaggattgtatgcaatgctccaatctgtgtgaaaatagctacaggagtgctccttgagagcgaaatgaagtcaaagggagagcaatttaaaattcaagaggaacttctcagtcacagcccatcctaacatggaagctcagtcatattccaaaacttcagcatacaaaggatgatggatttgaaatggagaaaatttcagtgcaaatgttggatatgtcagtaccctactcgtgctgctttacactgtcacaattaaagacaaatgattaaatacgggacctgacttttagg

SEQ ID NO: 5549 - DNA, 1017 bp, Zea Mays
  misc_feature (205)..(230): n is a, c, g, or t
ctctggtaccatgttggattggatagaatgttgctgtacaaaccctaaccctaacagctacagtgataaggacccctagtgggctgtgggctaggcccatgtacacagatagctaacacatatactttttttctggctatgtcaatgaactataccgagctgcgctgacccatttccaaacttctaagtgtacactgtccaaatnnnnnnnnnnnnnnnnnnnnnnnnnnattttactttcgtacaaaaaaaatgaatgtatgctactgttacagcagctgtcaatgttgctattttaattgtcgtcctgataaacaagtgtttgattcgagacatatctgtccttcggaaataaaacacttgcttcgaactaaaatcttatctgtagatgtaaattattggtaatgacccaaaaaatcttattcatcgtaaacacaaaccctcttgcgtacatactaaaattttcaacccatttttttacttcgtatatcaaatctagcttgatctgtttatacatttttttactccgtgtaaggcaccttcatgtattctttttataccagctatatatgatgctgcagcgatgttagatgtgaaactttaattgctgtgcacggaaaattaaaattttccatagcgtgcgtttgcatacagcctcttatttacaatgaatgaataatattagtacgtaaagttttccattgcttggtggatgtatacactattgcaacatttttagactgcattgcacatcgtcataccgattaccttacatatatacatcagcattttattaaatgttgtacgcaaatgacaatgcatacatttaattgtgatcttgcaggttgctcgaccacttcataatctatgtggtttgttcagatgggaagagcttctgtgcagtgggctgttatcccagagcattaacttcgacagtacaatcatacaagtatacatcaaattccatgttcaaagaccgtacgactgacggctgcacgtagatacgccacaaaaaag

SEQ ID NO: 5550 - DNA, 2757 bp, Zea Mays
cacaggccctccttgctgtgctctcagcccctcacacacacacactgacacacggtcacaccaccagacccagacgcgcggtcacctctccggctctcccctcgttaagaaccaacaaaaacctgtgcctgcctgcctgccactctgcgcatgtgaccgagcaacccactgccgcccgggatcgagccgccgcattgccgcgtcccttctggagccgccgccgcccacgggggtaccggatctgaggagcaaaggccattacttatcgtaagcaagatttctaattggcggaagcttttatgtgtagctgactgttgaatttactggtctcaagtatagagtaggcaggcaatctgcagtttagtggaacccaatgggttcttctccttccaaagccactggagaggatgccctggttctgtgcaaggatcggatgcgccacatcagacaagctattgactcgagagatgcactgtcagcagcgcacttatcttacacacaatctctccgtagtgtgggtactgcactgcggcagtatgctgagtctgagatctcaccggaatcatcgctctccatttcagaagtggataagtcaccatcacattcctctatggcatctccttcgccttcgcgtgcagtagagagtgttgcctctctggggcatcgagcaagtccatctattactccaccctcaacacgaatccattgcatgaaagcagcagcaaccactcctttgacctttgtgatagatcaatctactgctgaatttgtggggcgcgaatccccagtatcagcttttgtcccacccccaccaccattgcctccagaattatgtaccacgtgggacttctttgatcccattgatgctgctggtacctcttcctccaacaatgagaatgaggtaaccctgaacttcagtagattgagggatctaagagagtcaagggtagctgaagtagttccattgaaagaagttgaagaggaaatcatgtccagaaggcatacagaaatttctgatgataatacaccacctgagcaggaaagagagccaaagcaaggtgggaccggaaaaccaagtcagttggtggatacttcaaccaaagctacatctgagcaggttgctgcaaagttggaggaaagtgaaatggaaaaagaattatgtgcagaggcagaggacccttcagagttcatcactcatcgagccaaagattttgtgtcgagcatgaaggacattgaaacccggtttatgcgtgcagctgaagcaggaaatgaggtttccagaatgcttgaaaccaagaagatccgacttgacatatgtgctaaaataccaggttctccagtcaagctaccttctgcccgatttgtgtcagcacttcgagtgtgctgcaatcgtgatgttattctcaaccaggcatgtttcaaaggttgtcacatggaagcgttctgtctcatctctttcatcatcatctaagagtgcacttatgacatcgataatgaaagatgatgtggatgacagtaatagtgattttgttgaggaattcgccatggtatccggaagccattcttctacgttggacaggctacacgcatgggagagaaaactatatgatgaaatcaaggcaagtgaaaatgttaggaaggcctatgatgagaaatgtaacctactccgacgccaatttgcacgaggcctaaatgcgcaggtgattgataagactagagctgttgtgaaggatctccattccagggtatctgttgtgattcaagctgttgatgcaatctccaaaagaattgagaagataagggatgaagaactgcagccacagcttgtcgagctaattcaagggctaatcagaatgtggaaactgatgctggaatgtcaccacaaacagttcatcacgatcacattagcataccacgtgaaagactcgacctcggcgcgtcaagcttcagaaactgggtcaccgctcacaaatcgtacgtcgaggccctcaacgcgtggctccagaagtgcgtcctgcagccgccccaggaccggcgcaggcgcaaacgcaaggtctccttccctcctcggcaggctgtctcccctcccatattcatcctctgcggggactggctcgccaggacagaacctctccctgctgacgagctatgcagatccctcaaagacgtgatgcagctcctccgcggctcgttcgagcaccgcgacgagcagaacaggcccagaagcggcgagtcgcaggagtgcgggatgctggagaacagtagcgagcaggaggcggcggctaagagtgggagttgtgcagcatcagctgaagggctgcagtcgagactgacggcggttcttgaccgcctgacaaagttctcggaggcatcactgaagtgctacgaggagctcaagcagaactacgagatggcctgtgctgattataggagagttggaccaaatgctcagcttgcttaggattgatgttggctgtggtgtgtgactttttgctatctctgttctggatgacaaattctctagtgttttggtatatattttgtgaacaatcagctacgggaattcggcgaccattaatctcctactcacctttcagcaatggggtatgtactggcactattttttacaatggagaataagcagcttcatacgaaatttgtcgaaccaagtgaaaagaaagtctgtatagccatttttagcttactgataaaaatcttaattgaaaacaattcagacaaaaaaataatctgacaatt

SEQ ID NO: 5551 - DNA, 3809 bp, Zea Mays
gtggccgagacggaagcccaacccgcccgcctgcccgcacacacgcgcgtggccatcgcccctccttccccttcccccgcacacacgcgcctcacctttcgtcccttcgcccctacagatcgaaccaaggaggcagcaaccagcgcacgccactgcggcgctaggagctcgcagaagcgccgccccacgagagggagtccagagcaaggaagagatccggtggcagagcaggtcggtcggagatgggagtaccggcgttctaccggtggctggcggaccgctacccgctgacggtgtctgacgcggaggaggaggagcccgtggagctcgagcccggcgccttcgtccccgttgacctccgccgccccaatcccaacggcctcgagtttgacaacctctacctcgacatgaatggtatcatccacccatgcttccaccccgagggccggccggcgcccaccacctacgacgaggtgttcaagtcgatttttgattacatcgaccacctcttcggcctcatccgccccaggaagcttctctacatggccattgatggtgttgctccaagggcaaaaatgaaccagcagaggtccaggcgattccgggctgctaaggacgcggctgatgcggcagcggaggaagagaggctgaggaaggagtttgaggcagagggtaggactctagcccagaaagagaagtcggaggcaattgactccaatgtcattactccagggacggagttcatgtttgtactatctacggcgcttcagtactacatacagctgaggctgaatcacacgcttggatggcagtctgtaaagataatactgtctgattccaatgtccctggagagggagagcacaaaattatgtcatacatccgcctgcagcgcaatcttcctggctttgatcccaatacacgccattgcttatatggcctggacgctgatttgattatgcttgctctagcgactcacgaggttcacttctcaattttaagagagggcaacatgaaaaatgttttctttgtggtcaagttgggcatttggctgctgaatgcagaggtcctagtcagcctgataattctgtggagctacctcctattcataaaaagaaataccagtttcttaacatatgggtgttgcgtgaatacctggcaaaggatttggaaattatagatgctcccttcaagataaactttgaacgtcttattgatgattttgtgtttatgtgtttctttgttggcaatgactttcttcctcatatgccaactttggaaattcgtgagggtgccattaatcttctcatgagtatctacaggtcggagttcacatcaatgggtggttacctaactgatgtgggtgaggttatattggaccgagtggaacatttcatccagtctgttgcggtcaatgaagaacagattttccagaaacgggcacgcattcaacaggcacgtgagaataatgaagagaaacataaaatgcagagagagaattctgaggaggatcaatatgtggataaggtgaagttaggagagccaggatacagggagcgttattatgctgataagtttaaagaagaggcagaatcaaaacccattgttcaagttcggagagatgttgtccagaaatacgtggaaggtctttgttgggttatgagatactactatcaaggtgtttgttcatggcagtggttttatccctatcattatgcgcctttcgcatctgatctaaaaggcttggctgaattggaaataaccttttttttgggtcaacctttcaagccatttgatcaactaatgggaaccctaccagctgcaagctccaatgcactgccaaaatactatggggatttgatgagtgatccagattcaccgttgaagtctttctacccaaaagattttgagatagacatgaatgggaaacgttttgcatggcagggtgttgcaaaattgccttttattgatgaaaggcgtctgcttgcggaaacaagaaaacttgaagatactttgacagaagaagagaaattcaggaataggactatgcttgacataatttacgttagagatactcatccattgatcactcagattatcttcctgtatcagaactattaccatctatcaagaacagacccttatgttattcccattgagcctgctgctagtggtggaatgaatggattcctatgtttatctgaaaggaactggtatagtgtcactgtcacttctccagttaaggggttcaatggcattgctcagaacagagttttgaatgctgcctatctcaatcctcagtatcacaaacacatcccagagcctccagcgggggtcatcatacctgcgaagatactgaagcctagtgatttcaaaccctttcctgtgttgtggcatcaagataatagtcgtcgacaagtaagagaaaggcctcaggtttctggagccctgtccggttctctcttaggagaagctgcacaccgactggtgaaaaactccctccagatcagatctggcaatgctgctgggttactttatatgccatacagaggtgcaccctatggccctggaaacagaccaaggcctgctgggccattggggtatgagaggggttttgtggataatccataccatgcacacatgtctagaagtgttccaaaccctcacgctcaattctttggtgattctcaagctaacagacagcccatgcggatactagaacggccagactcccgaagtcatgatgctggtatccgtgcatcaatgtctaaactgacaatccaagaagggccaaggcctcatcaaaataacaggatgcagaattccgggtactggcccaatcaaccacatcctactcactttactggacccccagcccagcggcctatgcagaacatcagttttacacctcagcgacctttccaaaccgggggatttccgcagcagagacctgtaaatggggctccaccaccattacctcccagtaactggattggtaagcaaccaagtggatgccacatgagtgtatcacctgcaaaactcgatccaaggacagctccagacagacagcccaagcaggataacccaagatctcaacaggataagaggcagcaggcgaccaaggtataccgtgtcaaaactcaagctactaatgttaatggtttgtcagagccaggtaaacaggaagaacctgaagggtaactgggttgctgcaaatccacacgccaagtttaatgtgcgtggagagaatacgctggctcttggtgatagcagcagagggtttccatgtatccctcccacaatttacctttcgatgttgaattgtttgttgtattacccggaaaggagtcggctaaattttaggtcaggggatttagacacagcttttgtttagttgataggacatggtatgggcattcactgcttgttgtaaagctgttagttggatagctgaaactgttttgtgctggctgactgctgcatattcaacatagacccgtgcggaggctggctcaactgccctgctcctgctctatctcatggaagttgggggcagatgtgcttgtggtcttcaaactgagcagtttgtgtctctgagaaaggaggaagcattccgaatttttcattgtaccgttgaaccaagttgagtctttaacactgaaaagaacatgttcctctcgagcttaacgagtgccataattaggacatggaataatatatatatttttcttttctgggatgcaaacatggtgttcaaattcccattacgcactgtttgaattcgattttaataataataatttaggcaaag

SEQ ID NO: 5552 - DNA, 1976 bp, Zea Mays
gccgccaaactgcccacacgcacagccctagccgccaaactgcccacacgcacagccgcggagcagccagagccagacgctgccgccgtcggccgtcctccgccctccagttcttaaggaaagatgagtttgatatcccagaacgcggtccagaagcgctgcctcagaaaaagtgaagctgataatggcaatgatgaggacattggctctccgacctctatagatgcagaagttgggaaggaagcaaaattgaagaatcacaataaggaaaggaagaagaaaaagactaagttgttggaatcccagcagaacaaagaggaagaggagatgcggcagctggagagctcattgtttggttccctttatgctccactagagtttggcactgaggtaggggctgcagtagctcctgaccgggatgcgcctttgtttttcacagataggtctgctggtggtggcatggattattttcctacatatgaggaggatatggcccatgaagatgaggaagacatggtgggtatcaagaggaggaagcctgtatgggtggatgaggaggaagaaatgacagaggtggacattgtgaaggttccaaggttgaggaagctgagaaaagaggaagatgagcatttgatttcagggaaagagtatgaggccaggttgcgtggtcagcatgcgaaattgaacccctttactggctgggctgatatggaccagaaaacttctcttcctgctgcgtcagatggtgagtctgatgatgagggttgtgtcgatgatattcttcggaataatgatgagcttgttgccaaggatactgtcaagctcttaccggggatgctggaattctcaaggctcgttgatgccaatatccaggatccatcaagtggtcctatcaattcagtgcagtttcataggaatgggcaactgatgcttgctgcaggtttggacaagcatctgaggtttttccagattgatggaaagagaaaccccaagatccagagcatatttattggggactgtccagtacacaaggcttcttttctacccgatggctctgaggtgatcctatcaggcaggaggaagttcttctactcatttgacctggtgaatgctgctgttagcaagattggacctttgacgggacgcgaggagaaaagcctggagagctttgagatatcacctgattcgagaaccattgcttttgttggcaatgaagggtacatccttcttatttctgccaagacaaagcagctcatcacaaccctcaagatgaacggaagcgtgcgttcactggcttttgcggatggtgggaaccagctactgagcagcggtggagatggccatgtttaccactgggaccttggaacaaggaaatgcatccacaaggcaacagatgacggttccctggctggcctctcgctctgcacctcgcgggatagctctttgtttgccacaggctccagcagcggcatcgtgaatgtgtacaagagggacgattttctcggcgggaagaggaagccgatgaagactatcgagaacctgaccactgatatcggtgagatgaagttcaaccatgacgcccagatcctggcgatcagctcgaggaaagagaggaacggcatgaggctcgtgcacgtcccgtcgttcagcgtgttccagaactggccggggcctcggtttagtctccactatccacggtgcctggatttcagccccggcagcggcttcctgtccgtcggacatgcaggtggaaaggtcctgctgtacaagctccaccattacgagaatgcatgatgagactaggatggttgcttggcgaaaacccatttttgacattatatttgtactcatgaatactccattaatcgatcgtacgcaagtcgttgtgctgctgtttgctttattatagtggtggactaagttggttgcagaagtttagtttttttttggcaagagattgcagaatcactgttgtc

SEQ ID NO: 5553 - DNA, 1651 bp, Zea Mays
gcttgctcatgggtcacggccatgaccatggcatcccctcctctgcaaaagcccgtgcctttggtgtcttgtcacgggcaaaagtggcgcatgttcattattatcccccctgcctttttgctttcgcaagccctgtatgtgtcctggccataaagatgcaatctttatcctctatgcacatacttcacccgaaaaaaagctaaaggggtcactgattggtgctgcttccttaaatcttgcatgtgtgggaactaggaggccattggtcacggggttgggtctgtgctcaggtgccagcaagatgcagggtgtgttgtcgagggtgaggaggcccttcactccgacgcagtggatggagctggagcaccaggccctgatctacaagcacttcgctgtgaatgcccctgtgccgtccagcttgctcctccctatcaaaagaagcctcaatccatggagcagccttggctccagctcattgggatgggcaccatttcgttccggctctgctgatgcagaaccaggaagatgccgccgcacagatggcaagaagtggcggtgctctagagatgctgtcggggaccaaaaatactgtgagcgacacataaaacgtggttgccaccgttcaagaaagcatgtggaaggccgaaaggcaacaccgaccactgcagatccaaccatggctgtttctggtggttcattgttgcacagccatgctgttgcttggcagcagcagggcaaaagctcagctgctaatgtgactgatccattctcactagggtccaacagaatctaggtgaccagttctctgtatccacttccatggactcctttgacttctcatcatcacattcttccccaaaccaagccaaagttgcattttcaccggtggccatgcagcacgaacatgatcagctgtatcttgtgcatggagccggcagctcagcagaaaacgttaacaagtctcaggatggtcagctgctagtctcgagggaaacaattgacgacggacctctgggcgaggtgttcaagggcaagagttgccagtcagcatccgcagacatcttaactgaccattggacttcgactcgtgacttgcgtcctccaaccggagtcctacaaatgtctagcagcaacacagtgccagcagagaatcacacgagtaacagtagctatctcatggcgaggatggcgaattctcagaccgtcccaacactccactgagtgttcatcaggctggtctttgttgggaccacaaaataactgaagccatgttgatgtcctgagtttgctgatactaggttttcagtcgagtcttgtaactcctgttttagagctgttatatgttcacgtcatgtcgcctttcattttcggttcattcagatgggtgttctaataatttctttccttcttacctgtgaaggatttgagttccaatctgagacgtgggtttgttctaacttggaggtatttatgaatattaggcacttctgatttccattgaagcgagatttctttaaattgtcgaggctgtatttttttcaggcttttcaagtgctatactcttgaatgcttgatactgcctccgttctcgaatatttgtcgcctgttagttcatttttgaactaaaccgcaatagataaataaaaaagaa

SEQ ID NO: 5554 - DNA, 1723 bp, Zea Mays
ggggctgtgggcattcaattgcttttgcttcctccgttcccccatctggccatctccccttcccctgctcccccgaagcagcaagccagcctgcccacccgcagccatcacctccgccgctctccaccatgaatcccatccaccagcacggcatcgtacccaatccttcgtgactgttgcctccgcgcatctccgggagcaatggaaggaggccgagatgtgttcttaggtgcggcggcaagggcgccgccgccgccgccgtcttgcccgtttcacggatccgctaccgccacccgctccggtggagcgcagatgctcagcttctcctccaatggcgtagcaggtgccagcaagatgcagggtgtgttgtcgagggtgaggaggcccttcactccgacgcagtggatggagctggagcaccaggccctgatctacaagcacttcgctgtgaatgcccctgtgccgtccagcttgctcctccctatcaaaagaagcctcaatccatggagcagccttggctccagctcattgggatgggcaccatttcgttccggctctgctgatgcagaaccaggaagatgccgccgcacagatggcaagaagtggcggtgctctagagatgctgtcggggaccaaaaatactgtgagcgacacataaaacgtggttgccaccgttcaagaaagcatgtggaaggccgaaaggcaacaccgaccactgcagatccaaccatggctgtttctggtggttcattgttgcacagccatgctgttgcttggcagcagcagggcaaaagctcagctgctaatgtgactgatccattctcactagggtccaacaggaatttgctggataagcagaatctaggtgaccagttctctgtatccacttccatggactcctttgacttctcatcatcacattcttccccaaaccaagccaaagttgcattttcaccggtggccatgcagcacgaacatgatcagctgtatcttgtgcatggagccggcagctcagcagaaaacgttaacaagtctcaggatggtcagctgctagtctcgagggaaacaattgacgacggacctctgggcgaggtgttcaagggcaagagttgccagtcagcatccgcagacatcttaactgaccattggacttcgactcgtgacttgcgtcctccaaccggagtcctacaaatgtctagcagcaacacagtgccagcagagaatcacacgagtaacagtagctatctcatggcgaggatggcgaattctcagaccgtcccaacactccactgagtgttcatcaggctggtctttgttgggaccacaaaataactgaagccatgttgatgtcctgagtttgctgatactaggttttcagtcgagtcttgtaactcctgttttagagctgttatatgttcacgtcatgtcgcctttcattttcggttcattcagatgggtgttctaataatttctttccttcttacctgtgaaggatttgagttccaatctgagacgtgggtttgttctaacttggaggtatttatgaatattaggcacttctgatttccattgaagcgagatttctttaaattgtcgaggctgtatttttttcaggcttttcaagtgctatactcttgaatgcttgatactgcctccgttctcgaatatttgtcgcctgttagttcatttttgaactaaaccgcaatagataaataaaaaagaa

SEQ ID NO: 5555 - DNA, 496 bp, Zea Mays
gtcgaactcgaactgctgctgtgcagctatccactctccagtgctccacgctctccaattctctctcgaccgcggcatggccgccggcctctcattcccccgcgccggggccccgttcatcctcctccgcacctcctgtttctctccgtgggcagctctggtgccccgccgtcgacttctctctgggcctcccactgccggtgatcccccgcccccggcgctcccgccaacttcgaagctcgccgccccgccggttgtgggaacgccggagcccccgctgccgtttagggccgtggaggcggagatccttcgcgatattgaccccgtcgtcctgctcatcaaggatatcctccactccgatagatacggggatggcgaatgtctctgcccaagggacgaaaatgtcgtcgtggagaagctcctctcctaccatccacgcgcgcaggacaaaattgggtgtggacttgacgctataatgacaaccagcacttcattg

SEQ ID NO: 5556 - DNA, 1452 bp, Zea Mays
tcccaggtgctggtcaaatggcggtaggccgagaactcgactgaattctgaaacctgatcctgagatgctcaaggacatggtgctgaagctgtcgggcacccaccaccgccagcacggcgcgcagcacaggcgcggcgggtcgccgccgccgccacggggccgggccacctccctgtaccgcagcggctactaccgccccggcgtcgtgcaggacgacatggccgtgcccccggccacgtacctgggaggtggaggcgccggcgcgtcgagcgcgagctccaccccggcgtgggacctgcccgccgccgcccgcgcggacggcgaggcctgcagggagtgggtggcgcaggtggagcccggcgtgcagatcaccttcgtgtcactccccggcggcgccggcaacgacctcaagcgcatccggttcagccgcgagatgtacgacaagtggcaggcgcagaagtggtggggcgacaacaacgagcgcatcatggagctctacaacgtccgccgcttcagccgccaggtgctccccacgccgccgcgctccgacgacgccgagagggagtcgttctactcgcagtctcaggtagggagcccctcggccaccccgtcgccggcgccgctcacgccggagaggatcagctggggcgcgttcgcgcggcaggtggcagcgccgccagcatcatcaggtgccaccggcgccgcgcggcagcacagcttccggccgatgtcgccgccgccgccgtcgtcctccaacccttcggagcgggcctggcagcagcagcagcagcgacacatcggtggtggtggtggcggtggagcggccggcggcaagagccccgccgcctccgaggccgccgccgccgccacggaagcggcgcggaccaccacgtcgtccagggacgacgtgtccgtcagcaacgccagcgagctggaggtgtcggagtggatcatccaggaccagcccggcgtctacatcaccgtcagggagctcgccgacggcagccgggagctgcgccgcgtcaggttcagccgcgagaggttcgcggagctcaatgccaagctgtggtgggaggagaacaaggagaggatacaggctcagtacctttgaaaactgagctggaatgaggctgaatcttactagttcagttgagcagaagctggtgataattatggtgttgtgcaaggggctgacatataattaatctggtataagtatacggggagagtttatgtttcgagttaatttggagatgggggggggggggaggagataggagggggttcatttggagctgggaaagataggaggggatgagataggggttcatgcatgtttagggcacctgacctggctgcccaggtaacttgtgattggtgtaccgtactaaagtttttaccaatccaccactattgcgtctaatgttcagcttcactttctagcatgagtg

SEQ ID NO: 5557 - DNA, 1965 bp, Zea Mays
cagacactccgccacgtcaccgtcgccatggcgctgcaccacctccgcctcgcgccgctcgcgctccttcgcgccgcaagcctcccgcccctcgcctcctcccgtatcgccgcgcgcggccaccgccgcgttctcctctttgcgccgccgtcgtggccgtggcgccttctgtcgcccggtgcgaggccgcgcgcgcttgccaccgctgcggcagaggccgacgatgctacctcgggctcgggcaacgaattcttcgcagagagcacgtcgtgggcttcactcggcgtatccgaacgcctcgcgtccgccctttgcagtgccgggctctcgaggccttcccttgtccaggcaacctgtataccacatgttctcatggcaaatgatgtaattgtcgcagcagagactggtagtggcaaaacccatggttaccttgtacctttgattgaaaagctgtgctcaaaatcttctaccaccaaagatgacaattgtcaggacaccaccccaggagcacatgacatggtgttggtcctttgtcccaatgtcatgctctgcgagcaagttgttcgcatggctaattcattacttgacgagtctggcaaaccacttaaaagagctgctgctgtttgtgggccaaatggctggccagctgttcatccagatattcttgtagccaccccagctgctctattaaactatctatttgactatgacccggaaaagaggcgaagagagagattcatgcgtaatgtaaaatttgtagtgtttgatgaagcagacatgctactctgtggaagttttgagaaccaggtcattcgtctcatcaatatgttgagatttgatgaaaagctactttctagagcacaggattctggaaaggatatatcacttgggagtgatgatgaatatcatgaggattcaaagtttgagactgctgaatttggtagttctgacaaggaaattgaagacaatattgtggaagatagacttgtcaagttggagaatagtcacgttggagcacacaaggactggaggagagttagaaaaatatacagacgcagcaagcagtatgtctttgttgctgccacccttcctcagagtgggaaaaaaactgctggtggtgtgctacaacgtatgtttccggatgctgtatgggttagtggcacttatctgcaccgtcacaaccccagttaaatatggcctgaagagtgaagttcatgatgctaaagatgttccaagacgcactatggtctttacaaacaccgttgatgctgctaattcagtctctgatatattgcatcgagttggtattccatgtattttgtaccatcgtgagagttccttgaaggagcgggctaacaatttacagtcttttcgggaaaatggtggtgtgcttgtatgcactgatgctgctgcccgtgggcttgatgttccaaatgtttctcatgtcattcaggcagaatttgctgcctgtgctgttgattttttgcacagggtgggccgcacagccagagctggtcaatctggtatagttactagcctatacacagaggcaaatcgtgatcttgtaagagcagttcgtcaagcagaggagttggctcagccagtggagggagcattcagcaggaaaagaagctttcgcaacaaactaaagaagcaagcattacaaaaacgcgaagcactgctatcttgatagcgtgactcactatatttgtagtaaggagaaaatatatgttttttttctctattactgggtgatgaatgtttttgtagtactatatagaaagctgctacatattaaatagaagttgtattcagaccgagtgcgttgaagtaatctgaccaacatgtagtctcttggataattatatccttatggcgttttcgtggtatttttaccgcattattgcaagtgattacaagtatttttgagaaaattaactatatggccaaaaaaagtctgcctta

SEQ ID NO: 5558 - DNA, 2388 bp, Zea Mays
cgccagtttcccaccgcgcgctcgctgaaaaatgccaatgccgccgccgccgcgaaaagacttcccggcgttcccgtttgcgccgtacccgatccagtcggaattcatgtcgtttctctacgccgctctctcttcaggccccggcgccctcgccctactcgagagccctaccggcacgggcaagacgctcagcatcatctgcagtgcgctgcagtggctcctcgatcaccgcgaagctgccgtagttgccgctacggcattggcccaccccagcggcgcctccggctccggtggtgacgatgacgagcccgactggttgcgggatttcaagccggcggcggcggttaaagagagcactaagaagaaggcgaagcctcccgcgatgaggaaaacgctggtttcacggaaaccagatggatttggggaggaagacggcggcgacgacgagggggagttcctacttgaggagtatgagagcgacagcgaagacgtcgcgaggcggggtgtagggaaacgagcacattgcggtagtagtagcagcagtagcagcgaggacgacgatgagatgacgcccaaggttttcttcacaagccgcacgcactcgcagctctctcagttcgtcggggagctcaagaggacggagttcgctgggcggatcaggacggtgtgcttggggtccaggaagaacttatgcatcaacaaggatgttctgaagatgggcagtggaaacaggattaatgagaggtgcttggaactgcagaagaacaagaagagcaccaaaattaaggtttgtggatatgcaaacaagttaagtagcatccaaaatcagtttgatctccagctccatgatgaaggaagcagtatagcatgctttcaggcattggttgactttctacgctcccttctgaacagcaatgatgatggaagaatcatagttgcaaagcaaaagctaggtggacaacctgatgaagcatatcttaaatttgtgatgctttgtgcggaaaaaatattttctgaggttacgcaggatgcttatgctgttatcctggctggtggaactctccagcctattgaagaaactaggctgcgcttgtgtccaagcttaccaccaactgatataaaattcttcacttgcaaccatattgttcctcctgagagtattcttccaatagcagttacacgtggaccctcaggcaaggcatttgatttcagctacaattcaaggagctctccttccatgattgaggaacttggtcgtttcatctgtaacattataacagtcgtgcctgagggagttgttatgtttttttcttcatatgattatgaaaggcgtgtatatgatgcatggatgacaacaggcacaatttccaggatttctaaaaagaaacatgttttcagagagccaaggaacagtgctgatgtcgaggctgtcctcaacaaatacaaggaggcaattgaatcctgtagtaatttttcccaagacacaggtgtcaatggggcacttctattagctgttgttggtgggaagatttctgaaggcataaatttcagcaatgggatgggtcgttgtgtcataatggttggcttgccttatccaagtccatctgatgttgagcttatagagacaataaagcatatcgaaagtatttctagctcattttcggttggagatgataaggccttaagcagaaaatatgatgatgaatgtgaacttcagcctggttatgatatattacggaagtgcactagaggtggaagagagtattatgagaatttatgcatgaaagctgtgaatcaatctattggcagagcaatcaggcacataaatgactatgctgcaatgctattggttgactcgcgttatgcacagacttcatcaaccaagagtttttcctgcccggctgataagcttcctcaatggataaaagcacgactctcttgtgctcaaaactatggagaagttcatagatcgttgcatcagttcttcaagttcaataaaaaaaatgttgaaatactctagaaaccaccaagcattgccattgttgattcattgcaaacaaaaatacaggtgtatgtactcgtaaaacgtagcattgtgtttgtgtatccttatgctgcttacttatgagcaaggcttcagcctgcgcctgcgaatgcgatcagagttatgtacagaattatggtgacagtaacgcttcctcttaaggaattatggttagatccatatttcttttgctcgagattgtaaaacaatatcacaaatgtgattattcagtccttatcattgtttcaattctttcatgatagcaaatcttatagacctcattttactgacgcagaacaaatgaaattcatgtgttactacactaatatgttggtatattttcg

SEQ ID NO: 5559 - DNA, 1613 bp, Zea Mays
ctctacaagcccttttttttttgttatccggtccgcccaggctcttcccattctccggcgcttccctctgtcccttggctcgctctggcgtggttctcccgtcccctggtgcgtgcgcgcttctcgctctctcgtggcggcgactgggcgactatcgcctccgccctacaacagttgctcaggtcttctttgggcccttcgccggggacaagcacccaccgggtatgctatgctcaaccaacaatagtcgaggttttaaacaagttcaagtcagaatttcctgggaagtcacataagaatatacgatgttgatagaggctggagcatacacaaagacattcatgctaggtgtttaagatggacaatcagtgatgtatccttatcacctgatcagcggtatcttgcctactctagtctggcacctattatccatattgtcaatgttgggaatgcggcaagagaatcctatgctaacgtcactgacatccatgatggattggatttttcacagcatgaagatgttcaatattcatttggaatattttctgtaaaattttcctctgatggacgggaacttgttgctggcagcaatgatgactcaatatatgtctatgatcttcatgcaaacaaattgacattacgtttatctgctcatacatctgatgtcaatacagtagcatttgctgatgaaaccggccatctcatatattctggaagtgacgacactttatgcaaggtctgggacaggcggtgtttgtccgcaggacaggctgccggagttttgactggacatttgcatgggataacacatattgatagtcgtggagatggccgaagtttcatatccaatggaaaagatcaagcaatcaaactgtgggatatcaggaaaatgatgtccaatgctgatagttgtgcagatggagccccagcctgggactacagatattcaaggtatccgcatcaacataaacagttaaagcatccgcatgatcagtcaatagcgacgtaccgtggacatacagtcctccggacattgatccgttgctacttttctccttcgtatagcactgggcaaaagtacatatatacagggtcgtatgattccaatgtttgcatctatgatgtggtaagtggatcccaggttgcgaagctgaaatggcatcaaatggcgattcgggactgcagttggcacccatttgagcccacgcttgtgagctcatcctgggacggccgggtagtgaaatggaccagcgcacgtgatgaaggggcttctgatgtcgattgagttgagtcgaccgtgcaggtgcagcgcgagtgatctttactgttcgtggttgtgggctaaaaaaaaacatacccaatcttgcactaaaaaaaaggagagtaagcacagctcgtaataaagaaagaagatcatgtgttgcagtggtaatttgtaaatgtaaatactgaactgaaaccatgtgggcaggaccgagtgcataagcacctttgtgaatatggttgttccataaagccttttccatgtcctttggagggagcgtgtttttgttggcatttggttttcgacgttccgttttttttgggtatgggtatgggcaatgcgctttttt

SEQ ID NO: 5560 - DNA, 1019 bp, Zea Mays
cagaccagacgtagccgcgcacggtcggcttgcttgtgcatggacgtgatgttcggcgggacggagacggtggcgtcggcgatcgagtgggccatggcggagatgatgcacagccccgacgacctgcgccgggtgcagcaggagctcgccgacgtcgtgggcctcgaccgcaacgtgagcgagtcggacctggacaggctccccttcctcaggtgcgtcatcaaggagacgctccggctgcacccgcccatcccgctgctcctccacgagaccgccgacgactgcgtcgtggccgggtactccgtgcccaggggctcccgcgtcatggtcaacgtctgggccatcggccgccaccgcgcctcgtggaaggacgccgacgcgttccgcccgtcgcggttcgcggcgcccgagggggaggccgcggggctcgacttcaagggcgggtgcttcgagttcctgccgttcgggtcgggccgccggtcctgccccgggatggcgctcggcctgtacgcgctggagctcgccgtcgcccagctcgcgcacgccttcaactggtcgctgcccgacggaatgaagccctcggagatggacatgggcgacatcttcggccttaccgcgccgcgcgccacgcggctctacgccgtgcctacgccccggctcaactgccccttgtactgacgccctgcacgtggcgcgcggggactgccattacgcatgcatgcgtttggactttggtgttcatccctggggtggggccgccgtgggggaagttaggagtttggtggctttctagctctgtcttcttgtattctgtttattataaattttcccaacccttccatgcctgatcgatgtgcggtaataattgttagaaaatgtgacattttgtatgtaatcaatctatggggtgcaattgttatctcgtcaaaggacacaccactcgacttgcaccccttcatgtatatatatacatacacgaacatcccctgcaataaagaaatcgctgtcactttctttcg

SEQ ID NO: 5561 - DNA, 1133 bp, Zea Mays
atcgatcgttctccaccctatatacggagctgaaagtaggtaaacgtgatgaaagcatccgagtttgatcgagctagccaaccattggagaccatgcatgtcacttttcggtgcatttttttcgtctaagatagctctgtccaccttggtgcctcggacgtgatgttcggcgggacggagacggtggcgtcggcgatcgagtgggccatggcggagatgatgcacagccccgacgacctgcgccgggtgcagcaggagctcgccgacgtcgtgggcctcgaccgcaacgtgagcgagtcggacctggacaggctccccttcctcaggtgcgtcatcaaggagacgctccggctgcacccgcccatcccgctgctcctccacgagaccgccgacgactgcgtcgtggccgggtactccgtgcccaggggctcccgcgtcatggtcaacgtctgggccatcggccgccaccgcgcctcgtggaaggacgccgacgcgttccgcccgtcgcggttcgcggcgcccgagggggaggccgcggggctcgacttcaagggcgggtgcttcgagttcctgccgttcgggtcgggccgccggtcctgccccgggatggcgctcggcctgtacgcgctggagctcgccgtcgcccagctcgcgcacgccttcaactggtcgctgcccgacggaatgaagccctcggagatggacatgggcgacatcttcggccttaccgcgccgcgcgccacgcggctctacgccgtgcctacgccccggctcaactgccccttgtactgacgccctgcacgtggcgcgcggggactgccattacgcatgcatgcgtttggactttggtgttcatccctggggtggggccgccgtgggggaagttaggagtttggtggctttctagctctgtcttcttgtattctgtttattataaattttcccaacccttccatgcctgatcgatgtgcggtaataattgttagaaaatgtgacattttgtatgtaatcaatctatggggtgcaattgttatctcgtcaaaggacacaccactcgacttgcaccccttcatgtatatatatacatacacgaacatcccctgcaataaagaaatcgctgtcactttctttcg

SEQ ID NO: 5562 - DNA, 5438 bp, Zea Mays
aatcaaaaatcaaccgaacttgccagccccgccgcccctccctgcctccatcgcgcactagggtttttcctcgctctcacgttcggccgttccccaccacttgcgcgttgtgccgcgacgctccggccatggcgtggggggaggacgaggccatcggtcccgacgtggcctcggcgggtcttcacgtctcggagcggatcggccgcgacgccgccgcgcagcccgacctggaggaggcccttgaagcctcgcgctacgcgtcccacccctactcctcgcaccccaaggagtggcctcctttggtagaagttgcagaaactcgtcaactccctcctatgttgattgaaagatataacacagctgccggtgaaggaacagctctttgcgggattttttctgacatacatcgggcctgggcaacagttgacaattcatttttcatctggcgatttgataaatgggacgggcattgccaagagcataatgttgacgagcaagcaatttgtgctgttggccttgctagggcaaaacctgggattttcattgaagccattcaataccttttagttttagcaactcctgttgaactgatacttgttggagtttgctgttctgctagtgctgatggaacagacccatatgctgagctttcattacaaccattacctgagtacatgattgccactgatggtgtcacaatgacatgcatcacatgtacagacaagggccaaatttttgtagctggtcgcgatggccatatatatgaattgcagtatacaactggttcaggttggcgtaaacgttgccgtaaagtttgtcttactactggcattggcagtcttctttctaggtgggtactgccaaatgcattcaaattctcaactgttgatccaattgttgatatggtcatggatgaggagaggaacactatctatgcgcgtaccgagggcatgaagttgcaattatttgatctaggagttaatggtgatggccctttgacaaaaattactgaagaaaagaacattgttgatccacgggatggaccttatggtggtcggaggtctaatgcgccaagagctgcacgatcaccaagaccatcaattgtttgcatctcacctgtatcttctgtggaatcaaagtggctccatgctgttgctgttttatcagatgggaagagattattcctcactacatctggtggaagtggttcttcagttggattgaacagtggtctgcagaggccaacctgtttaaaaattgttgctactaggccgtccccacctctgggggttggtggtgggcttacatttggtgctgtttctgtggctggcagggctcttcctgaagatctagcattgaaagttgagtctgcattctattctgctggtgctcttgtaatgtcagattcatccgctacagccatgtcatctcttctggctgtgcagaaagattcagctgcgcagctatctctccccagcacctttggaacagcttctagaacctccagagctctacgagaaacagtctctgctttacctgttgagggtcgaatgctttgtgcctctgatgtcttaccacttcccgatgctgcttacatgatgcagtctttatatgctgatgtggaatgtttcacatgtttcagaaaaccttctgagaaggcatgtataaaactgtgggcaaaaggggatcttcctacccagcatatcttgcctcggaggagggtggttgtattcaatactatgggtttgatggagttgatttttaacaggcctgttgatattctaaggaaattgtttgacgggaacaccctgagatcacaaattgaagaattctttaatcgctttggtgctggagaggctgcggcaatgtgcttaatgttagctgcgaagctactttatgctgaagatagtctgataagcaatgctgtttctgagaaagctgctgaggcgtttgaggaccctgggcttgttgggatgcctcaaattaacggcaccactgctttatctaatacacgaactcaggctggaggctttagtatgggccaagttgttcaagaggcagaacctttgttttctggtgcatatgaagggctttgtttgtgctcgtcaagactactttatcccatctgggagcttcctattatgtcgattcgaggaccgtctggtaataataaacgcgaggatggcgtaattgtttgcaggctttcagctggggccatgaaaattcttgagagtaagattcattcactggaaacatttttaagatctagaagaaacaagagaaggggcctttatggttatgttgctggtcttggcgattctggttccatactctacaaaacagggcctattattggccctggagggcatagcaatggaaggagtccctacaactcccaaattcgagatatgaaccctgtagataaatctgcatcgaataaaaagccaaggctgctttatacatcagcagaactagccgctatggaggtgagggcaatggagtgtcttaggcggttgcttaggagatctggtgaagcactgtttctgcttcaacttatttgccagcataatgttgcccgtttggctcagacactgggcaatgatttatgcaagaaatttgttcaattaacatttcatcaattggtatgttcagaggatggtgatcagctcgcgatgcgtcttatttctgcactcatggagtactatattggcccagagggcagaggaactgttgaagaaatcagtactaaattgagggagggttgccctagttacttcaatgagtcagactacaaatattacttggcagtggaatgccttgagagagcatctatgactaataatgctgatgagagagatattcttgctagagatgctttcaacctcttgactaaaattccagactctgctgatttgagtgccatatgcaagagatttgagaacctaagattttatgaggctgtagtccgattgcctctgcagaaagctcaagcacttgactccaatgctgatattatcaatggtcaaatagacccaaggcatcatgatacaataatgttgcagcgtgaacaatgctataggattgttatggatgcgctgtgcactctcaagggtgttgggcatagtcgaatgcaaagtgcagacaagtcatctgctctagcaactgctgctgatccagcttctcgaagcaagtatatcaaacaaatcatacaacttagtgtccaatggccggacacagttttccatgagcatctatacaggacacttattgagcttggtctagaaaatgagcttttagagtatggtggatctgatttggtttcttttctgcagagtgctggccgtaagcatcaagaagagtttcttcagttacacctggagctgctaagatgcatgatttaggtgcacctatctcgactagtcaaacaaagtatctcgagctcctagctaggtactatgtccgcaagggggaacatattgctgctgccaggatgttgttaatattggcagagagacagtgctctaattctgaagaagctccagctcttgacaagcggtatgaatatctcagagatgcagtgcttcaggccaaaagcgcaggcatcgctgctgatttgtccaaaaatcctgttgatagcagcacagtggatttgcttgaaggaaaacttgtcgtgctacgcttccaaattcaaattaaagaagaattggagctcatggttgcacggctcgaaaatattccaagcagttctgaattacctaatgttccgttccctcgtgacaacattcttgctaatgcagagactgctaaggctgctaaggataaggcaaaagaactatcattaaatctcaagagtatcactcaactgtataacgattatgctgttccatttgatctctgggaggtttgcttggaaatgctgagctttgctaattactctggagacgctgatagcaaaattgttcgagaagtttgggctagactccttgatcaggcacttactaaagggggtgttgcagaagcttgttctgttgtgaaaagagtaggctcgaaacttgatcctgcagatggagcttgtttacctttagatatcatatgccttcaccttgagaaggctgcagtggatagattaagttcaggagaagaattagttggtgatgatgatgttgcaagagctcttcttggtgcctgtaaaggtcttcctggacctgtactttctgtgtatgatcacctgttatcgaacggtgcaatcataccctcactaaatctgaagttgcgccttctgcgatcagttctagcaatcctccgtgagtgggggatatctgtcattgcacacaggctaggcaccacaagtgctggggcttcattctttcttgatggaacattctcattgaaccaaacagggactgcgaatcaaggtgctcgagataaaataattagtttggcgaacaggtacatgactgaggtgaggcgattaaaccttccacagaaccaaacggagaatgtctaccgtggtttccgtgaacttgaggagaaattactatcttcttattaagcagattgcagtcattcctcaagatagtgaagaatgatcttgcatctgttgtaccacaaaaccaaggaatagagtcgagggcttctggattcacctcagcatgatctgtattgttccttacacttatctgcaagaacccggggctgctgcaggactctagctgaggtggttagatggctctagtaccactcatgtcctggctgagttggttagatggctctaatagcacttctgatgtcctgggtttgacttctaggtgagagcaaatttcagacgggttgaaaaaggtcatttgttggttcctctgtttgtgtgcacacaacggactgaccaatggatcctcgtgtaggtaaagatctagatctggtctatagggagcggattctcttgctgcatgggaggcagttttcgtgacttggtcgtactccgattgagcttcttaatataataacgggggacagtcttttctcaccgttcgagttcttttcttttttgaacccaaggctgctttaatcattattaatcagatgtttttcatgactaagtgcagccttcttttatttgacttgagtcagtatggactgcagagccgtagatttggaaaattgtttagatgtcttcattacttgctaatctagtggtagatactgccggtcctgttttaagggtggactttgtccctgaacaacattaaactgttgaatacaagttgggttttgatgcaggaatcggaatttagtatgtgccatgacattgtacagttctatagtagattattctcagtgttgtaagcttttacgctgtgtttgtttgtatgaagataccgtttcagtagctgaaaaaaggtaaaggttattgccagaaatgtggatttataggtctcgtt

SEQ ID NO: 5563 - DNA, 1127 bp, Zea Mays
atccgggtccgcgcattgcactagctccccccaggctctaccagaaccgccgccgtttctggatctctcgacggcgagcagcgactcgtccggtcgtccctcagcactgtgcttggcggacgcaggacaagacacaggatgagggctgtggtgcagcgcgtcctctcggccagtgtcgaggtcgaggggcgaatagtgtctgcgatcggccctggactcctcgttctcgtcggcgtccacgaggcggacacggactccgacgccgactacatttgtcggaaggtcctgaacatgaggctgttttcaaatgacaagactggaaaagcatgggatcaaagtgttatgcagcgtaactttgaagtgctattggtcagtcagttcaccttatacggcatcctgaagggtaataagccagattttcacgtggctatgtcacctgcaaaagcgaaaccattctatgcttctctagttgagaaatttcaaaggtcatactcggctgattcagtgaaagatggtgtttttggagcgatgatgaaggtgtaaattggaaagccttgcaggtttctttggtgaatgatggccccgtgacaatgcaaatcgactcaccctcactgcaaggtgctgctcagtcaagttggatctgaaagccctcctgctgtgcacttggtatgaactttgcgtctatctgttctagcgctttgtcattgccagtcagttacagcactgcttcagtctgcggaggcatagccttttgcgcaaatgacagaaccagacacattctctagactatatttgtcatcttattcatttttctactgcggataatactcttatcaatatgggagctacacatgagcttgtggcttctcaacaatgtagtatctagggtcttattactgaattagcaatcttcagtacatctatggatgaagttcagctctggtctatatatcagctgaactgtctctgtctcctacttgagcagaactcaaacaaccaaaaatcaatacttgggatcctctttcacccgagttattacttgttagcagcactgtagcagctagtgtcacatgcagcagagacaatgcagagatgccaacatgactgaaggataattttcttttgca

SEQ ID NO: 5564 - DNA, 690 bp, Zea Mays
gtgcagttgtgctccttccttccttgccccgtaccccgccggcgcgccctgagccaaatcgcaggctgccattgtgccatggacgaaggtgcgacgacgagcgactcgtccgctgccgagacatttgatccggacctgattcacgccatcttcaagctggtgtggaggcggcgggcggggaagggggccggcggcggcggcagcattgaggacatcgatgcggagccaatgcgactgctcttaaagtcagctgcgaacttctacggatatttgtaacagaggctattcaacgctctgcttttatcgctgaagcggaggatggtgctgttattgaacccacccacctagagcgtgtgttgccgcagctgctcttggacttctgaggtaccccatggagcctccaaaagcatttatctaggcgtgtctgctatggaaggatacagatgcctggatgcatcaacagaatcttattgctgatctatgtcttgtaatctgtaaacacacgagatttctatatggctttataaaaatgcatgcatttcttggaatgttttcctgttcgtgttgtgtttgacgagattattgccattataaaacacgacagagttggtttcgatgaaatggagatgtagggaagggcttcgacggtttggaggcgcagacgactgcgaagcgctgatatagacatga

SEQ ID NO: 5565 - DNA, 2070 bp, Zea Mays
actgtcttgcctgttgcctctgcggctttgcctgcgctcacggacggtcactggctcacgctcccctcgcctgcgtcgcctcgcctagacaagagacaagacgcctagtcgcctccgatcgaaatcgaatcgagtcgggtgggctcgggcccggtcttgttgtcttgtctcccagctaggaatagcgcaacgagatccctcgcgcgcgcggaccccggagaggccgagggagggtgacagggcgtgtcctcgaccgcgaggggaatgggatcggagggacgggcctggaacggcgcgggcatggccgccggcagcggctatggcggcggggtagaggcgaaagcgaccaccacggctgtgtcggccgcggcccccgcggaggttcccacgtcggcggcctccgtcgacatctcgctgccgctcctgaagatgtcgcctcgcatcatagctctctgcaaggaattggtcgaagggtggtcgtcgattgacagctcgctcttctccatcgagaccgtgtccgggggcatcacgaatctattgctgaaggtttctgtcaaagaagacaacggcaatgagtcttctgttactgttcggttgtatggaccaaatacggacttggtgattgataggaaaagggaattgcaggcgataccatatctctcagctgcagggttcggggctcggctacttggaatatttgagaatggagtagttcagtcattcatctatgctcgaacactgtcaccagcaggtaggcatagatcctgtctgaataacatatgggtgtggggtcctaatcaacctagtgcaatagtttctttgttctcctttgtagtttcagttgcaatttcaaatgcaagttgaaaggatttatgttttttcctttccctgtagtcagcattatccacgatttgacatgaaagaacctaaaatagcagctgaaattgccaaggagctacgcaaattccatcaagtagacataccagggtctaaagaaccacaattgtggaatgatatattcaagtttttgaagaaagctgcagcattgaagtttgaggataacatgaagcagaagagatatgaaaagatctcatttagagaaatacaagatgaagttcaagaacttaaggatctcttggacattctgcgcgcgcctgtggtttatgcacacaatgacttgctttcaggaaatctgatgctcaatgatttggaagggaagctatattttattgattttgagtatgggtcatacagctaccgtggctatgacattgcaaatcatttcaatgagtatgcaggatttgattgtgactataatttgtacccagataaagatgcccagtatcacttcttcaggaattatctacacactgatagacctagtgaggtggatgcacaagatatggaagtactttatgtggaaacaaacactttcagactagcatcgcacatttactgggcattatgggcccttattcaggcaaaggtatccccaattgactttgactatcttggatacttcttcttgcggtatggtgagtacaagaaacaaagggagtcctgcttctccttggcacaaagctttctctccgagctaaaaaatggctagagcctgagaatctgttcacgagtttatactggtgtacgcatgctcggagcgggtacgcgttgtgatcatcgactgctacccagaaactctattatagcggttgtagcagcccctcattgttgtatctgatgttaggttcatcattgtctaaggactagtttggatactctagtatcgagctcaattcatgtgtatgagatggattcgggtgtaacttaaactaatttacacactaatccaactcaacacatgtggattggggtcaatactaaattacccaaacaaagcctaacagggaagtcaccagtggcaaattatgtacttatatttataataataaacacaatcctgatgggttgtgccctgttgaatttgttcttcgattaattctgccctgtgcaatctgttctgcacttccgagtatatagtttttaatgactgggtagtcctttgaaggtccg

SEQ ID NO: 5566 - DNA, 1785 bp, Zea Mays
ataattctaacatgtgtgactagtatgatctttatttatactgataaaaacgtgggcagtcaattattcgaccaaatgatatattttttccaaaaagaaagaaaacatggacatgatgataaaacagcccccgaagcgtgcaacgggtgagcccgcaggctccacgcggacgcggccatgctgtgcactccgcctccgccccagccgccgctgcagtcatcgcggcgcccgcgcccgctcccgctccgggccgcgccacgatgctccaagcccaacgacgccgagccctcgccgtccccaccgtccaccgcggccgccggcggcgtccggcgccaggtgctctcgcccgagggccgcgcgaagctggacccgcggccggaccgcgacttctacgcgctcccgcgcctggtgacgcacgtggacgacggcttcatcgccacgctcacgggcctctaccgggagcgcctccgcgccgggtgggacgtgctggacctcatgagctcctgggtcagccacctgccgccggaggtccggttccggcgcgtcgtcggccacgggctgaacgcgcaggagctcgccaggaacccgcgcctggacctcttcttcgtcaaggacctcaacaaggagcagcggctggagctggagagcggcaccttcgatgccgtgctctgcaccgtcagcgtgcagtacctgcagtcccctgaaaaggttttcgcggagatcttccgggtgctgaagccagggggcgtgtgcatcgtcagcttcagcaaccggatgttctacgagaaggccatcagcgcgtggcgggacgggaccgcgtacagccgcgtgcagctcgtcacgcagtacttccagtgcgtggaggggttcacgcagcccgaggtgatcaggaagctgccgtcggccggcggatcgccgtcctcgccgctggacgccgtgatgaggctgttcggcgtggcaggctccgacccgttctacgcagttatctcgtacaggaacttcaagccaatgtgacaccctgattgacagaacccgtgcagcattgcgatatgcagtgcatacgatctatagaatcactactggtgcaaagctagtttgtacttgtacatgcacacttcagcattagctgtctagctcagcggcgggcagatgcaagttcgttcagaagctcaaaacatcatccaccgaccatctgattcagaaacatgctagcgatccttcttattacagaaagaaccactcttttttcaccgtcgtcgttcgtgaaacacgaacggactgagaccacctagctactcagaagaagaaacacgaacaggtcctgggagtaggtgccaaccggtatcaccatccggccgccaggctttagctgatcaagcagaggctgagggatctcaggtgccgctgcaccaacatggatagcgtcgtagggtgccgcgtctggaaagccaagcctgccatctgcagttttcatagcggccagacatcttagctccaggttatttcagagtttgctggcctcaacacaagcgaggttctcaagataaggagccacggggcatcaagaacaagtttcagtaccaggatatagtaatgaaaaaaggtctatatttgaagacaactttgatatcaggcacaatagcgatatcaccgacatgtactagcacacgtacttaggccctgtttgtttctatcctaaattatataaattgaattatggtggaaagataggagagtaaaatatcactttgggattacaaataagctgaaataagctactcaata

SEQ ID NO: 5567 - DNA, 1753 bp, Zea Mays
gggaaacatacaccgaataaagggagggtgactgtgaaccttggaggtcgccccaacagcgatctccaggcccagcccacccgatttttctcaaatcccaccgcttgttccaatccaacggaccagatcgctccaactaacccccacacacaaaccctagtcagctccacctatatagcctcttcccctttcgccgcgcctccattcgcaccaccgccgcgccgcccaaaccctagccgccgccgccgccgccgccgccatggtcgccgtcaaccgccccctcgtctccgtgaaggccctagagggcgacatggtaaccgacgcccccggcatcgccttaccgcccgtcttcggggcgccgatccgccccgacgtggtcaggttcacccacaagctgctgtcctgcaacaagcgccagccctacgcagtctcccgccgcgccggccaccagacgtcggccgagtcctggggtaccggccgcgccgtgtctcgtatcccccgcgtccccggcggcggcacccaccgcgccggccagggagcgttcggcaacatgtgccgcggcgggcgcatgttcgcgcccaccaagatctggcgcaagtggcaccgccgcgtcaacatcaacccgccgtcccggccctcgtccaggcgcgcggccaccgcatcgagtctgtccccgagatgccccttgtcatttccgactccgcggagtccattgagaagacctcccaggcgctcaagatcctcaagcagatcggcgcccacgccgacgccgagaaggccaaggactccgtcggcatccgccccggcaagggtaagatgcgcaaccgtcgctacatcaaccgcaagggcccgctcatcgtctacggcaccgagggctccaaggtcgtcaaggccttccgcaaccttcccggtgtggatgttgccaacgtcgagcgcctcaacctactagaccttgcccccggtggccaccttgggcgctttgtgatctggacccagagcgcgttcaataagctcgaggaggtgtatgggagctatgacgccccgtcgcagaagaagaagggcttcgtgctgccgaggcctaagatgtccaacgctgacctgggcaggatcatcaactctgacgaggtgcagtctgtggtgaagccactcaacaaggaagtgaagcgcagggagaagaggaagaacccactcaagaacatggctgctgtgctcaaactcaacccctacctcggcactgcccggaagatggccacccttgctgaggctgctcgtgtgaaggccaggaaggcgaagctcgactccaagaggaccaagcttaccccggagactgccaaggttaaggctgctggcaaggcatggtacaagaccatggtctcggacagcgactacaccgagtttgagaacttctcaaagtggctcggcgtgactcagtgagcggcaagggtagttaagttttgagtagctcagcttatgttgagaggaaagaggatccatcaaatctgttttatcctgcatcatcataacaagttgctacaagtcttgcatgttcgtgttgtttgtgcatttccgcgagaacatagtatttttatattcgaaccagttgtctgaactgtgcttggatttgtgcactgatgcttggctcaacctttctgtatcacgaatgagctggtccttgctgaaaatggtttacagaaaaagaaaacaggaatactcgttacaagaaaagatgaaattagaaagatttagatggcag

SEQ ID NO: 5568 - DNA, 2052 bp, Zea Mays
ttttcttttcccgtttttataaataaatcagcccgaaaaaaggacgcggtcgtggaccgaacaaacctttccccaaaatttccccttccccgcacaccgaacgaactctcgatctgatccctatccttgcagggcccgcctcggctcaccgatccggccccggatccgctcgtcgctcgacgggatctctcgattggagaacagtgagccgttcgtgaggcaccactctgagcagcttgcgtgtggcaacatgaggggagcagataatggtcgtccgaatttccttcctgagaagtgccagattgcagtcacaattggtgccaagtggtgtcaaggaaacaccaatagtggatcaaaacaagagacctgcatccagtgacatgcttgacatagttgaatgcaaacgtctgaagcaggaaggtcaaaaggattttcatgagtaccccacatacacgacttgcagaagaagctttgactcaccactatctgagagcgaggatagtgaagatgaaggtgtagattcacctctccatttttcacatgctcacacctatgttgaagatgatctatggcctgccagctttcatcatgctctgggcccttttcccttgaggaaacctgttcctatcgggccaaatcatcaggctgaattacctgagtgcaggccattttgtggaagaactgaagaaggcgaaagtgtcaagtggatcagaaacggtgttgtgccaatgcctgatactggtgcatcgtctttggtgttggaacctgttcactgcaaggcagactgtgagtgtcatgatgaaggttcaatcatttgtgtgaaaaagcatgtgagggaagcaagagaaaagctgaagggttctgttggtgcagacaccttcagggagttgggtttgaatgatatgggtgaagaggttggctcaaggtggacagaagaggaggaacatttgttccagcaggttgtcttgtcaaaccctgcttctctgtgcagaaacttttgggatgaactccctcttgccttcccttccaagtccagcaaagaactagtgagctactacttcaatgtattcatgttgaggaagagggctgagcagaacagatttgacccagtgaacatcgacagtgatgatgacgaatggcaggcaggtgacgatggtgagtatccaatcacaggaagaactgatgaatacttgccaactgagtctcttactgatcaagatgatgttgcatgcaatccagttcctttagaaagggatctctatgaagattctgatgatgaggatgagctggacaatgccagtggagacaggcataatggtgcccagagggctggtatgttgtcagagggtaatcgtgtaatgtcggtcatagaacataatcaacagacgttcaagttagatgcagaggcgcaagacgactcttgcacatcatttgaggctcatcaggttggtgttgaaggtgggacacatactgatattgctgatgacaatcattacaggagtgacggctttggtggtggtgcagaacatgggttcttcggtaatcagtgtgacacaaaagagtgggacttcggtctcagtatcggttgggaaaagcatgattttttgtcaacaaacaatgtcatagaagaggtgttcgggaagtgctgtgacactgctgaccaggaccttatctgagccagacgcggaggcttcttgtcagctgcgaaaactttagggttctctgaattgtacagcagtagttggctattttgatttaatgcctcacttgttcttacaggaatctcatctctgtccttggaacatcatctgcttgtgatttcgtcacatgattaatgtaaatccgtagtctgttgatagcctgtggaatgtatgtatcatctttgttgtgacggtgtctcttgacctgagcgttttttctatgtgctagcgagggtcatgtaataaaagctgttgttgttccttgaccctgtctgcaaataaatgtaacctgccagtcaatgtattccgaaaggtcatttttatctgatctgaaatctgtagtcgtttccgc

SEQ ID NO: 5569 - DNA, 2108 bp, Zea Mays
ttttcttttcccgtttttataaataaatcagcccgaaaaaaggacgcggtcgtggaccgaacaaacctttccccaaaatttccccttccccgcacaccgaacgaactctcgatctgatccctatccttgcagggcccgcctcggctcaccgatccggccccggatccgctcgtcgctcgacgggatctctcgattgtttagacaagcatgctgcatcaggagaacagtgagccgttcgtgaggcaccactctgagcagcttgcgtgtggcaacatgaggggagcagataatggtcgtccgaatttccttcctgagaagtgccagattgcagtcacaattggtgccaagtggtgtcaaggaaacaccaatagtggatcaaaacaagagacctgcatccagtgacatgcttgacatagttgaatgcaaacgtctgaagcaggaaggtcaaatcgtaactaaggaagacaaccatacatctgcagaggattttcatgagtaccccacatacacgacttgcagaagaagctttgactcaccactatctgagagcgaggatagtgaagatgaaggtgtagattcacctctccatttttcacatgctcacacctatgttgaagatgatctatggcctgccagctttcatcatgctctgggcccttttcccttgaggaaacctgttcctatcgggccaaatcatcaggctgaattacctgagtgcaggccattttgtggaagaactgaagaaggcgaaagtgtcaagtggatcagaaacggtgttgtgccaatgcctgatactggtgcatcgtctttggtgttggaacctgttcactgcaaggcagactgtgagtgtcatgatgaaggttcaatcatttgtgtgaaaaagcatgtgagggaagcaagagaaaagctgaagggttctgttggtgcagacaccttcagggagttgggtttgaatgatatgggtgaagaggttggctcaaggtggacagaagaggaggaacatttgttccagcaggttgtcttgtcaaaccctgcttctctgtgcagaaacttttgggatgaactccctcttgccttcccttccaagtccagcaaagaactagtgagctactacttcaatgtattcatgttgaggaagagggctgagcagaacagatttgacccagtgaacatcgacagtgatgatgacgaatggcaggcaggtgacgatggtgagtatccaatcacaggaagaactgatgaatacttgccaactgagtctcttactgatcaagatgatgttgcatgcaatccagttcctttagaaagggatctctatgaagattctgatgatgaggatgagctggacaatgccagtggagacaggcataatggtgcccagagggctggtatgttgtcagagggtaatcgtgtaatgtcggtcatagaacataatcaacagacgttcaagttagatgcagaggcgcaagacgactcttgcacatcatttgaggctcatcaggttggtgttgaaggtgggacacatactgatattgctgatgacaatcattacaggagtgacggctttggtggtggtgcagaacatgggttcttcggtaatcagtgtgacacaaaagagtgggacttcggtctcagtatcggttgggaaaagcatgattttttgtcaacaaacaatgtcatagaagaggtgttcgggaagtgctgtgacactgctgaccaggaccttatctgagccagacgcggaggcttcttgtcagctgcgaaaactttagggttctctgaattgtacagcagtagttggctattttgatttaatgcctcacttgttcttacaggaatctcatctctgtccttggaacatcatctgcttgtgatttcgtcacatgattaatgtaaatccgtagtctgttgatagcctgtggaatgtatgtatcatctttgttgtgacggtgtctcttgacctgagcgttttttctatgtgctagcgagggtcatgtaataaaagctgttgttgttccttgaccctgtctgcaaataaatgtaacctgccagtcaatgtattccgaaaggtcatttttatctgatctgaaatctgtagtcgtttccgc

SEQ ID NO: 5570 - DNA, 2124 bp, Zea Mays
ttttcttttcccgtttttataaataaatcagcccgaaaaaaggacgcggtcgtggaccgaacaaacctttccccaaaatttccccttccccgcacaccgaacgaactctcgatctgatccctatccttgcagggcccgcctcggctcaccgatccggccccggatccgctcgtcgctcgacgggatctctcgattgtgagccgttcgtgaggcaccactctgagcagcttgcgtgtggcaacatgaggggagcagataatggtcgtccgaatttccttcctgagaagtgccagattgcagtttgccagaggggtgaaaaagttagcctatttgatgaagggctgatacatggtgttgatctaaccaatcatattgctcagtcacaattggtgccaagtggtgtcaaggaaacaccaatagtggatcaaaacaagagacctgcatccagtgacatgcttgacatagttgaatgcaaacgtctgaagcaggaaggtcaaaaggattttcatgagtaccccacatacacgacttgcagaagaagctttgactcaccactatctgagagcgaggatagtgaagatgaaggtgtagattcacctctccatttttcacatgctcacacctatgttgaagatgatctatggcctgccagctttcatcatgctctgggcccttttcccttgaggaaacctgttcctatcgggccaaatcatcaggctgaattacctgagtgcaggccattttgtggaagaactgaagaaggcgaaagtgtcaagtggatcagaaacggtgttgtgccaatgcctgatactggtgcatcgtctttggtgttggaacctgttcactgcaaggcagactgtgagtgtcatgatgaaggttcaatcatttgtgtgaaaaagcatgtgagggaagcaagagaaaagctgaagggttctgttggtgcagacaccttcagggagttgggtttgaatgatatgggtgaagaggttggctcaaggtggacagaagaggaggaacatttgttccagcaggttgtcttgtcaaaccctgcttctctgtgcagaaacttttgggatgaactccctcttgccttcccttccaagtccagcaaagaactagtgagctactacttcaatgtattcatgttgaggaagagggctgagcagaacagatttgacccagtgaacatcgacagtgatgatgacgaatggcaggcaggtgacgatggtgagtatccaatcacaggaagaactgatgaatacttgccaactgagtctcttactgatcaagatgatgttgcatgcaatccagttcctttagaaagggatctctatgaagattctgatgatgaggatgagctggacaatgccagtggagacaggcataatggtgcccagagggctggtatgttgtcagagggtaatcgtgtaatgtcggtcatagaacataatcaacagacgttcaagttagatgcagaggcgcaagacgactcttgcacatcatttgaggctcatcaggttggtgttgaaggtgggacacatactgatattgctgatgacaatcattacaggagtgacggctttggtggtggtgcagaacatgggttcttcggtaatcagtgtgacacaaaagagtgggacttcggtctcagtatcggttgggaaaagcatgattttttgtcaacaaacaatgtcatagaagaggtgttcgggaagtgctgtgacactgctgaccaggaccttatctgagccagacgcggaggcttcttgtcagctgcgaaaactttagggttctctgaattgtacagcagtagttggctattttgatttaatgcctcacttgttcttacaggaatctcatctctgtccttggaacatcatctgcttgtgatttcgtcacatgattaatgtaaatccgtagtctgttgatagcctgtggaatgtatgtatcatctttgttgtgacggtgtctcttgacctgagcgttttttctatgtgctagcgagggtcatgtaataaaagctgttgttgttccttgaccctgtctgcaaataaatgtaacctgccagtcaatgtattccgaaaggtcatttttatctgatctgaaatctgtagtcgtttccgc

SEQ ID NO: 5571 - DNA, 2155 bp, Zea Mays
ttttcttttcccgtttttataaataaatcagcccgaaaaaaggacgcggtcgtggaccgaacaaacctttccccaaaatttccccttccccgcacaccgaacgaactctcgatctgatccctatccttgcagggcccgcctcggctcaccgatccggccccggatccgctcgtcgctcgacgggatctctcgattgtttagacaagcatgctgcatcaggagaacagtgagccgttcgtgaggcaccactctgagcagcttgcgtgtggcaacatgaggggagcagataatggtcgtccgaatttccttcctgagaagtgccagattgcagtttgccagaggggtgaaaaagttagcctatttgatgaagggctgatacatggtgttgatctaaccaatcatattgctcagtcacaattggtgccaagtggtgtcaaggaaacaccaatagtggatcaaaacaagagacctgcatccagtgacatgcttgacatagttgaatgcaaacgtctgaagcaggaaggtcaaaaggattttcatgagtaccccacatacacgacttgcagaagaagctttgactcaccactatctgagagcgaggatagtgaagatgaaggtgtagattcacctctccatttttcacatgctcacacctatgttgaagatgatctatggcctgccagctttcatcatgctctgggcccttttcccttgaggaaacctgttcctatcgggccaaatcatcaggctgaattacctgagtgcaggccattttgtggaagaactgaagaaggcgaaagtgtcaagtggatcagaaacggtgttgtgccaatgcctgatactggtgcatcgtctttggtgttggaacctgttcactgcaaggcagactgtgagtgtcatgatgaaggttcaatcatttgtgtgaaaaagcatgtgagggaagcaagagaaaagctgaagggttctgttggtgcagacaccttcagggagttgggtttgaatgatatgggtgaagaggttggctcaaggtggacagaagaggaggaacatttgttccagcaggttgtcttgtcaaaccctgcttctctgtgcagaaacttttgggatgaactccctcttgccttcccttccaagtccagcaaagaactagtgagctactacttcaatgtattcatgttgaggaagagggctgagcagaacagatttgacccagtgaacatcgacagtgatgatgacgaatggcaggcaggtgacgatggtgagtatccaatcacaggaagaactgatgaatacttgccaactgagtctcttactgatcaagatgatgttgcatgcaatccagttcctttagaaagggatctctatgaagattctgatgatgaggatgagctggacaatgccagtggagacaggcataatggtgcccagagggctggtatgttgtcagagggtaatcgtgtaatgtcggtcatagaacataatcaacagacgttcaagttagatgcagaggcgcaagacgactcttgcacatcatttgaggctcatcaggttggtgttgaaggtgggacacatactgatattgctgatgacaatcattacaggagtgacggctttggtggtggtgcagaacatgggttcttcggtaatcagtgtgacacaaaagagtgggacttcggtctcagtatcggttgggaaaagcatgattttttgtcaacaaacaatgtcatagaagaggtgttcgggaagtgctgtgacactgctgaccaggaccttatctgagccagacgcggaggcttcttgtcagctgcgaaaactttagggttctctgaattgtacagcagtagttggctattttgatttaatgcctcacttgttcttacaggaatctcatctctgtccttggaacatcatctgcttgtgatttcgtcacatgattaatgtaaatccgtagtctgttgatagcctgtggaatgtatgtatcatctttgttgtgacggtgtctcttgacctgagcgttttttctatgtgctagcgagggtcatgtaataaaagctgttgttgttccttgaccctgtctgcaaataaatgtaacctgccagtcaatgtattccgaaaggtcatttttatctgatctgaaatctgtagtcgtttccgc

SEQ ID NO: 5572 - DNA, 2165 bp, Zea Mays
ttttcttttcccgtttttataaataaatcagcccgaaaaaaggacgcggtcgtggaccgaacaaacctttccccaaaatttccccttccccgcacaccgaacgaactctcgatctgatccctatccttgcagggcccgcctcggctcaccgatccggccccggatccgctcgtcgctcgacgggatctctcgattggagaacagtgagccgttcgtgaggcaccactctgagcagcttgcgtgtggcaacatgaggggagcagataatggtcgtccgaatttccttcctgagaagtgccagattgcagtttgccagaggggtgaaaaagttagcctatttgatgaagggctgatacatggtgttgatctaaccaatcatattgctcagtcacaattggtgccaagtggtgtcaaggaaacaccaatagtggatcaaaacaagagacctgcatccagtgacatgcttgacatagttgaatgcaaacgtctgaagcaggaaggtcaaatcgtaactaaggaagacaaccatacatctgcagaggattttcatgagtaccccacatacacgacttgcagaagaagctttgactcaccactatctgagagcgaggatagtgaagatgaaggtgtagattcacctctccatttttcacatgctcacacctatgttgaagatgatctatggcctgccagctttcatcatgctctgggcccttttcccttgaggaaacctgttcctatcgggccaaatcatcaggctgaattacctgagtgcaggccattttgtggaagaactgaagaaggcgaaagtgtcaagtggatcagaaacggtgttgtgccaatgcctgatactggtgcatcgtctttggtgttggaacctgttcactgcaaggcagactgtgagtgtcatgatgaaggttcaatcatttgtgtgaaaaagcatgtgagggaagcaagagaaaagctgaagggttctgttggtgcagacaccttcagggagttgggtttgaatgatatgggtgaagaggttggctcaaggtggacagaagaggaggaacatttgttccagcaggttgtcttgtcaaaccctgcttctctgtgcagaaacttttgggatgaactccctcttgccttcccttccaagtccagcaaagaactagtgagctactacttcaatgtattcatgttgaggaagagggctgagcagaacagatttgacccagtgaacatcgacagtgatgatgacgaatggcaggcaggtgacgatggtgagtatccaatcacaggaagaactgatgaatacttgccaactgagtctcttactgatcaagatgatgttgcatgcaatccagttcctttagaaagggatctctatgaagattctgatgatgaggatgagctggacaatgccagtggagacaggcataatggtgcccagagggctggtatgttgtcagagggtaatcgtgtaatgtcggtcatagaacataatcaacagacgttcaagttagatgcagaggcgcaagacgactcttgcacatcatttgaggctcatcaggttggtgttgaaggtgggacacatactgatattgctgatgacaatcattacaggagtgacggctttggtggtggtgcagaacatgggttcttcggtaatcagtgtgacacaaaagagtgggacttcggtctcagtatcggttgggaaaagcatgattttttgtcaacaaacaatgtcatagaagaggtgttcgggaagtgctgtgacactgctgaccaggaccttatctgagccagacgcggaggcttcttgtcagctgcgaaaactttagggttctctgaattgtacagcagtagttggctattttgatttaatgcctcacttgttcttacaggaatctcatctctgtccttggaacatcatctgcttgtgatttcgtcacatgattaatgtaaatccgtagtctgttgatagcctgtggaatgtatgtatcatctttgttgtgacggtgtctcttgacctgagcgttttttctatgtgctagcgagggtcatgtaataaaagctgttgttgttccttgaccctgtctgcaaataaatgtaacctgccagtcaatgtattccgaaaggtcatttttatctgatctgaaatctgtagtcgtttccgc

SEQ ID NO: 5573 - DNA, 1057 bp, Zea Mays
agggcaaaagaggaaatttctttgggctgggtctactaaaccctaatgggctgcggcctcgtatataaaccagcaccactcatccgtcgccgcacggaagtttcggcggcgccggcgtgctcgtgatctcaacccaaggcgtgcctccgctccggtcacccgtcgctccacgcaaccatgttgtatgtgtttgcagtcgaggaggaagaccagggagcccaaggaggagaacgtcacccttggacccactgtccgtgaaggagagtatgtctttggtgtcgctcacatctttgcatccttcaatgacaccttcattcatatcactgatttgtctgggagggaaactctggttcggatcaccggtggcatgaaggtgaaggctgaccgtgacgagtcgtcaccttacgctgctatgcttgctgctcaagacgtcgcacagcgctgcaaggagcttggcattactgcactgcacattaagcttcgcgccaccggaggcaacaagaccaagacccctggacctggtgcccagtctgccctcagggcgcttgctcgttccgggatgaaaatcggacgcattggtaaggagaggacgttaccccggtccccactgacagcactcgcagaaagggcggtaggaggggaaggaggctgtaggcgtctcgtctgcgtggcatttgccggctcttggccggtggccattatgaagctagccctctctgggtggtgttgctgttctgtgtttgtcaagacgagctttaattttgctctatgtggatgaccgtttaccgttactcgaacctatatgatgttccatggataatgttttttggctgaggaattggctcgtcatatttatgtatgcattttcactctctctataaagtgtactagagtaatcttccctagcgaaagggcctatagcctagtggttaaggactttcgaatagcatctccaaatcttgggttagatttctctcgggaacaaatttttaggcttgttaaaaaaatcctctcgctatgtctcatccgcttttgggttatgatgttctgtgcgtca

SEQ ID NO: 5574 - DNA, 2075 bp, Zea Mays
cccgacccgcagaaaaaatccagtcagcgaagggttcctctgaccgggcgaggctctcatggcggcggctgaccccgagacggcggcggcgctgcggggggaggtcgccgcgctgcggatgcgcgtacaggagctggaggcagagaatcagaggctggcaaggattgcttcgacctgtacctgcggattcaagggcagtgtttcaaaggtgtcgcctaggtggccaggcgtacccagcttgccttgtgaaatagtgatgccttgtcgcctaggcgtccaggagggcagtgttggatccattactgcacatcataatgtgaaatttcatcaaaatagcactatggagaaagatttgagctctccatttgatcacacagtaatatccaatgcaaatgaaatgcagtgcaacagaaatgcagatgacaatggtttacctgaggattcaagcaagcatactaaaagaacaggtcgcaaggtgggcattttaagtcactgcccaaagcgactagttgctctcaaagtcatgtatttcggccagagattctatggtttttcttctgaaggtaacattgaaccaacagttgagtctgagatatttaaagcactggaaagagcaaaactgatggttgccaataggaaagaatcatgctactcgaggtgtggaagaactgacaaaggagtttctgctactggacaggtgatttctttatatctgcgatcgaacataaaggatgttgggggggacatgttagatgaaagatccgaaattgattatgtgaaggtattgaatagaattcttccaagagatatacgtgtactgggttggtgtcctgttccagcagattttcatgcaagattcacctgtttgagccgggaatataaatacttattttggaaaggggacctggatatattggaaatgcagaaagctgcatccaaattcattggagaacacgactttaggaatttttgtaagatggatgcagcaaatgtgagtaactacaggcggcacattacagaatttactatttctgcatgtgacagaaggtccaacaatgatgagctgtgttccatgacgatcaagggtagcgcttttctgtggcaccaagttcgctgcatggtagctgtgttatttctaataggtcaaggccttgagtcaccatccgtagttgattcactattggatattatgaaaacatctaggaaacctcaatataaaatggcgccagagcttccattgattttgcaatcttgtctatttgataaagccaactttatgtgttcagcagatgccagccggtctctgactgagcacttaaatgatgaatatcgtcaccatatgctccaagctgaaatatttcacatagcgtcatcctgtttaccttttccagaaccaaattcatcagaaacgcctcagaagaagaggaaccatattcctctcctgtcacgagagacagagccttcttacgaggagcgcatatcgaaagtcaaagcgaagctggctgataatctcaagtagagccaccgttttcaattgttacaccaatacttggaagagaacttatggaactgtagaaggtttcttccaaaagcctatatgtttatgacgtgcgctttttttatggcaaaattggatctgttaacatgtggagatggaaattacccggaaacatgagcttagcgtggattttaccattttgaggtgttagaaaagcgtgctgcctattttagactagatatacagactaaaacatatggagccccacatttcgggtattgtcaagttgtgcgtttcactttcaaaatagtgtaagggccttgtgttttttttcttcttctgaatttgttgtaaaatagtctagcatcccttgcaaagagggggtaatgttgttgtcacatgatggtgtgtaccaaagtgtagtaaagcatcccttgcaaagagggggtggtagtgtcctgtatgtttttttaagcaaatgtgacaaactatataagaaatgaatatttcatgtgagttatgtatttccagccgtattatttaggttacttgcattcatatttaagcagcttacaag

SEQ ID NO: 5575 - DNA, 2995 bp, Zea Mays
ccgcagaaaaaatccagtcagcgaagggttcctctgaccgggcgaggctctcatggcggcggctgaccccgagacggcggcggcgctgcggggggaggtcgccgcgctgcggatgcgcgtacaggagctggaggcagagaatcagaggctggcaaggattgcttcgacctgtacctgcggattcaagctgcagcagcccgaatagccagctttaattcgaagcgaacaacctgtatgattcagtcagctccagaagatgcaattgccactgttgtttatgagagctaattagagcatctccaagagaggttttaaatgtgaccctattttaatatagggctcggaaccataaaacacccttccaacaatggccatattttataaaatttcaccaaacgattatatggcttggtctcttgggtcctaaatatagtaccctatatactgaagccctattctcattaactctctccaaccattagtttcctaataccatgatttatttcctaaatagtattgtttaaggcctgactgttggaggacaaaattgttttgaggccctaaacaatctaaacacggtcctatttcaaaatttaggactattttagagtttattgttggagatgctcttagaacttatctttctggcatcgaccaaaacttttttaaggttgtttctctgcctataaattgttgcgacatgataatctttgttatagcatgtgctgacatgaattacagggagaattgagaacatgtaatggttgtttgctgccagagaatacatgctaacagaaagtttccatccatttagaattatatgctaacagaaagtttccatccatttagaattatattaaattagtgtccttaatattggctgtcaccatgactatgtgaatgcgaatttctatatgtttatggcattatggcaatcgccaacactattatatgcatattcatatatatatatgtgtggaaatcaagtgcgatgcatcatccactcaaggttcaaaaaagtttagattaattcgtttgcatatgtaggattgtatcttgatgttgatacctttccttaaagcaagtcaataccctgcatatcatgtaccgtagggcagtgtttcaaaggtgtcgcctaggtggccaggcgtacccagcttgccttgtgaaatagtgatgccttgtcgcctaggcgtccaggagggcagtgttggatccattactgcacatcataatgtgaaatttcatcaaaatagcactatggagaaagatttgagctctccatttgatcacacagtaatatccaatgcaaatgaaatgcagtgcaacagaaatgcagatgacaatggtttacctgaggattcaagcaagcatactaaaagaacaggtcgcaaggtgggcattttaagtcactgcccaaagcgactagttgctctcaaagtcatgtatttcggccagagattctatggtttttcttctgaaggtaacattgaaccaacagttgagtctgagatatttaaagcactggaaagagcaaaactgatggttgccaataggaaagaatcatgctactcgaggtgtggaagaactgacaaaggagtttctgctactggacaggtgatttctttatatctgcgatcgaacataaaggatgttgggggggacatgttagatgaaagatccgaaattgattatgtgaaggtattgaatagaattcttccaagagatatacgtgtactgggttggtgtcctgttccagcagattttcatgcaagattcacctgtttgagccgggaatataaatacttattttggaaaggggacctggatatattggaaatgcagaaagctgcatccaaattcattggagaacacgactttaggaatttttgtaagatggatgcagcaaatgtgagtaactacaggcggcacattacagaatttactatttctgcatgtgacagaaggtccaacaatgatgagctgtgttccatgacgatcaagggtagcgcttttctgtggcaccaagttcgctgcatggtagctgtgttatttctaataggtcaaggccttgagtcaccatccgtagttgattcactattggatattatgaaaacatctaggaaacctcaatataaaatggcgccagagcttccattgattttgcaatcttgtctatttgataaagccaactttatgtgttcagcagatgccagccggtctctgactgagcacttaaatgatgaatatcgtcaccatatgctccaagctgaaatatttcacatagcgtcatcctgtttaccttttccagaaccaaattcatcagaaacgcctcagaagaagaggaaccatattcctctcctgtcacgagagacagagccttcttacgaggagcgcatatcgaaagtcaaagcgaagctggctgataatctcaagtagagccaccgttttcaattgttacaccaatacttggaagagaacttatggaactgtagaaggtttcttccaaaagcctatatgtttatgacgtgcgctttttttatggcaaaattggatctgttaacatgtggagatggaaattacccggaaacatgagcttagcgtggattttaccattttgaggtgttagaaaagcgtgctgcctattttagactagatatacagactaaaacatatggagccccacatttcgggtattgtcaagttgtgcgtttcactttcaaaatagtgtaagggccttgtgttttttttcttcttctgaatttgttgtaaaatagtctagcatcccttgcaaagagggggtaatgttgttgtcacatgatggtgtgtaccaaagtgtagtaaagcatcccttgcaaagagggggtggtagtgtcctgtatgtttttttaagcaaatgtgacaaactatataagaaatgaatatttcatgtgagttatgtatttccagccgtattatttaggttacttgcattcatatttaagcagcttacaag

SEQ ID NO: 5576 - DNA, 2869 bp, Zea Mays
taaacgaatagacccaccgcatctcaacatcctctcctcgtcttctcccaacgccgccgcagcgttcttgtcgggctccggtcaggtgaagtatgctgatgaacttcagggactggatctcgtaccggctcggttcctcgctgctgtccgccaggccgttcgcgctttcccccggtgctgatgacggcgcctccgagggtgatgctcatgcacacaatgactttgtagatactgttactgccaatacattttcttctaatgatatgcgggcgtcagaggtcacagccaactctggtagtggtgcaatttattctggtattgttcaacaagatgatgataataagaagtcagatccactgatgaaagtcgaggcgcttcaaatcaagtttctgcggttagtatacaggactggagtgtctcccagtgctgatgtagttgcacaggttctgtacagattgcagcttgcaaatttgattaaagccagtgaatcagatgcaaggagaacaaacctagctatcaacaaagctagggttatagcagcacagcaggaagcaccgggtgggcctgatctggatgtctcaatgcaaatccttcttctggggaagtctggtgtgggaaagagtgccacaataaattcaatttttgatgagaggaaggttgctactgatgctctggttcctgctactcataggataaagaaaattgaaggaacaattaaaggaataagagtcacagtcatcgacacacctggcctggtgtctcattaccatggccaaaggaggaacatgaagattctgaattctgtcaagcacttcattaagcgatccccacctgatatcatcttatactttgagcgtttggaccatattaacagcagatacagtgattacccactgctgaagcttatgactgacatattggggtctccaatgtggttcaatactgtccttgtaatgactcactgttcctcatctcctcctgaaggaccagatggttacccattggaatatgatacttatacgcgttactgcaagaatgtggtgcagcgtcacatccaggctgcagtttccaacacgcagttggataatccatttgtgctcatagacaatcatccaatgtgcagacgaaacaccaagggtgaaagggttttaccaaatgggcaggtatgggtatcagaactgctgctgctgtgtggggcaaccaagttgctgacagaagcaaattccttgcttaagtttcaagatagcttcctactgtcacaagcaaacaccaggctgccttcgctgcctcatcttctttcttcacttcttaagcctcactcttcatccagttcagatgccattgacagtcaattgacagaaatgtcagatgaggaggatgaatatgatcaactaccacccttccgcattctaaagaaatctgaatatgaaaatttgaccaatgaacagaagtctgcatatcttgacgaactggactaccgtgagactttgtacctaaagaaacagtggaaagaaggaatcagaaggaaaaagcttactgaagctcagagtgatgaagttggtgatgattatgatgagagtgcatccccagagattgtgcacatgtcagatatggacattccactaagttttgactctgattatcctgtgcatcgttaccgtcacattataactgatgatcagttgtttagaccagttttggatccacaaggatgggaccatgatattgggttcgatgccatcaattttgaagcatctcaagagttgaaaaagaatgtctctgcggcaattacaggacagatgagaaaggacaaggaagacatgtatatccattcagaatgttcagtaagttacaatgctcagagaggctgctccttgatggggggtatggatatgcagacggcaagcaaagatttggtctgtactgttcatggggatgccaagttccacaatctgccttggaacagtattggaggtggcatttctgttactaagtttggcaacaagtactttgctggggctaagttagaagactctgttaccattgggagacgagttaaactggtagccaacgccggtaggatgtctggctgtgggcaggtggcacatggaggtggtgtggagattacagcaagggggaaagattaccctgtgagggaagggagtgtcactgccgcggtctctgctttgtcatttgaaaaggaaaccgtaattggggccaaccttcagtcagacttccgagtgggccgtggatcaaaaatatcagtcagcgctaacctaaatagtagaaatttgggcaatctcagcgtcagaactagcacatcagaccacgctgagatagctttgataacagttgtctccttgatccagttcattcttaggagaagatcagcagcagataataaagatgagcaacagattggcaccaatttggatgactaaataacaggtacaaggaaaagacaatgattgcatgctttagatgctcatcgtcatcaggatttgctgcaattatgttaacctaaggcgcctgtcaatctagagttccaatttgtacagaattcttgtatatcaattatgagtataaataatgtatgaaggaggcattttccatgagaagagctccttctgcccataagcgatttttttaggttttaaggatgtaatcagacgccgttttgagttttaacatcacacaaagtttatttagtttattacttgcataggaatgtttatttacttaccaagcttctgttttccaattttaaaaggtctcagtgatgagatttcactgctcagagacggatacaacctttatctgtataaatgaggaaactataacatcacatggtttttgttttgcaatagaa

SEQ ID NO: 5577 - DNA, 874 bp, Zea Mays
cgcccatttgccctctctcctccccagagcaaagcatacacgcgcgcagtcactcacgcacgcccccagctctctccttctccctgctcgctcgctcgccatggacgctccgagcagctggaagagtcctgcgcgcgccaagtgaccggagaagctgcgagatcagagtagttgcttgccgctcccgtgccaccaaattagattggacgtagctagcagctagctgagccgtagtgcgtagcggcagctaggctgctagctcgatcgttatagctgcgtactagtggtgtcgcagcagaagcagtagccagcttcagtagccgatccggtggtaaaagcaactttttttggacatggcggcggagggagccccggtgctggtgaggcatgctggcggcgtggaggagctgcggcagctcccgccggggttccggttccgccccacggacgaggagctcgtggtgcagtacctccggcgcaaggccttgggcgcgccgctccccgccgccgtcatccccgtcgtccgcgacctctacagcctcgacccctgggacgccgtcgacgtgccggccgcccctgatgcgagcagccaaggcgagagatacttcttcgcggtgcggccggcgggcggcgtcggaagtgctaggagggcgaccgcgagcgggcggtggaggccggcggggaaggagaagccggtggccctgccccgcccgtgcggcggcgggagcctcctggtgggcgtgaagagggcgatggcgttcgttccccggcggaagaagaagaaggcggcggcggcggcggccctggcgatcggctgggtcatgcacgagtaccgcctcgccgcgccgctgcacaagcacaagagcccgtgacc

SEQ ID NO: 5578 - DNA, 740 bp, Zea Mays
ctctattcccctccgtgtccgatgcctctcatcgccagaagaccttcccggtacgacgccaccgcaccacggaattaacacgagcactgcatcggtgaatctgcaagcccgcccgcccgtcgctcgccaccgccatgttcggcatcgtcttcccggaccacacctttcccctcgacgccaccgctttcgcgcaggtggcgcccaattcctgggtcctcgatctctccactctcgcgctcgccgccgcgccgcgctcggcagtcgtcttcctgctccccgctgccgtgacagcgctgccgcccggcaaggccgtctccgtctacttccaggccgccaccaaccgccccttcgcattcttaggtgcgctcgggcccacgcgcccctcggccagcttcccgcttccggaggccggcgacgagccggagcctgctgtgggccccgctaaactgggtgtcgccgtggaggacgcggccgcgttaccgccgccccctgacgagcagcgtgccgagcgtgtggcgctccgtgtcggcgagaacctgttcaacttcatgcaatcgttctgcggtgccgacggcggcaagctggtagtgcccacggacatcctggaccggtggttccgcaagttccaggagcgagccaagaaagatccagcgtacctcaagagcttcgacttttgagagcaaagatatcagagaacagaggggagaaagatccaaatatagttcaacaccataatactt

SEQ ID NO: 5579 - DNA, 1650 bp, Zea Mays
tgaaccgggaatctgggttgcactgttcggttctttcgtggggaattccgcttccgcttcttgctaaattcttctttggtgggaggctcatattcggacctgacgccaagtcactgatcctgtctgtttcgctcattgtggccccggtattggtcttctgcggattcgttgctcggcatcttcgccaccacttcccggcttacaatgctggatatgcgattcctgcggtagctgtagtgtttatgatttatgtgctagtcctgctcttgattacatcagcgcaggatcctgggatcgttccccgcgcagcccacccgccggaggatgagttttcttatggcaacgctttgtctgggggcacgcctgggaggctacaattcccccgtgtaaaggaagtactggttaatgggatgcctgtgaaagtgaagtattgtgacacctgcatgatttatcggcctcctcgatgctcacactgttcgatatgcaacaattgtgtagagcgctttgaccatcattgcccctgggttggacaatgcattgggcagcgcaattaccggtactttttcatgtttgtttcttcctcgactcttctctgcatttatgtatttgcaatgtcagccttgtacatcaagtttctcatggatgaggattatccaacagtatggaaggctttcaaacactctcccgcttctttggggcttctgatatattgtttcattgctctctggtttgttggtggactcactggatttcatttgtacctcattagcaccaaccagaccacgtacgagaatttccgatacagatcagacagcaggcctaacatctatagccaaggatgtctgaataactttctacaagtcttctgcagcaagacaaaaccttctaaacacaagttccgggcctacgcgcaagaggaagtgcggcctccaacggttagcttcggcagggaggtcgatgaggaaccggtcggcgggcctcggccgaaagttgaggacgatcttgaaattggtaccgatcttctgaagatctctcagcggcgcaactacgaggacgtcgatgcagaaacgggaggccgtcgcagtcgcagcagcgaggtggaaggcacggccagtgccagacctgctgtggcgtgctcggagtcccagatccctgcggtcgggggtactgacgtgagggtgcggcactcgagctgggaccggcgaagcgggaactgggacatgtcggctgtgcttacgaggagcgcgtcagatgtgattggacgtagcagcgtgttcgccgcggacgctgcacgtccatctctagaagagactcgctagcgaactgtgtctgtgcatccaggaaacatgtgcgagcggttcggatagcgaggccatttgactcgtggtggtggtgacacacacccaggtgttttggctttggctgccttgattgggtttttgttaccgacccttgtcagttgtcatgtatggacagttatttttagtcagagaatctgcccccattgttgccggcatgttcgtgtgcctgtaaattgcaaatgcaggatcctcatcaacttcaattcttattgggctgtttctttgagaatgcgtaatgtgaaaaagcatctggcctagctctttataggaatggatgcaattttaaagc

SEQ ID NO: 5580 - DNA, 1830 bp, Zea Mays
aaaaagaaaagcttttcattttacacctcacctccccgtcccaccacgtacaaaggcgacgcgagcagcgtttgcttccctttccctgctgtgctcggcctcgccgcttcctctgccctggctcaacgattcctccgcttttcctttttcaaaatcgccctttcctcgtgcgcgtgtcgactccttcctgctcgccgccgggtctgggctgggtgacgctgcctcggatgaggccgcgctgaccggagccgtagccggaccacccgcccacccatggcgcgcccgcagcgcgtgtatgaggcttggaaagggaacaataaattcttctttggtgggaggctcatattcggacctgacgccaagtcactgatcctgtctgtttcgctcattgtggccccggtattggtcttctgcggattcgttgctcggcatcttcgccaccacttcccggcttacaatgctggatatgcgattcctgcggtagctgtagtgtttatgatttatgtgctagtcctgctcttgattacatcagcgcaggatcctgggatcgttccccgcgcagcccacccgccggaggatgagttttcttatggcaacgctttgtctgggggcacgcctgggaggctacaattcccccgtgtaaaggaagtactggttaatgggatgcctgtgaaagtgaagtattgtgacacctgcatgatttatcggcctcctcgatgctcacactgttcgatatgcaacaattgtgtagagcgctttgaccatcattgcccctgggttggacaatgcattgggcagccttgtacatcaagtttctcatggatgaggattatccaacagtatggaaggctttcaaacactctcccgcttctttggggcttctgatatattgtttcattgctctctggtttgttggtggactcactggatttcatttgtacctcattagcaccaaccagaccacgtacgagaatttccgatacagatcagacagcaggcctaacatctatagccaaggatgtctgaataactttctacaagtcttctgcagcaagacaaaaccttctaaacacaagttccgggcctacgcgcaagaggaagtgcggcctccaacggttagcttcggcagggaggtcgatgaggaaccggtcggcgggcctcggccgaaagttgaggacgatcttgaaattggtaccgatcttctgaagatctctcagcggcgcaactacgaggacgtcgatgcagaaacgggaggccgtcgcagtcgcagcagcgaggtggaaggcacggccagtgccagacctgctgtggcgtgctcggagtcccagatccctgcggtcgggggtactgacgtgagggtgcggcactcgagctgggaccggcgaagcgggaactgggacatgtcggctgtgcttacgaggagcgcgtcagatgtgattggacgtagcagcgtgttcgccgcggacgctgcacgtccatctctagaagagactcgctagcgaactgtgtctgtgcatccaggaaacatgtgcgagcggttcggatagcgaggccatttgactcgtggtggtggtgacacacacccaggtgttttggctttggctgccttgattgggtttttgttaccgacccttgtcagttgtcatgtatggacagttatttttagtcagagaatctgcccccattgttgccggcatgttcgtgtgcctgtaaattgcaaatgcaggatcctcatcaacttcaattcttattgggctgtttctttgagaatgcgtaatgtgaaaaagcatctggcctagctctttataggaatggatgcaattttaaagc

SEQ ID NO: 5581 - DNA, 1775 bp, Zea Mays
ggatctgctaatccatccaactccaagcaaatggaatatgcctttgccttgcacccaagaacagtttctgtagtttcggctgcgagcctgaccgagacagacacacaccagagggagagggagacggagagaagggcgagcggcactagcaagcatggcggcggccgtcctagcgcccaagccgcctcctccgctgcctaccagggcctttccttcctcatccccctcgcggtttgcccctgccttcatctccccgcgtcatcccctgagaagattgctcctccgccggagtccaggccccgccgcatcgcccttttcgtcgagccgtctcccttcgcctacgtctccggctacaagaaccgcttccagaacttcatcaagtacctacgggagatgggcgacgaggtgattgtggtcaccacgcacgagggcgtgcctcaggaattccacggagccaagctaattggctcatggagcttcccttgcccctggtatcaaaaggttccgctgtcgctggccctcagtcctcgaatcatcgcagaagttgctagattcaagcctgacattattcacgcctcttcacctgggataatggtatttggcgcgcttatcatagcaaagttgctctgcgtccctctggtaatgtcataccacacccacgttccaatttatatacccagatatactttcagctggcttgtcaagcccatgtggctaataataaaattcttgcaccgagctgcagacctcacactggtaccatctgttgctatcggcagggatcttcaagctgctcgtgttacagcagccaataaaatacgcctttggaacaagggtgttgactcagaaagcttccatcctcgtttccgcaacatggaaatgcgttcaaggctaacgaatggtgaaccagaaaagccacttgtattttatgttggacgcttaggagttgagaaaagcttggattttcttaagagagtcatggaccgacttccaggagcaaggattgcatttattggagacggaccattcagagctgagctcgagcagatgttctcaggtatgccggtggtgttcacgggcacgttgcaaggggaggagctatcacaggcctatgccagtggggatgtgtttgtgatgccttccgagtcagagacactggggtttgtggtgctggaggccatgtcatcaggagttccggtagtcggggctcgcgccggaggaatacctgatatcatacctgaggatcaggaggggaggaccagctttttgtacacaccaggggatgtggatgactgtgttggcaagatcaagcggctcctgtcgagcgaggaactgagggaggccatggggagagctgccaggaaggagatggagaagtttgactggcgagcggcgacgaggaagatccgcaacgagcagtacagtgctgcaatctggttctggcgcaagaagagggcacaggtgctgcggcccctccaatgggtgctgcggctgctgaggcggacaatgccaggagctgccgatgccgcagcgaagcaatcctaggagaggggggctactatggttgatggtcctcttttttcccattccttagtataaaatgggctaaggaggccatggcagatgattggatatgtttcaggattagaggggaggaaggtcaagcttcaacattccaattcactgaagaatatataatgaattggtgtgcagtcagacaatgataataatatatcttgctctgtctttctagtatcaaaggaggtgaaacgaat

SEQ ID NO: 5582 - DNA, 1491 bp, Zea Mays
acagtagacacacccattttgttctgttctattctgcttcatttacaggggatctccgccaagttattggtcatattttaggacgttatcctcagtccaatgtctatgctaccggttggtctcttggagcgaatattcttgtgcgctaccttggcgaggaaactgataaatgccctttatctggcgcggtctccttgtgcaatccttttaatttggtaattgcagatgaagatttccacaaaggatttaacaacgtttatgataaagcattggctagggctttgacgactatatttaagaagcatgctctccttttcgaagggctggagggtgaatatgatatacccaaggcagcgaatgcaagaactgttagagattttgatgaggggttaacccgaggtttgcagcaacgtctaacccaactgtactagctgtaatttctatagtttcctgttcacattcaagaggacacttcaatggtttgcagtttcatttggtttcaagtcagtggatgattattactccaattcaagcagctcggattctatcaaggatgtttgcatacccttactgtgcatacaggctgataatgacccaattgcaccatccaggggaattcctagagatgatatcaaggcaaataagaactgtctacttatagtaacaccacagggtggccatcttggatgggtagcaggcgacgaagctccattcggatgtccttggacagacccaatagtgatggaatatctagaacatctcgagaatgagaaggactctagtaccaaaaataacacatcctatgagggtgtttcagaggcatcagtatcccatctaactgtgcatggccaaagataataatatctctcttctcatagtactcattcgccacattatgttttatatggaaatagtttagtagagttcatttagccgtgttgtctgctgctgcctgctggttaattgagtacatggctcttcgtctacaggtctagtggtctacacatgtgcgagaagatttctgtgtcaaataagatgtctggttctgagatcaaaatagaacatgcgttatccaattgttcgttcttagggggtttcactttcatcccgtgtttgaaagggattctctgtaaatgcatgagctgttacggagttggcctttgtatccctcttctgcaacgcgtgaaagttgatggcgatgagcacggcagtgcatcatgtaaatttgacaatgtcattcagcgcaaaaaaaaaaaaaccccccgaaaaatgtgttggaagagtttttgtgtgcgcatgctaacaaatatctcatgtggtaaacatcatcttggattaacatatggcaatgtgatgaaatagtaacagttgttgaaattttatatgatcctactattccttttacagatggtaccagatatagatgatttcattgaaccctttgcgccagaaaaattaatatatcttactactactgtgtctagattttcc

SEQ ID NO: 5583 - DNA, 1603 bp, Zea Mays
acgcaggagcctggtcttacaggtggaagtgatgatacatatgtaaggcatatgcttatgagagctagaagcaagggatggcgtgttgtggtgtttaatagccgtggatgtgcagatagtcctgtgactacacccaagttctattctgcttcatttacaggggatctccgccaagttattggtcatattttaggacgttatcctcagtccaatgtctatgctaccggttggtctcttggagcgaatattcttgtgcgctaccttggcgaggaaactgataaatgccctttatctggcgcggtctccttgtgcaatccttttaatttggtaattgcagatgaagatttccacaaaggatttaacaacgtttatgataaagcattggctagggctttgacgactatatttaagaagcatgctctccttttcgaagggctggagggtgaatatgatatacccaaggcagcgaatgcaagaactgttagagattttgatgaggggttaacccgaggtttgcagcaacgtctaacccaactgtactagctgtaatttctatagtttcctgttcacattcaagaggacacttcaatggtttgcagtttcatttggtttcaagtcagtggatgattattactccaattcaagcagctcggattctatcaaggatgtttgcatacccttactgtgcatacaggctgataatgacccaattgcaccatccaggggaattcctagagatgatatcaaggcaaataagaactgtctacttatagtaacaccacagggtggccatcttggatgggtagcaggcgacgaagctccattcggatgtccttggacagacccaatagtgatggaatatctagaacatctcgagaatgagaaggactctagtaccaaaaataacacatcctatgagggtgtttcagaggcatcagtatcccatctaactgtgcatggccaaagataataatatctctcttctcatagtactcattcgccacattatgttttatatggaaatagtttagtagagttcatttagccgtgttgtctgctgctgcctgctggttaattgagtacatggctcttcgtctacaggtctagtggtctacacatgtgcgagaagatttctgtgtcaaataagatgtctggttctgagatcaaaatagaacatgcgttatccaattgttcgttcttagggggtttcactttcatcccgtgtttgaaagggattctctgtaaatgcatgagctgttacggagttggcctttgtatccctcttctgcaacgcgtgaaagttgatggcgatgagcacggcagtgcatcatgtaaatttgacaatgtcattcagcgcaaaaaaaaaaaaaccccccgaaaaatgtgttggaagagtttttgtgtgcgcatgctaacaaatatctcatgtggtaaacatcatcttggattaacatatggcaatgtgatgaaatagtaacagttgttgaaattttatatgatcctactattccttttacagatggtaccagatatagatgatttcattgaaccctttgcgccagaaaaattaatatatcttactactactgtgtctagattttcc

SEQ ID NO: 5584 - DNA, 3026 bp, Zea Mays
gagagacagtcagacagcagctcgaacctcgaaaagcaggagagtccaaagccgaatggacaactggcaacaaatcaacagagccacagaggaaatgaatccgatagccaccgccgccctcacgccatcctcatttttcgcctcaaaccgccgcttcgcccctcgcctccgctccgtcctccccgccgctgccatgtcttacgccgccgtatccgcctccgccccaagccccagctccggcactggggaacaggtgaaggcggccccgctcccgcactcgaccctcgagatcgcgggcgcccgccggggcctcctctcaggcttcgccagcctccgcgccccgtaccgtgccttccccgtactcgcgtcgaaccgacacgtcgagaccatcttcgctgcgctcacgcgatcgctccccgccgttaagctgcggcgcgagtgcctccgcgcccctgacgacggagccgtcgcgctcgactgggtctctggcgacgaccgtgtgcttccgaatgatgctccggtgcttatactcttgcctggtcttacaggtggaagtgatgatacatatgtaaggcatatgcttatgagagctagaagcaagggatggcgtgttgtggtgtttaatagccgtggatgtgcagatagtcctgtgactacacccaaggtacttcaaataccttttccaattcttttattagcactgtaaagcttatttatagctcctatagctcttacaaagcttcgaagctatgcagtggaccatattttcccttttgatacttgtcagggaaaagtgctaagatctcatttatatggtttgattgattgagaagtgcactgcccacttttaagttaattatcagcaacagtagacacacccattttgttctggtaagctacacagaactgaacctctttctggcttatagcataacatgtgctgcctaaaagttggctcatcccagttcatatgtgcaaactgtccaaatatatattttttccatgttggcatctggtgtgataaatgcactctatatgatattgcttctgtgtactttttcctacttagggtgtaaccagaaactgactaaagggtgagtgaactggctcttactgtaaaacttgacagaattggagttttgaactgaaagtaggaaaaggttaaagaacattgaagtgtattattaacaataaattgcattgttgctcaatgttgaagggtttttttggtttttattttgtggctacttgctgccctagtaaaatacgacatattgtgtccttaaactgaattgtctgtcataaatttctaagcttcaccctgatgtgtacagcatatcaataaagtgtcgatatgcatgttggcaatcaacgtctttaaccatggggccttgaatcaaactcaatggataaacctttggaaacctaggggttaagtggttaacaaagagtacataataagtaaggagataaagatagcaaatgaaatcgaggctcgaagctgtaggggtccatcttctttttaggacatacgttgacttgcatcttctgtcatgtgcagttctattctgcttcatttacaggggatctccgccaagttattggtcatattttaggacgttatcctcagtccaatgtctatgctaccggttggtctcttggagcgaatattcttgtgcgctaccttggcgaggaaactgataaatgccctttatctggcgcggtctccttgtgcaatccttttaatttggtaattgcagatgaagatttccacaaaggatttaacaacgtttatgataaagcattggctagggctttgacgactatatttaagaagcatgctctccttttcgaagggctggagggtgaatatgatatacccaaggcagcgaatgcaagaactgttagagattttgatgaggggttaacccgaggtttgcagcaacgtctaacccaactgtactagctgtaatttctatagtttcctgttcacattcaagaggacacttcaatggtttgcagtttcatttggtttcaagtcagtggatgattattactccaattcaagcagctcggattctatcaaggatgtttgcatacccttactgtgcatacaggctgataatgacccaattgcaccatccaggggaattcctagagatgatatcaaggcaaataagaactgtctacttatagtaacaccacagggtggccatcttggatgggtagcaggcgacgaagctccattcggatgtccttggacagacccaatagtgatggaatatctagaacatctcgagaatgagaaggactctagtaccaaaaataacacatcctatgagggtgtttcagaggcatcagtatcccatctaactgtgcatggccaaagataataatatctctcttctcatagtactcattcgccacattatgttttatatggaaatagtttagtagagttcatttagccgtgttgtctgctgctgcctgctggttaattgagtacatggctcttcgtctacaggtctagtggtctacacatgtgcgagaagatttctgtgtcaaataagatgtctggttctgagatcaaaatagaacatgcgttatccaattgttcgttcttagggggtttcactttcatcccgtgtttgaaagggattctctgtaaatgcatgagctgttacggagttggcctttgtatccctcttctgcaacgcgtgaaagttgatggcgatgagcacggcagtgcatcatgtaaatttgacaatgtcattcagcgcaaaaaaaaaaaaaccccccgaaaaatgtgttggaagagtttttgtgtgcgcatgctaacaaatatctcatgtggtaaacatcatcttggattaacatatggcaatgtgatgaaatagtaacagttgttgaaattttatatgatcctactattccttttacagatggtaccagatatagatgatttcattgaaccctttgcgccagaaaaattaatatatcttactactactgtgtctagattttcc

SEQ ID NO: 5585 - DNA, 4043 bp, Zea Mays
ccaggccattccgcaccgccaaaattgctccgcgcgggaattccaatttcctccccacctccgcccgcttcccagttcccagtgcacagccgattcgtctccattcctatcttctcccattccctccccagtccgacctccgaccccccatttcgtcgccgccgccgtactcgccgagaacccgccccaaatccataggcccatcccttacccattaacccccaatgcctccgaagaagcgcgccgccgccgccgcctcttcaaagaagccgcagccatcgcagccatcgcagcccgccaagttcggtatcctccacttcttcgagcgccagacccaggcctcccagaacgccaagcgccagaagcccgacccccctgcgcctccccctcctcctccgccgccgcccgagaaggagccctcggaggtctcgccggaggttaccaagacgctggcgccgaagcgtgtcagattttctcccggaatgttgattaagcagagccaggacgatggggtcgcggaggtggtgacttggaagatctcgccggtgaaccatcgccttggtacgacgaagtcgaagcaatttctggggatggcgccccatccgtactcaagcgagaaaaattcctcccttgatgctatgaagaagtggcattcatctccattgggcttgtcaaggtgtactactttgggaagtaattcaggagttcttggatctgctatagttggttgtgatggtgtgggggatactcagagtccatttcggaccccaccatcgctttcctatggctgcaacgagcaagtgagcagtggtgtaacttctgagggaggtgccgaaccatcgggagcagggcagcacaaaaaggcattacttgatcttctagaccaagtagaggatgcaatcatggaagaagaattgcctgctgatcctggaaataaaggagggcaaaccacgaatgaggatatcaccaacaatagccgttctcctgttgctgatactgacttaactatcccatccaagaaaactattcatgtcccacccttcaatagttttcttgtcttggaggtgtccgaaaaacataaagctgatgattcatcatgtgatcgctaccctgttaaggttctgcgtctgctgaatgaacactctggtacagaatgtgccgtgcatctgtgtgatgagtggttcgacagtattgttgggcctggtgatactgtaaatgtcattggagaatttagtaaccatggaaaatgtattgttgaccatgacaataatcttgttattgtccatccagagcaactcatttccgggacacgggctgcttctagcttccaatgtttaagaaggtctgttctcgatgagaggctaaaaagcaatgaatattctaccagcgcgttgactggtactctgcttcaccaagtctttcaggctggattactcaatgatgctccttcatggcagtttttggaacaacaggcaaaggaagtacttctgaaaaatattgaaactttatatgcatgtggagtcaatgaaagcaacatgtactctacgctcattgaagctatccccaaaatgttgaattggttcaagtgtttcttaaagggttcaaaatgttctgatgttgattttggacataacgaagtgagaaagactgttggagtgactgaggtcatggatattgaggaaatggcatgggcaccaagatatggtatgaaaggggttatcgatgcttctgttagatcaagagttgagtcacacaatggtggttcatatgatagaataatgccactagagttcaaaactggcaaagcaactagtggccaggcagctatggaacactcagctcaggtgatgttatacacactgttgatgacagagagatacttgaatgaggatattgacttgggccttctgtattatcttcacacagaccagacattgggcattaaagtaaagaggactgatttaattgggctaataatgcgccgaaacgagcttgctactgagatcctgaaggcatcgatgtcacagagttttcctccaatgttacagagcccatcaacatgtaatagatgtcgacacctgatttcttgcaccatatatcacaaggcacacggaggcagtggtacaactagtgggcttggtgatctatttgacaaccttgtgaatcacttaacagtcacacatcataattttcttaaacattgggatagattgattgatcttgaagctagagcttctcagattcttcaggaaaaagcaaaagatacatatataattttgttcagcaaaagatgcagcctgaaacagctgatcagttagatgctcaatttgacagcatagatttcagcctgaaagttggtgattttgtggtgcttagcactcagtctgggagaatagcagttgcaaatggatgtataagagaaataataagtcactctcacataacggtctctttgccacgccgtttgagaattccagatagcaattccttgtcagagcaagaggatctgacacgtgaaatttggcggatagacaaggatgaatttagttcttcatttggaataatgagactcaacattgtccaactatttgctcagaatccacaaaactctcacctgcgcaagttgattgttgatcttgaggcacccaggtttgatagcggaggtctgtttagccaagatcctgcactatcatacataagattctaggagcaaaggattatgctcttattttaggaatgcctggaacaggcaaaacatacacaatggtgcatgctgtgaagtcattattgataagaggggaatctattttgctaacttcatatactaactcggctattgataccctgctcatgaagttgaagactgagggtgtagattttattcggattggaaggcctgaggctgtacatcctgatgtcagggcccactgcttgtcaacaactgaggcacaatcggttgatgccattaaagcaaggatggagcaagtacaggttgttggagttacttgcttgggaatgtatcatcctttattagcacataagaagtttgacacatgtatcatggatgaagctggacaaattacattgccggtttcactgggacctttgatgcttgcaacaaagtttgttctagtaggagaccattatcaacttcctccactggttcagagctctgaagcgcgagaaaatgggatgggcatcagcttattttggagattgtcagaagcacattcccaggcaatttcagcactgcgatgccaggttgtgctgtggttcattggaaattgcaaatgccaaactcaagttttctggtagagaaccaatgcagttgaagttaaaagagatcttgaatcccgatagggctgtgatctttgccaacacagatcaaatacctgcacttgaggcaaaggaacacagaactgtgaacaatcctacagaagcacacattatttcatggatcatcaaagaattactaagaaggggtgtagctcaagatgctattggtatcataaccccatataacgctcaagtgaatatcattcagcaatacactgattgtttggttgaggttcatacgatcgataaataccagggtagagataaggagtgtataatagtatctttcgtgcgctccactgcaaactcaagggctagtggttcttctctgcttggtgattggcacaggatcaatgttctgttgacacgtgcaaagaagaagctcatcatggtgggatcacgtggaacgctttcaacaatacctttgctcaggcttcttgtcgacaaagtagctgagattggtggcctgttggatttgacaaataaggatgcacattctttttcgagaacttgaagttcttgtttgaatgcacaataggatgcacggtagatgaatctggaaggtttttataaggccaagctgtaaataagaatatgctgtaaattttgtttttggaaatgtatagtaaacctagccaagagccacacagctagaggttaggttttgtatattccttccgttagttataacttatttcaatttcatt

SEQ ID NO: 5586 - DNA, 4189 bp, Zea Mays
ccaggccattccgcaccgccaaaattgctccgcgcgggaattccaatttcctccccacctccgcccgcttcccagttcccagtgcacagccgattcgtctccattcctatcttctcccattccctccccagtccgacctccgaccccccatttcgtcgccgccgccgtactcgccgagaacccgccccaaatccataggcccatcccttacccattaacccccaatgcctccgaagaagcgcgccgccgccgccgcctcttcaaagaagccgcagccatcgcagccatcgcagcccgccaagttcggtatcctccacttcttcgagcgccagacccaggcctcccagaacgccaagcgccagaagcccgacccccctgcgcctccccctcctcctccgccgccgcccgagaaggagccctcggaggtctcgccggaggttaccaagacgctggcgccgaagcgtgtcagattttctcccggaatgttgattaagcagagccaggacgatggggtcgcggaggtggtgacttggaagatctcgccggtgaaccatcgccttggtacgacgaagtcgaagcaatttctggggatggcgccccatccgtactcaagcgagaaaaattcctcccttgatgctatgaagaagtggcattcatctccattgggcttgtcaaggtgtactactttgggaagtaattcaggagttcttggatctgctatagttggttgtgatggtgtgggggatactcagagtccatttcggaccccaccatcgctttcctatggctgcaacgagcaagtgagcagtggtgtaacttctgagggaggtgccgaaccatcgggagcagggcagcacaaaaaggcattacttgatcttctagaccaagtagaggatgcaatcatggaagaagaattgcctgctgatcctggaaataaaggagggcaaaccacgaatgaggatatcaccaacaatagccgttctcctgttgctgatactgacttaactatcccatccaagaaaactattcatgtcccacccttcaatagttttcttgtcttggaggtgtccgaaaaacataaagctgatgattcatcatgtgatcgctaccctgttaaggttctgcgtctgctgaatgaacactctggtacagaatgtgccgtgcatctgtgtgatgagtggttcgacagtattgttgggcctggtgatactgtaaatgtcattggagaatttagtaaccatggaaaatgtattgttgaccatgacaataatcttgttattgtccatccagagcaactcatttccgggacacgggctgcttctagcttccaatgtttaagaaggtctgttctcgatgagaggctaaaaagcaatgaatattctaccagcgcgttgactggtactctgcttcaccaagtctttcaggctggattactcaatgatgctccttcatggcagtttttggaacaacaggcaaaggaagtacttctgaaaaatattgaaactttatatgcatgtggagtcaatgaaagcaacatgtactctacgctcattgaagctatccccaaaatgttgaattggttcaagtgtttcttaaagggttcaaaatgttctgatgttgattttggacataacgaagtgagaaagactgttggagtgactgaggtcatggatattgaggaaatggcatgggcaccaagatatggtatgaaaggggttatcgatgcttctgttagatcaagagttgagtcacacaatggtggttcatatgatagaataatgccactagagttcaaaactggcaaagcaactagtggccaggcagctatggaacactcagctcaggtgatgttatacacactgttgatgacagagagatacttgaatgaggatattgacttgggccttctgtattatcttcacacagaccagacattgggcattaaagtaaagaggactgatttaattgggctaataatgcgccgaaacgagcttgctactgagatcctgaaggcatcgatgtcacagagttttcctccaatgttacagagcccatcaacatgtaatagatgtcgacacctgatttcttgcaccatatatcacaaggcacacggaggcagtggtacaactagtgggcttggtgatctatttgacaaccttgtgaatcacttaacagtcacacatcataattttcttaaacattgggatagattgattgatcttgaagctagagcttctcaggtaaaaaagaacatcttgcagcctcataattcaaactatgggagtgggagttctgctgtaccttattttgttcttgacataaaaaatggacattcaatagattcttcaggaaaaagcaaaagatacatatataattttgttcagcaaaagatgcagcctgaaacagctgatcagttagatgctcaatttgacagcatagatttcagcctgaaagttggtgattttgtggtgcttagcactcagtctgggagaatagcagttgcaaatggatgtataagagaaataataagtcactctcacataacggtctctttgccacgccgtttgagaattccagatagcaattccttgtcagagcaagaggatctgacacgtgaaatttggcggatagacaaggatgaatttagttcttcatttggaataatgagactcaacattgtccaactatttgctcagaatccacaaaactctcacctgcgcaagttgattgttgatcttgaggcacccaggtttgatagcggaggtctgtttagccaagatcctgcactatcatacataaggtcactaccaaacttgaataatgaccaacaaaggtcactgcataaaattctaggagcaaaggattatgctcttattttaggaatgcctggaacaggcaaaacatacacaatggtgcatgctgtgaagtcattattgataagaggggaatctattttgctaacttcatatactaactcggctattgataccctgctcatgaagttgaagactgagggtgtagattttattcggattggaaggcctgaggctgtacatcctgatgtcagggcccactgcttgtcaacaactgaggcacaatcggttgatgccattaaagcaaggatggagcaagtacaggttgttggagttacttgcttgggaatgtatcatcctttattagcacataagaagtttgacacatgtatcatggatgaagctggacaaattacattgccggtttcactgggacctttgatgcttgcaacaaagtttgttctagtaggagaccattatcaacttcctccactggttcagagctctgaagcgcgagaaaatgggatgggcatcagcttattttggagattgtcagaagcacattcccaggcaatttcagcactgcgatgccaggttgtgctgtggttcattggaaattgcaaatgccaaactcaagttttctggtagagaaccaatgcagttgaagttaaaagagatcttgaatcccgatagggctgtgatctttgccaacacagatcaaatacctgcacttgaggcaaaggaacacagaactgtgaacaatcctacagaagcacacattatttcatggatcatcaaagaattactaagaaggggtgtagctcaagatgctattggtatcataaccccatataacgctcaagtgaatatcattcagcaatacactgattgtttggttgaggttcatacgatcgataaataccagggtagagataaggagtgtataatagtatctttcgtgcgctccactgcaaactcaagggctagtggttcttctctgcttggtgattggcacaggatcaatgttctgttgacacgtgcaaagaagaagctcatcatggtgggatcacgtggaacgctttcaacaatacctttgctcaggcttcttgtcgacaaagtagctgagattggtggcctgttggatttgacaaataaggatgcacattctttttcgagaacttgaagttcttgtttgaatgcacaataggatgcacggtagatgaatctggaaggtttttataaggccaagctgtaaataagaatatgctgtaaattttgtttttggaaatgtatagtaaacctagccaagagccacacagctagaggttaggttttgtatattccttccgttagttataacttatttcaatttcatt

SEQ ID NO: 5587 - DNA, 4237 bp, Zea Mays
ccaggccattccgcaccgccaaaattgctccgcgcgggaattccaatttcctccccacctccgcccgcttcccagttcccagtgcacagccgattcgtctccattcctatcttctcccattccctccccagtccgacctccgaccccccatttcgtcgccgccgccgtactcgccgagaacccgccccaaatccataggcccatcccttacccattaacccccaatgcctccgaagaagcgcgccgccgccgccgcctcttcaaagaagccgcagccatcgcagccatcgcagcccgccaagttcggtatcctccacttcttcgagcgccagacccaggcctcccagaacgccaagcgccagaagcccgacccccctgcgcctccccctcctcctccgccgccgcccgagaaggagccctcggaggtctcgccggaggttaccaagacgctggcgccgaagcgtgtcagattttctcccggaatgttgattaagcagagccaggacgatggggtcgcggaggtggtgacttggaagatctcgccggtgaaccatcgccttggtacgacgaagtcgaagcaatttctggggatggcgccccatccgtactcaagcgagaaaaattcctcccttgatgctatgaagaagtggcattcatctccattgggcttgtcaaggtgtactactttgggaagtaattcaggagttcttggatctgctatagttggttgtgatggtgtgggggatactcagagtccatttcggaccccaccatcgctttcctatggctgcaacgagcagcaagtgagcagtggtgtaacttctgagggaggtgccgaaccatcgggagcagggcagcacaaaaaggcattacttgatcttctagaccaagtagaggatgcaatcatggaagaagaattgcctgctgatcctggaaataaaggagggcaaaccacgaatgaggatatcaccaacaatagccgttctcctgttgctgatactgacttaactatcccatccaagaaaactattcatgtcccacccttcaatagttttcttgtcttggaggtgtccgaaaaacataaagctgatgattcatcatgtgatcgctaccctgttaaggttctgcgtctgctgaatgaacactctggtacagaatgtgccgtgcatctgtgtgatgagtggttcgacagtattgttgggcctggtgatactgtaaatgtcattggagaatttagtaaccatggaaaatgtattgttgaccatgacaataatcttgttattgtccatccagagcaactcatttccgggacacggcttccaatgtttaagaaggtctgttctcgatgagaggctaaaaagcaatgaatattctaccagcgcgttgactggtactctgcttcaccaagtctttcaggctggattactcaatgatgctccttcatggcagtttttggaacaacaggcaaaggaagtacttctgaaaaatattgaaactttatatgcatgtggagtcaatgaaagcaacatgtactctacgctcattgaagctatccccaaaatgttgaattggttcaagtgtttcttaaagggttcaaaatgttctgatgttgattttggacataacgaagtgagaaagactgttggagtgactgaggtcatggatattgaggaaatggcatgggcaccaagatatggtatgaaaggggttatcgatgcttctgttagatcaagagttgagtcacacaatggtggttcatatgatagaataatgccactagagttcaaaactggcaaagcaactagtggccaggcagctatggaacactcagctcaggtgatgttatacacactgttgatgacagagagatacttgaatgaggatattgacttgggccttctgtattatcttcacacagaccagacattgggcattaaagtaaagaggactgatttaattgggctaataatgcgccgaaacgagcttgctactgagatcctgaaggcatcgatgtcacagagttttcctccaatgttacagagcccatcaacatgtaatagatgtcgacacctgatttcttgcaccatatatcacaaggcacacggaggcagtggtacaactagtgggcttggtgatctatttgacaaccttgtgaatcacttaacagtcacacatcataattttcttaaacattgggatagattgattgatcttgaagctagagcttctcaggtaaaaaagaacatcttgcagcctcataattcaaactatgggagtgggagttctgctgtaccttattttgttcttgacataaaaaatggacattcaatagattcttcaggaaaaagcaaaagatacatatataattttgttcagcaaaagatgcagcctgaaacagctgatcagttagatgctcaatttgacagcatagatttcagcctgaaagttggtgattttgtggtgcttagcactcagtctgggagaatagcagttgcaaatggatgtataagagaaataataagtcactctcacataacggtctctttgccacgccgtttgagaattccagatagcaattccttgtcagagcaagaggatctgacacgtgaaatttggcggatagacaaggatgaatttagttcttcatttggaataatgagactcaacattgtccaactatttgctcagaatccacaaaactctcacctgcgcaagttgattgttgatcttgaggcacccaggtttgatagcggaggtctgtttagccaagatcctgcactatcatacataaggtcactaccaaacttgaataatgaccaacaaaggtcactgcataaaattctaggagcaaaggattatgctcttattttaggaatgcctggaacaggcaaaacatacacaatggtgcatgctgtgaagtcattattgataagaggggaatctattttgctaacttcatatactaactcggctattgataccctgctcatgaagttgaagactgagggtgtagattttattcggattggaaggcctgaggctgtacatcctgatgtcagggcccactgcttgtcaacaactgaggcacaatcggttgatgccattaaagcaaggatggagcaagtacaggttgttggagttacttgcttgggaatgtatcatcctttattagcacataagaagtttgacacatgtatcatggatgaagctggacaaattacattgccggtttcactgggacctttgatgcttgcaacaaagtttgttctagtaggagaccattatcaacttcctccactggttcagagctctgaagcgcgagaaaatgggatgggcatcagcttattttggagattgtcagaagcacattcccaggcaatttcagcactgcgatgccagtaccgtatgtcatctggtatcatggagctctcaaattcgttgatttacggtaataggttgtgctgtggttcattggaaattgcaaatgccaaactcaagttttctggtagagaaccaatgcagttgaagttaaaagagatcttgaatcccgatagggctgtgatctttgccaacacagatcaaatacctgcacttgaggcaaaggaacacagaactgtgaacaatcctacagaagcacacattatttcatggatcatcaaagaattactaagaaggggtgtagctcaagatgctattggtatcataaccccatataacgctcaagtgaatatcattcagcaatacactgattgtttggttgaggttcatacgatcgataaataccagggtagagataaggagtgtataatagtatctttcgtgcgctccactgcaaactcaagggctagtggttcttctctgcttggtgattggcacaggatcaatgttctgttgacacgtgcaaagaagaagctcatcatggtgggatcacgtggaacgctttcaacaatacctttgctcaggcttcttgtcgacaaagtagctgagattggtggcctgttggatttgacaaataaggatgcacattctttttcgagaacttgaagttcttgtttgaatgcacaataggatgcacggtagatgaatctggaaggtttttataaggccaagctgtaaataagaatatgctgtaaattttgtttttggaaatgtatagtaaacctagccaagagccacacagctagaggttaggttttgtatattccttccgttagttataacttatttcaatttcatt

SEQ ID NO: 5588 - DNA, 975 bp, Zea Mays
ccatagcccacacgcctggacacctaacccttcggccttcgttgcggacccgccactcacttcttctctcgaccgcatcttttctccgcgccgccgctcgcctgcacttctacgtgtgaaccgcgtccgcgcctatggcctgcccgtgcccagctgccccctctccacacgagcctctctaggcgtcaagcgtgccattaagcaaccgtggcccccacccctcctcggctctctgcgtgagcacaagcacgtctctgtagcccatgttcaacggaagcgaaagtgccgctggaccacatacgattgttgatggtaaagaagttgtgaactttgcatcagcaaactacctcggtttaattggcaacgaaaagattattgattcttgcatcagttcattggagaaatatggtgttggttcttgtggtccacgtggcttttatggaacaattgatgtccatcttgactgtgagtcaaagatagctaaatttttggggactccagactccattctttattcatatgggatttctacaatattcagtgtgatacctgccttctgtaagaaagaagatatcatagtcgcgtaagttcaccgtattacaaaattatgaaattcacaagtattattggaaccttgacttgtttggtgtatcgagttaactgtacatgggtagtttgatgtgattgcggtgacgagggtgttgactgtttggtgaaatgcttgggacaaagtggccaacaagaatggagtcatggaacatcgacaggaggggtgcggcagcagcaaccgatgtatcccttggacaatctggttttgacaagatgcaaatcaatccgctgtacactgtattccgcacttgcacagattgtttggttaattacaagattatctcagtgttttgattggtacacttatgtatgaaatattgattggtactcatctatattatatgaattatattattattaaatata

SEQ ID NO: 5589 - DNA, 1134 bp, Zea Mays
acctaacccttcggccttcgttgcggacccgccactcacttcttctctcgaccgcatcttttctccgcgccgccgctcgcctgcacttctacgtgtgaaccgcgtccgcgcctatggcctgcccgtgcccagctgccccctctccacacgagcctctctaggcgtcaagcgtgccattaagcaaccgtggcccccacccctcctcggctctctgcgtgagcacaagcacgtctctgtagcccatgttcaacggaagcgaaagttctaggtgtcagtgctagaggatttggaaaggcgctgtttgataagaagacaaacccgtgtcctgcccattaattccactgaagaaaacatagaatgtgcatcataatgtcacagaaggcctaaaatgttgtagtgtgcggccattgctcacgaggaggcagagtgccgtgttgccgagtgccgctggaccacatacgattgttgatggtaaagaagttgtgaactttgcatcagcaaactacctcggtttaattggcaacgaaaagattattgattcttgcatcagttcattggagaaatatggtgttggttcttgtggtccacgtggcttttatggaacaattgatgtccatcttgactgtgagtcaaagatagctaaatttttggggactccagactccattctttattcatatgggatttctacaatattcagtgtgatacctgccttctgtaagaaagaagatatcatagtcgcgtaagttcaccgtattacaaaattatgaaattcacaagtattattggaaccttgacttgtttggtgtatcgagttaactgtacatgggtagtttgatgtgattgcggtgacgagggtgttgactgtttggtgaaatgcttgggacaaagtggccaacaagaatggagtcatggaacatcgacaggaggggtgcggcagcagcaaccgatgtatcccttggacaatctggttttgacaagatgcaaatcaatccgctgtacactgtattccgcacttgcacagattgtttggttaattacaagattatctcagtgttttgattggtacacttatgtatgaaatattgattggtactcatctatattatatgaattatattattattaaatata

SEQ ID NO: 5590 - DNA, 1961 bp, Zea Mays
ggaaaacgctcaaaccggcaaaccctaatccccatcccccagccgacagccgccgagcaaaccggctcctccggtcggtcatccactcatcctcatcccctggcccctgcccatccgatccgatcggtcatcccctacccctacctgatcggatcccctgctcttccgccgagcaccaccaggcagcaggctgcagccgtcgagcaccagcaggagcacggccaggaggacgacgcccgcatcctgcctcttctctgctgctggagcttctgctgccaggagcacggccagaaggacgacgcccctgctgctgccggtgagcggtgatctgctgcgcccccatcctgcctcttctcctccctctcggcctcgcctcgatctgctgctgtgcggtccgctcgccgtacccttcttctgcttgagcagcctgaggtcctgagcggcgtgcggcgcttctccaaatctcccctcctctcgactcacgttcctgcgttcgaaaccctaattccgtccgaggcggcagcggcggaccggcagctccccgctcggcttgtattgggcggctgtcgcgctgcagcagcaggggcatcgtcgcgctcgcaccaaccgaagacggcgtcggcctccacgcggcaccgacgaccgacccacagtcccaagtccaacgaggaggccggagcgctgaacagccgtctacatcctcctcccgaaggttgctcttctatggagacttccaaagaacaggcttccaaggactatgctggtttcgagaagaaagttaagaggacaatatatattgaccacctttctcctcaagtaaaggaatcggccatcaaagctgctcttgcacaatgtgcaaatgttgtccatgtggagttcatcgtcaattacacgatcccatataaagatattgcttctgctgcattggtggaattggatgatgacgtgcaggctaaggctgctgtagaattgatgaatgatttcccgttcataattgggggaatgccaaggcctgtaaaagctatccatgccaaggctgagatgtttcgtgatcgccctccttgccctggccttcgaaaagatttctgctgggtaaaacaaggagataaggactatgaagcgatgcagaaattgaaaaaccttgcaaagaggcaggaatctgagaacatggccctcatacagaaaatcttgaaagatgagaaggaactggcgactcggcagcaggaggtgcttgatggaaactgcaagaagtacgacatgctggaagctctagtgcagaagggagacatcactaaccttgctcaacaatacggagtgaacttgaacgactgatgagtcattcgtgtctttttcccccttccccttggagcgatggcgcaactggtgtgatgatgatggaataggatagcatgccatagttttggtccggtatctggaccctccctctggtgtaaagactatcccaacttaggcttgggcttttcagccttctttggctctccaaaaaatctaaattagctggctctgagcctctgactttctgatcgatccaagctagctggctagctacaggttgtgtatatgaatcttgcaggggtgctgacgacgttgcaggaagggtgtagtggcccaaggaagaagagcagcggcagaggaggaggccgaccacgacgacaaggagcatgagtcggtggtggggtcggtgggattcttctccaacctggaagaactgctggtgttcaaccccagggccattctgtcctgctttgttgtcgtccacaaggcctagcttgagctgaactagtagtagtgtatggctacatgtaaggatgtaatatggtttgaaaaatattcgtccggatccggattcgaagatggtgaacaatgatttggatggaatttttggatatccgaatttttttggatattgaatcacacgagaaatcactttaagtatataa

SEQ ID NO: 5591 - DNA, 2552 bp, Zea Mays
ggaaaacgctcaaaccggcaaaccctaatccccatcccccagccgacagccgccgagcaaaccggctcctccggtcggtcatccactcatcctcatcccctggcccctgcccatccgatccgatcggtcatcccctacccctacctgatcggatcccctgctcttccgccgagcaccaccaggcagcaggctgcagccgtcgagcaccagcaggagcacggccaggaggacgacgcccgcatcctgcctcttctctgctgctggagcttctgctgccaggagcacggccagaaggacgacgcccctgctgctgccggtgagcggtgatctgctgcgcccccatcctgcctcttctcctccctctcggcctcgcctcgatctgctgctggtaatgtcctttatgaggtactacaagattagaaaatagaaaggtgtcgactgtgactcttgataattgcaccaccaatgatagtattatgagttctatgcaagataagttgcccctcttatccctcatgctagatggtaaattgttacacatgcgttgtgtggcacacatcattaatcttattgtgaaagatggaatgaccgttatggataaaggtattaaaaaggtacgcaatagtgttgcattttggtgtgccacgccaaaaagacatgagcgttcgcacaactgctcaaatgaatgttaaatatgataaaaggatagctctagattgtaaaacaagatggaattcaacttatcttattgttgaattgggaagaaatttgattaattatgttattcaattgctgaaaattgttctttgttatatccgatggatatccaatggatatccgaaacccgatgggcatggatatggatatgaatttctaaccgcgggtatagtcgcgggcagatattatctatgaccatggatatgactgcgggcggatattttcaatatccgatctgaatccgacccgttgccatccctagtgcggtccgctcgccgtacccttcttctgcttgagcagcctgaggtcctgagcggcgtgcggcgcttctccaaatctcccctcctctcgactcacgttcctgcgttcgaaaccctaattccgtccgaggcggcagcggcggaccggcagctccccgctcggcttgtattgggcggctgtcgcgctgcagcagcaggggcatcgtcgcgctcgcaccaaccgaagacggcgtcggcctccacgcggcaccgacgaccgacccacagtcccaagtccaacgaggaggccggagcgctgaacagccgtctacatcctcctcccgaaggttgctcttctatggagacttccaaagaacaggcttccaaggactatgctggtttcgagaagaaagttaagaggacaatatatattgaccacctttctcctcaagtaaaggaatcggccatcaaagctgctcttgcacaatgtgcaaatgttgtccatgtggagttcatcgtcaattacacgatcccatataaagatattgcttctgctgcattggtggaattggatgatgacgtgcaggctaaggctgctgtagaattgatgaatgatttcccgttcataattgggggaatgccaaggcctgtaaaagctatccatgccaaggctgagatgtttcgtgatcgccctccttgccctggccttcgaaaagatttctgctgggtaaaacaaggagataaggactatgaagcgatgcagaaattgaaaaaccttgcaaagaggcaggaatctgagaacatggccctcatacagaaaatcttgaaagatgagaaggaactggcgactcggcagcaggaggtgcttgatggaaactgcaagaagtacgacatgctggaagctctagtgcagaagggagacatcactaaccttgctcaacaatacggagtgaacttgaacgactgatgagtcattcgtgtctttttcccccttccccttggagcgatggcgcaactggtgtgatgatgatggaataggatagcatgccatagttttggtccggtatctggaccctccctctggtgtaaagactatcccaacttaggcttgggcttttcagccttctttggctctccaaaaaatctaaattagctggctctgagcctctgactttctgatcgatccaagctagctggctagctacaggttgtgtatatgaatcttgcaggggtgctgacgacgttgcaggaagggtgtagtggcccaaggaagaagagcagcggcagaggaggaggccgaccacgacgacaaggagcatgagtcggtggtggggtcggtgggattcttctccaacctggaagaactgctggtgttcaaccccagggccattctgtcctgctttgttgtcgtccacaaggcctagcttgagctgaactagtagtagtgtatggctacatgtaaggatgtaatatggtttgaaaaatattcgtccggatccggattcgaagatggtgaacaatgatttggatggaatttttggatatccgaatttttttggatattgaatcacacgagaaatcactttaagtatataa

SEQ ID NO: 5592 - DNA, 2039 bp, Zea Mays
tccagttttgattatgaggcactgaatactctgatgtcaactcgacttctccaagagcactttctcacactgttgagatgttggtgtcattggaaatttggttcattcatcacctaacatcaagaaggaggttcttaatgcaggggcactgcaacctgtgattggattattaagctcatgttgtacagaaagccaaagagaggctgctttgttgctagggcaatttgcttcagccgactcagattgcaaggtccatattgtgcaaaggggtgcagtccgtccactaattgaaatgctacagtcggctgatgtccaactccgggagatgtctgcttttgcactcggcaggcttgcccaggacacacataaccaagcaggtattgcatataatggtggcttggtgcctttgtttaaactccttgactcaaaaaatggatctctgcaacataatgctgcatttgccctttatggagttgcagataatgaggactatgtatctgacttcattaaagtaggaggtgtccaaaagttgcaagatggggaatttattgtgcaggcaacaaaggactgtgtggcaaaaacattgaaaaggttagaggagaagataaatggacgagtgttgaaacacttgctttatttgatgcgagtaggagagcaatctgtgcaaaggcgtgttgctctggctctcgcacacctttgtgctcctgaagatcaaagggcaatttttattgataataatggtctcgacttgcttcttgatcttctgatttccatgagcccaaaacatcaacaagatggctcagcagcattatacaaattggccaacaaagctgcagcactttctcccatggatgctgcccctccatctccaacacctcaggtttatcttggtgagcaatacgtgaatagttcaacactttcagatgttactttcttggtagaaggaaagcgcttttatgcacacagaattgctttgcttgcttcttcggatgcatttcgtgcaatgtttgatggcgggtatagggaaaaggatgcaagagacattgaaattccaaatatcagatgggaggtctttgaactcatgatgagatttatctatacagggtcagtgcagattaacagtgaaatttcacaggatcttcttagagctgctgatcagtatctcttagaaggactcaaacgcttatgtgaatatactattgcgaaggatgtgaatctagataatgtatctgacatgtatgacttgtccgaagcctttcatgccgtgtcactgagacatacatgcatcttgtacattctggaacattttaacaagatctgcaccagagccggagatccgcaattttctaaccaaggcactgaattcatcaagaagtccaagtccaagcgacaggaactcgcagacttgatgagtcccaattcattggcaccgacgccgtcatctgaccaaagttgctggagatcctgtacagtaaaatttctggcgctgagcgttcaatggtatctattttgggtacatggtggcgcggtccttgaaattaacatcagcaatgtaacaaaattttctaagatctagttgaggataaggataaggagaacatatctcgtactcatgcatcgaccagcttacactgggataggctatagttggatggtcctggccgtaattcgtcggtctcagctttgattgagtttagtgttgtttccactttccagttcacagttcagtgtatgcccgcatctgtttatttaaagtattaagcgtgaacaagttagacattaggacatgtacaatgatatcttgaggtgtctaaagggtttgcaaaaaaaattatggagccgtctctccgtgaagagacgccttctctgactcgtaacctaagtagcaatagatgcctcatttcttattgtacgaattcgtcgtatgttttttcattcggcgctgtataagtgtatttacttttgtatttattaatagactatatttataaacactattatataatagagtcttttagttgtctcttgtgttgtttaaa

SEQ ID NO: 5593 - DNA, 2924 bp, Zea Mays
ctaccgcgccggaatcatactccttgcgccttctccttcctcaatccgacacgctctccgcgccgccgtcgacctatcgaatggaggcggagcagcaaaagcagcagcgcccgcgccagcgcccgcgccgcaaggggcagaagcggaagttggaggacgaggcatccgccgccaccgccgccgccgcgtcctcgctcggcagtgcgggcgccgacgatgacaacgaggaggaggacggctcggcgggcacccccgagatctgccgccactcccacgcggcgcttgcgcgcgaggtccgcgcgcaggttgatgtcctcattcgctgcgcctcttcgtggcgccacgcagaccgcgccgccgccaagcgcgccacccacgtcctcgctgagctcgccaaaaacgaggaggttgtcaacatgattgtagagggtggcgccgtggcggccttggtgtgccacctagaagagcctgctgtggcggcgcaaacgcaggaggaacaacaactgcggccgtttgagcttgaggttgagaagggcgctgccttcactctgggcctcctagctcctgaacatcaacaatttatagttgatgctggtgcactacctcccctagtgaaacttttgaaaaggcagagaagtactacaaattcaaggatggttaatagcgttatcaagagagcagctgatgcaattaccaaccttgcacatgagaatagcaacatcaaaactagagtcagaatggaaggtggaatcccaccacttgttgaattgctagaatctcaggatcttaaggtgcagagggcagctgcaggggccttgcggactttagcctttaaaaatgatgaaaataaaactcagattgttcaatgcaatgctttgccaactttgatcttaatgctgcgatctgaagatgccgcaattcactatgaagcagttggtgtcattggaaatttggttcattcatcacctaacatcaagaaggaggttcttaatgcaggggcactgcaacctgtgattggattattaagctcatgttgtacagaaagccaaagagaggctgctttgttgctagggcaatttgcttcagccgactcagattgcaaggtccatattgtgcaaaggggtgcagtccgtccactaattgaaatgctacagtcggctgatgtccaactccgggagatgtctgcttttgcactcggcaggcttgcccaggacacacataaccaagcaggtattgcatataatggtggcttggtgcctttgtttaaactccttgactcaaaaaatggatctctgcaacataatgctgcatttgccctttatggagttgcagataatgaggactatgtatctgacttcattaaagtaggaggtgtccaaaagttgcaagatggggaatttattgtgcaggcaacaaaggactgtgtggcaaaaacattgaaaaggttagaggagaagataaatggacgagtgttgaaacacttgctttatttgatgcgagtaggagagcaatctgtgcaaaggcgtgttgctctggctctcgcacacctttgtgctcctgaagatcaaagggcaatttttattgataataatggtctcgacttgcttcttgatcttctgatttccatgagcccaaaacatcaacaagatggctcagcagcattatacaaattggccaacaaagctgcagcactttctcccatggatgctgcccctccatctccaacacctcaggtttatcttggtgagcaatacgtgaatagttcaacactttcagatgttactttcttggtagaaggaaagcgcttttatgcacacagaattgctttgcttgcttcttcggatgcatttcgtgcaatgtttgatggcgggtatagggaaaaggatgcaagagacattgaaattccaaatatcagatgggaggtctttgaactcatgatgagatttatctatacagggtcagtgcagattaacagtgaaatttcacaggatcttcttagagctgctgatcagtatctcttagaaggactcaaacgcttatgtgaatatactattgcgaaggatgtgaatctagataatgtatctgacatgtatgacttgtccgaagcctttcatgccgtgtcactgagacatacatgcatcttgtacattctggaacattttaacaagatctgcaccagagccggttctgcacagctgatccagcgtgttattccagagatccgcaattttctaaccaaggcactgaattcatcaagaagtccaagtccaagcgacaggaactcgcagacttgatgagtcccaattcattggcaccgacgccgtcatctgaccaaagttgctggagatcctgtacagtaaaatttctggcgctgagcgttcaatggtatctattttgggtacatggtggcgcggtccttgaaattaacatcagcaatgtaacaaaattttctaagatctagttgaggataaggataaggagaacatatctcgtactcatgcatcgaccagcttacactgggataggctatagttggatggtcctggccgtaattcgtcggtctcagctttgattgagtttagtgttgtttccactttccagttcacagttcagtgtatgcccgcatctgtttatttaaagtattaagcgtgaacaagttagacattaggacatgtacaatgatatcttgaggtgtctaaagggtttgcaaaaaaaattatggagccgtctctccgtgaagagacgccttctctgactcgtaacctaagtagcaatagatgcctcatttcttattgtacgaattcgtcgtatgttttttcattcggcgctgtataagtgtatttacttttgtatttattaatagactatatttataaacactattatataatagagtcttttagttgtctcttgtgttgtttaaa

SEQ ID NO: 5594 - DNA, 1318 bp, Zea Mays
cgcgagcacgacgcgtttggttggcgccgccgcaacagtcacccattcctgcaaccgcatgggcattgccacagtttggcgcacctgccaagggccacagggtgtgctttaacgggccctccccttgtagcggattctggcgaggtccgaaggcccaacaggcctcaatctagcccaatctgtccgttcagcccgtccgcgggccagagtcgcgcgactggagtaccgcggcggcgaaccaagcctcgagcgaaggcggcgaacggaaagccgcctggcgactccagatctctccggcctgctcctcggctcctcgctcctcctgcgccgccgcggaggcagatacagcctctggatccagccccgctgcatctccgctgtggcggtgctttggctgcttcctgcaggttggagtttctgaatggccaatcccagggatgcggtggacgtcagctcctccatgtcggagctgagcgtagaagcagcgccttcatcgattgaggttcaagtccccaagcagggttctcctcggcacgcggataccttagacagagaatggatccacaggcagagtcagtttcagaagatgggatatcgtgatggtgtaacagaagggcagaaggactctgcccaggaaggcttcaatgttgggttcaggcaatctgtaaacgttggctacaaatggggccttgttcgtggggttggcagtgcgctagctagtcttcctgacagcttgaaagaaaaactggtgccggatgttcagcgtagggggaaattacaggacctgcaccgctcagtgcaagaaatatcagcagatgatgctgtccagatgttccacgagagtatctgccagagcaaccgtccttccgatggatcaggatcacacgtaacatcaacctcggatggagctacagaatcaaataggatgaaaagcctatcaaaggaccttgtgttgctgttgcgcgaatgctcggatattaaagtgagtgaagagctggcgtcagattcatgaacaaggtgcccgggaatttcaaccgtgttttctaggtctggcagaatcacatcgagttcccagattactgaacatataaccttagctgtcgatgaacgtgattcacggattctgttttggaaggacctggtactcaaaaggctcgagcttcagagacatggagtgtagctgtagatcctgttattacatatttcccttttgctgcaacctgtaactagaattgtaactgttaatcctataaatttgcagttcttaaacattaaacaatagtaatgcttttttctccctgcattttatcatcttcct

SEQ ID NO: 5595 - DNA, 1826 bp, Zea Mays
ctctctttggagtggacaagtcctctttgcgtgcgaatccggcgcaaacggtgaatttcagccactctctagtttcgttctctctgtcttccgaaagtgaagtgcaggaccggaaaacacagcgatttggcagggtaaaaagctccaacagccacagccgtgatcattatatcctatctatctacgctccaggctttgaggtgggtattcgaccgccaagcgccaactgcttagctcactcgtacatcgccacatcggtgaagtggtgtcgtggtgaccatggcgcctggcctcctcgctgccgccgccgtgctggccgcggtggcggcgtccctcgcggcccacgtcgcgctcaactgccccgtgcagccggtgccgtcgcatcgcccgccgcccactccgccgcccaacaacctactacagaggctggagaagctcggggaaggggcgctggacgcgccggaggacgtgtacgtggacgcggcggcgggcggggcgctgtacacggccacgagggacggctggctgcagcggatgatgcaccccaacaacggctcctgggagcggtggcgcttcgtcggcggcacgggcctgctcggggtcgcgccgtccgccgacggcaccatgctcgtctgcgacgccgacaaggtacaccgatcggacaggatacttgttggttcggtcggttgtgtagtaagtagtagtacatataagagcactctacgtgtacggaactacggataacccttcttgaccaggggcttttgagggtcggtgacgagggagtgacccttcttgcttcggaggtcgagggctccccgatcagtgacgccagcaccaggttcggcttcgaccggtggttccacgacttcctagagttcagctccaccggccgcctgctccggtacgacccgcgcagcggcgagacgtccgtcgtgctcgaccgactcggcttcgccaacggcgttgcgctgccgagggacgaggccttcgtcgtcgtctgcgagaccatgaggttcaggtgcatcaaagtgtggctgaaaggggataaggccggcgaggcagagacgttcgtcgaccttccggggtggccggacaacatccgcctcgggtcagacggtcacttctggattgccgtcctccagctgaggtcgccatggctggacttcatcacccgctggaccttcacgaagagagtggtggcctcgttccccgcgctcagcgagtggagcaagggggcggcgaagggagccatggtcgctcaggtgtccgaggacggcaccatcctccgcgtgctcgacgactcccaggggaaggtgatcaacttcgtcacgtcggtgacggagttcaacggggacatcttcctcggcagcctcgcgaccaacttcgtcggcaaactatctctggcgcgggtggcacagaagcagggagcagtatcttcgtagacgtttgggttcttcatgtcagtttagccctgtttgtttatcctttatattatataatccagtttaaataagttaatagacaaacaaacaaaacaggttattagatgtattgtataatctagatacctagattatgataatacataaacagataattatgtgcttattatataatccataagctagattatataattctgaaaggaaaaaaaaaccttaatcaagggaacatatacacatttgagttcttcatgtgagtttaaatagacactctttgctctttaagcatcgtcactactcaattctcaaacggctctgatgtacaataatcggctaccagttaagatttgcatgtaaaccgaacaagtttatccatcgaga

SEQ ID NO: 5596 - DNA, 2391 bp, Zea Mays
acaaatcgggtttgccgtgcggcacttgcgttttgggtcgggtacggacccgcaaaaagagctccgtcagttcctctacctcctctgtaggagcacacttgtttcggaaaggaacgcagattcacgccacgccgccgcctcaattatatggcgccggcgttctcggcacaggtccccgcgctccgacggggagcactgcgcgtgcggtgggtcacggctgcgctgttctcatcggggattctcgccggcaacaagccgattctggtgcgtgacttcgtgaggtcagcgttgtacgaccccaaccatggctacttctccaagcgggcgggaccggtgggcgttcttgacgccagcatccgcttcaaccagctcgaggggaggagtgcatatatacagcaccttgataagctgtataagaagcatgatatcgcttggtttactcccgtggagctctttaagccatggtatgcctacacaatagcagcatcgattctgcgtacagcaaatctttcagtcccattgaagatatacgagattggtggtggctctggaacatgcgcaaagtgcatacttgattacatgatgctgaatgcgccaccaaaagtctacaatgatatgaaatacatagattagctcctctcttgctgagaagcaattggaaactgttggtgaagtgcaaagccatttgtcaaagttcacggtggagcaccgggatgcaattaacagacctggatggggccgcacggatcctcatccatgttgggtgcttatgcttgaggtatgttctgctgggacttctcagtttgttcttgtgttttatgtgtaaaccaaagaagcacaatgacatcatcatgcaccttcacccattatgaactgaggtatatgtgtccagtttaatcattgtatctagaagcattaaagtcttgcatgctgcggcatacaaaatactatgctgcaaaagaacacatgtacttgcttcaaaatttatctgctctgcgaagtgtaagtgtgccatttcactccatgtatgaatttcgtaaaattaatttcgttctgtagtaatattctgatcacaaaacaatacgaaactagtagctgtaaaaatcatagcaaacaaaacctccttggcatccattttttgctcattatgttacgaagtaagcaatgcatctaaaggaagatccacagtgatgcctacaacagtaactatctttccatggaatatcaggtacttgacaatctaccacatgaccttgtctattcaccagatcaggtctctccatggatggaagtgtggattgaaaaagtaaaaggcagttcacaagcttccgaagtctataagccattacaagacccattgatttctcgctgtgttgatattattggcatgaatgaagacaaagcttctgtcagtgaaaaactaacatttgctgcaaaaggagttctatcaaaagtattcccaaagcctcgtagagcttggttgcccaccggctgcttgaaactaatggatactctacatcaagctttaccgagcatgtcccttattgcttcagacttcagctatcttccagacgttagcatacctggtgacagggctccattggtttcatcaaagaaggatgggaagacatcagatcatcgcaactactttgatgctcagggtgacgcggacatcttcttcccaaccgacttccggctcctggagcagatcgaccataactgcgctggcttctcaaaggagcagaagaatcccggcgcattcaaacccgtgaagaagaggagaacgatcatacttgatactgcagccttcatggaggagtttggcatgccgctgaagacgaggaccaaagacgggtataatccgcttctcgacgatttcaagaacacaaagttctatctcagcgtccctacacacaacgttcctacccatagcaggaggaactagtcttctttccttttgctgatgtgtcacgagtcaggaaaagacgtctgacaggctagaatcggtctgtcattttgagtagtctgaatttgcaagttttcttaccttaaggtgctgaaaattttatagtttctcttttctgtagaacaaagtttttattatcatttttgacattgatgcatgggtaataaaaggtggaagaagactgactaacaaggagtcaaaccaaatgaatggtaaaagcaattacaggctgcattccacacgtataacgaaagaaaatgttcagtggatacaaaagggtatattctttgcgattaatcttttcgttgccaatacagctgccgccccatactccagggaattacattatcttctaacaaaaaaaagaatggttacatcgaatggctccaatatacagcttctcaccatgctatcagcaaaaccgg

SEQ ID NO: 5597 - DNA, 2398 bp, Zea Mays
acaaatcgggtttgccgtgcggcacttgcgttttgggtcgggtacggacccgcaaaaagagctccgtcagttcctctacctcctctgtaggagcacacttgtttcggaaaggaacgcagattcacgccacgccgccgcctcaattatatggcgccggcgttctcggcacaggtccccgcgctccgacggggagcactgcgcgtgcggtgggtcacggctgcgctgttctcatcggggattctcgccggcaacaagccgattctggtgcgtgacttcgtgaggtcagcgttgtacgaccccaaccatggctacttctccaagcgggcgggaccggtgggcgttcttgacgccagcatccgcttcaaccagctcgaggggaggagtgcatatatacagcaccttgataagctgtataagaagcatgatatcgcttggtttactcccgtggagctctttaagccatggtatgcctacacaatagcagcatcgattctgcgtacagcaaatctttcagtcccattgaagatatacgagattggtggtggctctggaacatgcgcaaagtgcatacttgattacatgatgctgaatgcgccaccaaaagtctacaatgatatgaaatacattagagattagctcctctcttgctgagaagcaattggaaactgttggtgaagtgcaaagccatttgtcaaagttcacggtggagcaccgggatgcaattaacagacctggatggggccgcacggatcctcatccatgttgggtgcttatgcttgaggtatgttctgctgggacttctcagtttgttcttgtgttttatgtgtaaaccaaagaagcacaatgacatcatcatgcaccttcacccattatgaactgaggtatatgtgtccagtttaatcattgtatctagaagcattaaagtcttgcatgctgcggcatacaaaatactatgctgcaaaagaacacatgtacttgcttcaaaatttatctgctctgcgaagtgtaagtgtgccatttcactccatgtatgaatttcgtaaaattaatttcgttctgtagtaatattctgatcacaaaacaatacgaaactagtagctgtaaaaatcatagcaaacaaaacctccttggcatccattttttgctcattatgttacgaagtaagcaatgcatctaaaggaagatccacagtgatgcctacaacagtaactatctttccatggaatatcaggtacttgacaatctaccacatgaccttgtctattcaccagatcaggtctctccatggatggaagtgtggattgaaaaagtaaaaggcagaaagttcacaagcttccgaagtctataagccattacaagacccattgatttctcgctgtgttgatattattggcatgaatgaagacaaagcttctgtcagtgaaaaactaacatttgctgcaaaaggagttctatcaaaagtattcccaaagcctcgtagagcttggttgcccaccggctgcttgaaactaatggatactctacatcaagctttaccgagcatgtcccttattgcttcagacttcagctatcttccagacgttagcatacctggtgacagggctccattggtttcatcaaagaaggatgggaagacatcagatcatcgcaactactttgatgctcagggtgacgcggacatcttcttcccaaccgacttccggctcctggagcagatcgaccataactgcgctggcttctcaaaggagcagaagaatcccggcgcattcaaacccgtgaagaagaggagaacgatcatacttgatactgcagccttcatggaggagtttggcatgccgctgaagacgaggaccaaagacgggtataatccgcttctcgacgatttcaagaacacaaagttctatctcagcgtccctacacacaacgttcctacccatagcaggaggaactagtcttctttccttttgctgatgtgtcacgagtcaggaaaagacgtctgacaggctagaatcggtctgtcattttgagtagtctgaatttgcaagttttcttaccttaaggtgctgaaaattttatagtttctcttttctgtagaacaaagtttttattatcatttttgacattgatgcatgggtaataaaaggtggaagaagactgactaacaaggagtcaaaccaaatgaatggtaaaagcaattacaggctgcattccacacgtataacgaaagaaaatgttcagtggatacaaaagggtatattctttgcgattaatcttttcgttgccaatacagctgccgccccatactccagggaattacattatcttctaacaaaaaaaagaatggttacatcgaatggctccaatatacagcttctcaccatgctatcagcaaaaccgg

SEQ ID NO: 5598 - DNA, 2729 bp, Zea Mays
acaaatcgggtttgccgtgcggcacttgcgttttgggtcgggtacggacccgcaaaaagagctccgtcagttcctctacctcctctgtaggagcacacttgtttcggaaaggaacgcagattcacgccacgccgccgcctcaattatatggcgccggcgttctcggcacaggtccccgcgctccgacggggagcactgcgcgtgcggtgggtcacggctgcgctgttctcatcggggattctcgccggcaacaagccgattctggtgcgtgacttcgtgaggtcagcgttgtacgaccccaaccatggctacttctccaagcgggcgggaccggtgggcgttcttgacgccagcatccgcttcaaccagctcgagggtggtctcctaaatctcctacgcgttgcacatttcctaagttcttatcgcattgcctcctccaatgggaagtttagtgtgtgttccggcattgcggggatgggaaggtacttgtgttttgtttcttcgtcgtgctggcatttcaacgaacaggtctcacatttgggacgtgtggtaatggataactccttgccgattgtctgatgctggttccgtgtcgtgctgtgtgttgatatgttgggcatttggtgaagatgtgaaaagcgtgctcgtttttcctttttaactttgacctaaaattcatttgcttcaataccatattaccatgtagggaggagtgcatatatacagcaccttgataagctgtataagaagcatgatatcgcttggtttactcccgtggagctctttaagccatggtatgcctacacaatagcagcatcgattctgcgtacagcaaatctttcagtcccattgaagatatacgagattggtggtggctctggaacatgcgcaaagtgcatacttgattacatgatgctgaatgcgccaccaaaagtctacaatgatatgaaatacatctcagtagagattagctcctctcttgctgagaagcaattggaaactgttggtgaagtgcaaagccatttgtcaaagttcacggtggagcaccgggatgcaattaacagacctggatggggccgcacggatcctcatccatgttgggtgcttatgcttgaggtatgttctgctgggacttctcagtttgttcttgtgttttatgtgtaaaccaaagaagcacaatgacatcatcatgcaccttcacccattatgaactgaggtatatgtgtccagtttaatcattgtatctagaagcattaaagtcttgcatgctgcggcatacaaaatactatgctgcaaaagaacacatgtacttgcttcaaaatttatctgctctgcgaagtgtaagtgtgccatttcactccatgtatgaatttcgtaaaattaatttcgttctgtagtaatattctgatcacaaaacaatacgaaactagtagctgtaaaaatcatagcaaacaaaacctccttggcatccattttttgctcattatgttacgaagtaagcaatgcatctaaaggaagatccacagtgatgcctacaacagtaactatctttccatggaatatcaggtacttgacaatctaccacatgaccttgtctattcaccagatcaggtctctccatggatggaagtgtggattgaaaaagtaaaaggcagttcacaagcttccgaagtctataagccattacaagacccattgatttctcgctgtgttgatattattggcatgaatgaagacaaagcttctgtcagtgaaaaactaacatttgctgcaaaaggagttctatcaaaagtattcccaaagcctcgtagagcttggttgcccaccggctgcttgaaactaatggatactctacatcaagctttaccgagcatgtcccttattgcttcagacttcagctatcttccagacgttagcatacctggtgacagggctccattggtttcatcaaagaaggatgggaagacatcagatcatcgcaactactttgatgctcagggtgacgcggacatcttcttcccaaccgacttccggctcctggagcagatcgaccataactgcgctggcttctcaaaggagcagaagaatcccggcgcattcaaacccgtgaagaagaggagaacgatcatacttgatactgcagccttcatggaggagtttggcatgccgctgaagacgaggaccaaagacgggtataatccgcttctcgacgatttcaagaacacaaagttctatctcagcgtccctacacacaacgttcctacccatagcaggaggaactagtcttctttccttttgctgatgtgtcacgagtcaggaaaagacgtctgacaggctagaatcggtctgtcattttgagtagtctgaatttgcaagttttcttaccttaaggtgctgaaaattttatagtttctcttttctgtagaacaaagtttttattatcatttttgacattgatgcatgggtaataaaaggtggaagaagactgactaacaaggagtcaaaccaaatgaatggtaaaagcaattacaggctgcattccacacgtataacgaaagaaaatgttcagtggatacaaaagggtatattctttgcgattaatcttttcgttgccaatacagctgccgccccatactccagggaattacattatcttctaacaaaaaaaagaatggttacatcgaatggctccaatatacagcttctcaccatgctatcagcaaaaccgg

SEQ ID NO: 5599 - DNA, 2142 bp, Zea Mays
cgttgtcttctctagcgacggcgaggcttgagcgctcacgtcccggcgttcccgtgccggtggccaagccagcggccgacgagatggactacctcaggacggtggttccgtcacaactcttggcagagcgcggctccaatcttgtcgtcatcaacccaggatcgggaaatgtgcgaatggggtttgctagtcaggatgtgccattcaatataccacattgcattgcccgacacatcaatccacaagagggcgaagaaccaagattctctgtgcgcgatcagatgctcaactgccatgctacttcatcgcagaatgcagagcgggagagtgcatatgatattattgcagcactgatgaaaatcccatttttggacgatgaagaaatgccttcaccgaaccaaccccttcctccaaagatgggacgtgttgatggcttctcttcgcagcaaaacagagacgataataaattcacttggacagatgtgtcagagagaattattaagccatccacaccattcgataggtcagtatacaaggatgctgaggaagatactctgccaagcacatctgatgatgataatggacaggactttaaagagaataagtataaagaaatgatatttggagaagatgctctgaaaatccctccttcagagtcatactgtctgagtcgcccaattaggagaggccattttaatgtgtcccataattattcagtgcatcaggttttagaagatttacgcactatttggaactggatactgacagaaaagttgcatatcaacccaagagacagaggtctatattctgcaattcttgttcttggggagacatttgacaaccgagaaataaaagagatgctgtctattgtccttcatgatttggggttcagcactgcagttgtacatcaggaagctctatctgcagcgtttggaaatggtttatctacaacttgtgttgtcaacattggtgctcaagttacacaagtagtttgtgttgaggatggagtagctttgccccacacagctctggcgcttccatatggtggagatgacatctccagatgcttgctttgggttcaacgtcgccatggcacgtggccaaacttccaaactgatccaatgagcaatcctatagatatgctaatgctcaacaaaatcaaagagtcatatagccaaataaagactgggagcattgatgcagctgtccttgttcattcatatgataatgaaaggtctggtggacatcagaagacaagactatcagcaattaatgttcctcctatgggtcttctttacccaagggttcttgttccagaagagtaccctccacctcctcgatcttggttccaagactatgatgacatgctggaggatacctggcaaacaagtgatggtctttaccctagtgggaatggacgtgttgaccttcaaaagaagctgtttggtagcattcagttggttggtggtgcagcttctacagctggccttgcacaagtgctggagcaaagggttcgcactaaaatttcagcaaaccaatctattgagaaagttgaggtgttgcaatctaggacttatccattatttgttccatggaaaggtggagtgattttgggcgtccttgatattggtaaggatgcgtggattcatagagaagattggattaaaaatggtgtccacatcgggagtggcagaaaatataaggattcctattttcttcaggcgcaagtaatgtgctactacaacgtataacagtatcttatttccgagctacacacgaagacttgcacttatacaggttgttcgaccgtccaaaccatcctagaatatgattggtggactgcgattaaattgcgtacatgatgcatcagttctatgcatgctcgctgctgtctgttcggaggtcatcaactcgggacctggactaagggccttgtcgttcgctcaacccctatgaaaaagtttggctttctaaagatgtagtagaagtactcatttattccctgccaattgaacatttcaaatcttcgtatggtgttaatgaaaaatctgatgtttggattcgtatttatttccaatgataatgtatatgtgcattctcgactgttttggaaagaatgaaaaatcctcgtccgtttgcgta

SEQ ID NO: 5600 - DNA, 1858 bp, Zea Mays
gatcgcaccgcacctaaagggagggccaaatccaatctcaatctcccacggccaagtaccatcacccccaccccaacgaaagggagccgggctcccctatctatatccacccgtccttctccctatatatatggattgggaaatttttcaggagggcagagaagcgaaagggacgcgcaagctccttcacccaccctcccccacgccacacgctcctcctacataaccacgctgcttcgattcactcctcatcggtggctcacgaccgagctgctgaggcaaagcttgtcccgcagtccttcccttagccttaacactcggagttgatcccgtctccgggggaagcagctggtaataatggcgcggtgccaggggaccgttgagagcctctgccaggggctgctcgacctcgacgacgacaagttcggtgcaatgtgcagcgccttcggctacctccaggagtggccggacctgggtgccgccatgtgcggcgccaatctcgccgtgccgcctgccgtggcgacgccgagcgccggcgacggcaacgattcctcctcttgcagcgtcagcggcgggttgaggaagaggaggccggacgcgtacctcgatgccaagggtggtgcgaacggcatgaacaagagacccagagggaagcagcagccgtctggcctctctgagatcgcggcggcgcccgggaaagggaagcaggagaggccaaaggctggcaccaagaagaaggccgaggctgcggcggcggcggcggctgccggccagaagaccgactacatccacgtccgggcccgccgcggccaggccacggacagccacagcctcgccgagcgggtgaggagggagaggatcagcgagcggatgcggtacctgcaggagctggtgcccgggtgcagcaaggtcacgggcaaggccggcatgctcgacgagatcatcaactacgtccagtccctgcagaagcaagtcgaggtgaatggaactgctgctgcctgggatattggctcccagaatttgttcagcggatttgatgcacaatttcagtcggtagaaagtggctgcttgctagacaacctcaaaatggaaatgtgagaagaattaatcctcattgctggagttttaaccacgggaaaaaaaacttgtggctgaagattctttattcatatcaactgtactaatgaagtattctgtcagcaatggcaatacaagtacatttcttgtgttatatgtttgtctgctactctcccggtttctaagcattccttcataaccaagccagacagagggttcagagcttcagattacaagcaaagcaaagcacttaaggacatgttcccacaacaaaccagcaccaatatacaacactttatcacctaaactgacagtacaacgaacaggaacaactctcctactcatcttccttcaaagcacagactgttcaccagcttctgtaaagacatgattcaaccttgtaacagaagtaaaggataattcgcttgcacaatatataatgacagtgaccaccacaaaggatttgagtgcattgagatatcagatgaatcttatttcaatatttacatgtatctacactgacatggcacatgatttgagtgcgttaggttacttgatacccagtctattttcgtgaaatgcttgagacgaagtaaagaacctgaactaacctttcccaggcacaatgataattggggctgctttacagttgtggaagcaatactcactgacacttccctgcaacacactttgaataaggcctctaccacgtgtaccaagaatgacagcggcaggcttcagtcgatctgcttctcggcaaataacttttccagcgtctcct

SEQ ID NO: 5601 - DNA, 2298 bp, Zea Mays
cgcctgagattctcgcagggactagtttgtggcggaatctcaaacccaggaacctgtgaatcctcgacacttgtgaaacatgagaaggttctttttcttcgggtcccctgctgcaaacgctggtgagggagccgggcaaccggtcaatgatagcaggactggacatagaaagacagatgagggaaaggacatctccaccgcgagattgtcgagatccagaagccgtcgtcagaagcggaataaggaggaaccggctaaccccaaacaactcaggaggtccatgtccttctcatccccggccagaagcagctgtgtggaggaacgatgctttagcttctcgggtgatgttccgtgctctttgtacgatgaatctgatgcaccccaccatgccaaagatgtcgctcccgacatgtggtctccagaagggaatccgttctctagagaatatgcaataagaaccccgaaagatcattctgccatggaaaatgattctcctcgttcaaaatactgttcttgctcagcagggcactctcctgttagctctcctgtcgctatacagtgcagatcaacaagactaggcaatttattaaacaggaacgaagtactagatcgttacattgatagagggcatggagatgcaatcgtagatgagaaacagaagcagtgcgtacctacggtttctaatttgggaaggccacctcgaccccactctacagtaccatccataccgagaccattcaaagagacaacggaaagctacccagatgtggacttaaacgacgccttcctttggcgacttgctcaagagggtataggagatacccacaagattacaactatgtgcagtgcatctagacgccacataaacatgtcagatgcttctgaaagagaaagtgcaacaactgttgaagatatttatgaagatttgcaagatgtgagacttccaaatgttatctgcccctccacttgtcctaactcagcggtagaagaaactgatgacatgttgcttcaaagagttaaggaagttgagtcaaggtttactattccttgtggagatgaatatgaatttagcatgctcaggtataaatcatcaacctcaaatgacatgtttcagttgatccagcaattgactgaagataggaaacagttagcatatgaattgtcttcagagatcaaagcacgtgttacagaaagatttgctgccaaagagcaatacaaacaattaaagaaagaattggacaacagaactagaaggctggagaaggagaagagtgaagtacaaactacactggaaggagagatggatagaaggtcagatgattggtctatcaggctatcaagatttcaatctgaagaagagagactacatgaacgggtgagagaacttgcagagcagaatgtgtcatttcagagagaagttacttctcttggagcaactaaggctgaagctttaatgaaagctgcgagtttggaaacgcaaaatagcaaactaaatgacgatctagagaaactaaaaaatgagcatgagaaactgcattattcctcaacagatttgcaggctcgctttgctgagattgtagaggaaagggaccacatccgagaatatttgaaggccaaggagggagagaacaaagcattgcacaaagtaattgcaagactacaaacaacatgtaatgagcaggaaagaacaatcacaggcatgagacaaggatgcatagacgaattaggtaggaaatttgttgagtacagcaccaatgataaaacgagaaaattacaaatggaacttattagactgactggggtggagcaaaagttgagaggtgaaattcgatcttgtaatcttgaagtaaaatctctcagacaagagaacattgcactcttaaatcgtttacaaggtgctggaaatggagcaagcttctcctcgattcgacttgatcaggagcttcaagctagggtggacaacctgtcgtggcaggaggcgaagcagctgagacgaaacatcagcatcatgcaggacgaggttgtatcgctgaagaagaagatcgaagccctggacgaagacatacttgtgaaggaggggcagatcacaatattgcaggacagcatcgacaagccgttcgacatcatctgcagcccaagatcgatgagggagttcgatatggcgtgaagacggctgctgttttgtagcgtatgcatgaaggattttttgcatcaagggcaagatgcatggagtataatgtgttggaagttgacagtagacccaacaacacattgcattctggtcaattgtttctgtct

SEQ ID NO: 5602 - DNA, 1650 bp, Zea Mays
caccgccccaccccaaaccacacacaagccgctcgcccgcaccgccgcacccgcacgccagaaacagctctcgcgttgcttccgcacgccgcccatggcgagcctgtcgtcgccgagtctcctctcttccttcctcggcgaccgcctcgcactctccactaggcctctccttctccgctccgctgtcccagcaggcggctggcgtatcaagcaacgagaacgctatgcaacttggtggatatcctatttaacaggagaaatcaggatgatgcaccagaaaacaaccctagacgcctgcgtcctgggaaagtatctccacgccttagtgttcccaatcatatacaacggcctccatatgtcaattctcgtcaacaacgacctggtatgaataatggacctgaaatacatgatgagaacgggatcgagtgcatgagagcttctggaaagcttgctgcacaggttttgaaatttgctgggactcttgtaaaggcataacgactgatgaaattgataaagcagtgcaccaaatgataattgataatggagcatatccttcacctcttggttattgtggatacccaaagagtgtctgcacttcagtgaatgaatgcatctgtcatgggattccggattctcgtccccttgaggatggagatatcatcaatattgatgttactgtctacctcaatggctaccatggtgatacatctgctacatttctttgcggtgatgttgatgacgaagctaagaaattagttaaggtgacaagagaatgtctcgacaaggctatatcgatttgttcacctggggtggagatcaaacaaattggtagaactatacagtatgtaatttctgagtaaccaagcttttaaacagatgcacatatttttttattatctttatcttaaaaaacaacattcagtttatcgataagctgtattgtcttaatttgtatgcgtaacagatctggtaatcaaaacgaactcttgttccaactactatacttacgacatttaatctttgaagggatcatgcagacaagttcaagtttggtgtagttagacagtttgttggccatggggttggcaaagtttttcatgctgagcctgttgtgcttcatttcagtgagttccccactttaacgaaaacatctttttattaattgctgtcttgcctcccggctatctcaaggttctggttgcactctgcaccatattaggatgtgatatctgtgccaatgacttcgaaatttgcaggaaacaatgaatggggacgtatgatgttgaatcaaacatttactatagagcccatgctaaccatagggagcatcaaccctgtcatgtggtccgatgactggaccgcagtgacagaagacggcagcttgtcagcacagtttgagcacacgatacttattaccgaagatggccctgaaatactgacacagtgttaatggaaggccaaataacaaagaacaatcgttagtcagctggcaagatcctgcatttctttttggggactaattggtccaacctaaactctgatgcaaaatggcaaactcacattgtaatctcggttcatcggtacaacgatatatgtatagaaattgtactattttcgaagttatatttgagagtgtgttttgttggtgct

SEQ ID NO: 5603 - DNA, 1756 bp, Zea Mays
gtctaaagagtcacccgactaaaagttgaggattccagtgctgatgtatcagcagcagcagcaaacttccagagtttaagcctacataatgatgagttagctgcaaaaaagtctgcagaagataaccctgcagtgataattcctgaccacttgcaagttacaaatacagaatgtgtcaagttgagctttggcagttttggatctggtgcattttctgggttactcccacaaaataccactgatagcaatgtggaattccctgctcgagaggaatctgcaccagtagatcaaatagatgccaggaatcaagattactatgaaagtggtgctgtaacttcaccagcagacgaaaatcttgaggccatgcttggagctaacatggagaatgtagatgcgccttctgtttcacaggctaatgagctcaggcaggacgtacttgatccttctgaacttcaatatgacgtcccatcagttccaagtcatgcttattcaaacacggacactttacagcctagcacaattgaggagccacaaggaaacaaccaagcacatactctttcccatttgtcaaacttaatggcactgaaagcaggggttttctccaacgcccagtctacacagagtcttccaagtactagcattcagacggggcttcctctgccacagcaattagcacatcacccttactctcagccaactttaccaatcacacattttccaaatatggttgggtatccgtatttgccacaaaactatgctacttacctatcttcaggcaccttccagcaagcatacccgagtagcggaccattccatcagtctgctgctgctgctttgctggcatctggtatgaagtactcgactccagagtataagaacaacctgtctgccacaggcttacaacagcaacatcagccacaaccacaaccactttcatcagtcatctctggttatggaggctttggaagctcaagtaatatacaaggaaattttacccttagtcagagtaccggctctgcatcagctcttgggtttgatgaagcattgagcagacagtacaaaaacaccagtcaatacatggctctccagcagggcgacaactctggaatgtgggttcatggctctggttcaagagcggcctcgacgcttccgcctaaccacttctatggttaccagggacagagtcagctgggtggctttgctcgggcgcagcagccacagccttcccaatttggaggccatgggtacccaactgtctaccagtctcagggacaggagcacccccagaaccttgctgagggcagcctgaacggcttccaggtcacaccgtctcagccatctcatccgagctggcagcatcagcacacgtactgagccctcctgtactccctggttagggtggctcttgtgctgtcacaagccaagtttcgcgtgcttgtgccctcactcgatgcagagtatgctgctcggattcagtgagcgctgagagggtcccaggcatacaacagttagagcgttttaacatgttgcgtgtgttgccagactgatgcattgcggtttgttttcgatagtgagttatatgtgcggaggcgcagtcctgtataactgagacatgataacctaacaagcagtcgtttctgtttcccaagagttggctgctcttagcttgagctgatgattgactgtttgcttgcagttttggtcatgattttactgcttcaaaaacatttccaattccaccatattggcatcgcgt

SEQ ID NO: 5604 - DNA, 2028 bp, Zea Mays
aaacttggccgcagtgaagggaggggaggagaaagggttttggaattaggcatcggccgccgttgcgttggtgtgagcaagtgaaccaggccgaaaccgaagctaccgccaccaccaccccgccctcgtctccctgtccccgagtcccagtaggggatcccggcggtgaggatgagcggcggcggagctggagggaagggggcggcggcgcctgttccgcccgggtcgaggaagctggtgcagggccttaaggagatcgtgaaccgccccgaggcggagatctacgccgcactgcgcgagtgcggcatggaccccgacgagacggtcagccgcctcctctcccaagatactttccaagaggtaaagagcaagcgcgacaagaagaaagagattaaagaggttcctgagacaagatatcgatcagcaaatagttctactaatcgaggccttagaagtggtgtagatcgtggtggacggaacaattctatgcactccagctctactgataacatgacctcaaggccaccagggtctggtactgcatcaggtacttccagtcagaggcaaacagttgcaagtccttctgcaaacaaacatatggttgctgatggaccagctgcatcattgcaatcatcgtctgggtttcagcatggtggttggtctgggacacctggtcagttgtcgatggctgacattgtgaaaatgggccggcctcagggaaagacttctatcaaacctgtggtcacagctgacagaggttatgctggacagtacccatctttgccaagcacaaaccagaatctgaaacaatctggaagcatggttcccccaacagagcttgacaaggggttacaacctgcccaagattcggttcaggttaaggatcatgatcattctactgctgacagcaagctcccatatggtactgactggtctccacaagatggcccgacatttgcgaaccaatcttcccttcctgagccatctggtgatccgtccttgtatgaggcatcgtttcagtcatctacattggttactgatgtagttaattcacatgaaaattcacacttggatgaaaacgacacctttgcaatgggaccagcacctgcctctgagagacacctggatcctagtgacggtatttctgagtacaatgatgtaatattgaacaactcaagttcctatcagcctcataattactcttacacagaacaacaagaagttgaggattccagtgctgatgtatcagcagcagcagcaaacttccagagtttaagcctacataatgatgagttagctgcaaaaaagtctgcagaagataaccctgcagtgataattcctgaccacttgcaagttacaaatacagaatgtgtcaagttgagctttggcagttttggatctggtgcattttctgggttactcccacaaaataccactgatagcaatgtggaattccctgctcgagaggaatctgcaccagtagatcaaatagatgccaggaatcaagattactatgaaagtggtgctgtaacttcaccagcagacgaaaatcttgaggccatgcttggagctaacatggagaatgtagatgcgccttctgtttcacaggctaatgagctcaggcaggacgtacttgatccttctgaacttcaatatgacgtcccatcagttccaagtcatgcttattcaaacacggacactttacagcctagcacaattgaggagccacaaggaaacaaccaagcacatactctttcccatttgtcaaacttaatggagagttgtgtgtcatttcattaagtaagaaaaacctttagggctagttcctggagagctgcagccccagccgggcaccacatttgcccttcatcgaccactgccaacacaacactttgaacaccaggccaaggtttggatgaatcagcttttagagaccatataaccaacggatgcacagtgcccaactcattctttctaaatcatgaacaccaagccagccatataaggtctttgcaccttagcccatga

SEQ ID NO: 5605 - DNA, 1082 bp, Zea Mays
aaaaaatgacacgatcgcaggagaaaccaaagaaaagttcctttttctttattttcttcgtcctcttgttctcgactcgctgcccactgcgtcacccgaatcccttcgatccaatctccaaaccctaggcagcccgccatcagattgttaggtcctccttccttaaaccgcggcggccggccatgtcccacggcggcggcggcgggagggcgaaagtgacgccgaacctggcggtggacggcgagggcacgcggacgctcaatctcaccgtgctgcagcgcctcgaccacgccgttgaggacatcctcatcaccgcggctcacgtcacgctctacgacttcgacaccgacatcaaccagtggagccggaaggacgtggaggggtcgctctttgtcgtcaagaggaatgctcaacccagattccagttcattgtcatgaatcgcaggaatacagataatctagttgaagatcttttgggagattttgaataccaactacaagctccttatataatgtaccgcaatgctgctcaagaagttataggaatctggttttacaattcccaggagtgtcaacaggttgcaaatcttttcagcaggattctgaatgctttctcaaaggtggcaccaaagccgaaaattccttctgtccaaagtgaatttgaagagctggaagcagcaccttcgttggttgatggtcctctggaagcgcaaacgtcaaatatcatgtcaactactactcacgttcaagaggatcctttatctgcatttttcagtaatgatgaattcgtcgatttagtctaccgcgagatcatgaacagacagtaatggatttacaaggtacagtcctctccatcaggctagcttgtgtttggactctgtcattatctgttgtttagcctattccaagttatcctgtaaattattattgataaaatccttcggttggtggtgtttgtactattaatgtactttctacatctgtataaatggttataaaatctgtgctgtattcgtggcgcagaaaagttttgttctgagttgtatattgaaacttttgctcaaccgacctttttttttggg

SEQ ID NO: 5606 - DNA, 974 bp, Zea Mays
aatgaacccctgtccgccgccgcctcgtgtggccgttcccgttccgtctcccaggagcgagacccgaagtttctagagccttcgggccgagatggtcgtgttgcacgtgaagttggcgccacccgctgccgccgccgccaccgccgccgcctcctctcccatgcaggacgtggacgaggagacggagttcctgtacgagtgcgccgcctctgcggtcgtcgcggacgtcgcggccgccctcggcgcgctagcgggcctccaggccgccatcctctccctctgccgccgccttcgagcgaggtgtgctggtgcgatgggcgagctcgagagggcgctggacgaggccgaggcctacgcttctaaggtgcagcgcaacagattcctgtctcctcgtgctctaagggaacatatcaagaacatcgagaagaaatgcgctaatactctacaagaacctctggaggcattgtctctgcaagagtcatcatcagacaacaagcatgagagaatacagatttggtgggctgggaaagagctagccatggaccagaagctatccgactatatcggtgttaatgataaaaccaagattgtcgtcaggctaattgaagctcgtgatgagtgttgattgtgctcctacctcttcattgatatcgcagagttggtttcctcttcgataatattagtatatggatactggtcctcagtccctgtaagatagttttaattcccttgaacaacattcttgtcaactgtattatctgacaataggtataagtggtttgacttcttgtaccagttgcttgtacaatatatcctcagtcatcacagaggcttacttttggggtgttatgtgccagttatcccctttcaataaggtggtataaattttaagctatcatcctgtttatctgtaacactgccaagtttacaggctgacaacctgtataaaaaccagaatacttatataggtcctt

SEQ ID NO: 5607 - DNA, 2485 bp, Zea Mays
ttctctcgcgtcgttctcccgtagtcccgtgccctcgcgtgcgctctatctgtttctggtggcgacgacttggcggtccccgctgccgccgtgcccaggcctctacttcgggaccttcaccggcgacgagcacccatcgggttgcttcgcaaaacttccaacatccaggatacaattaattacgattccttcaactttatctcgatttataggaggttgcacagagcccatccaacagggtgtctcagacatactgatggatggggtgcccaatatccttgagaaatcatcacatgaatgcatgtactcttggtacttcaccagggaagaactagagaaattttctccatcaaggaaagatggtattactgaaaacaaggaatcagaaattcggcatttatattgttcatttatccgggatgttggcatcaggctgaagctacctcagatgacactagcaacagcagtcatgctttgccatcgcttctatttacaccagtcccttgccaaaaatggatggcagacagttgcaacagtatgtgtatttctggcgtcgaaagttgaagatactccttgtcccctggaccatgtagttagagtggcctatgaaacaatgtataggcgggacactgctgcggctcaaaggatccgtcagaaggcttaaaacaacattgtgtctacagtataaaccccagtacatagctgctggttccctttatctggctgcaaagcttcacaatatcaagcttcccttgcatggagcgcatgtttggtggcaccaatttgatgttgcaccaaagcctctggaagccgtcattcatcaaatgatggagcttgcggctttgaaaaagttgatgcctgctcgacccaatccggttaagctgaaggaaactttatgtgaagctaaactgagcttatctaatagcccagactctgtgttgaatcaatcaaacttgttaataagcagctcaagtcctgatattggcgagcccagtgacaaagtgcaggtggattcctgccaatacttgataagcagtcacatgggtgattgtagggtctcaggtcctgacagcagttcgttgaatacttgtgctaatagaaatgtctcttgtaaagcacatgatgaagagagcttggatcaggccttaataatcaaacatgacagtgggatgatgccttctagtaatcagacatcattatatgctactgtaggcactgagggcagtgctgaactgaagcaggatgtaagccattgtaatgacttcaatatcagagtcaatgacgaaagcttgaaccaggtgttaagaaatcagcatggtgatgctatcccattacctgacgtggtatcgctggatgccaaggtggacaaggaaaggagttggtgtgtggaaccattaattgcaaactctgattgctgtactgacagtgttaatgtggatagcttgtgcactgatcagagattggctgatgctccttcaggccccacagctgatgcaccatccatgctggccgaggaggaatcttatccttttagtgcaaagcttgaaaatattgatgttgccaggatcaaaggtttattgatgaagaggaagagccggagagagatccaagaccgagccattgcttcagatggtctaagtgaagaagactggatcgagagggagcttgaatctgggattgttacaaaccaagaagccaattgtgctgccatctcagacgagctaagtgacgaagcctggattgagagagaactcgagtcagggattgtggtcggaccaagaaatgagcaagcgatcacttttgatggtttgagtgaagatgattggatcgagagagagctggagtctgggatcatcgttgagccagcacctgctaccaagaagcggaagctggagtcaagctgttagctctgcattcgaaggccagattccaagcaggtgaataataacagatggttgcgagtaggaccacatcgaagccaagagatacatgtcgcacagatgggaggatcaatattatcctttttttatttctttataaccaaacaccttggagtactttgacacaaggggtgtgttcacagtgggatctccccagtttcttgaatgcagaaccgtatccgttgtatttgttccttcttgtcgtgagtgtaaatctagcgtgtccgaagttcggttttagattgtaggtgtaactgtagcagggattatctggtgttaagcccaacgagaaaatgattcagtgtaactgttactgtaaggaaagaagttattcagtgtagatttatggttaacacaagaagaggcaattactggtgtatgatgtttataaattgatgatgaatgttactggcagctcaaaagaaaagacagttactggtaactaaagaaaagtacgtttaacggagctgatcacattcaatcccctattgagctgcccttggtcgtcaattgtataacaactttctgcgtgaccatcaaaaaat

SEQ ID NO: 5608 - DNA, 2856 bp, Zea Mays
cttgcttctgttctctcgcgtcgttctcccgtagtcccgtgccctcgcgtgcgctctatctgtttctggtggcgacgacttggcggtccccgctgccgccgtgcccaggcctctacttcgggaccttcaccggcgacgagcacccatcgggttgcttcgcaaaacttccaacatccaggatacaattaattacgattccttcaactttatctcgatttataggaggttgcacagagcccatccaacagggtgtctcagacatactgatggatggggtgcccaatatccttgagaaatcatcacatgaatgcatgtactcttggtacttcaccagggaagaactagagaaattttctccatcaaggaaagatggtattactgaaaacaaggaatcagaaattcggcatttatattgttcatttatccgggatgttggcatcaggctgaagctacctcagatgacactagcaacagcagtcatgctttgccatcgcttctatttacaccagtcccttgccaaaaatggatggcaggtgagagattatattgttgtgccagtgatggttgctgatgtctatgaaaagcgacaagagtgcagagtttcattgccaagcatttgttggaaatatgttctccaccatgtctaacttaacattacagaaacttaagcaagtttgacatactttgacggatcatcttgtaaattacatattcaccaacagttgcaacagtatgtgtatttctggcgtcgaaagttgaagatactccttgtcccctggaccatgtagttagagtggcctatgaaacaatgtataggcgggacactgctgcggctcaaaggatccgtcagaaggatgtttttgagaagcagaaagcgctcattttgatcggagagagattgcttcttacaactattcgatttgatttcaacattcagcatccttatagaccacttcttgatgccatgcaaaatcttggcatcaatcaaaaagaagtgaaacaagtagcatggaactttgtgaatgactggcttaaaacaacattgtgtctacagtataaaccccagtacatagctgctggttccctttatctggctgcaaagcttcacaatatcaagcttcccttgcatggagcgcatgtttggtggcaccaatttgatgttgcaccaaagcctctggaagccgtcattcatcaaatgatggagcttgcggctttgaaaaagttgatgcctgctcgacccaatccggttaagctgaaggaaactttatgtgaagctaaactgagcttatctaatagcccagactctgtgttgaatcaatcaaacttgttaataagcagctcaagtcctgatattggcgagcccagtgacaaagtgcaggtggattcctgccaatacttgataagcagtcacatgggtgattgtagggtctcaggtcctgacagcagttcgttgaatacttgtgctaatagaaatgtctcttgtaaagcacatgatgaagagagcttggatcaggccttaataatcaaacatgacagtgggatgatgccttctagtaatcagacatcattatatgctactgtaggcactgagggcagtgctgaactgaagcaggatgtaagccattgtaatgacttcaatatcagagtcaatgacgaaagcttgaaccaggtgttaagaaatcagcatggtgatgctatcccattacctgacgtggtatcgctggatgccaaggtggacaaggaaaggagttggtgtgtggaaccattaattgcaaactctgattgctgtactgacagtgttaatgtggatagcttgtgcactgatcagagattggctgatgctccttcaggccccacagctgatgcaccatccatgctggccgaggaggaatcttatccttttagtgcaaagcttgaaaatattgatgttgccaggatcaaaggtttattgatgaagaggaagagccggagagagatccaagaccgagccattgcttcagatggtctaagtgaagaagactggatcgagagggagcttgaatctgggattgttacaaaccaagaagccaattgtgctgccatctcagacgagctaagtgacgaagcctggattgagagagaactcgagtcagggattgtggtcggaccaagaaatgagcaagcgatcacttttgatggtttgagtgaagatgattggatcgagagagagctggagtctgggatcatcgttgagccagcacctgctaccaagaagcggaagctggagtcaagctgttagctctgcattcgaaggccagattccaagcaggtgaataataacagatggttgcgagtaggaccacatcgaagccaagagatacatgtcgcacagatgggaggatcaatattatcctttttttatttctttataaccaaacaccttggagtactttgacacaaggggtgtgttcacagtgggatctccccagtttcttgaatgcagaaccgtatccgttgtatttgttccttcttgtcgtgagtgtaaatctagcgtgtccgaagttcggttttagattgtaggtgtaactgtagcagggattatctggtgttaagcccaacgagaaaatgattcagtgtaactgttactgtaaggaaagaagttattcagtgtagatttatggttaacacaagaagaggcaattactggtgtatgatgtttataaattgatgatgaatgttactggcagctcaaaagaaaagacagttactggtaactaaagaaaagtacgtttaacggagctgatcacattcaatcccctattgagctgcccttggtcgtcaattgtataacaactttctgcgtgaccatcaaaaaat

SEQ ID NO: 5609 - DNA, 699 bp, Zea Mays
accggcaccatgtctcagcaagagaagcaaacagttattccatcaagtgtcgcctctgcctctgtatcaaatgcagcagcaccacaagctattatcaactcagatgatgtagcttgggctcattgtttttgcccagatgcaaacaagaagcattggctgaagtgcaagtactgtgacaagctatgcaaagctgggattacaagaattaagtggcaccttgctgtccttgtggtgaagcaaaagccaacaaaaggttctagtagccttagctgtagaacagtggtacgtggtggcactattgacagattttataaaccttctactattgaagaatttgttcaaatgatgcataaaggaattaaccttagcaacaaggttcaaacaacattgtcaactcagaaaagagaagagagaagggataaggcttgtgagtacatatgtcagtttttctatgaagctagtattgcacacaacacagtcacccttcctagctttgcacttatgcttgaggccattgggcaatttggtaaaggtttgagagggcctagtccttatgagatgagtggaccattcttgcagaaaaggaaacaaaaggtattggatggtttcaagaaccacaaggaatcatgggagcaaacaggatgtacaatcatgacagatgcatggacagataggaagggtaggggagtgattttttag

SEQ ID NO: 5610 - DNA, 2925 bp, Zea Mays
gtccgctcgtcaatcgtcctccttcgggcttcggcacagcaagcaccacccccttcgccaccgccaccatcaccgctaccgctacggcttcccacctcaaaaccctaaccctaaaccccctccgcgcgggagccctcgcccatggagaaccccaggccccaggccccagcactcacccctcccatggccccgctccccgtccccatccacccgccaatcgccccaatccccgtccctccgccccgcgtgcccgcccccgccccagccgccgccgcttccatggcctccacacccactccctccactggggacggaggcgaggccgagtacgaagtctccgacgaccaccgcgccgcgcgggagcgccacgagcgcgcggtgcaggagctcctccagcggcgccgcgcctacgccatggccgtacccaccaacgactccgctgtgcgggcccgcctccgccgcctcggcgagcccatcacgctattcggcgagcgcgagatggagcgccgcgaccgcctccgagccctcatggtccggctcgaggccgatggccaggtcgaccgtctcctccgcgcgcaggaggacgaccaggccgcgcgcatcggcgaggaggaggaggaggagcagatcgagtaccccttcttcaccgagggctcgcaggagcttctcaaggcgcgccttgacattgcacggtactcgctgccccgtgccaaggccaggatcgagagggccaagcgacgccacgaggaccctgatgaggatccagaggcggaggccgaactcgtcgtcaagcaggccggggagtttgtgctcgagtgcagtgagattggagatgatcgcccgctcactggctgttccttctctcgtgatgcatcgatgctcgccacaagtgttttttttttgttgttgaagggaagatctggtgcagcggcgagagctatctcattgagtcatcaagtcgtgggtgccaagcagtttctctgcatttgtgggggaaggaggattgtcacggtttatccctttcccagaccccactcatgtgggagcctccaacattgggtttgcccttgctgtaatttttttgttggaagtccatatcagtggcgagagctatctcattgagtcagcaagtcgtgggtccaaagcagtttctctgcatttgcggggaaatgattgcctcggtttatccttttcccagaccccactcatgtgggagcctccaacattggtcctgcttgagcttaattgagattagtttctcaccgcaagagaactgcaactatatctgaagtcactgggctgctaggaagccaggatcaggtattcaggtttgcttttcttctagtggatagagaatgaccaacatattatcaatccaaaattcccgtttggaacttgtatccctacccaatgcacataattctccctttttaacaaaccttggtagaacataaagctgaagttagacatctgtactgtcccccgtggtattgagtattatcaaaataacagcaataagaccatgttcagcgatatttaccttgagccgttaattgaaatcagttagcagttcgtatgcacagaaataagattgttaactgaagttaaacaacttatctatgttaccagtgtcatgtgcaactagttgcttattaaatgttatgatgtctatcatatatttacatttgttttgagctttaacatggtagattatgttctcgtactcttgcttccttttcaggaaataaccatttgcttatccacattgtgtagttcctggagtggaatagtcaaagtatggagcatgccacaaataactaaggttgcaaccttgaaaggtcacacagaacgtgcaactgatgttgtcttctctcctgctgatgactgcttagcaacagcttcagctgatagaactgcaaaattatggaaaccagatgggtcacttttgatgtcttttgatggccaccttgatcgtcttgctcgccttgcttttcatccatctggaaagtaccttggtacagctagctttgacaagacttggagattgtgggacatcaatactggcaaggaactgctactccaagaggggcacagcagaagtgtatatggagttagctttcaccctgatggttctttggcagcatcttgtggtcttgatgcatatgctcgagtatgggatctgagatctggaagattgttctttacactcaagggccatgtgaaacctgtcctaggagtcagcttctctcctaatggttatctggttgcaactggaagtgaagacaatttctgtcggatatgggatttgaggaaaaggcaaatgttgtattctattccagctcataagagtattatttcacatgtgaaatttgaaccccaagaagggtattatttagcgacttcttcctatgacaccaaagcagccctgtggtcagctcgtgattacaaaccaatcaaaagtttggtgggccatgagtcgaaggttactagtttggatattagtggagatggacagaagattgtgactgtgtcgcttgatcgtacgataaaaatttggtcatgcagaagtagcacacaagataatgagatggaactggattgagacaattgggttcattgttgccagccccgcttctctattcatcagctagaagtagatattctccctttttgctgatcagacattccaatcagtcattggtgctattgcacggaactatttcatagcatgtataaacccttggcttgagaaatatgttctgcacttactttgctgatattccttgtcatatactagggctagtttggctaccccattttttaagggattttcatttttctaacgacccgtttggatcattagaatttaacaatagtaattttggcatatattaattaagctaattcagttttatacaaaatata

SEQ ID NO: 5611 - DNA, 1267 bp, Zea Mays
ctcggctgctcctcaggtcctccattccttccaaaataaaagcgggagcgctgagccagacggcggcccactcgttctcgctctccctccccagtcaccaccatcacgagctcgcgtgtgcccctcgcgctccgccgccaccaccttctactaccataccgctgcgtcgccgcccggaccacgcccgccaccaaggcctctcctccgcctcgtccccatcacgggcgcggcccctcgacctcggtggccggccggttcgacaccgcaccgtgaccctcggctacggaggaagaagacggagtggtggactgggccatagaaccatgtcaagttccataatttcaacagtggccacagagttgtcggtggctgagaagagcagggggaataagaggtgtctggatcaaactgcccatcaccctttccaaccttattccaccagttgtagaggaaggtttctggtaccatcatgcagaggaaacttacttgatgcttgcgtactggcttccaaatacaacacatacactaccagtaaacgcaacccaccgtgttagtgttggagcttttataatgaatgacaaaagagaggtcttggctgtacaagaaaagagtggtgtacttcgaggcctaggtgtgtggaaatttccaactggcgtagtagaaccgggggaagatattaacgttggagccgtccgagaagtaaaagaagagacagggattgatgcagaatttgttgaagtgctggccttcaggcagagccacaaatccttttttgataaatcagatctatttttcgtgtgcctgctacgacccctttcatacgacattacgaagcaagactcggaaatagaggcatgccagtggatgccagtagaggaatttgcagcacaaccatttgtccagaaacatgagcttgtgaagtacatcctcgaagtcggcctggctaaagttgacaaggaatatgcaggcttttcgccaatctccataaaatcggcatttacagacaaattgtccttattttacatgaaccggagggatctggacagggcctcagggtagagtatatatgtaatgacacgggcaattcaggatagttaaattttcactttggtgtgtgacagcgggctaaatcttgttagacctagggtctgtttggttgggctgtggctgtcaaaaaagttgctgtgggctgtgagctgtggaaaaagctgctgtaggctgtgagccattaaaaagctaaaaatcgtttggtagaaaccactaaaaa

SEQ ID NO: 5612 - DNA, 1862 bp, Zea Mays
gtcccaccaacggcgtccaagccctagcctaacgatacttgcttcagcccagggctttcctccgaatccccttctcgtccaggcagttgttgcaaaaatcccgcctccctgattgcggttgttgcaaaaatcccgctacgctagtcgctaggctttcctcagcagcacttccgcgcttcgactcctggcagattggattgggtcgctgcttccaccagcaatccaattccggagatgactaccactcagttcgccatggttgaggagctggcctcgctcatcaaggacaacctgcacagcaagcacctgatcctctccaccgaggaagccctcatcgcagccctccagcagctgcactgccgcgacggcgaccgtgaagaggacgacgatgcggcggatacgatagagcttcagcctgctggggcctaccaccgccttctcttgcatcgccttgctgaaatctatgggttcgctcatgaatcggttggtgaaggcgaggatcgacatttagtcctccagtgctgccctgaaacagccatattttcaaaaacctcagaaggcagatgttgtcaaagatgtttctgttaaaaactcacatctgaaagataatacagacttgaaacctctgaagcagccagcagtacttccagcggcgtcattgaaggagagggaagctgcttatcgagctgctcgtgaacgaatcttctctggggatggtgccaagggaaatgatagatcatatgtgaaatgtagacaggttcctgtcgttgcaaaacggatgattgcccatgcactcggtcaaaaggttcaaaataccacagagacagccgcctccaaagaaagcaaagggaaacaactgtcgaatgggaaaactattccgacacatagcaggaacaacttctgcccagttacaccagataacatagaagcagttctaatggggatgccaagctcagctggtagtaactcgtatcaaactccaccaagccaaaggtgccacgcaactaatactagagctgttactgctgaaagcttgaagaaagagcagactggagcagctaagagaatgtttgcgcatgcactggggctgtctgcagctcgaggaagttgtggtacgctgcccaaaccgaagtaaagatctggagtcgagaacgcggataagtgaagaaggttggctgttgccgatgcaaggtccgactgagcttcatgtcctatcatatgtgagccatgggaatggaatgagcctgcaatggttggtgccatctactgatctacctctgcgaaacacgttttttgtgatgtgctagtagatgaaagggtttgttggttggatgttaattgttgggacccagagaggatctggtagccctggttcgaaacgcaacctcagtcggtgagagagcttgctggaatgctggatacgcatggacatggcatgccaagccaagtggatgttcttcaccagagtggaagcaaaatgatccttcacatgctctaggttgctgcaatgctgcatatgtttactctagcatgttgttaggctgtctccagcaaaacttgtatacaggcgtttaaaacactttttatactgtagacatgaggctttccatgcttacgtaagcatgaggcttttaataagtgttaattagagctccagcctcacgaattttgtagctgtctgtctctagctatagaaacttaagctgcgggtaggttgaaggcatttaattgatcctttctttttcttattttggattggattaattttaaggtttagtccatttcaattatcatgtgaacctgatgtactaactaaaacaggctcctgtttatctgttcatagacaacttctttgttgtttt

SEQ ID NO: 5613 - DNA, 3570 bp, Zea Mays
atgccccccgcctccatagtccctgtcatcggcgacctcagatccaacaggttggtctgcttgcgccgtgatcgcggaagctaccgcgccttcgtctccgtggatgaggtcctggatttgtgtgtcactggcgcggaatatgagggatcgagggcggcgcaggcggcgagctcgtgggcggaacagactggtgagagcaagaggatggatcaggagcttgagccccaggtacaaagactaacatcagcttctactgtactaaggagggtgttggataatccagcactccaggactatcaagagaataatggatttggagacttgaactgtccggccgcgtgtaccgcgtcaccttcaccaaccggctcaacggggccgcaggcgcggtgccgtgaagcagatacggaccgccgggaaactgtacctccacaagtaaaatatttatttagccctctgtctttgtttttttccatattctaagtttatacctaataacacatttgcacatacttgatgcatttgtctatggtattttctttttataaagtgaatcatcttgacaatgaaatagtgcatttatcagttttgtaatgggacatcactcctcaagtatccagaaggtaaactagatgtatttctcatacatcaattgggcaagtctgagagatagctgtcccaatttgtccagaaatttatttacctgtacctccacaagtaaaatatgtatttagccctctatctttgtttttttccatattctaagtttatacccgatgtataaatctacagatactttcttacctttgtttagttacgataaactttatccatcaattattttgtatacttttctaacctatgtaaatttagaggttaatttggactgtttaatatttaaatgttgtgggtggattaaggggttatttagtgttttaagtacaaacagaggaggacaattcatgcacatactttagctttttattgcaatgatagataatttatatgaagtttaggacttattttggatataatatgtcagaatgacagagattcacctgataggcgagcatgagttctcgctaaaatgtagcattgagtattgactgcagttcagtaagtaaattaaagcatgatagtattgttgatccagtgaacccttcatcctatattctctttgagctaatcttcttgcaccttgatgtaaaccttgacatatctgatggttctgctcagtgcttgtgtcttagattattgcactgacgtaattggaaaatgagtaatctgccaggaagcaacatattgtgttttactgaagtacagttagtcctgctgtcgcacaactttgctctgatgtttgaaagcataaagtatgttttcctaccatgggagaggtccaactgatattgcatctggatcttttgtgaaacatgatagcacttagcaacgctaggcagaagatgcacttttgaaatgtagtgttgcaccgttgctgtcgcaatcgttagttacacatatgttctctatatgctgtcagatatccatatctcttaatggtcgtacctaccaatttgattctgataaaaatcaatcaatctattagttacagaacaagcagagaactcactgtacacggtctcttcttgtactgaactggtattcaacttcattcaaagagttctggtaaagtataaattgtgctagaacttttgagctccttaattttcatgtagtatttttgttacttgatttttcgcctatcttgcaatagcaactttaacactgaaaaagattgcttatggccactggcaagtatgaattgatcaaattctcaaaacatatcatttgctgatttgatgaagcacgattcttaccttatttgtatctaatttgttacattcactgtttacagcttctcttgtaacattggatataatgacgctgctacatgactattattttgacatcataacctacatataaagattagagactaatctgttttttttctgaactaaggaaatgaacttccatcagacttgatagacacactactaaagtggatcccaagcaatgatgaggagcttaggcttcgactgtcctcccgtagcaccgccacaccgcacgcgtccgtggcggtcgaacatgcattttggagagaccaacttgaatgtgcggagcagtcgatcacacaatattttcataatgttgaatggaagcgataactaaatcaaggatgttctatttatatcggtctcagttgcatggaagcaataactgaatcaagaatgctctatttatttcgatctcagccattttggaggacgaacgagcaccggggagagtccaggaggaggcagatactgctgggacatgtccaagccagtggagatgcagtggagatggagatcaacattggcatggagaagctgtgaaacccaccgcagcagaaccccacccagaggaagtggcctcgcgtctcgtaagagtggcagacagtgatcggcgggttctttgcgacacgggctgctcttcgaccatgagcttcttgttactattcccccgcgacatttgtttggcatttctgttaacgattttctttgtttatattacactaaagtcaaagcctgaagccacgtcggcaactggatctaccattatgacataagcagaaatctaaataacacaaaaaaatcaggattactatatatttgtgcacaaagccacgaagaattgcatgaattgtggacaaagctgaaattcaaggatgctgaaagcctgcagcagacttctgacatggagagtgtgaatcttctccaaagtggggggccatgagatcaatgttgcctcggatcaatcacaaacaaggttgtctggatacacttcagttccatatacaagcttccctgcccaggcagagctaactgttgtaggttgcagcaaaggattggatgcaaaagggcgctggacacgtgctcgtgtggcccaagtgagcatgctaatcagccccttttggttccttgcacagcttacgttcaatctgtctctaagatacaccactgtcacggtaagtgttactaagaactgaatgatacttccatattttaaagccaaacctggcccaggcaccacccaggcaccagaggcctccaaacggtcaaggatacaccactgtcacggtcaagtcctgcagaagctgaaactgatcatggataagactttgccttgtgtcacaatgggtgcatttgctggtggtccttggatcaggttgctcatgggtggtgaatgatctgacgacttcagaagaggatagatctgagattacctttcatgcatgtcaaggaagttaagtagctgatgccatcaaagaaatggagaaacgtcaggtgaaccgcgagcagaattccgtggcgcatttgttagcgcagttagttaggactctgttcatacagctgttcgattaagccaaatacctgatttagttttatattggttgttgtcaaagaatttgtgaaatattgaggttgataatatatgtggcgttcgtttttatgtaatcattgttcactaata

SEQ ID NO: 5614 - DNA, 357 bp, Zea Mays
ttggcgtctgtgtcatggagaagaaggcgttctcttctccaatggagcagattctcgagcggctccgcgcgtttggagaattcgagattataatatttggagataaagttattctcgacgatcctattgagatgtatgtaatgagaactcaggaattgggaatagcatcttacaccattttgctttcagttggccaaactgtgattgcttgattgccttctattcctctggttttcctctgcaaaaggttcaagcatatgctgctttgagaaggtatattttttattctctatttctttatatatctctttcaaatggtaactattcttgtaagcacgtctccattttcttaataat

SEQ ID NO: 5615 - DNA, 1130 bp, Zea Mays
atgggatctaggagctccgtgcgcccccgccatgccgcatgcctccaccgcgccagtcgtgccaccgctagaaccacacatgaggatctccttgctcgccagcggatctctgccacgcacgtcgtgacctccgtcgcggcctcgcctcctgctcaaccccaccgcgcgccaccgcgatgggatctgggagcagcaaggccaccgcgatgggatctgggaggaggcaagcagtcctccatcttcggcaacgagctcggaagactagcaaatgttggtgatttagcagtcaaaagagtaaacccagaagcggggatcgtggagctaacaaatcatgtgaactactatgtgcaatcacacatacagggcaaccacctcaatgattggacgaagcagcagctcgacgaccatgggttccacatcttctacctccgccccttcctcctgcgcgtccgcgtcggttactgcctgactgatttcttttgtttactcactggaacttcccttaaacatccaactggagcaaagcgtcctgaatatagacagattaagtaccaagaaaaatacatgaattcaaaaataaaacctgctggcaaatacgaaatccctgaattagagttggtgaatccaatcaccttccctggttcaagagcaatagaagctcgagccattcgtgcaggtgcctccaatctgcagcaggctgtggaatcaagtgtatctgtgaattcacatctccttcatgcttcaaatgctggttttgtagacaaagggaagagtgtatctgtgaattcgcatctccttcatgcttcaaatgtctatctatttgttcgcctgttaattcgagatggatttgagattgcgttctcttctccaatggagcagattctcgagcggctccgcgcgtttggagaattcgagattataatatttggagataaagttattctcgacgatcctattgagatttggccaaactgtgattgcttgattgccttctattcctctggttttcctctgcaaaaggttcaagcatatgctgctttgagaaggtatattttttattctctatttctttatatatctctttcaaatggtaactattcttgtaagcacgtctccattttcttaataat

SEQ ID NO: 5616 - DNA, 891 bp, Zea Mays
ctacagattgcttttagtcatttacccaatggttcatatggaatacccaagtatctgctgcttcttgatgataactaaagctttgttggatgtgtacacaataaagagagaaattggcacactagatggaattaaacttggtttggttggtgaccttgctaatgggaggacagttcgttctctggcttacttgattgctaagtaccagaacattaagatatactttgtatctcctgatgttgttaaaatgaaggatgatatcaagaactacttaaattccaaaggtgttgaatgggaagaaagttcagatttgttggaggtggcatccaagtgtgatgttatttatcaaacacgtattcaaaaagaaagatttggtgagaggattgacctttatgaagctgctcgtggcaagtacatcgtggataaaaaggtcttagatgtgctgccaaaacatgctgtcatcatgcatccccttccaaggcttgatgagatcacagtagaagttgatagtgatcaaagagctgcatattttaggcaggctaagaatggcctctacataaggatggcattgctcaaacttctgcttgttggtcactgacatttcggctagtgctttagcttgtgctgcgtcaagggattagaaggtaataaaagtctgcatccatgcgaatgtgcagcgatgtttggcagagtttggtgttctcatgtgctgtgagaacatggaacataattaattttgcctgcacaaaaatcatttgcccgattcagttgtgatgatgctctaatacatttttagcaagcgtgagccgtacatatttagtattggcagtaaaaaaaccctgcatgactatttggtaggataatatcgccgagtaggagtgtttgaattag

SEQ ID NO: 5617 - DNA, 1421 bp, Zea Mays
aaataaataaatactagatgagtagagagcaagcggagaacaaggggagcgagacgccgccttgccaagtgtaagcaaccgaggggagaacgagggtgcggccgtggcttgtggcgttcgatcaggataaaaaggtagctagtattccagaggtgatttctcctctcctgatcgacagagggcaaatctggttcgtgaccccccagtatcatatcagagagggccacggttttgcttatcaatgtgttaggagttaggaccaagtactggagctatttcgtggttccgatggagtctaagtgtgtgaacgaccaggacaccttgatcgacctggagagtggcaacggcactgcagtgatcaaccatagcaacgacctggagagtggttgcgtgtgtgcgtgcgccaacggatgtccgagggatgacaggaacaaccagcacatggactgctcttcaccggcttcggacgccgttgctagaagtggagacgacaggaagtccgagggggaggagaagctgggcctgggccttctggacagctcgggaggggacaaggcgaagaagaagcggtcgaagaagaagccgccgcggccgccgaggccgctgacgcctacgccgctggacgtctctgaccagaagctcctcaacgagctgagcgagcttgccgtgctgaagcgggcgagggtcgagcggatgaaggccttgaagaagatgaagaacgccaagcaagggttctcgggtggcaatctgtgccccctgatcgtcaccgttatcttctgcgtcgtcattctctggcaaggtttcttctcgggacacgggccggcggtgagcttccatggatcaccggaatcgtcgatcagggggacgcgcagcagtctgatctccatcaggttctacaagaaccattccaacacgaggccaccaccattcagcgagaccactgcagctcccgataacgtagtagagaccggtccgaggctcaggaatcgtaaccaagcgagaaggctactagctcggtgacccgatgattatggcggcggccacacctcaaatgaaagaagctcgccacattttgaagcgtcgccggcgcttcgcttcgtcctcctcgaggcgccggccccacccccccgctccttggctgctgctccttggctgctgtaaaaaacgagtggactcctagtgtgtcgtgcgctgggtagtgaatctgtgttggccatggctctagcgaagcgtagagagcaacgaaagcaagcgagcgagcaagcaagcaagctgtctgtccgtatgtgtctggcatgttacagtaataaaaggtttgcgcgcaataaatcagagagctgatctgaatctgacccaccccgttgcagtgctgtgctgctgcacttgctcatcgttactgatttgctgaaatgtggcgtgtt

SEQ ID NO: 5618 - DNA, 2374 bp, Zea Mays
aatgccacgcgcggctctctctcacctgtctcattctcacccacgcgcttctctctctcaccagcaggccacgccgccgctgcaccaccgctctccggatcatcggctgtccccctcctcctcctcctcgcccactcaccggccatccctgctgcggtgccgcgcgttcaagcaggaggccgacgacggcgacggcgacccgactgaggccgacgcgcggaagcgcaggaagggcccgatgtacaagctcaaggcggcgatccagggcctcgcgggatctcgctccgccgccgcggaggtgtatgggggagagtaccagttccagcgcgccgtcgagaatttgtgcgagccaaggttccccaatccactcacgcgcgcgcatcgctgtggtttcctgtgttgctttccaccctcgcgcgctcttcttcttcatggagccatggcaggaagcggcaacaggagatttggccgggatatggtgtctagcagcacacatttctcccaatggcagatggtctgggttggagaccacgttcctggcggcagagtcgatctgcaatgtggaggtccaatctggccaccgatgtcagctcgctccggagccaattccgattccctagcagtgacgacgttcagatgcagcttcagatgcagcgacgacctctctctccatccatggatctctaggcaactgggaaccaggcatcaaaatgaagggaaccaggaatcgaaacggccccgagaatcccaaagcacgagaaggggaacaagggaactaggcatcgtgaagagagcccggggtgatgaattgttacggttcatggacggagcaagcaaggagcctctccgcaaggtaaacactaacacgcgattcctcttcaatccccggtcgtttcccgagatctggtgttataacccttgtagcttcgactcctagcttcagttggggggcaataacggattcggaaattttgggctgaaagttgttccttgtgttgttgaggtgctggaggggagtggttaattgtggtgtagcgctatggtgtcaaaaggtggatggagtccgtgacattttctcattgatttattttagagctgcttttttgtgtgccataattaggcttgcccaaccggtgcaggtgacttatttagcatgctgaactgtaggtagtattctagtttgtggccgtcgtgcaagtacatatgtgttggctttcagttcaaccgtctttacagtattcggaaattgcttaaaattcagtgttgatcatagaggcagcacaaatgtttcctattcagagctggtaatggtatggtcattactctgaatcatagtatcagacaatggctggcatagtatttatccaccatgaaaacacaattagcttgcaggtctaaatttggcatcctctacatgaactgaaaccagttaacctcttacgaagtaagaatccttggccttgaacaaatcaaagctaccatgcttgatggaaccaaacatttcctcaccagtaacacatttgttgaaacaatactttcattacactccaggtacagccgtacagtgttcagcttaacctcatgatttcttactactgcaggtctaacatttacattggtaaccttttttttatctttccagcactgtcggtccagtcactattcccttatctatacttcatgatatcagggacttgaaagtggcgaaagaggagcaagacattgggttttatgctggttttgttggggctacctatttccttggaagggccatcagcgccatgccatggggcatgttcgctgacaagtatggaaggaagccatgcatcgtgatcagcatcctctcagtgattgtgttcaacacactgtttggacttagcacaacttactggatggcaattgtgactaggggattacttgggttgctatgtggtatacttggacccatcaaggcttatgcttcagaagtctgcaggaaagagcaccaagctctgggaatctctcttgttacatcttcacgagccatagctcttgttattgggcctgctattggaggcttccttgcacaggattccggctctcatcaagtgactcctttccctcacattgactttgcggacagatgtctcaattctagtggtggagctacgaacaacaatccgatgtcctgatcgagagcgatggagctaatgtttgaacttgtgtgtttgaacttgtgaactaaaaatgtgaactatggatgtgaacttgtgtgaatatgtgaacttatttatttagacatatgtgaatttgtgaacttatatatttggacttgtgtgaatttgtgatatgaacatatatcaatgtgtttgaaatctgtattgtatgtgatata

SEQ ID NO: 5619 - DNA, 811 bp, Zea Mays
gaaagatccaaggcgtccccgtcgcctagtcttctggcgccacatatttcttggggcataatgtgggagatggcaaaactatggatgaaaggatacaaggttatcatcctggacatcccgctgttgtttgagaccaagatagatcgatggacaaatccagtaactgtggtctgggttaacccagaaacccagattcagaggttgatgtcaagagacgggtgttctgaggaacaagctcagaacagggtcaacgcacaacttgcgttggactggaagaggtcggaagccgacatagtgatcaacaactctggatcactggatgacaccagactgcagttccaggatgtcttgaggaaagtttctgagccattaacatggaaggaacgcttgagatcccgagatggcctgatctccgttgtcgtgtgtacggcagtgggcgtattgcttgctcggaagaatctactatgattctgataaggttcaggaagctaagaacagtgatatgtcgttttagagtagaggacgtacacaattaagcttgtctggtgcctgtgcctgacaaggaaattgaacggctgtatgtggagctttgattgatgaaataatttttttgtttgacgtattgttttttgcaatagaaattgccacagtaacacaatgcatatataggttggctgaagttacctgcccagtgtaatatttttaaagcatgtttgtaacaggaatgacagaggggcgggtattcgggttagggccccgaaatgctgtgtgtttgggtggtcggggtttcagtccccacccgtttgcgggc

SEQ ID NO: 5620 - DNA, 990 bp, Zea Mays
aaaaaaagccccgacggacccgctcccttcaactaacccatcgctgccgccgagcgccttcgactgcggcacctccagcgagaggggggaacccgaggagatgaggctggtcggcctgacgggcgggatcgcgtccgggaagagcactgtctccaacctattcaaggacgccggcgtccccgtcgtcgatgcagacatcgttgctcggtcttctggcgccacatatttcttggggcataatgtgggagatggcaaaactatggatgaaaggatacaaggttatcatcctggacatcccgctgttgtttgagaccaagatagatcgatggacaaatccagtaactgtggtctgggttaacccagaaacccagattcagaggttgatgtcaagagacgggtgttctgaggaacaagctcagaacagggtcaacgcacaacttgcgttggactggaagaggtcggaagccgacatagtgatcaacaactctggatcactggatgacaccagactgcagttccaggatgtcttgaggaaagtttctgagccattaacatggaaggaacgcttgagatcccgagatggcctgatctccgttgtcgtgtgtacggcagtgggcgtattgcttgctcggaagaatctactatgattctgataaggttcaggaagctaagaacagtgatatgtcgttttagagtagaggacgtacacaattaagcttgtctggtgcctgtgcctgacaaggaaattgaacggctgtatgtggagctttgattgatgaaataatttttttgtttgacgtattgttttttgcaatagaaattgccacagtaacacaatgcatatataggttggctgaagttacctgcccagtgtaatatttttaaagcatgtttgtaacaggaatgacagaggggcgggtattcgggttagggccccgaaatgctgtgtgtttgggtggtcggggtttcagtccccacccgtttgcgggc

SEQ ID NO: 5621 - DNA, 1074 bp, Zea Mays
gtacgatcgttggtgttgcccatccaaatttctagactagaggaccttggcaaacgcccaaacagacttgactgtgtagaaccactgaaccagcgtcgtcttctcgagttgaagtgtgctgcctgttcacccctgcgtctttccctcccctgttacgattatttgcctattgggtgaccgccgacgccgccccacgccaggtgctcaggtcttcggcgggccctttgctggcgaggagcaccaaccctatacggaggatattttggttgcgcataacaagttggatagttctgggttttcgctctgaacaaaatggacaatgctcagagtgagaaccgaattgataccaagcaagatgatgatgtgcgccagatcaaacatgatgatgaggaggctcgccttgaagaatataaaaagatcattgatcaaaagacttccctccgccggagcaacctaaaccctgaaaggcctgatgcaaactacctgagaaccctggactccagtatcaagcgaaatacaacagttataaagaagttgaagacaataaatgatgagcagaaggatgggctaatggatgagttaaaaagtgtgaatttgagcaaatttgtcagcgaagcagtttcttatatttgtgaggccaaacttcgctctgctgatatacaagctgctgttcaggtttgctcactccttcatcaaagatacaaggacttctctccttgtcttatacaaggtctactgaaggtcttctttccgggaaaatctgtagatgacttggatgcagataaaaattcgagagccatgaagaagagaagcacactgaaacttttgattgaactgtattttgttggaattgtcgaagatgctagcatatttgtaaatattataaaagatcttacatcagcggaacatttgaaggaccgtgaaggaactcaaaccaacttgtctcttctatctacctttgctcgtcaagggaagttttttttagggctacaacctcatggtcaagaagcttatgatgagatatgtcttggtcatttggtggaattcctgttaattcatttactatgcatagca

SEQ ID NO: 5622 - DNA, 1209 bp, Zea Mays
gggcgcgcgcgaggaagaagttaggttagaaggactctccaaaagcgccgcttgagtaaaaaagatctcgccccaaggggtacgacgactacgatcacacaatataagcatctctctgctgctcaaagcaacccaggccggactcccgagggagcttttttagagcaagagaggacggagaggtagagagagaagggggacggaacaagcagctagctagcagggaagatgggtcgcggcaaggtggagctgaagcggatcgagaacaagatcagccggcaggtgacgttcgccaagcgcaggaacgggctgctcaagaaggcgtacgagctgtcgctgctgtgcgacgccgaggtcgcgctcatcatattctccggccgcggccgcctcttcgagttctccagctcctcatgcatgtacaaaacactcgagagataccgcagctccaactacagcacacaggaagtaaaagctccactggagagtgaaattaactaccaggactacttgaagttgaggaccagagttgattttctccagactacacaaagaaacatccttggcgaagatctgggcccactcagcatgaaggagctcgagcagctggagaaccagatagaggtatccctgaagcatatcaggtcaagaaagatgctactcgaccagctctttgatctcaaaagcaaggaacaagagttgcaggatctcaacaaagacctaaggaaaaagctgcaagaaacaagtccgcagaatgtgatccacgacgtctcctgggaggaaggcgggcacagtgggagtagtgttcttggtccgttccagggactccttcagcaccatggcaatgatccttccctgcagacacggtaccatcagcaggcctacatggaccagctgaacgaggacatggcggaccctgacgagcacggtcggtctggatggatatgagatgctccggtccgatgccccccaaataatgtcgatgcatgcatatagtttcctgcggtatgcggaactatatatgtgttgaaactgcaccaacgattagctgcctgattgtaatggttaccttaagaactccagtgtattgtattgttgtgtgctgtgctgtgttgtcagaagcttgcaactttgtatatgtacatgtatggtattctgttagtttcttggagctgcgcaaaaccgtcttcatttctgggcttcatttctata

SEQ ID NO: 5623 - DNA, 2389 bp, Zea Mays
gcttaaagataaaaagggggtcatccgccttacttcgccttaccgccttaacaactatggccgaagcataggtctaaggcccggtcccggttgttctcacatgggctacaatgttgttgtgtatgggtggggcagagttcgggggttttcttgacctgcgtgaaagaaggtcctcttcttaatatactcgggagctgtcatatcccctgcagttatcctcgtacagagagcactgcatatccgtcatcatttgattttcgaggtgcacttgctgcactattaaataatcctctatggtccaatgatgtccggaaattactggatgctggttttgttaagcctcgtcaaggtcatgatgctggggaccatcctccaatcactccaatgaggtcagcaacagaagcatctttgggaactgatgcttggaggctgtaccaatacatatgccagcacttcattggaactgttagtcctgattgtagatatacaaggactgccattgagttcacttcaggtggtgaaacattccactgtgttgggtatcgagtcacttctaaaggatttacatctatcatgccatggctggctgtcagcgagaacagtcttcctgcatttaaaaagggagactctgttagtattcataaggctgacatatatgagggaagcactacaccacctgattacctcactgaaagtgaattgatttccctcatggagaagaatggcataggtacagatgcatcaattcctgtacatataaacaacatttgtgaacgtaattatgttcaggtgaattctggaagaaggttagtaccaacacccctgggaactacgttgataagagggtatcagtgtattgatgctgatctctgcttgccagatatcagaagctttattgagcaacagattactctaattgcaaaaggaaaagctgatcatcttcgagttgttcaacatgtcattcagcaatttatgaaaaagtactcttactttgtgaaaaagattgaaaacatggatgctctgttcgaggcacagttttcacctttggcagactctgggcgcctactaagcaagtgtggaaaatgtggtcggtatatgaagtacatttccactcagccaatgaggttgtactgtataacttgtgaggatgtctattatcttcctcagaacggttcaattaagctttacaaggaaatcgtatgccctcttgatggttttgagttgcttttgttctcgatggtgggacctgatgcaaaatctttcccactgtgccctttttgctataattgtcctccatttgaaggcatcgacaaactctttggtgctctcaagctcgatgacaccggcaaggttgggaaaggggccggcatgccatgcttcctttgtcctcacccgacatgcaagcaatctatgatcactcagggagtttgtgcttgtcctgagtgtagtggtaccctgattcttgatccagttagtgcacccaaatggcggctttactgcaacatgtgtaattgcattgtattgctcccacatgctgctcacaggatcaccactacagataagaagtgcctaacatgtgaatctactatcattgaagttgatttcaacaagaaaaccacccctcttcaagatggagctacattgcatgagggatgtatcttatgtgatgatctgttgcattcactcattgaaatgaagcatggtaagtcattctttattcggagagggagaggaagaggcagagggagaggtcggggcagaggaagcagccggggtagaggaagacgagggaactcaaggtatgatgatcctaaaatgagtttccgggatttttgaagattttggacaaccaacattcggtcactactcactactttgtctgcttcttcgtgactgctgccaagactgccccggctttggaacacaggaatttcacaggaattagttcaaaaacataggaaaaacacatgattcaggaaattttgtttattccaaaggagctgtaagccatgcttaggcaggaaactgaccatcatctgcaactttgtcttgcgttcagttaccccccagaatggagtcaatatattactagaaagtgacttaagagttaattgctgccccatgtctgtattgacacacactgaatctgtagtttgatttcaaatttttgatagaacaaggatcaactcaattgtattactcagtagtgtttctgtaatactcaatcattgacagaagagctcaggtaggtgagaattgagaactagctcaatatgacaaaggcaccagtcaacagattgaaagctcaacaaactcctctctttgcaatatttggttgcacctaaatagcttcttctgagctgttacgattcttctagatggattctcg

SEQ ID NO: 5624 - DNA, 2671 bp, Zea Mays
attccaagcatatgttgcagttatcgattgcactgggattcctgaaaatgaggctggcagaagaatttttcgtgctagattttcatctgttactgagaaggacatatcgagcgccatggataatcttgttctgccaaacaaagatgaatcactatctgtggatgctcgccaagaaattgacttaaaggttggagtagcatttactcgatttcagacccgatatttccaaggaaaatatggaaaccttgattcaagagtgatttcgtatggtccatgccaaacacctacacttggattctgtgtacaacgccatcagcaaatcaccacatttaaaccagagaaattctggtccttgaaaacgtatattatcaaagatagtgatgaaatacagctagaatgggaccggaagaaactttttgattttgatgttactgtaatgtttcagaagatggtcatcagtgatgggactctaaaagtagcagatatatctgtgaaggaagaatgcaaaacccgtccatctggccttaatacagttaatatgcttaaggttgcatcaagtgcacttggtattgggcctcagacagccatgcacttggctgagcggctttacactcaaggattcatcagttatcctcgtacagagagcactgcatatccgtcatcatttgattttcgaggtgcacttgctgcactattaaataatcctctatggtccaatgatgtccggaaattactggatgctggttttgttaagcctcgtcaaggtcatgatgctggggaccatcctccaatcactccaatgaggtcagcaacagaagcatctttgggaactgatgcttggaggctgtaccaatacatatgccagcacttcattggaactgttagtcctgattgtagatatacaaggactgccattgagttcacttcaggtggtgaaacattccactgtgttgggtatcgagtcacttctaaaggatttacatctatcatgccatggctggctgtcagcgagaacagtcttcctgcatttaaaaagggagactctgttagtattcataaggctgacatatatgagggaagcactacaccacctgattacctcactgaaagtgaattgatttccctcatggagaagaatggcataggtgaattctggaagaagatatcagaagctttattgagcaacagattactctaattgcaaaaggaaaagctgatcatcttcgagttgttcaacatgtcattcagcaatttatgaaaaagtactcttactttgtgaaaaagattgaaaacatggatgctctgttcgaggcacagttttcacctttggcagactctgggcgcctactaagcaagtgtggaaaatgtggtcggtatatgaagtacatttccactcagccaatgaggttgtactgtataacttgtgaggatgtctattatcttcctcagaacggttcaattaagctttacaaggaaatcgtatgccctcttgatggttttgagttgcttttgttctcgatggtgggacctgatgcaaaatctttcccactgtgccctttttgctataattgtcctccatttgaaggcatcgacaaactctttggtgctctcaagctcgatgacaccggcaaggttgggaaaggggccggcatgccatgcttcctttgtcctcacccgacatgcaagcaatctatgatcactcagggagtttgtgcttgtcctgagtgtagtggtaccctgattcttgatccagttagtgcacccaaatggcggctttactgcaacatgtgtaattgcattgtattgctcccacatgctgctcacaggatcaccactacagataagaagtgcctaacatgtgaatctactatcattgaagttgatttcaacaagaaaaccacccctcttcaagatggagctacattgcatgagggatgtatcttatgtgatgatctgttgcattcactcattgaaatgaagcatggtaagtcattctttattcggagagggagaggaagaggcagagggagaggtcggggcagaggaagcagccggggtagaggaagacgagggaactcaaggtatgatgatcctaaaatgagtttccgggatttttgaagattttggacaaccaacattcggtcactactcactactttgtctgcttcttcgtgactgctgccaagactgccccggctttggaacacaggaatttcacaggaattagttcaaaaacataggaaaaacacatgattcaggaaattttgtttattccaaaggagctgtaagccatgcttaggcaggaaactgaccatcatctgcaactttgtcttgcgttcagttaccccccagaatggagtcaatatattactagaaagtgacttaagagttaattgctgccccatgtctgtattgacacacactgaatctgtagtttgatttcaaatttttgatagaacaaggatcaactcaattgtattactcagtagtgtttctgtaatactcaatcattgacagaagagctcaggtaggtgagaattgagaactagctcaatatgacaaaggcaccagtcaacagattgaaagctcaacaaactcctctctttgcaatatttggttgcacctaaatagcttcttctgagctgttacgattcttctagatggattctcg

SEQ ID NO: 5625 - DNA, 2553 bp, Zea Mays
gaaacagaaaagagcaggtcgacagttgaggtgttgaactcggaaagcctgaagcgcgcagccctcggaagcgaccgccccgccgcgctaccaccgcacgccccacctactactcccctcgctgtccctcgccgtcgccgccctgatcccgcgatgtcctcgtggctgcggagcgcggtgagcaaggccgtcgaggccggcggccgcagcggcgtggcccgcacggtcctgggctacgccgacgccgtcgcacaccacgccggccaggccgtcgccgagggcgccaagattatcaacgagcgcagcactcagaacttcaaaagtgtgaagcaaacagtgaagcgattggaagaggttgcggtttcatcacgcagggatgagagagttcaagtgctaaggcgctggctcggagccctacaggaggttgaggctgaagttggaggttcgggtgggtctcagaggcagaatgtctcttcaagcgagccaaactcttcgaaaccatcattggccaaagttttgttttatgatgctgatattggagggcctcctatgaacttccgagatatattcctttatagccacgcacttgagggtattacgttgtccatgattcttgaagctcctaaagaagaagaggtttcccttcttctagaaattttcggaatatgtcttacagggggcaaagaagttaataatgctatagtgagcagtatacaggacctggcaaagtcattctcaaattaccatgatgaggtcctggtgaaacgtgaagagttacttcagttcacacaaagtgccatttcaggtctaaagaggaatgctgacattgtgaggatagattctgaagctctagatttgtggaagaaactacatgagaaggaggcatcacgagctcaatcaattggcgatcctgataaagttacagaaaagacttcaactattgagtctttcaaagaagcactcaacgaagtccgattttgctctagaatggaggaacttctattgaagaagaaaacaattaatactggggattccttagagatccactcccaaaaggttgagaaattaaaggtattggcgacttcccttgctaattcatcctccaaggcagagaagcgtattttggatcacagacgccagaaagaagaggctcttaactttcgtgctaaaaaggagaacgaagtgattgctgttgaaaaggatttgactgctgagatttctgaattggagaagcaaaaggatgaacttgaggctcagttaaagaaggtcaacatttcactgaatgctgctatttgtcgactaaagcagacaagagaagagagggaccagtttcatgaagcaaacaatcagatgatatttactttacaagcaaaggagaatgacctgtcaaaatctattgactcatgtaacatggaggccagtgtagtcaagacttgggtaaatttcctcgaggatacatggcaacttcagttgtcatacaatgaacagaaggaaactaaaacgaatgacgagctggagagatgcacaagcagttttctgaagttgaccaagcatcatctttcctatttcaaggaagttcttagcccgtcaattgagcggatacgcacatacgtggataatttggcagtcttaaactctagggaggagtcaatagaacatgaaggggatgatgagatttctgtgcagacaagtccacaaaagtcccttgaggaggaatatttggaaactgaaaagaagatcgtgattgccttcagcattgtagatcgcatgaagaagatgttttattctgagcaagcggctaattctaggcaagatgatgcagaggtcaggaccttattttctgagattgagaaactgaaggaagtgtttgagtcggtagaaaggccgacactagacattgaagtccgcaaggcaaaggatccaatgaaggacaagtctggatcgaatcgttcagccaaagacaaatctgaatcgagccattcacctgttcaggtgccctcttcacctaaagatgtgcccgtggagtctccgaaatctccagtgaaacctgagcagacgatggacccagattcagagtttgcaaagttagagctagaattcggaaaagttaacagagaccatgaggagataggcggttgggatttcgacgagcttgaagaggagctgcgagctgacctatctaaatcaaccaatccaaaataaccacgctcaacccgacatctctgaacgcgcattccacctaactttccttgtgctggcttcttctgaaaatttgtagactttgaattgttgaatgtacatagtattgttgtttcattgtgtccatggacgttctatagattatactcactacatgggaggtggagattgttacactgtagactgacatttcattagcttatttgtttggtcttgtcatgtgcattcatacatgaatgaatgaatgataaacattatgtagcattccacattttggacattggaacatatattaactataacgataaaatgctcttggtcttggatgtccctgccaggttttaattaagcaga

SEQ ID NO: 5626 - DNA, 1181 bp, Zea Mays
aagaataaacggcgagccgcccgtcaaacaatcgttaaacccagaagcctcctcgtcctctctctgactctctctcaccctctcccctccctcggggtcgcggttgcttcctcgcggccgattcgtatcttccgtggcagcagggagggtacggtactcctccggccggcgggaggagaagaggagcttcgagatgggggcgtccctcgcttccgcgggcttggtgaactacccgcttgtcgcggcgctcctcgcgttcgctctcgcgcagtcctccaagttcttcaccacctggtacaaagaaggtcggtgggatgccagacaacttatagcttctggcgggatgccatcatcccactcagctacagtgacagcactttcagtggcagtgggaatccaagaaggctttcgtagtgcaacatttgcaactgcactagtctttgcatgtgtggtactttgcacatcttcatgttgaactactgcttcaactgcatttgataataatactcagagttggttatgcatgatgcttttggagttcggttacatgccggaaagcaggcagaggtgctgaatcaaattgtctatgagctgccagaggaacacccattatcagagacaaagccactgcgtgaaatccttggacatactgttcctcaggtcgtggccggttgcatccttggaatcctcatggctgtcgttatgcttttggctctcgggaggtcttagtcaagtgttgttcaccctatatctcactggtgatggctacaaagcataaaaacatgatctccccatggttctggctgtccaagtgttcgatagtacaaagttctaaccgaatttagatctggactgtaggtttcaggttgtagctcgagttggttgctgtaaatctgaaagggtcacttttaattccaaccacggtgtaatggaagctttgttatacaatcagcagcggtaagatcattttgcggatcagtatggtcgataccatgccgtcgcatttgctttatactcctttaattgaaaactgcgagtcattttggctcttccagacatgttgtttttgctacgtatttaaaagcaatgtatttgaatatacattatatctagatatatagttagagtcatgtatttagaaaaggacaaacattgatatggagggggtaagcggttcattg

SEQ ID NO: 5627 - DNA, 1055 bp, Zea Mays
atggatggtacaggtgacctcttcaaggacgcggccttcagatctaagtgtagttgtaggttgtctaagaagagggggctttcgttggaggagaaacgggagcaaatgcttcaaatattttatgagagccaggaattctttctgcttaaggagctagagaaaatgggtcctaaaaagggagtgattagtcagtctgtgaaagatgtggtgcaaagcctggtggatgatgatcttgtcttgaaggataaaattgggacttctgtgtacttttggagtcttccaagttgtgctgggaaccagctgaggaatacttacaacaagctggaatctgacctttcaaactctagaaagcgttacatggaccttgttgaacacagagataacttgaaaagaggccgggaagactctgaagagagggaagctgctttggaggagctgaagactgtagaactacaccataagaaactcaagaggatgctactgatattgctcattcagcagctaacaggtggacagacaacattttcactttgcaacaatggtgttcaaccacattcccagaagcaaaagaacaactggaacatatgtacagggaggttgggatcacagaagattttgagtatttgcagtgatgtccaacagcctattacagcgtcgaaaatgtgccacggaatgttggatcgatcacagatgcaagtttatcatgttggtgctgtgagttatctgcagtaaatagattttgtatatttcacatgcttggcaacaatgaccgatatggccacatgcatgttagggactacttttcctagatgctaccaagtggctagactataccgaaggctcctgctatgcttgaaaactttaccgaaggctcgattttattggatgtagtggctagactatatcatgaaatgtatatttctttgctgatggaaagaacaacaatagcttggcatctggaaataaaaatactgccctaaaaatagctgaaaataataataccagaacctatagaaactaagggttttgaagagcatatgagaagggcatttctg

SEQ ID NO: 5628 - DNA, 1103 bp, Zea Mays
cccgtccccgccgcccccgcccgaaccgaactcatctcctttccgtttgggcgccaaaacagcatccgccgcgcgacgcgtctcgtcagcgccgccagccccgtcagaatgtctaagaagagggggctttcgttggaggagaaacgggagcaaatgcttcaaatattttatgagagccaggaattctttctgcttaaggagctagagaaaatgggtcctaaaaagggagtgattagtcagtctgtgaaagatgtggtgcaaagcctggtggatgatgatcttgtcttgaaggataaaattgggacttctgtgtacttttggagtcttccaagttgtgctgggaaccagctgaggaatacttacaacaagctggaatctgacctttcaaactctagaaagcgttacatggaccttgttgaacacagagataacttgaaaagaggccgggaagactctgaagagagggaagctgctttggaggagctgaagactgtagaactacaccataagaaactcaagaggatgctactgatattgctcattcagcagctaacaggtggacagacaacattttcactttgcaacaatggtgttcaaccacattcccagaagcaaaagaacaactggaacatatgtacagggaggttgggatcacagaagattttgagtatttgcagtgatgtccaacagcctattacagcgtcgaaaatgtgccacggaatgttggatcgatcacagatgcaagtttatcatgttggtgctgtgagttatctgcagtaaatagattttgtatatttcacatgcttggcaacaatgaccgatatggccacatgcatgttagggactacttttcctagatgctaccaagtggctagactataccgaaggctcctgctatgcttgaaaactttaccgaaggctcgattttattggatgtagtggctagactatatcatgaaatgtatatttctttgctgatggaaagaacaacaatagcttggcatctggaaataaaaatactgccctaaaaatagctgaaaataataataccagaacctatagaaactaagggttttgaagagcatatgagaagggcatttctg

SEQ ID NO: 5629 - DNA, 1303 bp, Zea Mays
gcctaaaaaagaagattagacaccgctcctcccgtccccgccgcccccgcccgaaccgaactcatctcctttccgtttgggcgccaaaacagcatccgccgcgcgacgcgtctcgtcagcgccgccagccccgtcagaatggctctcaagcatggagccacaaaaggaatgtgatgcacctgtcgtctactgagccatggatggtacaggtgacctcttcaaggacgcggccttcagatctaagtgtagttgtaggttgtctaagaagagggggctttcgttggaggagaaacgggagcaaatgcttcaaatattttatgagagccaggaattctttctgcttaaggagctagagaaaatgggtcctaaaaagggagtgattagtcagtctgtgaaagatgtggtgcaaagcctggtggatgatgatcttgtcttgaaggataaaattgggacttctgtgtacttttggagtcttccaagttgtgctgggaaccagctgaggaatacttacaacaagctggaatctgacctttcaaactctagaaagcgttacatggaccttgttgaacacagagataacttgaaaagaggccgggaagactctgaagagagggaagctgctttggaggagctgaagactgtagaactacaccataagaaactcaaggaggaactggctgcatatgcagatagtgatccagctgcagtagaagcaatgaaggatgctactgatattgctcattcagcagctaacaggtggacagacaacattttcactttgcaacaatggtgttcaaccacattcccagaagcaaaagaacaactggaacatatgtacagggaggttgggatcacagaagattttgagtatttgcagtgatgtccaacagcctattacagcgtcgaaaatgtgccacggaatgttggatcgatcacagatgcaagtttatcatgttggtgctgtgagttatctgcagtaaatagattttgtatatttcacatgcttggcaacaatgaccgatatggccacatgcatgttagggactacttttcctagatgctaccaagtggctagactataccgaaggctcctgctatgcttgaaaactttaccgaaggctcgattttattggatgtagtggctagactatatcatgaaatgtatatttctttgctgatggaaagaacaacaatagcttggcatctggaaataaaaatactgccctaaaaatagctgaaaataataataccagaacctatagaaactaagggttttgaagagcatatgagaagggcatttctg

SEQ ID NO: 5630 - DNA, 2297 bp, Zea Mays
ttggaagcacacgccactgcgagatgggcctcttcccgtccccgtctctgcctgcccaggcaacagccattcctctcctccagtcctcctcgcatcactcgactcgactcgactcgctcgctccaccgaccaccgtgcggccgcggagcggcgcggctttgctccactccactcgcgccggggcggtttccgtcgccgccagggcaccgcccgtgacaccctgatctcccttcacctactcgtggattcgatcccatccagcccgtcccgtccctctcccaccctttccagatctgcctgcgagcccccgccacgcaccctcatgacccaccactaccccccgacgcgcatcacgcgaggggagcgtcactactgctgccgccgccaatggctctctgccctgaccgagcccatggacgacctcaccgtggggggcctcgcgctcttcgccgccgtcgctgacttcatagacgactccgctcccgcgatgccgcagccagcggcggccagcaccgcgcacgagcccgagcccgagcccgggagcccctgctcagtcgccagcgactgcagcagcgtcgccaccgccgacttcgagggatttgccgacctcggctccgcgctcgtgctcgacgacctcgtctcctccgcctccacctccgccagctctgcctccgggcccagggccgccgccgccgctcccgccaggagcgtcttcgcgctcgactgcgtgccgcgctgggggctccagtccgtgtgcggccgccgacccgagatggaggacgccgcccgcgtgctgccaaccttcttccacgtcccgctctggatgctcgccggcgacgcgcccgtcgacggcctcgaccgggcgtccttccgcctccccgcgcacttcttcggcgtctacgacggacacggcggcctccaggtcgccaactactgccgggagagaatccacgaggtactggcagaggagctcaccaaggcagaggaggccgcgtccgacgctgacctgggtggcctcgaccctaacactcagaagcactgggagaaggcctttgtgggctgcttcagccgtgttgatgcagaggtgggaggagacgcggcgaccgaagccaagcctgtggctccagacaccgtgggctcaacagcggtggttgcgcttgtctgctcatcgcatgtcatcgttgccaactgtggcgactcgcgagcggtgctctgccggggcaagcagcctgtggcgctttccgtggaccataaaccaaacagggaagatgagtatgcaaggattgaggcccagggtggcaaggtcatcaattggaatggctatcgagtcctcggtgttctcgccatgtcccggtcaattgtcacaggagagcctcagtgtactgttttgatgcctttgtttcagcgttccaatccacttcacttaaagttgactacaaccgatccaaatagacttgtggatgaaaaggggacagatacctgaagccatatattatcccagtccctgaggtcacaattgtcgcccgtgcaaaagatgatgagtgcctaattattgcaagtgatggcctctgggatgtgatgtcaaacgaggaggtatgtgatgctgctcgcaagcgcatactgctgtggcacaagaagaattcagatgcctcatcgtcagcccaaagaagcggtgattcgccagatgaagcggctcaagcagctgctgagtatttatcgaagctggctctccataaggggagcaaggacaacataaccgtaattgtagtcgacctcaagtcacataggaagatcaagagcagagcataaccgtggattcggtaagacttggacagtagaaatggttgttactacactaggacgctagaaaggtggagaaaaggctcctgttcagtctgctgcacatgtacactggttggcccaacactagtctttttccacaaccatataggctgccacgtttgttcagggactcatacacagatctaatctggttagaaattgggctgacgaagtaaggtaaaggtacaatagaaaccgccagcattaaactgtacctgtgctacttgtgttttggtatattgatgtctaggagtagcagattagcagtgcaaagaatactacgataccccaagttgtttctgcaacaaatgttatgtgcatgtatatcataaaataagaccatctgtaatatgaattcaattcttggcatccgacgttattaattcagttgattgccaacaggatggttgttttgctgctgagaattacatctcattcggtctgattttgccact

SEQ ID NO: 5631 - DNA, 1278 bp, Zea Mays
ccaaaaccctaacctgccgcgcgatcaaaggatgccggagggccacgtgccggcgcctcccccgccggccggtccaggccgtccgtttctccggtggggacaggacagggacgactatgcagccacagctcggcggtcgacgcatcacacgggcgcaacagtattttagctgctgctcgtctcatctctgagactctgacccagtgaccatgatcacctagccgagctccgtccctccatctgcctctctctctttcttcccgcggcctgtgcccccagattgccgcggcctccggctccgcccctctcctccagcaccagcagtccatctccggctctcttccctctcgttaggcgctagctaggctctagcccctagtctggtcctgcccgctgtgcctgtgcggctgtgcgtgcacagcgaaggcgcacagctagcggcttctggccactgggcgtcgccataaacagtggagattcccgcccccattttcccaattatggatatccagcggcgaccgggggagcactgctgaggccgctcgcccgcccgcacgccattgctcccgtcgagggtcacaacttatcctacacatcgtagctccgcgacctgttcggcaaaatgaggccttcagatggcaggacgcagctttcaggctttgcacaatcagatgaatcaacacttgatgtggaggggcattgctaccaccagcagtcattcccttcctctccatcgatgcaaccgattgcttctggctgcacacacacagagaacagcgctgcgtacttcttatggccaacatcaaacctgcagcattgtgcagccgagggacgcgcaaactacttcgccaacctttcaaagggactgttgcccaagtctggccggttgcccaagggccagcaagcaaatagcttgcttgacttgatgactataagagctttccatagcaaggtgttgcgttgctttagccttggaacggcggtgggcttccgcatcaggaaaggggctctgacagatatccccgcgattctttgctttgttgctcgcaaagttcacaagaagtggcttaatccggaccaatgccttcctgccattgttgagggtccaggaggtatttggtgtgatgttgacgttgttgagttctcgtactacggtgcaccagctcaaaatccaaaagtgcaaatgttcactgagcttgttgataagttgtgtggcagtgatgaatgtattggctctggctctcagctgtgcacaatgattgtattgcaccaaaccat

SEQ ID NO: 5632 - DNA, 2326 bp, Zea Mays
cttgccaaccctggcggctccggcgccttctcttgccttccaggccgtttcccccctcctttttggttgacccatggctggattcatcagtccgcttagctttcgtcctcgttcatcgttctaccggtggttggtccatctgttagaggccccctctgggtcacaacttatcctacacatcgtagctccgcgacctgttcggcaaaatgaggccttcagatggcaggacgcagctttcaggctttgcacaatcagatgaatcaacacttgatgtggaggggcattgctaccaccagcagtcattcccttcctctccatcgatgcaaccgattgcttctggctgcacacacacagagaacagcgctgcgtacttcttatggccaacatcaaacctgcagcattgtgcagccgagggacgcgcaaactacttcgccaacctttcaaagggactgttgcccaagtctggccggttgcccaagggccagcaagcaaatagcttgcttgacttgatgactataagagctttccatagcaaggtgttgcgttgctttagccttggaacggcggtgggcttccgcatcaggaaaggggctctgacagatatccccgcgattctttgctttgttgctcgcaaagttcacaagaagtggcttaatccggaccaatgccttcctgccattgttgagggtccaggaggtatttggtgtgatgttgacgttgttgagttctcgtactacggtgcaccagctcaaaatccaaaagtgcaaatgttcactgagcttgttgataagttgtgtggcagtgatgaatgtattggctctggctctcaggttgcaagtcaggacacttttggaactttgggcgccattgtaaaacggcgaactggcaacaagcagataggtttcctcaccaaccgacatgttgctgttgacttggactacccaaaccagaagatgtatcacccattgccacccaaccttgggcctggtgtttatcttggagctgtcgaaagggcaacatctttcatcacagatgatgtttggtatggaatctatgctggaacaaacccagagacatttgtacgcgccgacggggcattcatcccatttgctcacgacttcgacatctccacagtcacaactacagttaggggtgttggtgacattggggatgttaaggttatagatctgcagagtccacttaatagcctcatagggaggcaagtatgcaaaatcggcagaagttctggtcacacaactggaactgtggtggcttatgcccttgagtacaatgacgagaaaggaataagcttcttcactgacctccttgttgtcggcgaaaaccgccaaacttttgatctagaaggtgatagtggaagccttattatcctgactggccaggataatgagaagccgtgtcccattgggataatatggggtggcacagcaaaccgtgggaggctaaagcttaggtgtgaccatggccctgaaaattggaccagtggagttgatcttggccgccttctggatcgtcttgaacttgaccttatcataaccaatgaatcactcaaagatgccgtgcagcagcaaaggctcgcgttggtggctgcagctaactctgctgttggggagtcgtcgacagcagctgttcctgccccagaagaaaaggtggagatcttcgagcctctggggatcaaaatcgagcagctgcctcggcacgacgtttcggcgacgacggaaggggatgaggcagctgtgatcaatgtggaagagcgccagttcatctcaaactttgtcggcatgtcccctgtacgcgacgaccaggatgctccgaggcaaatcgcgaacctgaacaatccgtcagaggaagaactcgccatgtcgcttcacctaggtgaccgggaggccaagcggcttcgcactgacacagaatccgagcttgacctggagaagtgacgcactcatttcagcgtctccgcattgagtcataaagtagtccgaagaaggtgacctgtggttcagcagactgaacctgcagccgtagctgcagtttcctggcacaagccttatcatgtactatggtaaaacttgattcagcaattgtaggatgttaggtggtatcccctgcagttttgttgtgagacttgatatgcacaagcacaatgctgaatccccctatatcaaaacaatgcaggtagcgataaagtggtcttgatcagttttctctgtccaaccattaacggagttgtttcaagatcactagatcagcttccgggaaaccttgtgttttcaccttttgaattattcttacggaacgtttggatgca

SEQ ID NO: 5633 - DNA, 1159 bp, Zea Mays
cgaagtcgaggtgtggcctgacccatcgtcaacgaggacttcgagggggtcagagacgaagaccccaagacgatggcatgggtttcaagttgaccaaacagagtggatacagtcctgctcaaagttgggaagctgtgtcaacaagcaggcccttatctgctactcacttcatgggcatgcatcaaagcctcggtattcagttggcacagcttgggaaggatgcatctgcagcaggagctgcacgtagagttagtgcccaacgaaaggcagtcgaggttgagtctgttgcagctgctggtaaacaagagattcgagaagtagtgaagaagttattccgtgctgagtttgtcgagaagcgatatgaaggtttagatgaggatatcgatttgagagctttggagaatggatttatatctgtcacccctctgaatgttcatggacaagtggagcttgaaatcggagccacagcttctgattggctctcagcagctgtatcactagacaaagaaaaggtagctgcttcagctacagctgaccaacaagatgttgcagctgaggaaaaggaagctccctcagcagcctaacaaacacgcagacatgtccacactccgtaggtgtctttagttcctgtggtgatgtcgatcttttattacctcttgtcagtttggtttgtctagtgttttgccctcaatatttgtttgttgcaatgtctattttttttgttcaccttctctgccgattaccggcttccttggccctacaaatgatttggtgcaggcagccctgcattttggatgtaacgatgtaggctacggcaactaccagatgaatactgcccagcccccactatttttttcagtgtggtttgttataggaaggtgttgtattcagcatggggtatgtgattgattttgtcttgctcccgtctgaaccatggcaaccaaatgtggccgtatggatcccttcactttacaagaattgaaatttacggccccgtaggaattggaatcttactattgaaatagtatattttttttgaatgtgacattccaccactttccaaagttatcatataagtttatctcaaatttatagtgtgggggatagaaattgattttatgtatctccaaattatgattctactctgcaattttgtaac

SEQ ID NO: 5634 - DNA, 803 bp, Zea Mays
atggcgagctcgctggcccgcctgggagcggcgctgccacgcgccgcggcccgcgccctgccaccggggcggtgggccgccgcggtgctcggcatcggcgcctcccgccgcgccgaacggtgccaagttcattccgacattaaagtagcccctacatcagacgtgaaggacgatagcaaatctgaaactaggaggatcaagatgctctatgacggtgattgccctctctgtatgcgtgaggtaaacatgctgagggaaagaaacaaatcatatggggcaataaagtttgttgacataagctctaaagattactctccagatgacaatcaaggccttgattatgaaactgtcatggggaagatacatgccattctttcagatggaactgttatcacagatgttgaggtagctacgatggcaaatgcaatatatggcgtgtgggcgaaataccgaatgcaaattacaggtcgacctccgctagaaaagctgcaggcgaatgtaaagatgacaaagtatgcaagatgtgagcataaaaaatgttctactgtgctacatacctcactcacctatattcatgcttagtgcttagataggctcatatacatagttttaacacaaaaaataatcacaatggtattgaaaagggcgaatagcttatgtaatggtttgtcgaagtaaatatatacattttctgaaaaaatgtaaatatatacatttgtatgtacactgtgctggtttgacggcaagatattttacggtgaaaacttccacggaatgtgctgttgtgactggtgggattgcac

SEQ ID NO: 5635 - DNA, 1551 bp, Zea Mays
ccttttgcccggccggctcgtcgtcttctcctcctgcctttttagtctccacgctcggcgcggggacagaccaaacgccgaggcgcgattccgcaaagcgaccggccgcgcgacacgactgagcgagctcgctcgaccctcctgccgcggtgctgctacacagctagtactagtggtgagcgagttgactcatgggacatcccagggcgaggtgagcaaggccgagttccaggaggccctgtcggacatactcctcggcatggcggcggggctcaagagggaccccctcgtgatactgcgcatggacggcgaggacctcagggacttcgccgccggcagcagatacgagcccacagctgccgccgttttctcgcaggtcgtcgatctcggttccgaagtcgcgtcaccgcgccaatgcgtgttggccgctctacagaagctgtccgtcgaccacggagtgcccccggcttcagatgcctgggtcgcgaagcacatcgtggagccggcgttgcagcagcttcttcctgccgatcagcctgggcagcagccggcctcccgcgatgacctgttccagcagctgaagaagctgctgggcgccgtcgctgatcgactccaggagcagcctgtgatcgtcgcgcacaccgagaaccactatgacgggagtggcgtcaagaggctgctggccaacaaattcgagttggacaagctgctggattctgtctggaaaaatttggcagcagaagataagaacaaggcgtccaaggggtgcctcataaccgcgcttgacaagatggccgatgctgcaagccttccatattacagtgctgtgaaagaggtggatgctgtcgtggaagagtcgatcaagacagcgggcgtcgaagaaggaaaggcagtggatgaagcggagttcaagaagtcgctcacagaaatccttagggctatcatgctgaggctgaacgacagccccgtcttcgtctctaccgacgtcgtcgtgcacgagcctttgtccgggacatcatcgtcggtgaactgaagggaaacgtacgacggaaacgtactgggaaaacggaacgggccagggtcattactgttggtatttgagcagtgcctgcgtagttgctttttgtctgatctcgcacagggactgcttttttgactgatctcacactgtgctctgctagcttgtcgcaagtttgcaacatgacaagatgtcaagatgaaggccatcatctggttttgttaacccgattgacatataagtttggaataaggcgttcaagccatacataattacatatcatcgacggcaacctaatagctattctaaattttgttttgctggagctcggagaaatatgttactcgatgcatgcaaaatacacagtcattcaatcagatgttatacactcgagcctaaaggtaaccaagtgaaagtttgcaggatatcctacacaacagtgggcatactatcaagggcctcaaatatgttacattgtagtagactgttttataatctagaattaggattttattattgaagcggtatatttt

SEQ ID NO: 5636 - DNA, 734 bp, Zea Mays
tcctcctccccaaattcctctcctcgtgacctcgtgtcctccctcgctaccacgcttgggtgaaatgccctcgccgcctctccccgtgctcgcccaaatcgccgcctctccctccctgtcgcccctgcgccacggtgcttcacgccgttgaagtcacttcactcatcccaccgatgctgtcgcccacaccgcctcctcccctcctccgctcaagccgcaccgcgacagctacacgccgcgatgtcagctgccagcagcgcccccctcttaacaacgtcgcgacgtcctcgtgggctaaaccccctccatcacttcttcccgtcgagatgcacaacaccgcgagatccatccaccttctccagcaccctcacccccactcaaatggtgtcgcgatgtccgccaccaacagcgccccttcccccctctcaaacaacgtcgcgacgtctacgagttctgtgcatgtggggtcatcttggcacgatgtgcggccatcgatgaagtagccgctaccttcccacaacgtcactatccgcctcctgtgtctgccagtaaccccacccctcctcaaacatcatactaatggtcatgatcagtcgggtgattgagctttaaccttgaagtcctaggataatggtagcaaacctttcttcaagtgtattagaaatgaatgaaaaacgtgtaagtattgcatctgtcagccttcatgttatatttttcccaataagtgtcatttc

SEQ ID NO: 5637 - DNA, 2631 bp, Zea Mays
ttcgaacccgccggctgggggaggagccgccgacgccgtctcggcccgcgggggcgaagccctagagatgtcggcgtccgtcgacgccgcgtcggcagtagcggtgccggcggtgccccccgcggtggaggaggccggcggcgcggtggagcaggccaggacgctcatcgcagcgctcaacctgctctctcgcaacctaccgctgccccctgatgtcatgcgcgccgtctcgtccatctaccacgacgggggtgccggcgacagggcgggggaggaggagaagggaggggacgaggagatgccggccgcggatggggcggccgaggggaactgctcggtgtacgccgctggcggcgcgaccgaggggaccaccttgattgaagagcttgaagatgcaatattgaagaatcaaagaacgcccataacctactcagaattggcagcaatacgagaagggcggttcaatgcatccattcagcatcgactagctgaacttgaaggattaccttctactaggggtgaagacttgcaaatgaaatgtttgcttgaattgtatgggctaaaggttttgcgtccattcttgctgaggaggaagaaagatgaagtagagaaatatctccctgtgaaaacacaagtaattctcaagtgtgacatgtctgcttggcaaaaagcatactacgaacaagtcacaagcagggaaaaggttgcgctaggatatgggatcagaaagaaggctctgcaaaatctgtcaatgcaacttaggaagtgttgcaatcatccctacctattcgtagagcattataacatgtaccagcgggaggaaatagttagagcatccggaaagtttgaattgcttgatcgtctacttccgaaattgcagagagctggtcacagggttttacttttctctcagatgacaaaattgcttgacgttttagaaatatatttgcagatgtacaatttcaagtacatgaggcttgatggatccacaaagactgaagaacgtgggaggttactggcagattttaataagaagaattcagaatatttcatgtttcttctcagcacacgagccggaggtcttggattgaacttgcagactgcagacaccgtcattatctttgatagtgactggaaccctcagatggaccaacaagctgaggaccgtgcccatcgtatagggcaaaagaacgaagtacgtgtgtttgttcttgttagcgttggttcaattgaagaagagatattggatcgtgcgaaacagaagatgggtattgatgcaaaagtaatccaggctgggttgtttaacacgacctccacagcacaggacaggcgagcattgctgcaggagatactcaggagaggaacaagctcactgggaacggatatccccagtgaacgtgagataaaccgcttggctgctcgaaacgatgaagaattccggttgtttgagaagatggatgaagaaaggaggctaaaggagaactacaaatctagacttatggatggaaatgaggtcccagattgggtgtttgccaatgataatgaaaccttacgcaagaaaaccgtggcagatgaattccggaatataattgttggttcaaagagacgtagaaaggaggttgtctattcggactcttttggtgatcagtggatgaaatccgacgagggatttgaagagattgcaaagatgactccaagggtgaagcgaactgcttattcgcctgacattcaagttgagtacaatgaaaggaggaaaaggcccaagtctgtggaaaacagcgcagatggcgcaagcaacccaacacggacacccgacaaaggaagggctggagtttcatcatacagcaaggatgagaccgaagatgatggtgaagacgaagtcatcaccagtggcttacagaagggtaacagtttcacatggaagacccttggaagaaaaaggtcaagccacttaagttcgtcgtcggactcaaaagggcgaccatcattctaatgtcagttgccttgatgcttttgctcgatgaagcccttctaataatggagtacccctggaggctagcagcgctaccatttcgaaagtaccttgaacctataaacttcaggatggaggctgtagctagcaggactaccattttgaaagtacattgaagctataaacttcagaattagtagtatactctggacttgttgccatgaattcgtaactcaaacgaacttaaattgcgttacagttcaagcctattttgggggtaaaggttattggtaaatagctggtgatggcttgccctgaatttgggctgtcttgtctgcacattccgttgagcagtcttcggctaatgcctgtccagattttactggtttatatggcaagcaaaactgtactaggtgctatctgatgtgcttccaccgaggcaagtcctcaaacaagtgtcatcttttattgtgtatagctagtagagttggctctgtgaatctatatgcacttacatagcctgatagacacacgataactacgtaaaaatagctttgtgcaaagataatttctttttgagttttcccctttaattaatcgcgttgaaactacgcgttcaaatttgtgcttccaagtgccaaacggaattcgctgcgact

SEQ ID NO: 5638 - DNA, 5001 bp, Zea Mays
cccgtccgcggcgccggtctccgatcgatcgaagcttcggcttccaacacaggccggtgcgaaaacgcccatcaaacccctcccaaaacccagcgtaccgttgccgcgcgccgattcgaacccgccggctgggggaggagccgccgacgccgtctcggcccgcgggggcgaagccctagagatgtcggcgtccgtcgacgccgcgtcggcagtagcggtgccggcggtgccccccgcggtggaggaggccggcggcgcggtggagcaggccaggacgctcatcgcagcgctcaacctgctctctcgcaacctaccgctgccccctgatgtcatgcgcgccgtctcgtccatctaccacgacgggggtgccggcgacagggcgggggaggaggagaagggaggggacgaggagatgccggccgcggatggggcggccgaggggaactgctcggtgtacgccgctggcggcgcgaccgagggtaaagcttttactttacaggggaccaccttgattgaagagcttgaagatgcaatattgaagaatcaaagaacgcccataacctactcagaattggcagcaatacgagaagggcggttcaatgcatccattcagcatcgactagctgaacttgaaggattaccttctactaggggtgaagacttgcaaatgaaatgtttgcttgaattgtatgggctaaagttgttagacttacagaagaaagttcggtcagatatcagtgctgagtattggctacaaaagaaatgtgcatatcctgagaggcaactcttcgattgggggatgatgcggatacggcatcctttttccatgtatggaataggagatagcttttcagtggatgttgatgatgttcaccgcagaaagagattcacagagaggatgtcaagacttgaggaggaaggaaaaaatcaggcagatatcaggaagaggaagttctttgcagaaattctcaatgcttctagagaacaccaggtgcaattagggactactttcaaacaaagaaagcagcggaatgatggcgttatggcatggcatgttcgggcacgccaacgtattacacggcaagaaaaaagcagaattaatcttctgaaaactggtgatcaagaagcatatatgaggatggttgaagagagcaagaatgaacgcttgaaaatgctccttgataaaacaaatgagcttcttgaaggaattggaaaagctgtacagcgacaaaaagatgctgaacatgttagtaagccagaaggagggagtgaagtgccaaaagggtcagaatctgaggattgttctcaaatttcgggcatcaagagtgaatcagctgaggagtctccttcagatgacgatggagacctccctggccctgcagatgaaagtaaattcaatgcaggacgtagacttgattttactgttcattctattgaagaaaaggtaacagaacaaccatctgctctcgaaggtggtgaattgagaccatatcagctagaaggtctccaatggatgctttctctatttaacaacaatttgaatggcattctggctgatgaaatgggtttggggaagacaattcaaaccatagctttgatcgcttatctgttggaaaagaaggaggttgcaggaccacacttaataattgctccaaaagcagtattaccaaattggtctaatgaattcaaaacttgggctcccagcattgggacaattctttatgatggccgtccagaggaaaggaggctgttaagggataagaattttgacggagagcaatttaatgttttgctcacacattatgacctgatactgaaagataagaagttcctaaagaaggttcactggcattatttgattgttgatgaaggacatcgtctgaaaaatcatgaatgcgctcttgctcgaacactggtttctgggtaataccgtttattcatatttttactgtcttcaggcttggaatgacatgtatccacttaattatatgatgctctgattgccatgtctttttggcggtggacatattggtctataaccatttgaaataccagccattgaaatatgaagaccttcaatcttcacactcattactactaggtgtcagaacattgttgttagagtggacgcagtaaccagttcaacccaaaagcttaagctgatgggagaaggtagtcaatccacttatacacttcaacactctcactcacgtgcaaccagagagaaagacgcaaatgtggaaataaataggtggagacataaataaagcctttgctaggatttgaactcgaggcctctggcttcgataccatgttaggcgccgttcggttgttacggtttggtgggttggaacgattcctaaccgggttgcttctctaatttatataaactttgattagctggaacgattccgggtgcaatccggcaccaacgaacaagaccttaaagtggacgcataaccagttcaactcaaaagcttaagcagatgggagaaggtagtcaatccacttatacatttcaacaattgtgtatcctctttaacaatcattaaactactcttgtgatcttgtttccacatgttttgctcatatgtagtcgtagtgacaatgggcctacacctatagcatttcacagatggatcttgaatggcctgtcttggcaggttatcacatgacaaagtttctgccttttctgaatgaggttgtccttgtccttgatagttggaaaataatatacatgatccgccggagactacttttaacaggcactcctatccaaaacagcctgcaagagctctggtctttgcttaacttcatcctgcccaatatttttaattcatcccagaattttgaggaatggtttaatgcaccatttgcatgtgatgtcagtcttaatgatgaggaacaactactaatcatacatcgtttgcatcaagttttgcgtccattcttgctgaggaggaagaaagatgaagtagagaaatatctccctgtgaaaacacaagtaattctcaagtgtgacatgtctgcttggcaaaaagcatactacgaacaagtcacaagcagggaaaaggttgcgctaggatatgggatcagaaagaaggctctgcaaaatctgtcaatgcaacttaggaagtgttgcaatcatccctacctattcgtagagcattataacatgtaccagcgggaggaaatagttagagcatccggaaagtttgaattgcttgatcgtctacttccgaaattgcagagagctggtcacagggttttacttttctctcagatgacaaaattgcttgacgttttagaaatatatttgcagatgtacaatttcaagtacatgaggcttgatggatccacaaagactgaagaacgtgggaggttactggcagattttaataagaagaattcagaatatttcatgtttcttctcagcacacgagccggaggtcttggattgaacttgcagactgcagacaccgtcattatctttgatagtgactggaaccctcagatggaccaacaagctgaggaccgtgcccatcgtatagggcaaaagaacgaagtacgtgtgtttgttcttgttagcgttggttcaattgaagaagagatattggatcgtgcgaaacagaagatgggtattgatgcaaaagtaatccaggctgggttgtttaacacgacctccacagcacaggacaggcgagcattgctgcaggagatactcaggagaggaacaagctcactgggaacggatatccccagtgaacgtgagataaaccgcttggctgctcgaaacgatgaagaattccggttgtttgagaagatggatgaagaaaggaggctaaaggagaactacaaatctagacttatggatggaaatgaggtcccagattgggtgtttgccaatgataatgaaaccttacgcaagaaaaccgtggcagatgaattccggaatataattgttggttcaaagagacgtagaaaggaggttgtctattcggactcttttggtgatcagtggatgaaatccgacgagggatttgaagagattgcaaagatgactccaagggtgaagcgaactgcttattcgcctgacattcaagttgagtacaatgaaaggaggaaaaggcccaagtctgtggaaaacagcgcagatggcgcaagcaacccaacacggacacccgacaaaggaagggctggagtttcatcatacagcaaggatgagaccgaagatgatggtgaagacgaagtcatcaccagtggcttacagaagggtaacagtttcacatggaagacccttggaagaaaaaggtcaagccacttaagttcgtcgtcggactcaaaagggcgaccatcattctaatgtcagttgccttgatgcttttgctcgatgaagcccttctaataatggagtacccctggaggctagcagcgctaccatttcgaaagtaccttgaacctataaacttcaggatggaggctgtagctagcaggactaccattttgaaagtacattgaagctataaacttcagaattagtagtatactctggacttgttgccatgaattcgtaactcaaacgaacttaaattgcgttacagttcaagcctattttgggggtaaaggttattggtaaatagctggtgatggcttgccctgaatttgggctgtcttgtctgcacattccgttgagcagtcttcggctaatgcctgtccagattttactggtttatatggcaagcaaaactgtactaggtgctatctgatgtgcttccaccgaggcaagtcctcaaacaagtgtcatcttttattgtgtatagctagtagagttggctctgtgaatctatatgcacttacatagcctgatagacacacgataactacgtaaaaatagctttgtgcaaagataatttctttttgagttttcccctttaattaatcgcgttgaaactacgcgttcaaatttgtgcttccaagtgccaaacggaattcgctgcgact

SEQ ID NO: 5639 - DNA, 1818 bp, Zea Mays
ctagcacacaagcgaaacttgtgaccgaagtggccactgatcgacggcccgcatggagctgaacctcgtgtcatgggtgtcgtccctcctcctcctggcgctctccgccgcgtatgtctactacacgacgaggcgccggtcgccgcagcggctgcctccgtcgccgccgggttggcccgtcatcgggcacctccacctgttgtccgagatgccccaccacgcgatggccgagctggcgcgtaccatgaaggcgccactgcttcggctgcgcctgggcagcgtgcgggccgtggtgatctccaagccggagctggcacgcgccgcgctgaccaccaacgacccggcgctggcgtcgcggccgcacctcctgtcgggccagttcctgtcgttcgggtgctccgacgtgacgttcgcgccggcggggccctaccaccgcatggcgcggcgggtggtggtctccgagctcctctcggcgcgccgcgtggcgacctacggcgccgtccgggtgaaggagctccgccgcctcctcgcgcgcctcaccaagaacacctccccggcgcagcagcccgtggacctcagcgagtgcttcctgaacctggccaacgacgtgctctgccgcgtcgcgttcgggcggcggttcccgcacggcaagggcgacaagctcggcgacgtcctcgccgaggcgcaggacctcttcgccggcttcaccgtcggcgacttcttcccggagctcgagcctgtcgctagcaccgtcactggcctccgccgccggcttaagagttgcctggccgacctccgcgcggtctgcgacgagatcgtggacgagcacatcagcggcaagcgccagcgcatccctggtgaccgtgaagaggattttgtcgacgtcctgctccgagtccagaagtcaccagatctggaggtcccactcaccgacgacaacctcaaggccctcgtactggacatgttcgtggccggcaccgacacgacgttcgcgaccctggagtgggtgatgacggagctagtccggcatccacgcatcctgaagaaggcgcaggacgaggtgcggcgtgtggtcggtggcaagggccgcgtggaggagtcggacgtcggcgagctccactacatgcgcgccatcatcaaggagaccttccggctgcacccggccgtgccgctgctggtgccgcgggagtccgtggcggcctgcacgctcggcggctaccacatcccggccaagacccgcgtgttcatcaacaccttcgccatgggccgggacccggagatctgggacagcccgctggagtaccggccggagcggttcgagaacggcggcgagatcgacctcaaggacccggactacaagctgctgccgttcggcggcggccggcggggatgccccggctacaccttcgcgctggcgaccgtgcaggtgtcgctggccagcctgctgtaccacttcgagtgggcgctgccgcccggcgttgctgccgaggacgtcaacctcgacgagtgcttcggcctcgccaccaggaagaaggagccgctgttcgtggtcgtcacaaagagcgaggcctacgagttcaagggggaggagcttaacgaggtttaattaataagtgtgattagattatgtataataagtcttggcgtcttggttccaaataaagtttgatgattattaactttattgttattttacagagcaagtattttggctagtgttctctcttggggcgctaatagacaacattgtatttttatttctttttgtaacgtagcggtttgcggaatataaaaaggatgtacaaggagggcgtatgg

SEQ ID NO: 5640 - DNA, 1635 bp, Zea Mays
cggtcctgcatgttcggctcgcctcgtggaaaaatcacacccccttcttctcctccgcagacctatcttttccgtctgcttcggtttgggttcacatttactctattctttttttttcaaccgaaagaatatggggaaaaaggggggcgtggtactgtggcgagatgctgttcgacacgatttttttttgttctgcctcgcgtgtgtgactgacttgacacatttttctttttcctcctcctttttggttgatgcagcatgccaatgcctgtttgttttttgcagtgagaaaaaaaaggtttttgttttcattttgaggggaaagggtgaggagcccagcattggattggaggttggattttggctcccaggtctccaacggacttgagtactactagtagtggtggttgcatggtgcaatcatttgcaggaatccaaatcattcgccctctagatcgtgctgccatgtctctgtccacccccaccaccttgtgttccgcgacgtctcctctctctctctctctctctagagttgctgatagagcgtggcggagctgaagcagaccctgctggcgaccacgctggagctggaggcggcgagggaggagctgaggcggaaggagcagagcatcgccaagctgtcggacctggtgcgcgaggtggccaaggagcgcgacgacgcgcgggaccaggcgcagagcctccgcctcctcgctgcccaggccgcgccgccgctcgtcacgtccagcgtcaccgactccgactgcagcctcgcgtcgtcccccgtggacccgttcttcgaccccgtcacgtccgccgacaacaggcggcgctgcaagttcagccccgccacgccgccggccgcgcccaggcagcagcagcagcgccagcccggcgccgggctcgggtcggcggccgacgccgcgctcgagatgctcgccgccaagaggcccctgccgcacaggggccgcctgctggccgccgtcatggaggccgggcccctgctgcagaacctgctcgtcgccgggcagctcccgcgctggcgcaacccgcccacggtgcgcgcaccggacacgctgccgctcggcgcctcccgcgccgccgggtacgccgacgacgcggtcacgctggccgccagcggctgcacgaagcggccgatggccgcggccttgcccgtgctgcccgccgccagctgctcgccgggcttcatcgccaagcgacagaggctgcactgacggactgacggcaggatccaccgtcgtcttgtgtttgatgatgacgagcgaaacgaaacgtttgaagaagcgatcgatgatggtattagatgctaactgcacagtagtgttatctgagccatagaaagtaacttatgttactagaagtacagtcagtcaggttctgaattttgataatgcgatccatgtgaatagcaggtttttttcccacccgcacttgctcgttttctcttccgtttttcatttttgagcttgtcagtctgaaggctgttcatagctccacatggcttggcttggggtcagcaaatctatgtatctatataagtctgtcattcagtggagagcttgttcttgaaatgttctctgcaagtcaatatatgctactacgtttcatccgtgt

SEQ ID NO: 5641 - DNA, 2078 bp, Zea Mays
accccggaagtccatcacactaataaccagtataactcatgaggagctggttggaatgtccagagaagatcatctcatacccttggttccctgtttcatgaccaccttttctctatattatttatatttactgggatttaccttgtgaattatattctcctgagttcagccgcagatgaatccagtgagacagtggtcatgaactttcaagatgctacagagctaatgcaccagatattcacaaatcctgcaggaccaattgtgctattagtgatccttctcttttcaagccatatcatctcattgacatgcattgttagtggtgaagtaatttcagagaacttctttggtgttaaactgccgctttcggcacatcatctgctacctaagggtctggccatggttcttaatatctattttgcgaaggttgctggtcctgaagggatatatcagttacttattatgtgcccagttatccaggctatgcttcttccttcatcgattatacccattttacgtgtttcctcgtcaagattattgatgggaagatacaggatagctttatgtattgaaatctttgccttcctcgcattccttcttgtggtgttcacaaatataattttcacagcagaaattatgtttggtactagcacttggacaaacaacctgaaaggagatactggaagccctgctatacttccatattctgttgtagtcctaatttcatgtgcatcgattggatttacactgttacttgctgttactccactaaaatcagcaagtaatgaagctcagactcatttatcgtccatgcactcacaaagaggagctttaggcactactcagagagaagcaacatctctgaaaaaatttgagcatgaagaagttcagagctgttctgttggagctgttcttatgggttcatcggaaggtcataagaagtcagtccatctgcggagaactttatctggataattgtgcagatgaagaaattaaggggtcctctgttgatgctgttccaagggattcattggagggtcttcagaagtcaacttttgagattaagtatgattcggacgcctctgatggtggcgccgagcaatttgtggatagattgaagctgaaccatcaccatctataaccaatgaggagccaaaatcagttgtgtagtggatgcaaccagttccagaggtttgtgctatcatcgtaccagtaccataccatagtgtttcagaaaatttcgagatgaagccctcaaatgaaaaaggtggttaaacaagaaggtgaaggtaactcagatgaaggggaaatagatgagctcttaactagacattcaacctgttgatgcccttcctgttatagtgtgttcctatattatccatgtatgtggttgccgctccattaggattagggtttccataggtgtatatatgtaaccattctctattggattagggtttccataggtgtatatatgtaaccattctctatgcaatggaagtgtaatctcaatctgttacatggtataagagctaggtcttctctggcgcccccgcctccctgccccagatctggcgccctcgcctccttgcctctgttgtggtgcctcatgcacacacgtttgcctagccgcggcagagagcacgggcgccgtgcaagcgccgtcgctgttgcgggctagccatgcgagcgtgcgagtgtcgctgtgggccagccacacgtacaggcacgaccatcaccccttgcctggccccttcaagcttcacctgtcgtcgacgtcgctccttcgcctggctagatccggcgtagccccctgcttggatgaaccgcccagccgccctcccattctcttcatcgccgtcacaaccggattcaacgctatcgcgaccttcacggtcgggttcaccgtcttcctggttggatctggcgcggccttctcgtgtggatccatcgtcgcctcctctgttccacgtcgtcggctcccctggccagaatccgacatggcccctccagcgggagcggccaccctgatcgacgcaaacgtgcgcgctgccgtcggcctttctggtggggcttct

SEQ ID NO: 5642 - DNA, 3143 bp, Zea Mays
cgccgcccgccgactttggcggtttgccggccctgcgaatgccaccgctcttcctagctggggtcgtacactctccacgcctcccacgtcttactgctcaccgccaccaccccgccgcctctatctcggtctgcgacgcgttggcccatccctgctccccgccatggtctctcgcccaccgagagttctcgtggcaggggaattccaagcggaaaaggggggaattctggaataaaaggtggctcggtcttaactgttgaggtttcagttgggaggaactacgaagacacctcatcactagttcatgtgctgtggatgatcatcttctctgaggagtggcaatcgactaattggatcgtaaagagagtcaagatggcctgagtttggtttactgttcgctattaagcttagtggtctggtgtcttccatactttcgctgattaacattatttctgcaccatgaatagtgtgcatagtatagaatctctggctgctggggatgctcaacataaacttttccaaacccttggaccaacgctcttgatttcgatggcatatattgaccttggaaagtggttggtagcagtggatgctggatctcggttcggctatgatcttgtgctactggtgctgttcttcaatttctcagccattttattccaatatctgtcaacgtgtatcggcatggtcactgggaagaatcttgcagagatctgctgcctggaatacagtaaggtgatatgtgttgttcttggtctccaggcatggctatccttattgacctctgaattgacaatgattgcaggcatggcagtggggttcaaccttgtgtttgaacatgacaatcttatcacagccatatgttttgcaagtgttgttgttaatctactaccatacacactctcccgactggataaggtggctgggatatgtaatgcctgtatagctggatttacacttctttgttttgtgcttggtttattaatcagtcacccacataccccagtcaatatgaatgcgatgtttcccaagttgagtggtgaaagcgcttattcactgatggcacttcttggcgcaaatataatagtacacaacttttatacgcattcggcatttgttcaggtccagagaagatcatctcatacccttggttccctgtttcatgaccaccttttctctatattatttatatttactgggatttaccttgtgaattatattctcctgagttcagccgcagatgaatccagtgagacagtggtcatgaactttcaagatgctacagagctaatgcaccagatattcacaaatcctgcaggaccaattgtgctattagtgatccttctcttttcaagccatatcatctcattgacatgcattgttagtggtgaagtaatttcagagaacttctttggtgttaaactgccgctttcggcacatcatctgctacctaagggtctggccatggttcttaatatctattttgcgaaggttgctggtcctgaagggatatatcagttacttattatgtgcccagttatccaggctatgcttcttccttcatcgattatacccattttacgtgtttcctcgtcaagattattgatgggaagatacaggatagctttatgtattgaaatctttgccttcctcgcattccttcttgtggtgttcacaaatataattttcacagcagaaattatgtttggtactagcacttggacaaacaacctgaaaggagatactggaagccctgctatacttccatattctgttgtagtcctaatttcatgtgcatcgattggatttacactgttacttgctgttactccactaaaatcagcaagtaatgaagctcagactcatttatcgtccatgcactcacaaagaggagctttaggcactactcagagagaagcaacatctctgaaaaaatttgagcatgaagaagttcagagctgttctgttggagctgttcttatgggttcatcggaaggtcataagaagtcagtccatctgcggagaactttatctggataattgtgcagatgaagaaattaaggggtcctctgttgatgctgttccaagggattcattggagggtcttcagaagtcaacttttgagattaagtatgattcggacgcctctgatggtggcgccgagcaatttgtggatagattgaagctgaaccatcaccatctataaccaatgaggagccaaaatcagttgtgtagtggatgcaaccagttccagaggtttgtgctatcatcgtaccagtaccataccatagtgtttcagaaaatttcgagatgaagccctcaaatgaaaaaggtggttaaacaagaaggtgaaggtaactcagatgaaggggaaatagatgagctcttaactagacattcaacctgttgatgcccttcctgttatagtgtgttcctatattatccatgtatgtggttgccgctccattaggattagggtttccataggtgtatatatgtaaccattctctattggattagggtttccataggtgtatatatgtaaccattctctatgcaatggaagtgtaatctcaatctgttacatggtataagagctaggtcttctctggcgcccccgcctccctgccccagatctggcgccctcgcctccttgcctctgttgtggtgcctcatgcacacacgtttgcctagccgcggcagagagcacgggcgccgtgcaagcgccgtcgctgttgcgggctagccatgcgagcgtgcgagtgtcgctgtgggccagccacacgtacaggcacgaccatcaccccttgcctggccccttcaagcttcacctgtcgtcgacgtcgctccttcgcctggctagatccggcgtagccccctgcttggatgaaccgcccagccgccctcccattctcttcatcgccgtcacaaccggattcaacgctatcgcgaccttcacggtcgggttcaccgtcttcctggttggatctggcgcggccttctcgtgtggatccatcgtcgcctcctctgttccacgtcgtcggctcccctggccagaatccgacatggcccctccagcgggagcggccaccctgatcgacgcaaacgtgcgcgctgccgtcggcctttctggtggggcttct

SEQ ID NO: 5643 - DNA, 1003 bp, Zea Mays
caagaaagcaattgatgacgtggccgtccaccccccctcgcatcggataagcccttcttccctccagagaggcagagagagactcgagtactagactagagtctcaactcttgagcagggaaaacgagagatccttggagtcagcaatggagtctaccgcgctaatgaccgcgagactaccactgctgacctctggctcccgttccaaacccctcccctttgcttccttcaccagggcggcttgccgtctcgcctccgcccccttctccggcagcggcagcgtcgtcctgctgtcgcgccggagccgcgactatgctggcgttggttccttggtctccgccgcggcggatcctggggatacggcggacgccggatccgagtccatcctgctcagcgtccaggggatgatgtgcgacgggtgcgccgcgagcgtgaagcggatcctggagagccaacccgaggttacttctgctaccgttgattttaaggaagcaagcgcagtcgtgtggacaacagatgaggccaaggggacacaaggttggcagaagcagtatggagagaagcttgctaagcaccttggcacttgcggatttgagtctcgcctacaagagtaaggtgaagccgaaccgatattgaagttcagatcagatgtcaccttaatggtcaatttataccaggatatatgttaaatattttgtctctatggattgcagttgtaggattagtctcggtgcttgtctggtggcataatactacatacctacctttcacatgatctttagctagattgtttcgaataggatgatgtcctaaaattgtaggtgtaggccactgttgcgaggaaggagtttgcggctgggctattgttaaatccggtcttcccgttgcttcgaagatataaagtgatactacctctataactcaaaataaatcgattttttaaactcactatgagtcagattgtcttaagcttaaccaactttataaaaacgtaacaacatat

SEQ ID NO: 5644 - DNA, 1132 bp, Zea Mays
aaagaaggaaaaaagttcagagcaagggaagacctccctcatgacacagcagaaaactagcaacaccgacgggagcgggagtgcgcgcgggcgacgacgggagggcagttggacgcgatgaagggaaatggcgagccgtactccctcgtcaaagatacctagcaaaggggagcagacgacgagctggatagagaagatatatagaaagcgagcctgttggatacgattttaacatgcttttctattttttaccgattcttattagtttagcgaggttgttggagttgttctaaacaagacagagacataccatgttgcatgtatttgttttgcttagtatgcacgatacagttgaagatgatacaaaacttttgtggtgctcatataggagaactttttatttatctattcatggattgtttcctatatttgcatccacatcggtctgtactgatctgattaaataagtcaaggttttttttcatttcttttagtgttacttttaatttgctttcacttataaatggacgcttttgcagcccgaggttacttctgctaccgttgattttaaggaagcaagcgcagtcgtgtggacaacagatgaggccaaggggacacaaggttggcagaagcagtatggagagaagcttgctaagcaccttggcacttgcggatttgagtctcgcctacaagatgatcaacgaacgatcacgtgaagttacatgctagaagccaaagagtaaggtgaagccgaaccgatattgaagttcagatcagatgtcaccttaatggtcaatttataccaggatatatgttaaatattttgtctctatggattgcagttgtaggattagtctcggtgcttgtctggtggcataatactacatacctacctttcacatgatctttagctagattgtttcgaataggatgatgtcctaaaattgtaggtgtaggccactgttgcgaggaaggagtttgcggctgggctattgttaaatccggtcttcccgttgcttcgaagatataaagtgatactacctctataactcaaaataaatcgattttttaaactcactatgagtcagattgtcttaagcttaaccaactttataaaaacgtaacaacatat

SEQ ID NO: 5645 - DNA, 1420 bp, Zea Mays
cccttcttccctccagagaggcagagagagactcgagtactagactagagtctcaactcttgagcagggaaaacgagagatccttggagtcagcaatggagtctaccgcgctaatgaccgcgagactaccactgctgacctctggctcccgttccaaacccctcccctttgcttccttcaccagggcggcttgccgtctcgcctccgcccccttctccggcagcggcagcgtcgtcctgctgtcgcgccggagccgcgactatgctggcgttggttccttggtctccgccgcggcggatcctggggatacggcggacgccggatccgagtccatcctgctcagcgtccaggggatgatgtgcgacgggtgcgccgcgagcgtgaagcggatcctggagagccaacccgaggttacttctgctaccgttgattttaaggaagcaagcgcagtcgtgtggacaacagatgaggccaaggggacacaaggttggcagaagcagtatggagagaagcttgctaagcaccttggcacttgcggatttgagtctcgcctacaagatgatcaacgaacgatcacgtgaagttacatgctagaagccaaagctatgtgcaaacgatgatacagttattaaagttgactataaagtggaaactgccatgagaaaacgtctagctccggatccagatgttttttttttcacgagaagagataaagatgtgtgtgtttttttgctggatttggtttagtgtacaagatggatctaaatggaatcagcatttggtcataaaatgatgagtaccgcttacttaaatcaacaatgcaaattgctcttgaaaatacgcaaaactgatttttattctgtatatgatgttgaggatgtctgaggcatagttgtaaacaacgaatagttgaggcaggttttgtccggatattgactgtaccacttcctcagtattttgaaatcatagttcaactcttgagcctgccgtgagccagtgagctaactatacctgtttctctttcagagtaaggtgaagccgaaccgatattgaagttcagatcagatgtcaccttaatggtcaatttataccaggatatatgttaaatattttgtctctatggattgcagttgtaggattagtctcggtgcttgtctggtggcataatactacatacctacctttcacatgatctttagctagattgtttcgaataggatgatgtcctaaaattgtaggtgtaggccactgttgcgaggaaggagtttgcggctgggctattgttaaatccggtcttcccgttgcttcgaagatataaagtgatactacctctataactcaaaataaatcgattttttaaactcactatgagtcagattgtcttaagcttaaccaactttataaaaacgtaacaacatat

SEQ ID NO: 5646 - DNA, 1443 bp, Zea Mays
gagagactcgagtactagactagagtctcaactcttgagcagggaaaacgagagatccttggagtcagcaatggagtctaccgcgctaatgaccgcgagactaccactgctgacctctggctcccgttccaaacccctcccctttgcttccttcaccagggcggcttgccgtctcgcctccgcccccttctccggcagcggcagcgtcgtcctgctgtcgcgccggagccgcgactatgctggcgttggttccttggtctccgccgcggcggatcctggggatacggcggacgccggatccgagtccatcctgctcagcgtccaggggatgatgtgcgacgggtgcgccgcgagcgtgaagcggatcctggagagccaacagggaagacctccctcatgacacagcagaaaactagcaacaccgacgggagcgggagtgcgcgcgggcgacgacgggagggcagttggacgcgatgaagggaaatggcgagccgtactccctcgtcaaagatacctagcaaaggggagcagacgacgagctggatagagaagatatatagaaagcgagcctgttggatacgattttaacatgcttttctattttttaccgattcttattagtttagcgaggttgttggagttgttctaaacaagacagagacataccatgttgcatgtatttgttttgcttagtatgcacgatacagttgaagatgatacaaaacttttgtggtgctcatataggagaactttttatttatctattcatggattgtttcctatatttgcatccacatcggtctgtactgatctgattaaataagtcaaggttttttttcatttcttttagtgttacttttaatttgctttcacttataaatggacgcttttgcagcccgaggttacttctgctaccgttgattttaaggaagcaagcgcagtcgtgtggacaacagatgaggccaaggggacacaaggttggcagaagcagtatggagagaagcttgctaagcaccttggcacttgcggatttgagtctcgcctacaagagtaaggtgaagccgaaccgatattgaagttcagatcagatgtcaccttaatggtcaatttataccaggatatatgttaaatattttgtctctatggattgcagttgtaggattagtctcggtgcttgtctggtggcataatactacatacctacctttcacatgatctttagctagattgtttcgaataggatgatgtcctaaaattgtaggtgtaggccactgttgcgaggaaggagtttgcggctgggctattgttaaatccggtcttcccgttgcttcgaagatataaagtgatactacctctataactcaaaataaatcgattttttaaactcactatgagtcagattgtcttaagcttaaccaactttataaaaacgtaacaacatat

SEQ ID NO: 5647 - DNA, 1314 bp, Zea Mays
gatgttttccaggcaaaccccaattttgttgaagatgagaaggcatatgagaatctaaagagaagcatcctgggagcagagtcttctgaagatgaagaaggatcagatgctgcttctgatgatgatgatgatgatgatgatgaatctgatgaagaggatgaggaacaaatggagataagggatagaacagagacaaatcttgtgaatcttagaagaacaatatatttgactattatgtctagtgttgattttgaagaagctggacacaagcttatgaaaattaagcttgagcctggtcaagagatggagctgtgcattatgcttcttgagtgttgcagtcaggagagaacatatcttcgttattatgggctgctaggacagcgtttttgcatgatcaataaagtgtaccaagagaacttcgaaaaatgctttgtgcaacaatattcgatgattcatcgtcttgaaacaaacaagttgaggaatgttgccaagttctttgcacatttgttggggactgatgcactcccttggcatgttttggcttacatcaggaattatcggagcacctgggcatacgcctactcaatgagaggctgaatgatcctaacatgcaaggttcctttgagtctatcttcccaaaggatcatccgaagaatacaaggttctcgatcaacttcttcacgtccattggtcttggtggtatcacggaaagcctgagggagtacttgaagaacatgccacgtctaataatgcagcagcagaagccagaatcatcagagtcagattcaagtggatccgaatctggttcggaaagctctagttcagggtccagttctgagcctgagtcagaatcaagccctgatgagcgtgacagaaggcgaagtaataagaggaggaagaggacttgagagcacttccaactatgctttttggaattcatgtatttggttttgtttaaatgtgcttcttcagtatacatgtgcagtatgtgatctagctcttgatgtgttagtggtaatcagaaagccgtaacagtaagatactattcgaacttgtacgtggcaggttggtagtccagcaacaaagggccaacagagatcttgtttatttttcataacttccaatgcagaacaagttctgtacgtgggtatttgtaccattgcgacatcacactgctagccatgttctgtatcctgtagtgtggtaactggtaagcatcaaatatggacatcggttttgatttttttctgctcgttttttccccagtatatagacagtcaaagctataggcttctgtggccttcacaatttttg

SEQ ID NO: 5648 - DNA, 2147 bp, Zea Mays
caacgcggtcgcgtcaactccacctgcgcccctcaggccctcacgagtcacgacctcgtcttcgcgggcgccgccgaccggatcctcccgacgctatcgcggtcaaccctgcctgcaccctcacgacctcgtcttcgcggtcgcacatgatcacgtggtcaaatcccgctccgttagcaagtaccaccagcagcaagccagcaacccaatgctgtgctcctcccacctcctgctgcgcgcacaagtcaactcctgtctgcggccgccgcgccccacgccggtccccatggctcgttccgctcccactttcgtcgctgtttttctcctagtcctcgtgcttctcaccatggacgcggcgcagggtcaacagccgttcccgctgtccaccgatccatccgacgcggatgctctgcacgctgtgttccggcagtggagactggagggcggcgcggcgatggaggacccgtgcaggaagggcgtctggtcagagtcgtccggaataaacgcgtccgtcgaatgcaactgcctcccctcaagggtgtgccgcatcacaagcctaaatgtgagtgggcacgggaacatctcggcgatcccgcgggagctattcaatttgacagaactggtctctctggatttaagtaataacaacttgagtggttcgatacccccggaagttattaatctttccaaactggaaacatggcacttcaataataatcctctcagtggaggttttcctcatgaactgtcgcttttaaggaatctacggtccctgtggatgtttgataattacattgtagggccttttccggcatttattcagaacttaaccaatctcacagacttgcgaatatatgggacgaatcttcaaggacctattccaaaaaatttctctaatctgagcaatcttgaagtcctgatgcttggtgatcttgcgggcaaccattcttatttaaatgtcataggagcgtgggcaaacctttcagtgttatctctgagaaaatgtggtcttacaggtcaggttcctaatactcccccaaacttgcccaagctaaaatatctggatttgacatcaaacaacttatcaggatcaataggaggactcttgctttcatataagacctcaaattacatatatgtaggtggaaacaacttaagtggacctgtgccttctgaaattgttcaatcatcagtttccttggatgtttcgtataactattatgttgacggatccctttctaacaatccttctggtcagaagcagttcataaattatcttggaacatcaattgatgcaagtggaagaatcaacagtggaaatcttacaatcctgaactgccttcgcatgaacgaatgcaacataaataatttaactaagatagtcataactcatggacctggaaagcgcttatttgacattgatattcaggaccagaatatcaggaaggactttgacattactaaggaagcagggggttccagaaaagccactaacataacctacgaagtgactgttgataactccatactggcaatacatctgtattggagtggacgcggcacctgttgtattccatatgaaggagcttacgggccactagtttcagcaataaaagttacccattcccaagacccgaaaaccagtcccccacaagcaccacattctgattctgcccgagatgatgtaaagcgaagaggagtggttgcaggcattgcagcactttccatagctgctgcggtgatatcttcatctgttgtctacctttggtggaaatgggtttcacttgtgaagcgcccaatggcatgagttcgtcagatgtttgcatatagttgattctcccacaaatttccatgtcatgcgaaggactctatgtatttgtcttttagcgttggctgctagcaactagccaactagcatagccaagatgactgatgtacagttgacgttgcgatcacggttttaggtctcaagttttgtttcacgattattgtaacctaggaaattatctaagacattctgctgctaatatgttgtttgtttgttgatcaaagtgattcaaatcgcattgtgatatattgtttgtttgtcgatcaaactcattgtaaaactattctcggacgaatgtcacatttcacgtgttgccaac

SEQ ID NO: 5649 - DNA, 2514 bp, Zea Mays
gccgcaccgcatctcccgtccgtcgatcggatttccccactccacccccaacgcggtcgcgtcaactccacctgcgcccctcaggccctcacgagtcacgacctcgtcttcgcgggcgccgccgaccggatcctcccgacgctatcgcggtcaaccctgcctgcaccctcacgacctcgtcttcgcggtcgcacatgatcacgtggtcaaatcccgctccgttagcaagtaccaccagcagcaagccagcaacccaatgctgtgctcctcccacctcctgctgcgcgcacaagtcaactcctgtctgcggccgccgcgccccacgccggtccccatggctcgttccgctcccactttcgtcgctgtttttctcctagtcctcgtgcttctcaccatggacgcggcgcagggtcaacagccgttcccgctgtccaccgatccatccgacgcggatgctctgcacgctgtgttccggcagtggagactggagggcggcgcggcgatggaggacccgtgcaggaagggcgtctggtcagagtcgtccggaataaacgcgtccgtcgaatgcaactgcctcccctcaagggtgtgccgcatcacaagcctaaatgtgagtgggcacgggaacatctcggcgatcccgcgggagctattcaatttgacagaactggtctctctggatttaagtaataacaacttgagtggttcgatacccccggaagttattaatctttccaaactggaaacatgctaggcacttcaataataatcctctcagtggaggttttcctcatgaactgtcgcttttaaggaatctacggtccctgtggatgtttgataattacattgtagggccttttccggcatttattcagaacttaaccaatctcacagacttgcgaatatatgggacgaatcttcaaggacctattccaaaaaatttctctaatctgagcaatcttgaagtcctgatgcttggtgatcttgcgggcaaccattcttatttaaatgtcataggagcgtgggcaaacctttcagtgttatctctgagaaaatgtggtcttacaggtcaggttcctaatactcccccaaacttgcccaagctaaaatatctggatttgacatcaaacaacttatcaggatcaataggaggactcttgctttcatataagacctcaaattacatatatgtaggtggaaacaacttaagtggacctgtgccttctgaaattgttcaatcatcagtttccttggatgtttcgtataactattatgttgacggatccctttctaacaatccttctggtcagaagcagttcataaattatcttggaacatcaattgatgcaagtggaagaatcaacagtggaaatcttacaatcctgaactgccttcgcatgaacgaatgcaacataaataatttaactaatcgtgcaacttccttcgctataaactgtggtggcaagcaagtggagtattcagatctaatgccaattatgttctctgaagactccactgatcttggaggatcaggctttcatgttaatgctactagtcattgggtagttagtcatgtgggttctgatccatttaacgaatccaccggtattgtaaatacaagtgatatttttgaaaccaacatgcaagagctctaccaaacagcaagaacttcaacaagttcgttgtggtactatgtggtaggtttagctaacgggaactacacagtccaactcttctttgcagagatagtcataactcatggacctggaaagcgcttatttgacattgatattcaggaccagaatatcaggaaggactttgacattactaaggaagcagggggttccagaaaagccactaacataacctacgaagtgactgttgataactccatactggcaatacatctgtattggagtggacgcggcacctgttgtattccatatgaaggagcttacgggccactagtttcagcaataaaagttacccattcccaagacccgaaaaccagtcccccacaagcaccacattctgattctgcccgagatgatgtaaagcgaagaggagtggttgcaggcattgcagcactttccatagctgctgcggtgatatcttcatctgttgtctacctttggtggaaatgggtttcacttgtgaagcgcccaatggcatgagttcgtcagatgtttgcatatagttgattctcccacaaatttccatgtcatgcgaaggactctatgtatttgtcttttagcgttggctgctagcaactagccaactagcatagccaagatgactgatgtacagttgacgttgcgatcacggttttaggtctcaagttttgtttcacgattattgtaacctaggaaattatctaagacattctgctgctaatatgttgtttgtttgttgatcaaagtgattcaaatcgcattgtgatatattgtttgtttgtcgatcaaactcattgtaaaactattctcggacgaatgtcacatttcacgtgttgccaac

SEQ ID NO: 5650 - DNA, 2517 bp, Zea Mays
cgagaccgccgcaccgcatctcccgtccgtcgatcggatttccccactccacccccaacgcggtcgcgtcaactccacctgcgcccctcaggccctcacgagtcacgacctcgtcttcgcgggcgccgccgaccggatcctcccgacgctatcgcggtcaaccctgcctgcaccctcacgacctcgtcttcgcggtcgcacatgatcacgtggtcaaatcccgctccgttagcaagtaccaccagcagcaagccagcaacccaatgctgtgctcctcccacctcctgctgcgcgcacaagtcaactcctgtctgcggccgccgcgccccacgccggtccccatggctcgttccgctcccactttcgtcgctgtttttctcctagtcctcgtgcttctcaccatggacgcggcgcagggtcaacagccgttcccgctgtccaccgatccatccgacgcggatgctctgcacgctgtgttccggcagtggagactggagggcggcgcggcgatggaggacccgtgcaggaagggcgtctggtcagagtcgtccggaataaacgcgtccgtcgaatgcaactgcctcccctcaagggtgtgccgcatcacaagcctaaatgtgagtgggcacgggaacatctcggcgatcccgcgggagctattcaatttgacagaactggtctctctggatttaagtaataacaacttgagtggttcgatacccccggaagttattaatctttccaaactggaaacatggcacttcaataataatcctctcagtggaggttttcctcatgaactgtcgcttttaaggaatctacggtccctgtggatgtttgataattacattgtagggccttttccggcatttattcagaacttaaccaatctcacagacttgcgaatatatgggacgaatcttcaaggacctattccaaaaaatttctctaatctgagcaatcttgaagtcctgatgcttggtgatcttgcgggcaaccattcttatttaaatgtcataggagcgtgggcaaacctttcagtgttatctctgagaaaatgtggtcttacaggtcaggttcctaatactcccccaaacttgcccaagctaaaatatctggatttgacatcaaacaacttatcaggatcaataggaggactcttgctttcatataagacctcaaattacatatatgtaggtggaaacaacttaagtggacctgtgccttctgaaattgttcaatcatcagtttccttggatgtttcgtataactattatgttgacggatccctttctaacaatccttctggtcagaagcagttcataaattatcttggaacatcaattgatgcaagtggaagaatcaacagtggaaatcttacaatcctgaactgccttcgcatgaacgaatgcaacataaataatttaactaatcgtgcaacttccttcgctataaactgtggtggcaagcaagtggagtattcagatctaatgccaattatgttctctgaagactccactgatcttggaggatcaggctttcatgttaatgctactagtcattgggtagttagtcatgtgggttctgatccatttaacgaatccaccggtattgtaaatacaagtgatatttttgaaaccaacatgcaagagctctaccaaacagcaagaacttcaacaagttcgttgtggtactatgtggtaggtttagctaacgggaactacacagtccaactcttctttgcagagatagtcataactcatggacctggaaagcgcttatttgacattgatattcaggaccagaatatcaggaaggactttgacattactaaggaagcagggggttccagaaaagccactaacataacctacgaagtgactgttgataactccatactggcaatacatctgtattggagtggacgcggcacctgttgtattccatatgaaggagcttacgggccactagtttcagcaataaaagttacccattcccaagacccgaaaaccagtcccccacaagcaccacattctgattctgcccgagatgatgtaaagcgaagaggagtggttgcaggcattgcagcactttccatagctgctgcggtgatatcttcatctgttgtctacctttggtggaaatgggtttcacttgtgaagcgcccaatggcatgagttcgtcagatgtttgcatatagttgattctcccacaaatttccatgtcatgcgaaggactctatgtatttgtcttttagcgttggctgctagcaactagccaactagcatagccaagatgactgatgtacagttgacgttgcgatcacggttttaggtctcaagttttgtttcacgattattgtaacctaggaaattatctaagacattctgctgctaatatgttgtttgtttgttgatcaaagtgattcaaatcgcattgtgatatattgtttgtttgtcgatcaaactcattgtaaaactattctcggacgaatgtcacatttcacgtgttgccaac

SEQ ID NO: 5651 - DNA, 1400 bp, Zea Mays
acccgattcaaacggtttcaaaagcgcgaccccaccgcagcccgcagggtccacggctctcgtttccgcccgcgccacccgccatgtcgtccccgccgcgggggcagcccgccaccgccgccgtgccggcggtcgcggccgccacgtccccgcagttgcctgcggcgtcccacacgctcccccgcgcgttcctcgccacatcctctccccgtgccatagtggcagcaccggcgcccccgctattcaccggtcggccgctgaaccctaacccaccggcccacggctcctccgtgccccacggcatcctctaccccgtcctgaaatccgcctccacgtccaactccgcggccgcggccgtgacagcgcagctccgccgcgttcctcccatggccgtggggtaccctcggacccacgccgtcgccatccctattgcacagcagcagcagcccctggtgcacgcgcaaccccggtccttcgcggccgtgcctcgggcccttgtgactggcgtgtcgacggggtccgaacagcctccccgaggagttcctataggctcgcagcccaaggttaatccagtaccacctgttggcccatccaatgagcagagtaacccaaaagacagggaaaagagcagagaagaacctacagttgtggtgattaatgaccgcaaagttaacctgctggatagtgagtcgggatccttttatgctctctgtcgatcttgggttcgtaatggtgttccacatgaaagtcagccaagctttggaaatggtgaaccacttcttccaagacctttgcctgcttcagttgtagattctagaatatcagacaaggacgataatgatgttgcaggtgaagattcagatgaagagccacagaagatgccaacggtgaatacaatacaagtgatttattgaagcagcatgtaaagcgtgcgaaaaggatacgtgctgggttgcaaaaggatcggcttcgtcggattgaaagatacaagcaacgccttgcacttcttttgtagaatcggcctgtgactgtataaagctgaaaccataggtgtttgtcttgcaggttttaacttccgtattggaatttgttaagatgttttattgactagcattgtatgttaggaccatctggatgttttattgccaacgttatctaataaaatgtgaaaaagcctttagctaagttggttggatgatctgagtagcactattaaagttttgagtatggtgccactgtgcatgggtgagacaaaggttcgaagttcgaaggttttctcgagctgcatgagaagatcttaaatgtaatgtaggtcttcttaaaggtaatgccgttgaggtggtcttaccatatatgtggattttttttatctagtgaaatgaaactgaaatcatagtcat

SEQ ID NO: 5652 - DNA, 3676 bp, Zea Mays
ggccacaaacacccgcgctcgtcgctgtctcctcctcgccttttgccccgcatcgcgtctcgctgaaaccctctcggtcaccgccgctgtcgatcagacccggctgtagctcagggaccccgtcgctgcagtatcctccgagggtcgttggcgggggagtcgtcgtcgtcgtatttggctgccggaattcgatgcgccacggagcgggcgagaggacctagttgagttgaatacggcagcgacgggaggacgtgatgccgggggtggcgtccgcagcgggatcggggatctggtcgcgccggcgggacgagatcacgttcgatcgccttcagaagttctggaatgacttgcttcctcaagcacggcaggaactcctcaaattagataagcaaactctcattgaacaagcacgcaagaatttctactgctcaagctattgaattaagaattacacatggagagcaagatggcgctcaggacccatcaatccatccctggggaggcctttcaaccacaaaagatggcttccttacgcttcttgactgctttataaaagcaaaatcattacgggtgcttcagaatgtctttgacaatgcacgggcaagagaaagggaacgggaaatgctttatcctgatgcctgtggtgcaggtggcagaggatggatcagccaagggatggctaactataggggtcatggaataagagaaatgtgtgctctacacactgcccacctttcatgtactacactggtggatttctggtcagcgcttggtgaaggaactagatcatctcttctgcggatgaaggaggaagatttcattgaaaaacttatgtacaggtttgatagtaagagattttgccgagagtgtcgaaggaatgttatccgtgaattcaaggatctgaaggaactgaagcgcatgcaaagggaacctcgctgcaccagttggttttgtgttgcagatactgcttttaagtgtgaggtgtttgaggatgctgtcgtaattgattggcaccagtgcttatcagagccagatgaatcttatgaccactttgaatgggctattgggacagatgaaggagaatccgatatttttggctttgaaaatgttggaatgaatgcacaagtccacagaaatggaatcgatcttgatcagtttgaggactacttcataacgttgcgagcttggaggcttgatggccagtgcacagagctgtgtgtaaaagcacatgcattgaagggtcaatcatgtgctcaccacaggctagtggtgggtgatggctttgtgactatgacaaagggtgaaagtattagaaatttctttgagcatgctgaagaggccgaggaagaggatgaagacgatgccatggacagggatggaaatgattttgatggtgatgatgcccattcacagaagcatgccaagagccctgaactggcaagagaatttcttttggatgctgctgctgtgatattcaaagaacagattgagaaggccttcagggaaggtacagcacagcaaaatgcacgtagtgtttttgtgacccttgctttaaaacttttggaacagcgagttcatgtagcatgcaaagaaataattacgttggaaaaacagaacaaacttcttgaagaagaggagaaagaaaagcgtgaagaacatgagcgcgggatgaagaggagaacaagagagagagaaaagaagaacagaagaaaagaaaggctgaaagaaaaggatcatagtaaaggaaaaagactagttgaatcaaagtcaccagacaatatttcatcttcagctccaagcaactccacagcatctatcaatgattattcgacaaatactctggactcaagagattcagtgtccactgcaatgcagtgacagaattttctccaatggacaacagtgacatttctacatcagatcaacccaagtctttgagacgaagtccaagatcaagagattattttcctcaagatcagtcatgttggtatgatgactgcggagatgagtctggaagaattggtgaattacgatggaagtcaagggaaaagacaagaggtactgatagaagttgcaacacagcatccacctcaaataacaagacaagagagaggcactcatacaatttttgcagctgtggccatccagaagactatggagttatggacagctgtttcttgccaacagttagatctgtcagagagatgaagatagcaagaaaatcaggagttgagaaacctaaggtgcagtacaacagatgctatacattggatagctttatagtgccaaaaggaaaccatgctggttgtacacagaaaaatgctatcccaaagcaagtatgggagcctatggatgctcgaaggaagactaacttacacaacacagttcatgattcaggttcaattaacgatgttgatccactgaaacatgtggtttttgataacagcggatctcataagttcagtgtaagatgtgaatcacagcctcaggcttctgaaagttccagggatgtttgtaattcagatcaaagatgtgcaaatggtgggagaaatcaaactacttcctgtgctagtactcttatggtaaataaacaaaattgttactcagaaaatgatgaaggctccaggcatgatgtagagctgatgacgaactctgctagttctgatagcacctcgtcatgcatgagccagggagatagggaaagcagctccagcagtacaacctcttcgagcgctcaaaatccggaatcatcttctgaatctgaggaatcaccggagagaataaacagcacagtaggtacaccatcatcaagagctgcttcacggtctttgcttgaagcatgtgcaggaaatggtttcagagaataccaacccaagacaacccgcccagctcacaatgacatgtttgggtacaatgtatcccctgtccaagaccagctgctgcattaccaaatcacgcatccacctcaacaaccgccaataacaatgggatttcatgaccgttcttgggctgcaccaacgaatggaaactttcaccatatacctccagagcctattcacaaggccgcaggcagctttagagccgtgcctctgtcactgccttttcaaaacggacatcggcaggttgctgagcatactcagagagacatgaatctagagaggcacccttcgaagttgactatgctgacaggcaaggatcccccagaagacaagaacaagtcgggactaaagtatctcccagaagacaagaacaaatcatgggaggcggatgcatccttctcgttgttccaattcaacttgccaatagcttcgcctgtaacaccatcatcgaaagataagagcggaaagttggctgcaaggacgccactggttgaggttcaacctcagctttgcttgagggaacaggcagatgtgaagcagtataacctcttctcctcgaaagataatggtatattttcgtttatgtagataaattaaaaactgtgacaaatctgttatccttcgtttctgctgtctcttgctgcacttcgtgaatgatttgtgttctccggagaaaaataaaggctgttggcattttcctcttgctgtctgtatcttcgtttacctttatgtttgttcccgtgtgcgctaaaagctagcaaactgtaatgctgctgactcttgattttttttataga

SEQ ID NO: 5653 - DNA, 1958 bp, Zea Mays
gagctgagctcatggtgatggggaggccaagcaacagccacgggggcgggggcgacgaggagcggctgcccctccgcggcgtgctggagacgtccccgtcccatcacgccgcggtgcaggccaaggacaaggaggcgaggcgcgggggcagcaggctctggcgcgcgtccgtgcgcgcggggctgctgctctgcctgctgaccgtcccggccgtcctgctgctgctgtggtggcaggccgactcctcgccgcagtgggtcttcgacttcgagccacccgaggaagacgacgaccaagatatacaagacgacatgtcagacgatctatctccgtcgccgcaaatagagtacgatcgtcttctgggcggccttctcgtcgagggttttgacgacaaatcatgcagaagcagaagaagtgcggcccaggcaccagagcatacagggaagcttcgaagcagctgaaatccggtcagagcatgagcatcaacgccacagacgactgcaactacctgttccttatcatccacgccggcttagggaaccggatgctcgagatcacttcggcgttcctctacgcgctgctcacgaaccggatcttgctcctggaccgttacaaggagatcgcggatcttttctgcgagccctttcctggaacgtcgtggctggttccttcggacttccctctgaacgacgacgagttcggccagagcagcgctgagagctacggcaacatgctgcagaacaaggctttcggtggtggtacggaccgatctttggttggcaacagactccctccctatgtgtacctccacctggacggcaactatggtttccacgacaaactcttcttctgcgaggacgaccagcagttcctgcgaggtgttccgtggctggtcatgaggacggacatgtacttcgtgccgtccctgttcctcgttccagctttccaggacgagctcggcaggctgtttcctgagaaagacaccgtcttccatcacttggcgcgctatcttttccatccgacaaatggcgtctggtattcggttacaagatgcttcaggtcctacctggccaaagcggaaaaaagggtgggaattcagatcaggatatatgaaaccaaaggtatcttgcagagaaacggcccgttcccacacattctgaaccagatcctctcgtgtgctcaaaacgagaagctgcttccagaaatcagtatggcagagggagcagccgatgggactcggaataaccgaacagcagccgggagtgggactcggaacaaccggacgatcgctgttctaacgacttctctgagcgcttggtacagcgagcagatccaggagaagtacgacgagcagtcggctgttgatggcgtgtctgtcagagtgttccagccgagccacgaggagtaccagaggtcgaggaacaaggggcacaacatgaaggcgcttgctgagatctacctattgagcatgaccgacgtgctgatcaccagtggcttttccacgttcgggtacgctgctcaggggctcgccggcctgaagccgtggatcatgcttaagtcggagaaccacgtgacgccagacccaccgtgcgtccgcgccatgtccatcgagccgtgcttccatcaagctcccttctacgactgcaaggcgaggaaggacaccgatttgggcaaggtagtgccttacgtgaggcactgcgaggacgtgagctgggggctcaagattgtagatcaaactcatttgtagtgtagctgtaatctggtcaggactcacggcagacttgcttgctaactagggcagaactattgttattcttattcttaatctgcgaaacacaaaggaaccatacaaaatgtattctttccctcctgtatttgatccaagtgtagatagttgatagacagatccattaatctgttcatcctctgatgtcaaaaggaagagaaacatgtttact

SEQ ID NO: 5654 - DNA, 1939 bp, Zea Mays
cggcccgcgagaggggatggcgtccacggctcgcccgctccgctcttataacagccgcttcctacgtctctcgcgcatcccttccgagcggaagcggcagcccgtcaggattcaaatctgccggaaacctgtatcttcatccagtatcaaggggaagttctgttgttgtgtgttcggtgatggatacatccaaaagcaagcaaggaccagaacatctccttgttcttgtccatggtatcatggctagccccaaagactggacatatggggaagcagtgctgaagaggcggttgggtgatgattttttcatatatgctagttcaacgaacagctacaccaaaacctttgatgggattgatgttgctggaagaaggttagcaaatgaagtcttggaagtggttaacaagatgcccagcttgagaaagatttccttcctagcgcattctctgggtggtttgtttgctagatatgttattgcaatactccactcagtctcagtggaaacaaagaatgcaggacagagtagtgcacttattgttcctacaacaagagggccagcaaaatcgagatgtgcttcaggattaggttctattgctggattgcggccaattaattttattaccttagcaaccccacaccttggggttagagggagaaatcaggtgcatcaccaaaatgtttcggattacgtttacaaaatatactgcacattatccagcaaaggctcgattcctgggaaaacgaactctctatttgttattttgttcattcatgtagattttgaagttgcatggtatgatttttacaagcttggattatatcattgctgaagtggtcaataccaactagcatctataacttttgaggaaaaaacgacgaacttattgggacctgttcctgttagtgctgatcaatttctttgacacatgcttatatgtttttcccccgaattaccagcttccgtttcttcaaggcctatcaatcctagaaaagcttgctgcgcctttggctcctttaattgttgggcgcaccggtgctcaactcttcctcactgatggtgatcctagcaaggcacctctcctgttacagatggcatccgactgtgatgacaaaaactacatatcagccttggcagcttttaagaaccgtgtcctgtatgccaacgtctcgtacgaccacatggtcggctggcgaacgtcttcactaaggagagagaagaatcttataaagccctcacatcgttcactggatggctataagcacattgtgaatgtggaatactgttcgcccgtgtcatcggagggcccacatttcccttccaaggctgccagagctaaagaagctgcacagcgatcgccaaaccgagaaaataccgaggagtaccaccaaatgatggaggaggagatgctccatggcttgcagaaggttggctggaagaaggtggacgtcaacttccattcgtcattctggccttactctgctcacaacaacatacacgtcaagaacgagtggcttcacaatgctggcgctggtgttatcgcgcacgttgcggacagcatcaagcagcaggagtcacggccatgtcttcctgccaatctatagcagtagcattcagcaatccatttgttcaaattatctgtcgctagcaaataaacccatgaccaaactctgttcgtcagcatccactgagcggcgaaatatttgggactgggacacacaataagctgtgtatcattatcggccgcctaggttttacattgtttgatgtcaattgtcaaatggcatgtgtttcctcatggaacagacgaagcattcgaagttgatataaagacaacctaaattgtcatatatgctaccgatggttcgtacccaatccagcgacgacgtcgatgagatttgggttagattgtttgggagccacaagccccttgcaaatcgc

SEQ ID NO: 5655 - DNA, 1986 bp, Zea Mays
cggcccgcgagaggggatggcgtccacggctcgcccgctccgctcttataacagccgcttcctacgtctctcgcgcatcccttccgagcggaagcggcagcccgtcaggattcaaatctgccggaaacctgtatcttcatccagtatcaaggggaagttctgttgttgtgtgttcggtgatggatacatccaaaagcaagcaaggaccagaacatctccttgttcttgtccatggtatcatggctagccccaaagactggacatatggggaagcagtgctgaagaggcggttgggtgatgattttttcatatatgtgccggtttatgaactaaatggatgttaaaaaaagtgtatgcaaacatctttgtctacagctagttcaacgaacagctacaccaaaacctttgatgggattgatgttgctggaagaaggtcttggaagtggttaacaagatgcccagcttgagaaagatttccttcctagcgcattctctgggtggtttgtttgctagatatgttattgcaatactccactcagtctcagtggaaacaaagaatgcaggacagagtagtgcacttattgttcctacaacaagagggccagcaaaatcgagatgtgcttcaggattaggttctattgctggattgcggccaattaattttattaccttagcaaccccacaccttggggttagagggagaaatcaggtgcatcaccaaaatgtttcggattacgtttacaaaatatactgcacattatccagcaaaggctcgattcctgggaaaacgaactctctatttgttattttgttcattcatgtagattttgaagttgcatggtatgatttttacaagcttggattatatcattgctgaagtggtcaataccaactagcatctataacttttgaggaaaaaacgacgaacttattgggacctgttcctgttagtgctgatcaatttctttgacacatgcttatatgtttttcccccgaattaccagcttccgtttcttcaaggcctatcaatcctagaaaagcttgctgcgcctttggctcctttaattgttgggcgcaccggtgctcaactcttcctcactgatggtgatcctagcaaggcacctctcctgttacagatggcatccgactgtgatgacaaaaactacatatcagccttggcagcttttaagaaccgtgtcctgtatgccaacgtctcgtacgaccacatggtcggctggcgaacgtcttcactaaggagagagaagaatcttataaagccctcacatcgttcactggatggctataagcacattgtgaatgtggaatactgttcgcccgtgtcatcggagggcccacatttcccttccaaggctgccagagctaaagaagctgcacagcgatcgccaaaccgagaaaataccgaggagtaccaccaaatgatggaggaggagatgctccatggcttgcagaaggttggctggaagaaggtggacgtcaacttccattcgtcattctggccttactctgctcacaacaacatacacgtcaagaacgagtggcttcacaatgctggcgctggtgttatcgcgcacgttgcggacagcatcaagcagcaggagtcacggccatgtcttcctgccaatctatagcagtagcattcagcaatccatttgttcaaattatctgtcgctagcaaataaacccatgaccaaactctgttcgtcagcatccactgagcggcgaaatatttgggactgggacacacaataagctgtgtatcattatcggccgcctaggttttacattgtttgatgtcaattgtcaaatggcatgtgtttcctcatggaacagacgaagcattcgaagttgatataaagacaacctaaattgtcatatatgctaccgatggttcgtacccaatccagcgacgacgtcgatgagatttgggttagattgtttgggagccacaagccccttgcaaatcgc

SEQ ID NO: 5656 - DNA, 2173 bp, Zea Mays
cggcccgcgagaggggatggcgtccacggctcgcccgctccgctcttataacagccgcttcctacgtctctcgcgcatcccttccgagcggaagcggcagcccgtcaggttatagctcactcttgatcgcttcctggtttgctaagcgatttgcctctcgtggttcggtgacggatcggaggcgctgcgaattcgaagctggtttctctgggctaagtcgattcggacttacttgttcagtaggtgtagtgtaggcgtgtagctcgatagacgagaagaatatttggcgtcgaagtttcagctaagcaacgagatcaggaagtttcagcaaagctcctggattaaatatttggcatcatagaggattcaaatctgccggaaacctgtatcttcatccagtatcaaggggaagttctgttgttgtgtgttcggtgatggatacatccaaaagcaagcaaggaccagaacatctccttgttcttgtccatggtatcatggctagccccaaagactggacatatggggaagcagtgctgaagaggcggttgggtgatgattttttcatatatgctagttcaacgaacagctacaccaaaacctttgatgggattgatgttgctggaagaaggtcttggaagtggttaacaagatgcccagcttgagaaagatttccttcctagcgcattctctgggtggtttgtttgctagatatgttattgcaatactccactcagtctcagtggaaacaaagaatgcaggacagagtagtgcacttattgttcctacaacaagagggccagcaaaatcgagatgtgcttcaggattaggttctattgctggattgcggccaattaattttattaccttagcaaccccacaccttggggttagagggagaaatcaggtgcatcaccaaaatgtttcggattacgtttacaaaatatactgcacattatccagcaaaggctcgattcctgggaaaacgaactctctatttgttattttgttcattcatgtagattttgaagttgcatggtatgatttttacaagcttggattatatcattgctgaagtggtcaataccaactagcatctataacttttgaggaaaaaacgacgaacttattgggacctgttcctgttagtgctgatcaatttctttgacacatgcttatatgtttttcccccgaattaccagcttccgtttcttcaaggcctatcaatcctagaaaagcttgctgcgcctttggctcctttaattgttgggcgcaccggtgctcaactcttcctcactgatggtgatcctagcaaggcacctctcctgttacagatggcatccgactgtgatgacaaaaactacatatcagccttggcagcttttaagaaccgtgtcctgtatgccaacgtctcacatggtcggctggcgaacgtcttcactaaggagagagaagaatcttataaagccctcacatcgttcactggatggctataagcacattgtgaatgtggaatactgttcgcccgtgtcatcggagggcccacatttcccttccaaggctgccagagctaaagaagctgcacagcgatcgccaaaccgagaaaataccgaggagtaccaccaaatgatggaggaggagatgctccatggcttgcagaaggttggctggaagaaggtggacgtcaacttccattcgtcattctggccttactctgctcacaacaacatacacgtcaagaacgagtggcttcacaatgctggcgctggtgttatcgcgcacgttgcggacagcatcaagcagcaggagtcacggccatgtcttcctgccaatctatagcagtagcattcagcaatccatttgttcaaattatctgtcgctagcaaataaacccatgaccaaactctgttcgtcagcatccactgagcggcgaaatatttgggactgggacacacaataagctgtgtatcattatcggccgcctaggttttacattgtttgatgtcaattgtcaaatggcatgtgtttcctcatggaacagacgaagcattcgaagttgatataaagacaacctaaattgtcatatatgctaccgatggttcgtacccaatccagcgacgacgtcgatgagatttgggttagattgtttgggagccacaagccccttgcaaatcgc

SEQ ID NO: 5657 - DNA, 2189 bp, Zea Mays
cgctgatcccggcgcggggtttttttttttttttgtcccgtcccgtcccgtgccgtgccgccgcactattcgacgccgccgcggcccgcgagaggggatggcgtccacggctcgcccgctccgctcttataacagccgcttcctacgtctctcgcgcatcccttccgagcggaagcggcagcccgtcaggattcaaatctgccggaaacctgtatcttcatccagtatcaaggggaagttctgttgttgtgtgttcggtgatggatacatccaaaagcaagcaaggaccagaacatctccttgttcttgtccatggtatcatggctagccccaaagactggacatatggggaagcagtgctgaagaggcggttgggtgatgattttttcatatatggtaaagcatgctagcatttgaattcttcattcactaggttcaatactagtcattatctaaccatttgttctagcttctacagtgccggtttatgaactaaatggatgttaaaaaaagtgtatgcaaacatctttgtctacagctagttcaacgaacagctacaccaaaacctttgatgggattgatgttgctggaagaaggttagcaaatgaagtacgtcctttgaagtttgtcctagaaaaaaggtcttggaagtggttaacaagatgcccagcttgagaaagatttccttcctagcgcattctctgggtggtttgtttgctagatatgttattgcaatactccactcagtctcagtggaaacaaagaatgcaggacagagtagtgcacttattgttcctacaacaagagggccagcaaaatcgagatgtgcttcaggattaggttctattgctggattgcggccaattaattttattaccttagcaaccccacaccttggggttagagggagaaatcaggtgcatcaccaaaatgtttcggattacgtttacaaaatatactgcacattatccagcaaaggctcgattcctgggaaaacgaactctctatttgttattttgttcattcatgtagattttgaagttgcatggtatgatttttacaagcttggattatatcattgctgaagtggtcaataccaactagcatctataacttttgaggaaaaaacgacgaacttattgggacctgttcctgttagtgctgatcaatttctttgacacatgcttatatgtttttcccccgaattaccagcttccgtttcttcaaggcctatcaatcctagaaaagcttgctgcgcctttggctcctttaattgttgggcgcaccggtgctcaactcttcctcactgatggtgatcctagcaaggcacctctcctgttacagatggcatccgactgtgatgacaaaaactacatccttggcagcttttaagaaccgtgtcctgtatgccaacgtctcgtacgaccacatggtcggctggcgaacgtcttcactaaggagagagaagaatcttataaagccctcacatcgttcactggatggctataagcacattgtgaatgtggaatactgttcgcccgtgtcatcggagggcccacatttcccttccaaggctgccagagctaaagaagctgcacagcgatcgccaaaccgagaaaataccgaggagtaccaccaaatgatggaggaggagatgctccatggcttgcagaaggttggctggaagaaggtggacgtcaacttccattcgtcattctggccttactctgctcacaacaacatacacgtcaagaacgagtggcttcacaatgctggcgctggtgttatcgcgcacgttgcggacagcatcaagcagcaggagtcacggccatgtcttcctgccaatctatagcagtagcattcagcaatccatttgttcaaattatctgtcgctagcaaataaacccatgaccaaactctgttcgtcagcatccactgagcggcgaaatatttgggactgggacacacaataagctgtgtatcattatcggccgcctaggttttacattgtttgatgtcaattgtcaaatggcatgtgtttcctcatggaacagacgaagcattcgaagttgatataaagacaacctaaattgtcatatatgctaccgatggttcgtacccaatccagcgacgacgtcgatgagatttgggttagattgtttgggagccacaagccccttgcaaatcgc

SEQ ID NO: 5658 - DNA, 1502 bp, Zea Mays
aaaaaaaaacagaggaaagaaaaaaccgtcagagcgacgttagtcggctcagctgtagtgtagttgcaggtgttcgccggcacacgcgcgtggccgcgaaccctagatgacaccggcgaacggcgccccagcgcgggcagcggaggcgggcccccacgaggtggagtcggaggccgacgcgttccggcgccaggtcgacgacctcgtctcgaagaccgacgtgctggagcggcgggtgaaagaggtggcggacttctacgatggcaaaaagcacggaagcggcgggaggaagggtggtggtggtggcaggtatggggcatcctcgaggggaatgccggaccttatgcgccagttcggcgtgcttttgaaagagatcacctctcataaagatgcatggccatttctggagccggtggatgttgtaactctacagcttcctgactatcacaacattattacccaacctatggacttctctaccatccaaaagaaaatggaaaggaaggatggtacttgttacaccaatgttagagaaatatgttctgatgttcgattaatttttgccaatgcgatgaagtacaatgatgatcaaaatgtcatccacttgatggctaaatcattgcttgagaaatttgaagagaagtggctccattttcttcctaaagttgagagtgagacaaaaggaggaggaatcaaagggtgttgcagccacaaatacttctcgagaagttgcaatcgtaaaattagcaaaagacactgatgatgagctaaatcagatcaacaagaagctggaggagctccggaaaatggtggttcacagatgcaggaaaatgacgacagacgagaagaggaagctgggtgcaggtatctgtcacttgtctccagatgatcttagcaaggcgctagagattgtcgcacaagacaatcctagcttccagactaaagcagaagaagtggatcttgatatggatgcccagagcgagacaactctatggaggctgaaattctttgtgagggaagcgctggaacgacaggccaacgttgcctctgggaagatggacgaaaacgccaagagaaagagggagatatgcaatgctctggccaaaaccacctcgagacggatcaagaagcagccctagccatcttccatatctttcactcgcgtcctctgattgtttagaagttctttttttgatactagccaccagctttgtgaaacgttttcctgcattttttttgtgatgtgtatatagtagtatagtgaactgtccagtccagtaacaagtgatttcgtgtgtaaccatgagctggtcgcattcgcgtcccctctgatccaacaacaaacattgtctcacaatgtgattgattgtagaagcaagcttttgtcacagggcgatgttgctcacttgtggaatcagatgatgcatacatttcgtaactgttcattcattctccaccttggcttgaaaattaaggtgagaaggcctgcggatttacatgtt

SEQ ID NO: 5659 - DNA, 1848 bp, Zea Mays
cctctcggctgcccaccaccgcagacaagtccagtcctctccctccccttaatctagcgccgccactcacgcccaccacgccgctggtgaacggatccgtccatcccgtacaccgcccaaccgctgttccagtacccgcctcgtcgagttgagctgagtttagggcctgcgggagctgagccggtggcccatgcttcgcgaagggtagggttgtctgtctagctagctgctgcttggtctgatgagctcagttccggcgtcccgcctcggcttccccgcacgcttgctccgtcggctgcccagaacccagcttgcccgctccggcgcttctcttcgcttcttcgggaaagggtggagctttgaggtggtgcgggtgctcagccgaggactccgggcgatgacgcccgcagtggcgcgcgtttgtcgcgacagtcctgggttcggatagcgagttcctcgagcggatttggctgctgctgcatcctgcgtgggaaggggaggcggcggcagcaacagaggaaggggaggggttgctctgaagcggagggggagcgggctgacattgctgctgggagcatggcgagcttctaaggacgctcagctcccgtagcccagccattctcatcgcagaggagcaaagatatatggtcttttgtgctttctcttcgagtccgtgtgctatttgacaatgcaaaatgggcatatccttgtggattctcggaagaaaagcagaaagttcgaaggcagaaaactacttcatggctaagagagcaagtattacagcttggcccaacgtttattaagctcgggcagtgatcctccactagatctgatttatttcctagagaatttgtggacgagcttgctactgaaatgtaaagttaccatgtgctcctgaaatgtaaagttaccatgtgctccaattacttctgtgctaaatgaggtataatcaataggtgcttatgctccaattcttttatggtgaccatctaaaatagaaaacagcatgacaattgctatgtcatcaaacatgatcatcatcaatactagggtttctttaggccatgttattagtcttgacctgtctaggcagcattgatgcatgttcatgtgttctttttcttaaactataagtcattatttgactatgttgtattgttgttggcatgtaccaatatttcatggcaaatcttatatcccaagttttgtatatgccgcagaggactaagtacaacaacatggagccggatgctgttgatttctttggggaatgtatgaatagtccccgaaatggtcgtactccgcttgcaaatgagatatatgagcaaatggttgcagagaaggaaagagagctagaagaaggagaagcacaaaagtcaccctccaagctcaacaggccacacttgaagaaaaccaaagtttgctgcgccagacccaagaggaagtgaaggggttgcataccaagtttgaagagaccaatgcactgctacgagctgtcctgaaacttcagaaagattgaggtagggatgcataccaagtctgaggatgatgcctttgcttaaggtttttctaccttgctagaacatattttgtggttagaactttgtcagaactacgtgcaatctgtttgaatgcttcgaacctttgtggtggaacctttgtatgtttgaacctctgttgtggaagaactagtgtgctggaattgtgtatgacttgtgatgagaatgttgtgtatgatggcttttctgtgtattatgattctgtgagctatcatgagagcttagtgtgtcgtcactgtatggtcattgtatgtgggtgccatattaaactaaacaaaacaaagctgtc

SEQ ID NO: 5660 - DNA, 2145 bp, Zea Mays
cctaccttatcctctcggctgcccaccaccgcagacaagtccagtcctctccctccccttaatctagcgccgccactcacgcccaccacgccgctggtgaacggatccgtccatcccgtacaccgcccaaccgctgttccagtacccgcctcgtcgagttgagctgagtttagggcctgcgggagctgagccggtggcccatgcttcgcgaagggtagggttgtctgtctagctagctgctgcttggtctgatgagctcagttccggcgtcccgcctcggcttccccgcacgcttgctccgtcggctgcccagaacccagcttgcccgctccggcgcttctcttcgcttcttcgggaaagggtggagctttgaggtggtgcgggtgctcagccgaggactccgggcgatgacgcccgcagtggcgcgcgtttgtcgcgacagtcctgggttcggatagcgagttcctcgagcggatttggctgctgctgcatcctgcgtgggaaggggaggcggcggcagcaacagaggaaggggaggggttgctctgaagcggagggggagcgggctgacattgctgctgggagcatggcgagcttctaaggacgctcagctcccgtagcccagccattctcatcgcagaggagcaaagatatatggtcttttgtgctttctcttcgagtccgtgtgctatttgacaatgcaaaatgggcatatccttgtggattctcggaagaaaagcaggtatgtgtttaagatatagataaaacctgagtcatgttctttcaagaaaaaaatattgagtctccaacattgtgattccaaagaagtcattataggaaattttctgtgctaagtagccacctccagttccaaatgagtgttctatctttaggtggagttaagtctgttaatctgtttgttgttatgaatggaagcatgatgatttatatcacttggggctgcaaagagaaaggattcactttctactatacatgtgagtgggctaaaaggtggcttacatgttgcagaaagttcgaaggcagaaaactacttcatggctaagagagcaagtattacagcttggcccaacgtttattaagctcgggcagtgatcctccactagatctgatttatttcctagagaatttgtggacgagcttgctactgaaatgtaaagttaccatgtgctcctgaaatgtaaagttaccatgtgctccaattacttctgtgctaaatgaggtataatcaataggtgcttatgctccaattcttttatggtgaccatctaaaatagaaaacagcatgacaattgctatgtcatcaaacatgatcatcatcaatactagggtttctttaggccatgttattagtcttgacctgtctaggcagcattgatgcatgttcatgtgttctttttcttaaactataagtcattatttgactatgttgtattgttgttggcatgtaccaatatttcatggcaaatcttatatcccaagttttgtatatgccgcagaggactaagtacaacaacatggagccggatgctgttgatttctttggggaatgtatgaatagtccccgaaatggtcgtactccgcttgcaaatgagatatatgagcaaatggttgcagagaaggaaagagagctagaagaaggagaagcacaaaagtcaccctccaagctcaacaggccacacttgaagaaaaccaaagtttgctgcgccagacccaagaggaagtgaaggggttgcataccaagtttgaagagaccaatgcactgctacgagctgtcctgaaacttcagaaagattgaggtagggatgcataccaagtctgaggatgatgcctttgcttaaggtttttctaccttgctagaacatattttgtggttagaactttgtcagaactacgtgcaatctgtttgaatgcttcgaacctttgtggtggaacctttgtatgtttgaacctctgttgtggaagaactagtgtgctggaattgtgtatgacttgtgatgagaatgttgtgtatgatggcttttctgtgtattatgattctgtgagctatcatgagagcttagtgtgtcgtcactgtatggtcattgtatgtgggtgccatattaaactaaacaaaacaaagctgtc

SEQ ID NO: 5661 - DNA, 2545 bp, Zea Mays
agaaaagctactcacaccaataagccaaagccaaacagcccttccttcgcagcgatggcggcggcggcgccgccggtggccaagaaggtcccgcggcagctcgttgagcacggcgacgtccgcgtcgacaactactactggctccgcgacgactctcgatccgacccggacgtcctcgcgcacctccgcgccgagaacgactacaccgccgccgtcatgtccgatgtcaagcaacttgaggatgaaatatatgctgaaatcagaggaagaataaaggaagatgatatagatgcgcctcttcgcaaagggcggtactactactatgaaaggacattgactggcaaggagtatgtgcaacactgtaggcgtcccgtatcgactgatgctcctattacagtccacgatgtgatgcccacaggacctgatgcccctgatgagcatattatcctggatgagaatgttaaggctgagggccacgactactacagcatcggagctttcaaggtcagtcccaacaacaagctagttgcttacgctgaagacactaaaggtgatgaaatctacacggtctatgtcattgacacggagagtggagaatacgttgggcaaccacttaaaggaattacttctgacattgagtgggctggtgacgaccacctcgtttacattacaatggatagtatacttcggccagataaagtatggctacataagttagggtctgaccaatcaagtgatgcttgtttgtatcatgagaaagatgatacattttctctaggccttcaagcttctgaaagcaagagatatttatttgttgaatctggaagcaaaaacacaagctttatattctacctggacatacccaaacagaacaaggaacttgctgttttgacacctcgtgtgtatggcattgatacaacagctagtcatcgtggaaatcatttctttattaagaggcgaagtgatgaattctacaattctgaattggttgcttgtccactggataatgtagctgagaccactatactgctaccacatagagaaagtgtgaaaatacaagacttccagctctttgacaaccatattgctgtatatgagcgtgagaatggccttcccaaagtgatcgtatatcggctacctgctattggagagtcaattggacaactccagggaggtcgagcgattgattttattgatccaacatatgctgtggaccctgaggagtctcagtttcattcatctgttctacgatttcattatagctcaatgcggactccaccctctgtttatgactatgatatggattcaggggtgtctgtgctgaagaagatccatactattttaggcggattcaatgcatcaaattatgtaacagaaagaaaatgggctgctgctgctgatggcactcaggtccccatgtccattctatacagaaatgatcttgtgaagcttgatggctcagaccctatgctactctatggctatggctcctatgagatatgcatagatccgagttttagagggtcacgattctctctggtagataggggctttatatatgtgatagctcatatccgcggtggtggtgaaatgggccggaagtggtacgaggatgggaaactgttgaagaagaaaaacactttcactgatttcattgattgtgctgagcacttgataaaaagcaagtactgctccagggaaaagctttgcattaatggcagaagcgcaggtggcttattgatgggtgctgtcctaaatatgaggcctgacttattcagggcagctgttgctggagtgccttttgttgatgttgtcacaactatgcttgatccaactatcccactgacaacagctgaatgggaggagtggggtgatccaagaaaagaagaattctattattacatgaaatcgtattctcctgttgacaatgtgatggcgcaagagtatcccaacattcttgtcactgcaggcttaaacgatccacgcgtgatgtactctgagcctgcgaaatacgtggcgaagctgagggagctgaagagagatgacaatcttgtgctgttcaagtgcgagctgggagctggacacttctccaaatcgggaaggttcgagaaattacaggaggatgcgtttacttatgcgttcatcctaaaggcgctgggcatgactcggaagctggcatcactgtgaattcgattggtgtgaggcacctggactggatttgtatcatggcctgccctcttggttgggggatggatggattctgatggaatatgcatttagatttgaatagggacacagatgttatgcaaaagagattgtttgaaactttgaattctgatttgcatttggatatctgtcctagaataattgtgcttctattattcaatatttgccccatttttaacctatggaccatataaattttgctattttctcctttcaaagtactacaatcattacatgttggtactagtattattttacaggagcatgtatgtaattttatagtgactggtttatgcacatcatataaatacgtttattt

SEQ ID NO: 5662 - DNA, 2689 bp, Zea Mays
agaaaagctactcacaccaataagccaaagccaaacagcccttccttcgcagcgatggcggcggcggcgccgccggtggccaagaaggtcccgcggcagctcgttgagcacggcgacgtccgcgtcgacaactactactggctccgcgacgactctcgatccgacccggacgtcctcgcgcacctccgcgccgagaacgactacaccgccgccgtcatgtccgatgtcaagcaacttgaggatgaaatatatgctgaaatcagaggaagaataaaggaagatgatatagatgcgcctcttcgcaaagggcggtactactactatgaaaggacattgactggcaaggagtatgtgcaacactgtaggcgtcccgtatcgactgatgctcctattacagtccacgatgtgatgcccacaggacctgatgcccctgatgagcatattatcctggatgagaatgttaaggctgagggccacgactactacagcatcggagctttcaaggtcagtcccaacaacaagctagttgcttacgctgaagacactaaaggtgatgaaatctacacggtctatgtcattgacacggagagtggagaatacgttgggcaaccacttaaaggaattacttctgacattgagtgggctggtgacgaccacctcgtttacattacaatggatagtatacttcggccagataaagtatggctacataagttagggtctgaccaatcaagtgatgcttgtttgtatcatgagaaagatgatacattttctctaggccttcaagcttctgaaagcaagagatatttatttgttgaatctggaagcaaaaacacaagctttatattctacctggacatacccaaacagaacaaggaacttgctgttttgacacctcgtgtgtatggcattgatacaacagctagtcatcgtggaaatcatttctttattaagaggcgaagtgatgaattctacaattctgaattggttgcttgtccactggataatgtagctgagaccactatactgctaccacatagagaaagtgtgaaaatacaagacttccagctctttgacaaccatattgctgtatatgagcgtgagaatggccttcccaaagtgatcgtatatcggctacctgctattggagagtcaattggacaactccagggaggtcgagcgattgattttattgatccaacatatgctgtggaccctgaggagtctcagtttcattcatctgttctacgatttcattatagctcaatgcggactccaccctctgtttatgactatgatatggattcaggggtgtctgtgctgaagaagatccatactattttaggcggattcaatgcatcaaattatgtaacagaaagaaaatgggctgctgctgctgatggcactcaggtccccatgtccattctatacagaaatgatcttgtgaagcttgatggctcagaccctatgctactctatggctatggctcctatgaggaaccagcaatgtctaactagtagtaactgcatgtgacaacttggcatcgagactatgagatggttccaggtttcaggaataaatataatagaagttattgtgataaaaccgtgctcttgttttctttgttcttatggctacagatatgcatagatccgagttttagagggtcacgattctctctggtagataggggctttatatatgtgatagctcatatccgcggtggtggtgaaatgggccggaagtggtacgaggatgggaaactgttgaagaagaaaaacactttcactgatttcattgattgtgctgagcacttgataaaaagcaagtactgctccagggaaaagctttgcattaatggcagaagcgcaggtggcttattgatgggtgctgtcctaaatatgaggcctgacttattcagggcagctgttgctggagtgccttttgttgatgttgtcacaactatgcttgatccaactatcccactgacaacagctgaatgggaggagtggggtgatccaagaaaagaagaattctattattacatgaaatcgtattctcctgttgacaatgtgatggcgcaagagtatcccaacattcttgtcactgcaggcttaaacgatccacgcgtgatgtactctgagcctgcgaaatacgtggcgaagctgagggagctgaagagagatgacaatcttgtgctgttcaagtgcgagctgggagctggacacttctccaaatcgggaaggttcgagaaattacaggaggatgcgtttacttatgcgttcatcctaaaggcgctgggcatgactcggaagctggcatcactgtgaattcgattggtgtgaggcacctggactggatttgtatcatggcctgccctcttggttgggggatggatggattctgatggaatatgcatttagatttgaatagggacacagatgttatgcaaaagagattgtttgaaactttgaattctgatttgcatttggatatctgtcctagaataattgtgcttctattattcaatatttgccccatttttaacctatggaccatataaattttgctattttctcctttcaaagtactacaatcattacatgttggtactagtattattttacaggagcatgtatgtaattttatagtgactggtttatgcacatcatataaatacgtttattt

SEQ ID NO: 5663 - DNA, 3217 bp, Zea Mays
agaaaagctactcacaccaataagccaaagccaaacagcccttccttcgcagcgatggcggcggcggcgccgccggtggccaagaaggtcccgcggcagctcgttgagcacggcgacgtccgcgtcgacaactactactggctccgcgacgactctcgatccgacccggacgtcctcgcgcacctccgcgccgagaacgactacaccgccgccgtcatgtccggtcagtcggggacttgggatctactcacatgcgagatgcctttagcgtgctattaggcattagcttgagatctacccacatgcgatctattgttttgacatgacaattgacaatcacttgccagtgtttccaacttaccagattgtgctattgatattatatatcacttagaaattggaatgtagttgtatagcgtctgttcagacttcagtgtggttgctagctctctactcgggaacgtagtactctataatgtagtagtagacagtactactactacacgggttgtttccagtggattggtagtgcagatgattctgtgctgtcgtgagtagcctcagtcctcttctgctaaccctggtaactctcttggagatgtcaagcaacttgaggatgaaatatatgctgaaatcagaggaagaataaaggaagatgatatagatgcgcctcttcgcaaagggcggtactactactatgaaaggacattgactggcaaggagtatgtgcaacactgtaggcgtcccgtatcgactgatgctcctattacagtccacgatgtgatgcccacaggacctgatgcccctgatgagcatattatcctggatgagaatgttaaggctgagggccacgactactacagcatcggagctttcaaggtcagtcccaacaacaagctagttgcttacgctgaagacactaaaggtgatgaaatctacacggtctatgtcattgacacggagagtggagaatacgttgggcaaccacttaaaggaattacttctgacattgagtgggctggtgacgaccacctcgtttacattacaatggatagtatacttcggccagataaagtaggtcgcttgttcctccgcttcttctaactcctacatggcatacctctagttttgcgagttcagttgaaacttctggtgatttttttttcagattctttagttatggttgttgtgactgtatatgctatgttatattgttattgaatctttttctttaatttttttgtagtgttttatacttttacatttatcttacctttgtaatggcttttgcaggtatggctacataagttagggtctgaccaatcaagtgatgcttgtttgtatcatgagaaagatgatacattttctctaggccttcaagcttctgaaagcaagagatatttatttgttgaatctggaagcaaaaacacaagctttatattctacctggacatacccaaacagaacaaggaacttgctgttttgacacctcgtgtgtatggcattgatacaacagctagtcatcgtggaaatcatttctttattaagaggcgaagtgatgaattctacaattctgaattggttgcttgtccactggataatgtagctgagaccactatactgctaccacatagagaaagtgtgaaaatacaagacttccagctctttgacaaccatattgctgtatatgagcgtgagaatggccttcccaaagtgatcgtatatcggctacctgctattggagagtcaattggacaactccagggaggtcgagcgattgattttattgatccaacatatgctgtggaccctgaggagtctcagtttcattcatctgttctacgatttcattatagctcaatgcggactccaccctctgtttatgactatgatatggattcaggggtgtctgtgctgaagaagatccatactattttaggcggattcaatgcatcaaattatgtaacagaaagaaaatgggctgctgctgctgatggcactcaggtccccatgtccattctatacagaaatgatcttgtgaagcttgatggctcagaccctatgctactctatggctatggctcctatgaggaaccagcaatgtctaactagtagtaactgcatgtgacaacttggcatcgagactatgagatggttccaggtttcaggaataaatataatagaagttattgtgataaaaccgtgctcttgttttctttgttcttatggctacagatatgcatagatccgagttttagagggtcacgattctctctggtagataggggctttatatatgtgatagctcatatccgcggtggtggtgaaatgggccggaagtggtacgaggatgggaaactgttgaagaagaaaaacactttcactgatttcattgattgtgctgagcacttgataaaaagcaagtactgctccagggaaaagctttgcattaatggcagaagcgcaggtggcttattgatgggtgctgtcctaaatatgaggcctgacttattcagggcagctgttgctggagtgccttttgttgatgttgtcacaactatgcttgatccaactatcccactgacaacagctgaatgggaggtgatggcgcaagagtatcccaacattcttgtcactgcaggcttaaacgatccacgcgtgatgtactctgagcctgcgaaatacgtggcgaagctgagggagctgaagagagatgacaatcttgtgctgttcaagtgcgagctgggagctggacacttctccaaatcgggaaggttcgagaaattacaggaggatgcgtttacttatgcgttcatcctaaaggcgctgggcatgactcggaagctggcatcactgtgaattcgattggtgtgaggcacctggactggatttgtatcatggcctgccctcttggttgggggatggatggattctgatggaatatgcatttagatttgaatagggacacagatgttatgcaaaagagattgtttgaaactttgaattctgatttgcatttggatatctgtcctagaataattgtgcttctattattcaatatttgccccatttttaacctatggaccatataaattttgctattttctcctttcaaagtactacaatcattacatgttggtactagtattattttacaggagcatgtatgtaattttatagtgactggtttatgcacatcatataaatacgtttattt

SEQ ID NO: 5664 - DNA, 2783 bp, Zea Mays
ctggtgctcggcaaaatagctagcttttattgtataagcgatttatgtgcaaatatgtgaaggtagaaataacaacttgtgctgattggatgacttgagaaactgatgaatgcctgaaacgtaatgagaaaattcttcttcctaagtggcaggatgcattcgaggatactccataggccgagtagaaagccactgttcttgaaaaacagggtgcattgaaggacacttatatattgaagaagatgataaatcatacttgtgcgtgaattatcttttttttgtttgatattgaagtaatttgaggtagagggaggctaaactagaactactccctatgcgtaaggtaaaaacgataagtagacttgatttgatcgattgtgggggcttcaatcggtcgtagcccttcatctatataaaggggaggtctggacccgttacacgtcgtttcctgagttaatcccgcggatttagctaacaaatcccgcaagaaactcggaaccctaaaaggttctgcgcacgcgcggaccgtcgagcctcaggttgacgaacatatgccccgtgccttttggtggaggttgacgaaccaaaagcatatgaactaagtctgatgcgagtcaccggcttttcaatccaatatggtgatcattcaatagagccccaatgcataaaggccgtttcggattgcatctttctcggctatgaccatttgatcaatggatcaaaatgaatagaatggaggtgccctcagcccgaatagacgaagggactatgcatataccacggtttcatcgtcgtatcattccatatttgaacatgacaatatatcgatgatgagtaggcgggtggaaagcatcctggcatcacaggatgaataggcgatgcttgttgcgtcgccttttgggccgttttgttttagcgggtgacctaggtttcttcgttggccgatcactattttgagaggtacagtttagtcaggttcataaagacggtccagaaggccggcctgtttgtacatctctgcatcggtccctacatttgtggcgagtggaacttcggtggcttcccagtttggttgaagtatgtaccggactaccgggcatcagcttcaggacagacaacgaacctttcaagatggccatgcagggtttcactcagaaaattgtgggaatgatgaagagcgaaaacctctttgcatcccaaggtgtcccaattatcctctctcaggcaagtataatattttccttaggtttgattgagaatgaatacgggccagaaggcagggagtttcgtcccgcaggtcaggcatatatcaacaaggcagcaaagatggcagtcggattgggtactggtgtgccgtgggtgatgtggaaggaggaggatgcacctgatccagtgatcaatgcatgcaatggtttctactgtgatgcattttctcctaacaaaccttacaagcccacaatgtggactgaagcttggagtggctataccatggaggaacaaattttgggcgcactgctgggggtcccttcatcacaacaagctatgattatgatgctccaattgatgaatatggactttttagagaaccaaagcacagtcatcttaaagaactccacagagctgttaagttatgcgagcaggctttggtttctgttgacccagcaattactacccttgtaccatgcaagaggcccacgtcttccaatctccatctggttgtgcagctttccttgcaaactacaattctaactcctatgcgaatgttgtattcaacaatgagcaatacagcctaccacattggtcgattagcatccttcctgattgcaaaaatgttgtttttaacagtgtcacagttggtgttcagacatctcagatgcaaatgtgtggagatgatgcctcatcaatgacgtggaagaggtatgatgaggaggtttattctctggcagctgctccattgctcaccacgactagtttgcttgagcagcttaatgtcacgagagacaacagtgattatttgtggtacatcaccagtgttgacataagctcatctgaaaactttctacaaggtggcggcaagcctctgtctctcagtgtgcagtctgctggtcatgccttgcatgtctttgtcaatggacagcttcaaggttctgcatatggtactagggaagattgaagaatcaaatacaatggcaatgctaaccttcgagccggcactaacaaaatttccatgctaagtgttgcctgtggattgccgaatgttggagtgcattatgagacgtggaacactggtgttggtggtcctgttgtgcttcataggctggatgaaggttcacgagaccttacttggcagacttggtcctatcaggtcgcccgagtgctacttgtgctaccgagtgctgctgtgcagcctatgctacctggtgtgtgactgcgtggtgactgcttggtgcttggctgcttgctgccgagtgtaagacgccaggaccaggaggcaggaccgccggagcagcgagtaggagccaggagcccaacctaggtccatgtggcgagcacagatgtgcagagaagataggcagacaacaaaatctaccttgtagttcaagtatacccttacccaaacccaatactttgggtacttgaaatttcagtcctaactgggatagatgcgaggcgtgctcctctgccttggggcgacagtagatgggctcccagcggctcccaggtctacgccggcggctccagctgatccttgcagtgtgcgtgtgcttgtgctggagtgggac

SEQ ID NO: 5665 - DNA, 1933 bp, Zea Mays
ggcagccagagaccgaacggtgtagaattccgctacgcatattcgccccctcttctctcgttttcttcttttgccccggaggcgcggacaggtaccagcaccaccagagcattccgtcccgcccccgcctccacctcgccgcgaccacacctcctctcctccccgccggctcctcctcctcgcatggcgacagcctctcgtccctagcccccccagatccagcggcacgcacctacacacgcgcaaggaaccgtagacgcgcccccgcgcctcccctctctcccgtcctccgccacccatggacgcggggaatggctgcagcgcgcgggcgctggcggcgtgcgtcgtcggcggcatcgtgctgggcgcgtcggtgctcgcgctccacctcgcgggcgggcccgccgccatcccgcccctgcccctgccgccgcccatcggcgcgcttctccgtcgccgccgccgccccgtgcgcgtctacatggacggctgcttcgacatgatgcactacggccactgcaacgcgctgcgccaggcgcgcgcgctcggggacgagctcgtcgtcggcgtcatcagcgacgacgagatcaaggccaacaagggaccccccgtcacgccgctccacgagagaatggtaatggtccgtgctgtgaaatgggtggatgatatcattccagatgcaccttatgccataactgaagaattcatgaacaagctattcaatgagtacaacatagactacattatccatggagacgatccttgtttgctacctgatggtactgatgcctatgctcttgccaaaaaggctggtcgatacaagcagattaagagaaccgagggagtgtcgacaacagacattgacggatgcttctttgtgttagagagagatcatctgatgcacataaccactcgtcactacaaaggcagttcagtagtggacatggtcagaaagttgatgatactggatctggaactggaacaagagtatctcattttcttcccacatctaggcgaatagttcaattctcaaatagcaagggtccaggtccagattctcggatagtttacatagatggtgcttttgatctgttccatgctggacatgtcgagatcttacgacttgctcgagaacttggagattttttgcttgtggggattcacacagatcagaccataagtgcaacacgaggacggcatcgcccaatcatgaatctccatgagcgaagtttgagtgttttggcttgtcgttatgttgatgaggtgatcattggtgctccatgggatgtttcaaaagacatgattaccacgttcaatatctctttagtcgttcatggaacaattgctgagaacatggacttcacagaggacgatttacacccatatgctgttccaatggctatgggcatctaccgccgactggagagccccctggatatcacaacaagtacaatcatcaggaggattgttgcgaaccatgaagcttaccagaagcggaatgagaagaaggaagccagcgagaagaagtactacgagggtaaaagctttgtgaacggggagtgaaggtcggagtagcagcagggactggcatggggattgctgcctcgttcaatttaggtctcccaggcttttagcagaggcaacagttggtcgatctacagttgtaccctttcttttttcttttttcatcttcttcagtaatctttgatgatcttgctgacatagcttaggaagcataggagcatttctcccccgtgtctgcagccaattttcctcactgtgttgtatatgcgccttccagctgttgtttccagctgctgagctgcatttgagatctataggcttttccacacacacacacagagacattttgaaattgtgcgctgcagtatgaagaagatcatgaatgttagcgtgattaactatttgctgc

SEQ ID NO: 5666 - DNA, 2609 bp, Zea Mays
cgggagccaccaccggttcgtgtcgggaccggaaaccacgatcagccttgcacagttcccggcttccagccgccgccgccgcggggagcaccggccgttggttcttcgtctccgccccgcttgcgagaagagcgacgcgtttccccttcgaaccctcgtgtatcgtgggtcatggtgacgcctcgtggtagcggcgggagatggtgaagatagtgacgtacaacgtgaatgggctgcggccgcgggtggcgcagcacggctcgctccgctgcctcctcgacgccctcgatgccgacatcatctgcttccaggagaccaaattgtcaaggcaggacctatctgcggatgtaattatggctgatggatatgaggcttttgtttcatgcaaccgctcttcaaaaggccgtggagcatactctggtgttgcaacattttgccgagtaacatcatcattttccagccaggaggttgctttgccagtagcagctgaagaaggctttactggacttcaggactatgcaaaaaatagtcaaactgttggggatttcagtattgcaatgcctgttgaggaggagggtcttggtgaactcacaagagaggacctcttaagggtggacaatgaggggcggtgcatcatcactgatcatggacattttgttcttttcaacatatacggcccagctgttgacggagatgataaagagcgtgttcgttttaagctactattttacaagatactgcagaaaagatgggaacgtctattggctcttggaaagagagtttttgttgttggtgatttgaatattgctcctgcttctatagacaggtgtgacgcggcacctggcttcgagaagcaaatgttccgggaatggctgagatccatgctgagagaacatggaggtcccttttttgatgcttttagatcaaaacaccctgaaaggtggaaagggggaagaagcagtaagctagaaggatctgatcatattccagtttatattttactgaaagaaatacctgaacttccggtccataatatcccaccatcagctgcaagatatcttccagagatccgtggaaggcaacaaagtatagtatcgttccttgataaagggaaaatttatgagctgcaaaatgctgcaaatttgattcaatctgaagatacagtacttgatagttactgtagtgatggcttggaaaatacaattctagctaagaaaggactggcaactggtataactgagtttgcaaaaggtggtaaccttcctagtttgatgtgcaaggggacagatctgaatcaatggataaatgaaggtttaatgggcatctctcatgtcagccagaaaaaatcactgtctagtaccaagtttgtgccacaaaagaaaattaaacgcaacttatcatcccaaccaacaatcaagtcattttttcaaagaccagggtcaaagacagtaaatgctagtaccagtaccttagttactccagcagaaacattagaccttacaaatcaagcatgtgtttcaaatggtgatacactgcctgaaaacatgcagtgcacaacttcagctgcaaaagttcaggataacacagatgcatcgtcatgttcactttcaacagacaagtctaatgctgcagcattggagtggcagaggatacagaaaaagatgaagatgacactaccacgttgcaaagggcatagtgaaccatgcattccgaggtctgtgaagaagggccctaatataggccgtttgttctatgtctgtgctcgtgctcagggacctgcatcaaatccagaagccaattgtggccactttcagtgggcacctggaaagtctaaagagaagagctctaaagagaaacgtctgtgacttcatttttctcccaggacattttgcttccaatgagtctggtacatcaccttgtcccagcatactgatgacgtggcgatgtatttgtggagaggtaagctgatcaagggcctgtttgggaggtctggctctgactggctccttgctctagtaaccggaggggccacaaaacgtgtcttcaccagctccccattgttttgaaaaggacagaaaacaacttcatgaacattgcagccacagtgccatggataagctacagtagcgcatcagctggaacagccaagagctgtcccaaacgtggcctgaacaagcacttctctcaggcaggtacatattctaatcctgtaattagttggttgacactaacatgcagccttccgttggttggctaacaactaagggcttgttcggttagctctcaatccatacgtacggattgagtaggattgggtgcgtttaaattccaagcaagtcaaacttctttttaattttttctaatctctcagggatcttctcagaagttatttatttttccgcctggtttagcgtattcaaattcttaatagacaagtcacaagtggccatcagtggagaaatcttacagtcctgtagtaatgttttatatgaaaactaatatggacattatagtattattgcccatatctccccagaaataaagtgccagtcgtgtaagtttttgtttctttcctttttcaaaacaacgagaaagagcatatattaggc

SEQ ID NO: 5667 - DNA, 2813 bp, Zea Mays
cgggagccaccaccggttcgtgtcgggaccggaaaccacgatcagccttgcacagttcccggcttccagccgccgccgccgcggggagcaccggccgttggttcttcgtctccgccccgcttgcgagaagagcgacgcgtttccccttcgaaccctcgtgtatcgtgggtcatggtgacgcctcgtggtagcggcgggagatggtgaagatagtgacgtacaacgtgaatgggctgcggccgcgggtggcgcagcacggctcgctccgctgcctcctcgacgccctcgatgccgacatcatctgcttccaggagaccaaattgtcaaggcaggacctatctgcggatgtaattatggctgatggatatgaggcttttgtttcatgcaaccgctcttcaaaaggccgtggagcatactctggtgttgcaacattttgccgagtaacatcatcattttccagccaggaggttgctttgccagtagcagctgaagaaggctttactggacttcaggactatgcaaaaaatagtcaaactgttggggatttcagtattgcaatgcctgttgaggaggagggtcttggtgaactcacaagagaggacctcttaagggtggacaatgaggggcggtgcatcatcactgatcatggacattttgttcttttcaacatatacggcccagctgttgacggagatgataaagagcgtgttcgttttaagctactattttacaagatactgcagaaaagatgggaacgtctattggctcttggaaagagagtttttgttgttggtgatttgaatattgctcctgcttctatagacaggtgtgacgcggcacctggcttcgagaagcaaatgttccgggaatggctgagatccatgctgagagaacatggaggtcccttttttgatgcttttagatcaaaacaccctgaaaggagcatatacttgttttaatcaaaaaattggtgcagaagagtataattatggttctagaatagaccacattctcatttccggttcctgtctccatcgctgtgattctgtggaggaccatagcattttttgttgccatgtagaagaatgtgagataatgaatcatttcaaaagagggaattctgaaaatttatcaaagtggaaagggggaagaagcagtaagctagaaggatctgatcatattccagtttatattttactgaaagaaatacctgaacttccggtccataatatcccaccatcagctgcaagatatcttccagagatccgtggaaggcaacaaagtatagtatcgttccttgataaagggaaaatttatgagctgcaaaatgctgcaaatttgattcaatctgaagatacagtacttgatagttactgtagtgatggcttggaaaatacaattctagctaagaaaggactggcaactggtataactgagtttgcaaaaggtggtaaccttcctagtttgatgtgcaaggggacagatctgaatcaatggataaatgaaggtttaatgggcatctctcatgtcagccagaaaaaatcactgtctagtaccaagtttgtgccacaaaagaaaattaaacgcaacttatcatcccaaccaacaatcaagtcattttttcaaagaccagggtcaaagacagtaaatgctagtaccagtaccttagttactccagcagaaacattagaccttacaaatcaagcatgtgtttcaaatggtgatacactgcctgaaaacatgcagtgcacaacttcagctgcaaaagttcaggataacacagatgcatcgtcatgttcactttcaacagacaagtctaatgctgcagcattggagtggcagaggatacagaaaaagatgaagatgacactaccacgttgcaaagggcatagtgaaccatgcattccgaggtctgtgaagaagggccctaatataggccgtttgttctatgtctgtgctcgtgctcagggacctgcatcaaatccagaagccaattgtggccactttcagtgggcacctggaaagtctaaagagaagagctctaaagagaaacgtctgtgacttcatttttctcccaggaatccaggacattttgcttccaatgagtctggtacatcaccttgtcccagcatactgatgacgtggcgatgtatttgtggagaggtaagctgatcaagggcctgtttgggaggtctggctctgactggctccttgctctagtaaccggaggggccacaaaacgtgtcttcaccagctccccattgttttgaaaaggacagaaaacaacttcatgaacattgcagccacagtgccatggataagctacagtagcgcatcagctggaacagccaagagctgtcccaaacgtggcctgaacaagcacttctctcaggcaggtacatattctaatcctgtaattagttggttgacactaacatgcagccttccgttggttggctaacaactaagggcttgttcggttagctctcaatccatacgtacggattgagtaggattgggtgcgtttaaattccaagcaagtcaaacttctttttaattttttctaatctctcagggatcttctcagaagttatttatttttccgcctggtttagcgtattcaaattcttaatagacaagtcacaagtggccatcagtggagaaatcttacagtcctgtagtaatgttttatatgaaaactaatatggacattatagtattattgcccatatctccccagaaataaagtgccagtcgtgtaagtttttgtttctttcctttttcaaaacaacgagaaagagcatatattaggc

SEQ ID NO: 5668 - DNA, 1848 bp, Zea Mays
cttatcttatcttctattttaaactacactaaataaatgtgtgtcaaatagagctgataccggcttaccgcttacctccgcgcactgcacacgttcgacgaaatgccgccgcgagccctcttcgtcgtcaactgagatttgcctcacatcatctccgattccttcccctacttccgtccccatcagtggacccagccgagatcgactggatctcctggctcgggcggctttgatggttcctggggtcggcccggggaggagttcgaggcgatgagcaggcttgcgtcggggctccagcgcccgcggaggtcgttgtcgccgtgcgagggctggtgttactcgcggctatcgtgctcggccgcctgtggaggaggttcatcggagtgacggcgtcggcgccgctcttcgtgctcttcaacatcctcctatcgtggggcgtttacatcttcgtaatccgtagaagtgagctcttgtggtactgtaaattggattcagccattaagagatgattttatgctccattcaatgagagttgcagacttcaaagcatatactaagggattatttcaactatgaatccctgtagtacttcaacattaggtcactccttgtcaccaaatttgtgctcaactacaaaacccgtatctgctcaagactgagctggcttcggttaagggaccaagtgtggacactgcatgctctagtcaatttgtgctcacttttagagtcctaattcttggtgaatcaaaatgcttcaagagatcaagcatggaagcattactcttggtttgtctgtgctcacctctagttcatcgtgaattgcagtgctattaaccagaaacttcttctctgctggacatgctaataaatgcagaatgtgcactgcttctgtggggattctacaggattttatcttgtgatcctggtatttttgcttgtgattcttcttatttggcagaggctggttgcaaggattttgtggaagctatatacacgagtgagagactcccaatgctctcaagagtcaggcagtgtacctggtgcaaagcaaacattaggggctatgaccatcattgccctgcatttggtacttgtataggacagaaaaatcatcgtctatttatggcccttttgacaggatttgttgttgctgaatcaacatatacgatgtgctcaacaaaatatattactatatgcattagctcaggaactataaaatcagagaatcctgtatctctaaacatggtaatcagtacaatgctcttctctatcctccaagtcctctggcagattgtattcttgatgtggcacatatattgcatctgcttcaacatcaagacatatgagtggattaactggaagaaatatcctgagttccagatgaaggaacaacctcgatcagattctgaagtcaaatctatgaacccatatgacaaaggcatgctgtgtaacataagagattttctaaaaccagttttgagtacgaagacctgacctctgatggaactatagaaacatgggaaatctgaagtgcgttatactggagccaacatggaagcttgtttcccttgttgctgccgtagcatttattgagactcgtcgtgaggattctgctgtgtaatttaatgtgcaagtagcattcttttataagattacttccgaccgggaattctagtctcttaacttcagaactgatttggtgagtaggtaaatagaggggatctatggggtcccttactattcatatggagttcacatcgtgatcctgcatttttttcctgtctggtcttgccaaagggtaactcttgcaggtgaaaggaccacgatgctcaagagggggtgaattgg

SEQ ID NO: 5669 - DNA, 1879 bp, Zea Mays
ggcttaccgcttacctccgcgcactgcacacgttcgacgaaatgccgccgcgagccctcttcgtcgtcaactgagatttgcctcacatcatctccgattccttcccctacttccgtccccatcagtggacccagccgagatcgactggatctcctggctcgggcggctttgatggttcctggggtcggcccggggaggagttcgaggcgatgagcaggcttgcgtcggggctccagcgcccgcggaggtcgttgtcgccgtgcgaggtgctgtggtgcgcgctcgcgtcatgcggcctagtgcttttctcgcagctcgccgtggcgatggttccccgcctcttcccttccctctatctcctcgccatgctccccatcgcggggctggtgttactcgcggctatcgtgctcggccgcctgtggaggaggttcatcggagtgacggcgtcggcgccgctcttcgtgctcttcaacatcctcctatcgtggggcgtttacatcttcgtaatccgtagaagtactgtaaattggattcagccattaagagatgattttatgctccattcaatgagagttgcagacttcaaagcatatactaagggattatttcaactatgaatccctgtagtacttcaacattaggtcactccttgtcaccaaatttgtgctcaactacaaaacccgtatctgctcaagactgagctggcttcggttaagggaccaagtgtggacactgcatgctctagtcaatttgtgctcacttttagagtcctaattcttggtgaatcaaaatgcttcaagagatcaagcatggaagcattactcttggtttgtctgtgctcacctctagttcatcgtgaattgcagtgctattaaccagaaacttcttctctgctggacatgctaataaatgcagaatgtgcactgcttctgtggggattctacaggattttatcttgtgatcctggtatttttgcttgtgattcttcttatttggcagaggctggttgcaaggattttgtggaagctatatacacgagtgagagactcccaatgctctcaagagtcaggcagtgtacctggtgcaaagcaaacattaggggctatgaccatcattgccctgcatttggtacttgtataggacagaaaaatcatcgtctatttatggcccttttgacaggatttgttgttgctgaatcaacatatacgatgtgctcaacaaaatatattactatatgcattagctcaggaactataaaatcagagaatcctgtatctctaaacatggtaatcagtacaatgctcttctctatcctccaagtcctctggcaggtcgtcttctcgttaggtgtttcttgtagctaaaaggtcagattttccagattaactggaagaaatatcctgagttccagatgaaggaacaacctcgatcagattctgaagtcaaatctatgaacccatatgacaaaggcatgctgtgtaacataagagattttctaaaaccagttttgagtacgaagacctgacctctgatggaactatagaaacatgggaaatctgaagtgcgttatactggagccaacatggaagcttgtttcccttgttgctgccgtagcatttattgagactcgtcgtgaggattctgctgtgtaatttaatgtgcaagtagcattcttttataagattacttccgaccgggaattctagtctcttaacttcagaactgatttggtgagtaggtaaatagaggggatctatggggtcccttactattcatatggagttcacatcgtgatcctgcatttttttcctgtctggtcttgccaaagggtaactcttgcaggtgaaaggaccacgatgctcaagagggggtgaattgg

SEQ ID NO: 5670 - DNA, 1892 bp, Zea Mays
ggcttaccgcttacctccgcgcactgcacacgttcgacgaaatgccgccgcgagccctcttcgtcgtcaactgagatttgcctcacatcatctccgattccttcccctacttccgtccccatcagtggacccagccgagatcgactggatctcctggctcgggcggctttgatggttcctggggtcggcccggggaggagttcgaggcgatgagcaggcttgcgtcggggctccagcgcccgcggaggtcgttgtcgccgtgcgaggtgctgtggtgcgcgctcgcgtcatgcggcctagtgcttttctcgcagctcgccgtggcgatggttccccgcctcttcccttccctctatctcctcgccatgctccccatcgcggggctggtgttactcgcggctatcgtgctcggccgcctgtggaggaggttcatcggagtgacggcgtcggcgccgctcttcgtgctcttcaacatcctcctatcgtggggcgtttacatcttcgtaatccgtagaagtgagctcttgtggtactgtaaattggattcagccattaagagatgattttatgctccattcaatgagagttgcagacttcaaagcatatactaagggattatttcaactatgaatccctgtagtacttcaacattaggtcactccttgtcaccaaatttgtgctcaactacaaaacccgtatctgctcaagactgagctggcttcggttaagggaccaagtgtggacactgcatgctctagtcaatttgtgctcacttttagagtcctaattcttggtgaatcaaaatgcttcaagagatcaagcatggaagcattactcttggtttgtctgtgctcacctctagttcatcgtgaattgcagtgctattaaccagaaacttcttctctgctggacatgctaataaatgcagaatgtgcactgcttctgtggggattctacaggattttatcttgtgatcctggtatttttgcttgtgattcttcttatttggcagaggctggttgcaaggattttgtggaagctatatacacgagtgagagactcccaatgctctcaagagtcaggcagtgtacctggtgcaaagcaaacattaggggctatgaccatcattgccctgcatttggtacttgtataggacagaaaaatcatcgtctatttatggcccttttgacaggatttgttgttgctgaatcaacatatacgatgtgctcaacaaaatatattactatatgcattagctcaggaactataaaatcagagaatcctgtatctctaaacatggtaatcagtacaatgctcttctctatcctccaagtcctctggcaggtcgtcttctcgttaggtgtttcttgtagctaaaaggtcagattttccagattaactggaagaaatatcctgagttccagatgaaggaacaacctcgatcagattctgaagtcaaatctatgaacccatatgacaaaggcatgctgtgtaacataagagattttctaaaaccagttttgagtacgaagacctgacctctgatggaactatagaaacatgggaaatctgaagtgcgttatactggagccaacatggaagcttgtttcccttgttgctgccgtagcatttattgagactcgtcgtgaggattctgctgtgtaatttaatgtgcaagtagcattcttttataagattacttccgaccgggaattctagtctcttaacttcagaactgatttggtgagtaggtaaatagaggggatctatggggtcccttactattcatatggagttcacatcgtgatcctgcatttttttcctgtctggtcttgccaaagggtaactcttgcaggtgaaaggaccacgatgctcaagagggggtgaattgg

SEQ ID NO: 5671 - DNA, 3974 bp, Zea Mays
gacgttgttggagagtaaggagatatagagaacaaaatcttttagacaagactgtaaagaacggatataaagtacgttgctggagacagccttacccattaaagacatgtttaggttcttccggatggaaagctactgagcacattaaatctctttctatttaattttaactataaaagattaatcctcttaaattcactttcgatccacttttaaccaaacagacccttatccattgcagacacatgggtattattaatttttttttctgcaaggtttcagttgttttaaattttttttcccctgcaaagccaacatacatggccactaaccactttatttttttacaagaaaatagcacacacaaagttggttaactggtaataacataaattaaacttacacattctgaatttagcacaccaacactactttacagcgctgtgttcagcgcgcagctagcctcgtagtagtagtagttatactagcgcatcgacgttcagcagcctcgcaattacagtagtttattcaggcatgcatcggtgggcatttggtgcttgcattggcaaactggaaaaagaggtaggtagctagctctggacggaggtctcgtctcacggcctgaagaaggctgggtggggacggccggtgccctggaaggaggtgttcttgaggccgtgagacgtggccttcgtccagagctagctacctacctctttcagttcgatcgtcgtcagtgcaaagcaccaccaatgcctgaataaatttaactacgaggctagctgctgaacatcgatctgctactgctagtattactacggcgaggctgctgaacagcgctgtagagtagtattggtgctcagttcagaatgtataatgttacttctaccgattaaactgttaaaaaaccctagtacgcttatgtggtcaaataccacttatatctgtgagcagtgtcgcatctctatataaaggaatatgtatcttctcagaaagaggttagagacccaactctacatactgtttttttaatgtgttttctgagtgtgtggattgctagaaaagaaaacgtgcttctaccgacttttcgcgtctatactgctgacaggaggggaaatgagcaaatctgatgatccatgttaacattgatgatttgtgatagcgtggttctcagcgtaaccaaccttgtctgttattctcacgtagagagggagagagaaaaaacaataaagtagcactaccccaggagccagtgcgttttaaaaagggccgcacgcaccgttaccaaccatttgacacaagtgcaaaagcccatcacgcgtttttaaacgggccaaattctagttacgataggtttttttttctgtagcataaatcacctgtattgaaccgaaaacatcatacgccgccgcctgcctctcccgccggccgtgggctgccgcatcccggcctggtgccctccggcggccgcatccaaacccccccaccccctcgcgtagataagcctagtaatcagtctcggcggcgcgggacgctgtggcgggggagaccagtgcgagactgcgctgtcttgtccattggggggatttggggctgtgcgcgaggcagttaataatgcccgtcctctccccaagtcagagtccgctgccatggccgtcgccgtcgccgtcgacgtcccctcctgcatccagctcctccgctcctgcagcgcggtcgccggccggcagctccaccagctcctcctcaaatccggccacgtcccctcctcgctcccgcccactaactccgtcctcctcatgtacgcgcgcggctctccgctccactcccgcgacgcccgccgcctgttcgacgaaatgcccacgaagaactgcttctcctataactccatcatcaccgccctcttcaagtccggagaccaccgtgcggctctccgcgtgtttcgctccatgcctgacaggaacaccttctcctacaacgcggtgataactggcctcactggtgctggggatctcgacaccgcgagtgagttgctagatgagatgcccgtgaaggacgccgtggcttgcaacgctgtgttgcatagtggttggcgcctgtgctgatcggacgcagtatgagattgggaggcaagctcacacccggttggtggttgccaacaccgggattgattcgatattgggctgcgcgttgattgacatgtattgcaagtgtggggatttggactccgctcaccaagttcttgacaggttagaacatgtcgatgagatttcgctgtccgcattggtctatggctacgcatcttgcggacagttgcacaaggcgttatgtcttttcgacaagatggagagccccagcattgctctatggacgtctcttatcagtggttgtaaccctgcctatcatggagatggtgcttttgttctttttgtaaggatgttgcggtcagaaatgttgcctaattctactatttatgccattgttctgaacatgtgtggctttttaggcatgctgaagcctggtcagcagacgcaagcttgtgctttaaagagtggggctgtcaatgacttgatagcagcaagtgctctcattgacttctactcgaaatgcggcctctgggcagatgcctgccaagctttcagtgagcttaggcatcatgacaccattgtgctcaactcaatgatcactgtatactcaaactgtggccaaatagatgaggctagaagagtttttcgtttgatccctagcaagagtgtcatctcatggaattctatgattgttgggttcagtcaaaacgggcatgctcttgatgcattggagctgttctgtgagatgcaccggcttggtttgcagcttgacaatgtagctatatccagtgtccttagtgcatcaggcagcatctgctctgtaagttccggggagcagatttttggtcttgctattgcgcttggtctgcagtctgaccatattgtagcctcctcgctcattgacctatactgcaaatgtggtaacttggccaatggacgcaggatcttcagtggtattgctaatccagacgaagtcctgtggaactcaatgcttataggttatgcttctaacgggtatggactcgaggcactgaaacttctagatttaatgcaaagtaggggtctgaagccaagcgaacggacatttgttggtgtcctttctgcatgctgtcattctgggcttgtggaagagggattgagatggttttaccggatgaaggaagattttggcgtgagtccatcagctgagcattatgcatgtgtgactgacctgttggtccgagcaggtcgactggatgaagcagttgagttcatagagaacatgcctttcaaagctgatgcaattagttggacttctattattggaggatgcaaagcccagggcaatgaggttctgttggacaaggttgcaaacaaattgatggaaacaggattgtcaacacattcaagtttgtatgtgcagctgtcaagcacactcgcagctcatggggattgggacaaatcagctgagattaggagtatgatgcatgacagaagaatctcaaagaatgctgggcgcagttgggttgacagggcatagaggaaatgaccagtgtcacctcccacaggcgtctcggtccattttctcttgggccttccctattggctttggtttcttcgatgtgttcttccgctagttaggaagtggtaacaaacaacgatcctgctaaaatatgtgcttttgatcatttgcttagttgaaccatatgaggtgatttcttggatgtggattcctgaagcatgcacaggctaatgattcagtccatgatatcttcgacatcaaaattgaccataatgaaaatgtgtcaaccaccaaaaagaggttagtttggtatggttgcattatcccacgccttgaagattatggaaccagaagatcaggaatactgtcgcttcagtaatcatcttcag

SEQ ID NO: 5672 - DNA, 2878 bp, Zea Mays
aaagaaaagccagtcaaacccaaccacctcagctcagcatcgaggtcgccttcccctcctccagttgtccccagaaaccgtgtcccctactctctctctctctctctatctctcttctcccctcgatcaacagcaacagcggcggtcagaagcttccgtcgcgacagctcccgacctcctgccggtcttcccctctcctagtcggcgcgaatcccgaggcggaggaggaagaggggagcggagtgggggtgggccccatcagccatgagtctcacggggtccgccctggaggcggcgctacaggcggtggggcgcggcctcgacgcagctggagaccaccggctgctctactgcaagggaggtggaaggctcgtcgcgctcgaggaggaccgtgcgcgggacctcccgctccccgacggcggcgtcctcccgagcgtgccccccgatgtcgaggtcgagcagtgccgcagagaccccgagcgcatccgccccttcccctctggcccaagctctgccgcagcggatgggccctttgtctgcagcttcgataagatggctgagtatttcaacaggaagtcatgcttgtccgagacagtaccgctgggttccttcaactctctgttcagcttcaccggttcatggaagaatgatgctgcggctacgaaggcccttgcgattgatggctattctctgcctctgtttcgagtgaaaattaggagttctgaactgacgctgcttgagagcgttaagcacgcgatcccaaatgtttgggatccatcagcattggctagctttattgagaattacggtacccatattattatttctgttacggttggtggtaaggacgaagtatacattaagcagcattcatcgtcccaattgtcagggttagagttcaaaaattatgtgagggaaattgggagggaaagattctcagatgtggaaaacaagtcaaatgcaactcctatcaattacagcgagaaggatattacagtaatattcagaaggaggggtggttgtgatcttgttcaaagttttagtgattggaaaggaactgttgcctcagcaccagatgtcataggcatgacctttctttcaattgtctctcttgttgacgatgtaccaggaaagaagcaccttgctcgtgcagttgagctatacttgacctacaaacctccaattgaagaattacagtatttcttagattttcaagtcccactagtttgggctccagctccaccaggtattgctagtcaccataggaaggaacctgtctgcccatcgcttcagtttagcttaatgggcccaaagctcttcattagcacagaacaggtaaaggttaccccttaaatctgaacatatgagtacagtgattactttttggagttttacgctagaaatgttattttaattgttgtcaggaaatgctatagctaagtatgaaacacaattaccatcataaacaattttctactaggttgggcctctagctgagttggttaggtggtagcacttaagttctgagttcgattccccatgggagtcagactgctgttaaaaaggtcctctcgtttgtcccaaaataaagcacaggtaaaagaaccgactcttacataggctacggcgccgttgtgtatgggtgagatatgtgttcggatgttttctagaattgcaagagaaggtcttcttaatgcaatacctgggatcccagatgttgtcttaccctcgcaagccaagtttttttttaaaaaaaaatataattctaaagatcaaggcatgcagaagaacaaaaatgtgtaaattgcaccaggggtacaaattttgtacctatagtgcattttactgataaaaagatacacttttaagacaatcaattttttgtgaacatgctaactctgaagaagacatgtgcagatctctgttgggcgccgaccagttgttggcctcaaactgctcttggaaggagctaaacagaatcgtttggctattcacttgcagcaccttgtctcattaccaaaaatattcctacctcattgggactctcatattaccattggacctccaaaatggcaaggccctgaagaacaagacagccgatggttcgagccaatcaagtggaagaactttgctcatgttagcacagcacccatagagtacactgaaacaaatattacggacctatctggtgtttatattgttacaggtgcacagttgggagtgtgggattttggtgcaaagagtgttctccacctcaaacttttgttctccagggttcctgggtgcacaattagaagatcagtgtgggaccacagcccatcaagttcttcaattcataaagcagatgaatcttcatcgtcctcgagtgataatgctaaacttctgaagattattgacatgacagaaacattgaagggcccacaagatgcacctggccactggctgatcacaggtgctaagttgggtgtcgagaaaggcaggattgtagtgcgtgcgaagtactccttattgaattattaaccaaatgtttaaagcattcattcactcactctgatattgagcactgtgttttaaggtagcatttgttcttttgtttttcatgtatgactttccttcccccttgtaacttgatgtggatccatgcttcttgttgatgcggtgagtgaagtagcatgaagatgtttatgctcagctcaaaagtgtttgatctggtctcggtcatcgcttccagagccatctggttttgacagtgaaaatggtgcgttcctaagttttggcactggtgttttgcactcggaaattcatcagtggaacataattagtatattcgctctggttactaagcgctaagagtttcagtaagtttttttgacattgg

SEQ ID NO: 5673 - DNA, 1357 bp, Zea Mays
cagcccatgacacgcacagtagcccacaaaatcatggcctgcctgccatgctggccatcgacccggtcgtgggggcattcgcggcgggcaacgccgtggcgctgaagccgtcggaggtggcgccggccacgtcgctgctgctggccgacctgctgccgcgctacgtggacccctcgtgcgtcagggtcgtgcagggcggcatcgcggagaccaccgcgctgctggagctccagtgggacaagatcttctacacaggtaacagcagagtaggacgcatcgtcatgtcctacgctgccaagcacctgacgcccgtggtcttggagctcggtggcaaatgccctgtcgtcgtcgactccgacgtcaacctccacgtcgctgccaagaggatcgccgccggcaagtggggctgcaacagcggccaagcctgcgtctcgccggactacgtcgtcactaccaaatcgttcgcgccaaagctgctggagtccctgaagcgagtgctgttcgagttctacggggaggagccgctgcggtcgccggacctgtcgcgcgtcgtcaactccaaccacttcaacaggctcatggcgctcatggacgactactcggtctccggcaatgtcgcgttcggcggccagatcgacgagcggcggctaaggatcgccccgacgctgctgctggacgtcccgctcgactccgcgatgatgaaggaggagatcttcgggccgctgcttcccataatcacggtggacaagatcggcgagagcttcgctgtgatcaactccatgcccaagccgctggcagcttacctcttcagcaacgacgggcagctcaagcagcagttcgagaggaccgtctcggcgggagggatcatgttcaacgacaccggcatccacctgacaaacccgaacctgccgttcggaggagtcggggagagcggcatgggcgcctaccacggcgccttcagcttcgacgccttctcccacaggaaggccgtcctggaccgcagcttcctcggcgaggccagggccaggtacccgccgtacacgccggcgaagctcgccatcctcaggggcgtgctcaatggcagcccgcttgccacggttcaggcggctgcggggtgtacaggaggggcatcagctgactgactgactgaccccccttcatgcttattattaataataagcataaatattcaccgcatacacattgctgtgcttttattaaggttgttgtgagggcgaaaaatgtattgaccctttgcgtgtgcgcgtgcgtgtatagcaactattaataaaagaaaaaagtgatgttcatttcgtacagagtatactaaattaagatcacatcacgagttttaagc

SEQ ID NO: 5674 - DNA, 3024 bp, Zea Mays
ctcagatctccccgacctgccaccacccgcgagccctgcacaacatcactgctaccttctctgtcgatccctcgatctccagacaaccccgctcgcctctctccctgctccggtccccgcccgcctctcgctcgcgacaactccgccgcagcacgcggcggccgcggcgagatgctccgcctgcgggcgttccggccgacgagcgacaaagtcgtgaagatccagctccaccctactcacccctggctcgtcaccgccgacgccaacgaccgcgtctccgtctgggactgggagcaccgccaggtgatctatgagctgaaggcaggtggcgttgatgagcgtcgcttggttggagcgaagcttgagaaacttgctgagggagatgattcaaaaggaaagcccaccgaggctattcgagggggaagtgtaaagcaggtttccttttatgatgatgatgttcgcttttggcaacattggcgtaattgctctgctgctgctgaggccccaactgcagtcagtcagcagtcttccacgttcattgcacctgcaccttcgacacgaggaaggcactttgttgtcatttgttgtgagaacaaagtcatatttttggacttggtgactatgcggggccgtgatgttcctaaacaggagcttgacaataggtcacttctttgtatggaattcctctctaggacatcttctagcgatgctcctcttgttgcctttgggtcatctgatggtgtcatcagggtcctttcgatgttgacatggaagcttgtgcgtaggtatacgggtggacataaaggagcaatagcttgcttaatgacgtacatgtctgcagctggtgaggtacatttagtttctggtggcagcgatggcctgctgatattatggagtgctgatcatatccatgactcacgtgagcttgtgcctaaaattagtatgaaggcccatgatggaggtgttgttgcagttgaactttctagggtgatggggagtgctccgcagctcattacaataggggctgataaaactttagccatatgggatactgttactttcaaggaaataagacgcattaaaccagtgcctaaacttgcttgtcatagtgttgcatcgtggtgtcatccccgtgcaccaaaccttgatattctaacttgtgtcaaggactcacatatttgggccatagagcacccaacttattctgctttaacaagaccgctctgcgagctgtcatcactagttcccccacaggtccttgcactgcataagaaactgagggtttactgcatggtggcacaccccttgcagccgcatcttgttgctactggaactaatattggtatcatattaagcgagtttgacccaagagcacttccagctattgctcctttaccaacaccaacaggcaacaaggaacattctgctgtttacatagttgaaagagaacttaagttactgaatttccaattgtcaaacacagcgaatccatcccttgggaatgctggtgttgcatctgatgcaggaaggtcaatgaacaattcaatagaacagttgatagtaaagcagaccaagaagcatatcagcactcctgctccccacgattcctattcggtcctttcagttagcagttctggaaagtatgttgcaattgtatggccagatatcccttcttttgctgtatacaaagcaaatgattggtcagttgttgattcaggcacagggaagctttttgcctgggacacttgtcgagacagatatgctctggtagagagtgcattggccccaagaatgccacttgttgttaaaggtggttcttctaaaaaggcaaaagaagcagcagcagctgcagctcaagcagcagctgcagcagctagtgctgcttctgctgccacagtgcaagtgcgtatcttattagatgatggaacagcacatgttttgcagagatcgattgatggtcgtaatgaaccatcctttgacagcaacagctatatcaactgttcaatcgatgcccttatcaggttttggtggaagtggatcatcttttgcatctgatgatccattttcctctaaggaagggcctccacaaaatttccaactgtacagctgggagacctatcagcctgttagtggcctacttgcacaacctgagtggactgtgtgggaccaaactgttgagtattgtgcatttgcttatcagcagtatatagtgatttcttccttgcggccccaatttaggtaccttggagatgtttcaattccctttgcaactggtgccgtttggcatcgaaggcagttatttgtgtctacaccaacaacaattgagtgtgtctttgttgatgctggagtggcagcgattgacattgaaacaaaaaggataaaacaagaaatgaaagcaagagaagctcagagtcgggcagctgaagagcatggagatttggctcttatcactgttgaagctccccaggttactgtgagtgaaaaagtatcattgaggccaccaatgttgcaggttgttcgtttagcctcctttcagtacgctccatcgataccaccatttatagtaccaaagcaatccaagttcgatggagatgattcagtgtttcagaaagaactggatgacagaaggtatgctgaagttgctgtcgctggaggaggtgtgtctgttgcagtaactcgcttccctcctgaacagaagagacctatcggacctcttgttgtggttggtgtaagagatggagttctctggcttgttgacaggtatatgtgtgcacatgccttatcactcagccatcctggtataagatgccgttgccttgcagcatatggggaccctgttagtgctgtgaaatgggcaacgagacttggcagagagcatcacgatgacctggctcagtttatgctgggtatgggctatgccactgaagctctccatttgcctggaatatctaagaggctggagttcgaccttgcaatgcagagcaatgacctgaaaagagcacttgcttgtctattaacaatgag

SEQ ID NO: 5675 - DNA, 2401 bp, Zea Mays
acacggtctgcaccgcagaaactttgccttccccgcgtccggctactactgtcggggcgtcgacccatattcactcctctgccctctcagatcccgaactaccaaacccccttctcgccggcggaggaaggcgggggcggagaaaagagatcacgatcgctaatccgtgacggcagcggtcgggatggcggcggcgctagctccgggggtgtcccggaagttgaagaaggtgctggagacgcgtacggataacccggatctgctggcctcgctgggcgcgctctccactttctacgtccagaacaccccgcaggcgcgccgcaatctcaaatcctccattgagcagcgtgcacttgccatcaatcgccacttcctcgacgcctcgctccccgcccacaaggcgctggatcgcgtcgagggggaggtgcacgcgctgaacgactcctggaagaagatcgaggaagcattgaacagttgtagtgcaagtactggggacatcatcagtacaacagagaggttgcaacaggaacttgaagttatcactcagaggcaagaaattgtgtcatgcttcctgcgggattaccaactttcaaatgaagagataaatgcacttcgggaagaggagatagatgacaaattcttcaaagcattgctgcatgttcaagaaatacactcaaactgcaaggtcctgctgcgaacacaccaccagcgtgctggtttggagcttatggatatgatgtctgtgtaccaagaaggggcttacgaaagattatgcaggtgggttcaagctgaatgtaagaaattaggtgatactgacaatcctgaagtaagtgagcttttgaaaatggctgtttgctgcctgaaggaaagacctgttctgttcaagtattgtgcagaggaggttgccaacatgaggcaccatgccttattcaggcggtttataagtgctcttactagaggtggacctggagggttcccaagaccaatagaagtgcatgcccatgatcctcttcgctatgtaggcgaaatgctgggttggctacatcagaatatttgaaggagcatgtcggccatttaaagttcgagttgagcaagttttgcagtcacagccaagcctgatagtttctttcaaacttagcaataccttggaattctattgttacacgatatcagaactgctgggtgaagacactgcgctgtgcaatacaatatggtcacttagagatgcagctcagcagacattcttcaatatcctgaagagtcgtggagagaagttattgcgatatcctccactagttgcagttgatctctctcctccaccagctgtaagagaaggaatttctttgctgcttgagctcatagatacctacaatagcatgatggttcctgcctctggaaaaagaccaaactttgaccctgttatttctgcattattggatccaataattcaggtgtgtgagcaagctgcagaggcacagaagtcaaaaggatcacttgcgcggcgtggtagaacaagctctgatcctagtggaaatagcagggattctatatcagttgatgctattctgtctaagaatttatctacgtcgattctgagtgccgaatcttcatccaaagtctacctcatcaactgcttgtcagctattcaggagccattgatgggccaggaggtcgctacaagctatgtaaacaacctgcgctctatgattgaagcacatatttgtgtccttgtcgataaagaagttgactgcattcttaggaaatgtggactatcaaataagatgccgtacataaaggagtatggtagcaaggctgatgcaaggcctctggcagatattatcgagacgtcgccacaaatgcttatggaatgcttgaaggcattctatggtattgtgactggaacagaaggttccttgcctgaatttgagcaactgcaggttccaaggttacgttcagatgcctgcaatggtttggcaagagctctagcagaatcttatgagctcatttacagcgcagtcatggatccgaataacagttatcctgacccaaggtctttggttaagcactctcctgaacagataagaactatactggaagcctgaggtcttcgcacgatgccttatggtacatgttaagtagaggtctttcgtgcatgaaactttgtcatgtaaatttccgactacaagctgtgggttcaattgattacagaaatatggaagcggtgactctctgaactcatgtatcggtatctagtgtctcgttgtcctatattccttttttctttatgtatcaagttattgtatacttcatgatgtaatttgaggtacaacttaagtgcttaaccgactattatgataccaaagctactatgcaagcatggtgaaggcttgtcggggagaag

SEQ ID NO: 5676 - DNA, 2472 bp, Zea Mays
caccgcagaaactttgccttccccgcgtccggctactactgtcggggcgtcgacccatattcactcctctgccctctcagatcccgaactaccaaacccccttctcgccggcggaggaaggcgggggcggagaaaagagatcacgatcgctaatccgtgacggcagcggtcgggatggcggcggcgctagctccgggggtgtcccggaagttgaagaaggtgctggagacgcgtacggataacccggatctgctggcctcgctgggcgcgctctccactttctacgtccagaacaccccgcaggcgcgccgcaatctcaaatcctccattgagcagcgtgcacttgccatcaatcgccacttcctcgacgcctcgctccccgcccacaaggcgctggatcgcgtcgagggggaggtgcacgcgctgaacgactcctggaagaagatcgaggaagcattgaacagttgtagtgcaagtactggggacatcatcagtacaacagagaggttgcaacaggaacttgaagttatcactcagaggcaagaaattgtgtcatgcttcctgcgggattaccaactttcaaatgaagagataaatgcacttcgggaagaggagatagatgacaaattcttcaaagcattgctgcatgttcaagaaatacactcaaactgcaaggtcctgctgcgaacacaccaccagcgtgctggtttggagcttatggatatgatgtctgtgtaccaagaaggggcttacgaaagattatgcaggtgggttcaagctgaatgtaagaaattaggtgatactgacaatcctgaagtaagtgagcttttgaaaatggctgtttgctgcctgaaggaaagacctgttctgttcaagtattgtgcagaggaggttgccaacatgaggcaccatgccttattcaggcggtttataagtgctcttactagaggtggacctggagggttcccaagaccaatagaagtgcatgcccatgatcctcttcgctatgtaggcgaaatgctgggttggctacatcagtggtccaacttttcgacgtcagtctggtagagatggtgattcttccaaaggagaacctgatgtaacttctgtgcttgatagaatatttgaaggagcatgtcggccatttaaagttcgagttgagcaagttttgcagtcacagccaagcctgatagtttctttcaaacttagcaataccttggaattctattgttacacgatatcagaactgctgggtgaagacactgcgctgtgcaatacaatatggtcacttagagatgcagctcagcagacattcttcaatatcctgaagagtcgtggagagaagttattgcgatatcctccactagttgcagttgatctctctcctccaccagctgtaagagaaggaatttctttgctgcttgagctcatagatacctacaatagcatgatggttcctgcctctggaaaaagaccaaactttgaccctgttatttctgcattattggatccaataattcaggtgtgtgagcaagctgcagaggcacagaagtcaaaaggatcacttgcgcggcgtggtagaacaagctctgatcctagtggaaatagcagggattctatatcagttgatgctattctgtctaagaatttatctacgtcgattctgagtgccgaatcttcatccaaagtctacctcatcaactgcttgtcagctattcaggagccattgatgggccaggaggtcgctacaagctatgtaaacaacctgcgctctatgattgaagcacatatttgtgtccttgtcgataaagaagttgactgcattcttaggaaatgtggactatcaaataagatgccgtacataaaggagtatggtagcaaggctgatgcaaggcctctggcagatattatcgagacgtcgccacaaatgcttatggaatgcttgaaggcattctatggtattgtgactggaacagaaggttccttgcctgaatttgagcaactgcaggttccaaggttacgttcagatgcctgcaatggtttggcaagagctctagcagaatcttatgagctcatttacagcgcagtcatggatccgaataacagttatcctgacccaaggtctttggttaagcactctcctgaacagataagaactatactggaagcctgaggtcttcgcacgatgccttatggtacatgttaagtagaggtctttcgtgcatgaaactttgtcatgtaaatttccgactacaagctgtgggttcaattgattacagaaatatggaagcggtgactctctgaactcatgtatcggtatctagtgtctcgttgtcctatattccttttttctttatgtatcaagttattgtatacttcatgatgtaatttgaggtacaacttaagtgcttaaccgactattatgataccaaagctactatgcaagcatggtgaaggcttgtcggggagaag

SEQ ID NO: 5677 - DNA, 1997 bp, Zea Mays
gagcctttttttttggttttcccttccaggaggacgaacaacacgtcagcactactcgcagtcccatcttcgccccccgcgacccgcccactatataaaacccgcctccccacccataggcccacaccaccaagaaaaataaattcagagaaaggaggaagggagactgggagaaacagacaggaaggagcccatccgcgtctgcctccacccctcggctcccagagtccccgctagccaagcccccacatggcaccaccgcccgcgggcctcgtgctcgtggctctgctcgcgctggtcctggcgctggcgctggcgccggcgccggcgcgcggggacaagccggcgaggggcggggcgtccagctccatcgccgccggggcggagacggagccgtcctccgccgtcttcccgctctacggcgacgtctacccgcacgggttgtactacgtggctatgaacatcggcaacccacccaagccatacttcctggacgtggactccggcagcgacctcacctggctgcagtgcgacgcgccctgcaggagctgcaacgaggtgccgcacccgctgtaccggccaacaaagagcaagctggtgccatgcgtgcaccggctgtgcgcttccctgcacaacgggctgaccgggaagcacagatgcgactcgccgcacgagcaatgcgactacgtgatcaagtacgcagaccaggggtcgtccaccggcgtgctcatcaacgacagcttcgcgctccgcctcaccaacggctctgtcgctcgccccagcgtcgccttcgggtgtggttacgaccagcaggtccgcagcggcgacctgagttcgcctaccgacggcgtgctggggctcgggaccggctcagtcagcttgctctcgcagctcaaacagcgtggcgtcaccaagaacgtggtcggccactgcctcagcctgaggggcggcgggttcctcttcttcggtgacgatctcgtgccttaccaacgcgcgacatggactcccatggctcgcagcgcgttccggaactactactcccctggctctgcaagcctgtacttcggcgaccggtcactgggcgtgagactggcgaaagtggtcttcgacagtggaagctcgttcacctacttcgctgcaaagccataccaagcacttgtcaccgctcttaaggatggcctgagcaggacgctggaagaggaacccgacacttcgctgcctctctgctggaaagggcaggaaccattcaagtctgtgcttgatgtgaggaaggagttcaagtctttggtgctcaacttcgccagtggcaagaagacgctcatggagatccctcctgagaactacctcattgtcacagaaaacgggaatgcctgtctgggcatcctcaacggatccgaaatcggtctcaaggacctgagcattattggagacattacgatgcaggatcacatggtgatatatgacaatgagaaagggaaaattggatggattcgtgcaccctgtgacagagcccccaacgacataaatacggttcatgggtttgaggaaggttactgttggcctcaattcctcccggggatcattggtcttcccaacgaagattgcccagcctattaccgttcaaacaaagagcgatttgccaaggcccaagggggaggccgctagaatgacagaaacagcagaaggatggtcacggaggctggtgtgtgttctttaggaaaggagagaaactagcccatgtaaacatcataatgttcatatgaaatataacgatgatcaccctgttacgagtacaatcttttcggaccttttctgtgtacattctttacttggttttctttctgttgatgtgatatatactcggttccaggtgtctcgcgactatgtgtgagtgtgatacgcaggcagcagattgtcttgttcttcagggtcgttgtgtggataacgtcaggaatttagacattttcagattcaatttaatctagaaatatagcacg

SEQ ID NO: 5678 - DNA, 1090 bp, Zea Mays
gcttctttgcgtggtccgtcctgttcatttgaagatgaactcatccctctgcttgatgtcctagcaaacaaagtgaacgctatcaggaggcttagggaactcttgacaaccaatcttcctacaggcacatttccagtcaaggaagtcatagctgctacaatgataagaagaaagtagaggaaaaggaacagatctcgactgtaattctgcagatgaagcataccaataaaaaggcatatgaccagactctgtaacaatatctgcacatcagtaccttggcagactctccaagcagcaaacaaagtgaaggctatctggaggcttagtgaactcttgacaaccaaacttcctacaggcacatttccagtcaaggtaaactatctggcaccttggttacattacccgtgcttccagcagattacatcttgccatttattccaatcacaatgcatggttcaatccaatcatgagaagtggcaatctgtgaggtttttgcaagggagatgagctcaccttggcaatggtagttaatcttattaatgcaaacaaggatgattaatttgatgtacttttctatgcctcgtggtgcccattctcacaagaatgcatttgaggaatctgcaattaggccaaggcgtcccacacaggtgtttcttccataagaagactaccgacatgggatacgtctcttcagtttgtttgtcaatattttgtaggaatcagaagaggtgttcaacatgtgggttaattttgttttcaagtgtgctcctctaatgacacccttttcttttttggagtaccttttgataataacaaatttgggttctatttttgtttctagactcaagtctagagttccatgaattaaaatattggtttatttgttgtggccacctatggtctcattatcttctctccacttagttatttgttcctgcaatttgggtttggccagtatcaaatttggtaaggaaggaggcaactagatgcttaccgaatttactctcaattttgctttccttatcgcagttttactttgacatgcactaccattccccctctaatctctaccaaccatatgcaaaattgg

SEQ ID NO: 5679 - DNA, 1965 bp, Zea Mays
ctactatcccatatgagcagagcgagggcgtccaccacctaccgtgcccccgcccggccccgcgcatcccgctccccgaaaacctctccctccgtgccagggctcatccccaccgtgtcgtagccgccatcatcgcccaaatcctcgctcgccccacgccgcgccgaaatcctcatgccccacgcctgcccctgcccctgcctcccaaaccgcgcccattcgaaccggccgcccgaatctagcgcaagcacgcaggcggtgatgacggccacgggagacagccggcgctcggcgtgattcccgccccgccgcgagccaagaggttcgaggtcaagttcgcggaccccccgccgtgccccgcgctcccacgcccgcacaggcatctagcccccatccccctcccgctcgagatatccgccgatctagcctgtcggggggtccgcgacgtgtggaagggtgagcatcgacgatggcggtagaagaggaggaagccttcgatggtgcgctcaccgacgagcagctgcgagagatgaactcatccctctgcttgatgtcctagcaaacaaagtgaacgctatcaggaggcttagggaactcttgacaaccaatcttcctacaggcacatttccagtcaaggaagtcatagctgctacaatgataagaagaaagtagaggaaaaggaacagatctcgactgtaattctgcagatgaagcataccaataaaaaggcatatgaccagactctgtaacaatatctgcacatcagtaccttggcagactctccaagcaggtttgtacgatcacatatgtaaaaataaagtagataccctccaaattcggatctgaaaatataattgcaacccagttagcagaatagtgcaactagaaagcttgaatgattggaggagagcaactgtagcttacattgccctcagtgttaaacgattctccagaagcaactggtccatgaatataagtctgttgaacccaacattttctttttgtcagagacacaatgccttcggatactgatattgagaaattgtaaatttataatttatagagaacctgagtatttgtgatgtgagggaagtataagctggctttgcagccattgcttggccaccctcctccaataacattgtctggtcttctgctttgactgaactgtcatccatcactgctagattgacatctgaatgtctactgacaaagatgactgttggttgattcctcactgtgtcttgttgttgtcgtagtttcgttcaatcattaatggcacccattagtcgccaaagatgttgtcctgttacaaatattctgatgttcctgagaattagtaatcgaattacccattggtcgccattgtttgaaatatattctcacaacttctcttactgcttcattgtatgaaatattaagaaacaaactaaatgatagatatttaaatgttccagtttctaattaatatatgtggaatatattctattgttgttagcatgggttaagaccagtgttgtggttgacaccggatttccctctgaacactgatgaactcatccctctgcttgatgtcctagcaaacaaagtgaaggctatctggaggcttagtgaactcttgacaaccaaacttcctacaggcacatttccagtcaaggtaaactatctggcaccttggttacattacccgtgcttccagcagattacatcttgccatttattccaatcacaatgcatggttcaatccaatcatgagaagtggcaatctgtgaggtttttgcaagggagatgagctcaccttggcaatggtagttaatcttattaatgcaaacaaggatgattaatttgatgtacttttctatgcctcgtggtgcccattctcacaagaatgcatttgaggaatctgcaattaggccaaggcgtcccacacagatctgccaattcattaatcgagcacacatttcc

SEQ ID NO: 5680 - DNA, 1215 bp, Zea Mays
ggcgcagaggcagacgcatgcatgatgcatcgagcccccccagctcgcagtcgcaccggaggaatgctaactggagagccacgcctgccgcggaggaccgggactaactacgagctgccgcggccgttcctggtgcagggtagagagagagagaggggatggtgtgagggagggaagggagcaaaggcaaagcagccaacgaccagagagacacggaggctcagagagagagagcgaggaagaagaagagaagaagaagatggagcaagaggaagcgtgctcctcctcgctgcggcagtgcaggatttgccacgacgaggaggacgagcggcgctccgccatggagtcgccctgcgcctgctccggctccctcaagtacgctcacaggggatgcgtgcagaggtggtgcgacgagaagggaagcgccgtctgcgagatttgcctccagaactttgagccaggctacaccgttcctcccaagaaaacccaacctgctgatgtcgcggtgaccatcagagacagcgtgggggtgcccaggccgcagcacgagcctgaagaggaggaggagcaggagctggtggacgtggcgttgatcggagccagcgacccggagtacgccgagtgcgcgcgcgccgccggcaggagcgcgtcctggtgccgctcggtggccgtcacgttcacggtcgtcctgctgctgaggcacctggtcaccgtggtcacggtcggggcggccaaccagttcgccttcggcctcctcacggtatacttgctgcgggcgagcgggatcctgcttccgttctacctcgtcatgaggctcatctccgtgatacagcaggggcagaggcagtaccgcctccggctgctccaggagcagaggagacacgcgttgaggtcgggccggctgcacggccaggaacagcaacaacagcatgtcatcctggttcgctgaggaacgagccattcattcaccttgccttggtgtccatacattccattcatccgtcgtacgcgtacaaggttgtaagatgtaccgctccatttttttctttttgttcaggcctttacaagcctaaaaaaagcttatatgtaccaccacttcatttgtaaaccctcaaaatttgttgctgagaagatcgacatatcatgtatagaattgtaaaaagaaacaaacaaaaaaaaaggggaaaagagaactggcgcaatgttcgattaccc

SEQ ID NO: 5681 - DNA, 2859 bp, Zea Mays
gtttccgttgtgcgcgtgcagctgccacctccaccttttctcgttctgtcgccgcctccacttccaccatcccaggccctctatcgtccctcagtccgctgccggtgccggtgccgcatcgggtagttcagcggcggcggcgctgctgatcaggtggtgcccaggccgtccacggaccgagccctctcgtcctcgtccgacgcgagggcaatcacccacccgggacgccttccgaagcggcatccctcctctggccaacgtcccagcaacgaagctcactgatgcgatatggaacaactgcttcctagacaagctcgccttcaggtatcgaagtcgaaccaaaggaggttgaagccatggccctcatcgtagctgcagctggaggaaaccttcttgtcagaaagttggtcaatttaactccctcgcaaacatgatgaggagcgaagtaattgaggctggaaagctagtgaacctgtggaatgaatgggggctacagatcctggtcattgcaagcttcgggttacaagtattcctcctcgttttcggaggagtccgccgtcatagcaactccactgccctgacgttcttcctctggtcggcatacctactggccgattccacagcgatatacaccctgggccacctatctgttgacagtatgtcagacgagcaccagctggtggcattctgggcgccgttcctattgctgcacctcggtggcccagacaacatcacagcgtatgcactcgaggacaatgcgctctggctacgccacctgcaaactctcgccgtgcaggtcctaggagctgcttatgtgatatacgagtacatcgccagcagaggggcattgctttttctggcctccttgtccatgttctttgccggtcttctcaagtatggcgagaggatatgggctctcaagtgtggcaacatcagcagcatccgcagcagcatcagcatccggaagatcaagactgacccttatcagctattgactttgggtactagcgaagaggatttgctgcttggagcccactcccagtttgatatctgcaaaggtgtcttcgccgatatcataatgctaccaaatcccttagttcgttcacagcctaaaccacgttccgtgatatcttatctgggagaggatctatacaagttggttgagatggagctgtctctgatgtatgacttcctgtacactaaggcagcagtgatccacacatggtatggcttctgcatccatttcatctcgctgtttggcacagccaccacattccttttgtttcagctcagtatcagcaacagtggaaatcggtacagcagagtggatgtggctatcagttatgttttactggttggggctttggtcttggaaatcatatcagtgtgcagagctgtactatccacctggacatgttctttgttgcaccgcaggggcaggggatgggagtggtctctccacattgtcacttcccttggtcagcgtgtccatccagcaagtaggagactctggtcgggctccattgggcagtacaacttgttccacctgtgcacccgcaacaccaacgagatagggagcagactagcaacgaaactggggctcgaggactggtggaacaagatgcacttctccggaactttcccacacgctaactcgtctttgtcaatacaagatatcaagaaattggttctgcaagcactgcgaagcaaagagcaagcactgcaacaccaggatactgatttgaactcaagaggcagctttatactgaaacgtatggaggcctacaaagactttgctcgctggagcgtcaacattgacttcgacgagagcatccttgtttggcacattgcaaccgaggtgttcatcaggaaatccaaggccagacatgcaaaagaactccttgaggctactgaggcgctgcgcggcataacatacatctcacctcctgcgaacaactagaaggacactgtcgaacgcgatttggtgataaggacaacccagtggcgccatcccctgtaagctggaacccgtactatattcttaaggaattgttccaccatgatggtcccagttgctccaggataccacggagggagaagcttgcagaggtggcctggagtttctcccaatttgcactggtataacttccctgatcattcaactgaaacacatttcgttgggatcagtaaaggcaccaaatccacatggggactccatccgtgacagtgctaatatgtatgcaatcttgctcgccaacgagcttctgagcatagagttgcagtggcaggatcagcgtgacactttggaactgatcctgggggtgtgggtggagatgtcgttgtatgctgcggatcattgcagccaagagtcccatgccaggcagctcagtaatggctgcgaattcattaccatcgtgtcgttgctggcacaccacttcaagtactactctggggccttcaggggcgccgacaaccttggagaagataaacccgctagtgaaaataaacccgttactgtaaataatcccatgagtgaaaattgtgggaacttggtttagatgagttcgcacaattttcatttgaaatgacctctctgtcagttcagggaaaaacctgaggattcatgactccaaacaagagtaaatatatttatctgtcgatgaacatagtaattaaagtgctaggattcatcaatgttagctttggactctacattcaacagtttgtaaggtgagtctgactgtgtgtgtgtgtgacatgctcatatatcttccatgatcaaggtaatgatcggcgttgagtgtgttgctcaaccgccattatacaatatgcaattattattagataattatcaacgag

SEQ ID NO: 5682 - DNA, 2065 bp, Zea Mays
aaaactgtcacgaggaagccagatgcggcggacaagggatcgagtccggagcacgcccgcccggatataaatttatatcgcacacatcccccgttcgccaatctcgcggcggccctgcaaagctgcgatcaggaggtgcagaacagcggtgaagggtggaaaccgagaacactaggcagaggcactagccgagccgagccgcgccaccacgaccacgagtcgaccggcgagtggttggcgcaagttgtcaggggcgttgccggagccgtgcggcggccggcggccgggagcggggccgatggggcgctacgagctcgtccgcagcgacgacgcgcctgccgtcgccgcggatctggaggccggcaccgccgcgccgtgcgacggctaccccaagcgccgcgtgttcacgccctctccgtctccgtctccggcgccggcgtcgacccggtaccggcagcgcctcgtctcgctcgacgtgttccgcgggatcaccgtcctgagagttccggacaagttggacgcttcgagaaaggcattgctccgtgcgctgaagctgttttgtcttggtcttgttctacaaggtggattctttcatggtgttcgcagtctaagtttcggggttgatcttcaagaaatacggctgatgggtgtactgcagagaattgcaatagcttatttgctgaccgccctctgtgagatttggatcagaggagatgaagatgtagactatggatacgatttgctcaagcgataccgctaccaactgttcgtaggtgcagtcgtggcaatcacatacatgtccctgttgtacggtacctatgttcctgactgggagtaccagacatcagctcctggttccacagagaagcatctctttgtgaaatgtggagtaagaggtgacaccagcccaggctgcaatgcggttggcatgatcgaccgtaaaatcctgggcatccagcatctctacggccgacctgtttatgcacgatccaagcaatgcagcatcgactcgccacaaaatgggccccttccttctgatgcaccctcttggtgccaggccccttttgaccctgaagggcttcttagttccgtgatggccatcgtcacatgcttgattggactccaatacggacacgtcatagtgcattttcagaaacacagggagaggatgatgaactggctaatcccttccttcagcatgctggtcctagccttcgccatggacttctttggactacacatgaacaagccactgtacaccctgagctacaccttaggcaccgccggcgcggcggggctcctcttctccggaatctacacgctggtcgacatctacgggtaccggcggccgaccgtcgccatggaatggatggggatgcacgcgctgatgatatacgtcctgatcgcttgcaacgtcctgcccatattcatccacggcttctactggaaggagcccaagaacaacctgctgaagttcatcgggattggagcgtgaggcgatggactgacgacggtacacgagtacggatattgtttaggagtctatttggacagagatagagaagcgcgtgcgttcagcaggccaagttttgctacacggccagtgctgcagctgcagcgcatcattgttgctgcacagagcgcctttctctgtgagctcttgtatatatgataaaaaagagtgttgcatataatgacgacacgatttgaaagaaaaaatatatacataatacagtagtatagagatcttacgtgaatgacggtggaaattgtcaccgaactagcaaaattgttccgcgcggggccgcatggggacgaggcgcgcaacaccgttgcacaacctgaatttaatctgaccagatgacattttaacaggtttagtattacaaaacagttactagctatttaaatcctttgctctttataatatatatctatatctgtcattttctgttctgccttttttcgttttctgttttgccctcatcccttgtctggcagtaaaaaatgaaatctgtaagaattatgagtcgaactcaagacctactgctagattagagacaac

SEQ ID NO: 5683 - DNA, 3434 bp, Zea Mays
gttttataatggaaaaaatctcctcccgggattcccccagccaccaagcccgactccgctgatcccctcaccacgcaaccctcgccggatcccggctccgctgatcccctccccacgcaaccctcgccggatcccgacatgccgccgcggaagcctctcgctggcggcaagctcaagaagccgctcactgacaagcagcgcgctgccgcggagcagcgcctgtcccacctccgcgcccacctcatcctgcgctccctcgactcccccgctggcggggcccgtgccctaccgccgccgcaggaggcggcgctcgatgccctcggcctgctcaatttcttccgcctcgacctgcaatctgacaccccgcgccccgacctcatcgctccgctcgtcgcctactacgacccggtctgcaagcgcagcttcgtccgcggcgtccgtgtcagcgtctcgcgccaccacatcacccgcgcgctctgcctaccctcgaagcccgcctccgcagcgccggccccagcagacgtcgatcccgcagcggtggtccctgccgttatgcagctcctgcaggattacgtcctgctcccgtttcaggggggcgacatgtgcatactgccgcaggaggtggccgccgcagagcagatggtcagggagggggcggcgcatagggttgattggggagggctgatctggggcctcgtcgagaaggagatgctcgagctgcccaagagggaagacggggtgtgctactatgggccgcacctgcagaggctcatttattccgaaaagccacatctgttggagctggtggaggaagggcctgttccggaggcgtccgctgatgtggagatggaggatgaggatggtgatgtggatttgaaaagcaagaacttggtggaactggagccgggggatggggatggagaagcgggtaacgatgtcagaagcgagagcttgaaggattcagaattggggaatgctggtgcaaggaatgatggtttggacaagttggagttgggggatgctgttacaaggaacaaggtcatggaggagttgggtttaagggatgtagatgctaggaacaacagtatagaggaactagaggtggtcgaggaagatgcaaggagcaagagcttgaatgaatgtgaggctgtggatgccataaacaacaatatagttgaattggatgcggtcaatgaagatgcgaggtgcaaaagcttgaatgatgaatcagagctggttgaagaggaatttaagagcccaagctttgatgacatgaacaccgtggatgagcacgtcaatggcacagacacggatggattatgtttgggatttgtggaagttgaagcggtgcctgctgtacatgaggcaatgcctgataataatgaagaaacgacagaggaagcaccagcagggggtgctgatgtggcaggcagtgataatgtggcagtgcctacagatgtggattgtgaagaacactatgttgaggcagtagttgtaacacaagaggtagtggctgttgcagaggagttgggggatgaggaggccaagagggatgaagagaaggatgtgatgggattgagcttgggttttaattctaccaatggttatggtgctatggatgtggaaaaggaaaccaatgttgaaagtttggatgaggacgagagtgacagtggcaatgaagaggcagaagagtcagaggatggtgcatttgacgttaatgatggagaggacatgaattggagaattggggatgtcaacgggggtgagggaatgacacattccttacaacgctgtaacacatttgggggcatggagtttgagaacctgaataaaggagaggatgagatgagggatgagttaagatttgacgattttcctgcaagggcatctttggaaaggatgacatcatcaaacctcctccaagccatgaactcaattccctcatcatacaatgtatcagagaatgtgcatgatctgccctctggggatttcttggctatgggggctgatgcacataagagtggagtggacctgggaccagggagctcatatttatttgggaataatggtaagaggaatattgatgatattgatgggtacaatggcaatatgcaggtgcaagaggggtttcctcggtctaatcagcagaagaggatgcggcatagtaacagtagcaacatatcacctggatcaggctttttcaatgcaagcttttcggtgcctatacagaacttgatggttgaggcaagcaggctctatgagcagaatgagcaaaaacttcagagtttgcaatttgagaagcaacattggtctgacatgctgcagcagaaggaagccattatccaatccctaaactcagctcgttttgagcaacataataagtatcaagcggagcttagacgcttcgagcatgatctgaatgttatggctcagttggtcactacatacaaaaaagctttaaaacagacccgggcttcttttgatgagtacaggaagaagttcccttgcaatgttcctctttatggtgatgttgcttgtggcggtggtcttgttcttagtgtgagggagttggagaaaaggcggtgtgaggagcagcagcaaaatattgccatggtaaatggtatgattgaaagattccagtacaaatggctctcaaagtttgaagagtggggactttctgtcaattcactgtggagcagaatggaaggactctataaggagattgagcttctcaaggaaaacagaagagcaagatttgctaccccagctacagaggaatctaccctagctacagaaggatctactccagctacagaggaatgagctccctgacaatcagaggttcagttgtgatgtgaagatgactccctattactgccctaccctctgctggatgttttggtgtcaacgagcatacaagagcaattgtggctgcctggtggtggtacatactgtagtaagataaatagtttcgcttgtaactatggttgtttcctcatgtagggacgttttgattattagtgcttaatttaggtgcatttagggttccgtaatctatatcaaagtgtgcgtttcatatccttttttatgcactaacgacgtgctcatggcctcggaaagccatttaaagactgcatatgctagtggcaccactaatccatactgccttcagcttaactgctggtagtagcttctgcacctgactagtggcctagtgggcggatactgctaggccatgaacaagtttcaggtatcatacgcgatgcactagctgcatttggctctagtggtttgaacgctaatctctatattgggagagggagtttccagtagggtctctgattctaaatcttaattccatgtgtaactaaataatagaatttaggaaaattgattccaattatcaattctgtacacggatatctacatccaaa

SEQ ID NO: 5684 - DNA, 1459 bp, Zea Mays
accccctcacttctcaaaactcccaactaccactaccagtccaatcaagaaatgctccactacatctcctcttcccctctccgtccccgattcctcctcctcccgagcccaccctccaatcttcgcttcctcaccatgagcgcctccccctcgagctcctcgtcccgttcggtgcgcggtgcggcggtgtcggtgccttccctcggcgccgacgaggcctgcgcagtggcagatgaagccttccggaggtacacgtcgccgagcttattgaggagaggcggcgtcggggtggccgtcgtgtggttcaggaacgacctccgagttatcgataacgaggcgcttctgcgagcatgggcggcttccgaggcggtcctgccggtgtactgtgtcgatccgcgggtctttgcggggagcacgcattactttgggttccccaagaagggagtctgagaaaggaatgcatttcataggaggagagagcgcagctcttggtagggtacatgagtacttctggaagaaggatcagctgaaagattacaaggtgaccaggaacggcatgttaggtccagactactccacaaagttctctccttggcttgcttctggcagcctttcgccgcgttatatttgcgaagaggtgaagagatatgagaagcaaagagtggcaaatgattcaacatattgggttttatttgagttgatatggagagactacttcagatttctatcagcaaaatatggaaacgccatatttcacctgggaggcccgaggaaagtagtatcgaagtggagtcaggaccaagcactgtttgaatcatggagagatggtcgaactggataccctcttattgatgccaacatgagggagctttcagccaccggttacatgtccaaccgtggtcgtcagattgtctgctcatttcttgttcgagatatgggtgttgattggcgaatgggagccgaatggttcgagacatgcttattggattatgacccagcttcgaattatggcaattggacatatggagcaggagttggcaatgatccacgagaagatcgatacttcagtatcccaaaacaagccaagtcatatgatcctgaaggggaatacgttgcatactggttaccagaacttcggtcacttgcaaaggaaaggagaaatttcccaggagcctcatacatcaggcaggtagtaccactgaagtttgatggtggaaatcagaggaaggatcagcaattcaaccggcagagaagaccaaacaacgtgtacataagacaagtaaaataggaggctcttgattcacttgaaattgaaccatctatcagtaggagatgaagcaaatttttacacaactgattgtggtgtaaacatacgcgaattactctatggtcttatgcaatgttcattgatgcattcagatacactttgcaacgtttgtcagcagatccagcagtccag

SEQ ID NO: 5685 - DNA, 1600 bp, Zea Mays
accccctcacttctcaaaactcccaactaccactaccagtccaatcaagaaatgctccactacatctcctcttcccctctccgtccccgattcctcctcctcccgagcccaccctccaatcttcgcttcctcaccatgagcgcctccccctcgagctcctcgtcccgttcggtgcgcggtgcggcggtgtcggtgccttccctcggcgccgacgaggcctgcgcagtggcagatgaagccttccggaggtacacgtcgccgagcttattgaggagaggcggcgtcggggtggccgtcgtgtggttcaggaacgacctccgagttatcgataacgaggcgcttctgcgagcatgggcggcttccgaggcggtcctgccggtgtactgtgtcgatccgcgggtctttgcggggagcacgcattactttgggttccccaagaagggaggcagttgaatcgaagtgctcagttaggaactgcgccaagttgccaacgtcgctcggtccaccccctagttccagcatagatgagattggaggatgggggacagtaccaacactggagtcactaggccccagtgttacgaagtctgagaaaggaatgcatttcataggaggagagagcgcagctcttggtagggtacatgagtacttctggaagaaggatcagctgaaagattacaaggtgaccaggaacggcatgttaggtccagactactccacaaagttctctccttggcttgcttctggcagcctttcgccgcgttatatttgcgaagaggtgaagagatatgagaagcaaagagtggcaaatgattcaacatattgggttttatttgagttgatatggagagactacttcagatttctatcagcaaaatatggaaacgccatatttcacctgggaggcccgaggaaagtagtatcgaagtggagtcaggaccaagcactgtttgaatcatggagagatggtcgaactggataccctcttattgatgccaacatgagggagctttcagccaccggttacatgtccaaccgtggtcgtcagattgtctgctcatttcttgttcgagatatgggtgttgattggcgaatgggagccgaatggttcgagacatgcttattggattatgacccagcttcgaattatggcaattggacatatggagcaggagttggcaatgatccacgagaagatcgatacttcagtatcccaaaacaagccaagtcatatgatcctgaaggggaatacgttgcatactggttaccagaacttcggtcacttgcaaaggaaaggagaaatttcccaggagcctcatacatcaggcaggtagtaccactgaagtttgatggtggaaatcagaggaaggatcagcaattcaaccggcagagaagaccaaacaacgtgtacataagacaagtaaaataggaggctcttgattcacttgaaattgaaccatctatcagtaggagatgaagcaaatttttacacaactgattgtggtgtaaacatacgcgaattactctatggtcttatgcaatgttcattgatgcattcagatacactttgcaacgtttgtcagcagatccagcagtccag

SEQ ID NO: 5686 - DNA, 1927 bp, Zea Mays
tttacttctcccgttcgtcccccgtgctctttctccctctcgtggcgctgggcgaccgcctacgcaggccaggcgccgtcgccctaagctacgccaggttcccgggtcttggtcggtcccttcaccggcgaagagcacccaccagacgcgccggtgcctggatccggaggaagtgctgcgggtttcggcggttcgtctctctcgttgtttccggcggggttatgaaggcggtgggatacaacctctacgatagcagcgggactgatgacgatctccctccagcacaaaatagaggattgagaggacgggttttcagtgggaatggccgagcatctgctggggcatttccttacatgagggcaaataatgatttggagagtgaaatacatcgagttgagcaagatgcatatactggtgttcttagggcatttaaagtgcaatctgatgcaatatcctgggaaaaagagagcttgattactgaactcaggaaagaactgagggtttctgatgaggagcatagggagctattaaataaagtcaatgaagatgggagcatccgtcaaatgagggagttaagacaggcaggtggaatcccaagtggtctgcatcgtggcaacagggttttatatgatgcagaacctgggcccactaccaagaggcaaagggcatctcattcgattccttcgcaatctgcaggcctccagtcccctatgatgccctcccactcagtttcatctgcaaaatggggtcctttgtcagcaagaggcaagaaggcgaagatgcccattcctttggtgctaccatctgtggatccaagttcgttaataaaccataaagtttatacaaggtggccagaagacaacaacttctatgaggccaccataacaaaatataatgctgtgacgggtgagcatgaactcgtctatgacatgggcacacaagccgagacttgggaatgggttaggctttgtgatatggcacctgaagatataagatgggaatttgatggacatctttcaaatcatgatggctggggcccttctggccctatgctgaagaggcacatgaccaacaacggtgctatggcaggttcaatcaggggaagaggaaggttatcgataaatgagcctataaaagactatgctccacctcaaaatgacatcaataggaattttgattatattgacataccaaatactgaaagtgttgttactgaggtggagagggtgttggccaatccaaatatgcctgaaatcgagaaggcaaggaaactgctgaaagatcaggagcagtcattacttgatgcaattgccagacttgatgaagcatctgatagcgatagtggtaactgaagatatggctatggaagaccgaaggggttctgctggggtcctggggaatggaacggcattgctacttagttgttggaattggaagattaacatgcatctgtgtatcacctacctcgaccacagaacaaacaaaccacattatggcaaaaaaattgacatgccagaaaatggtgcctggaaactgttgatgcctgaaatgggatttgctggctacacaaaattgagcgcacgaggagcagggatatgcaaatgtcagaactgtttgaatggtgtttcctatgtagcgtagtaaaagtagcttaaatgttctagatgattagcacggatcacttagcattcctgattcagtataggtagatgtctaactctagcataatatccaacttggttgttcttgtactctaatgtgaaaaaggacgttgttcactcttttcatgttggctgcttggctaggactttgttgtgcacgcttttcatttatgctgctggacgtatcttattaactactaagagcatctctaagataggtcctaaacaaggttgtattttaaaatataggccctggagtcttaaaa

SEQ ID NO: 5687 - DNA, 2003 bp, Zea Mays
tttacttctcccgttcgtcccccgtgctctttctccctctcgtggcgctgggcgaccgcctacgcaggccaggcgccgtcgccctaagctacgccaggttcccgggtcttggtcggtcccttcaccggcgaagagcacccaccagacgcgccggtgcctggatccggaggaagtgctgcgggtttcggcggttcgtctctctcgttgtttccggcggggttatgaaggcggtgggatacaacctctacgatagcagcgggactgatgacgatctccctccagcacaaaatagaggattgagaggacgggttttcagtgggaatggccgagcatctgctggggcatttccttacatgagggcaaataatgatttggagagtgaaatacatcgagttgagcaagatgcatatactggtgttcttagggcatttaaagtgcaatctgatgcaatatcctgggaaaaagagagcttgattactgaactcaggaaagaactgagggtttctgatgaggagcatagggagctattaaataaagtcaatgaagatgggagcatccgtcaaatgagggagttaagacaggcaggtggaatcccaagtggtctgcatcgtggcaacagggttttatatgatgcagaacctgggcccactaccaagaggcaaagggcatctcattcgattccttcgcaatctgcaggcctccagtcccctatgatgccctcccactcagtttcatctgcaaaatggggtcctttgtcagcaagaggcaagaaggcgaagatgcccattcctttggtgctaccatctgtggatccaagttcgttaataaaccataaagtttatacaaggtggccagaagacaacaacttctatgaggccaccataacaaaatataatgctgtgacgggtgagcatgaactcgtctatgacatgggcacacaagccgagacttgggaatgggttaggctttgtgatgtgaattaaaatttgcctggctgattatcacattgccattaattattcagttgaagattgataaacactccttaaacagatggcacctgaagatataagatgggaatttgatggacatctttcaaatcatgatggctggggcccttctggccctatgctgaagaggcacatgaccaacaacggtgctatggcaggttcaatcaggggaagaggaaggttatcgataaatgagcctataaaagactatgctccacctcaaaatgacatcaataggaattttgattatattgacataccaaatactgaaagtgttgttactgaggtggagagggtgttggccaatccaaatatgcctgaaatcgagaaggcaaggaaactgctgaaagatcaggagcagtcattacttgatgcaattgccagacttgatgaagcatctgatagcgatagtggtaactgatatggctatggaagaccgaaggggttctgctggggtcctggggaatggaacggcattgctacttagttgttggaattggaagattaacatgcatctgtgtatcacctacctcgaccacagaacaaacaaaccacattatggcaaaaaaattgacatgccagaaaatggtgcctggaaactgttgatgcctgaaatgggatttgctggctacacaaaattgagcgcacgaggagcagggatatgcaaatgtcagaactgtttgaatggtgtttcctatgtagcgtagtaaaagtagcttaaatgttctagatgattagcacggatcacttagcattcctgattcagtataggtagatgtctaactctagcataatatccaacttggttgttcttgtactctaatgtgaaaaaggacgttgttcactcttttcatgttggctgcttggctaggactttgttgtgcacgcttttcatttatgctgctggacgtatcttattaactactaagagcatctctaagataggtcctaaacaaggttgtattttaaaatataggccctggagtcttaaaa

SEQ ID NO: 5688 - DNA, 1502 bp, Zea Mays
gttgacggcatgcattttatttttttgcatcgaacacactgtggttagttctagcctcccagccacccacgcttctctcgtccctcccctttgtcggtgtcttccccctctctcttctcttctctacaaatctctcttccgcatccgccgcaaaaccctaacctaagcggctcaaccctacgattaccgccgccgccgccccccgctcgcccacgcaagcttgggcgggcctccctcagctcggccaagagcccgaccccctgctccggcaccagcgccgccaccgccatggatatggaagtgtacgagcgcctcaccgccgaaaccagtcactaccgtggcacgcgtttcgatgcgctgatcgggctcgacgaggtggagcctagtgacgaggaagaggatgaggaggaagaagagcgagcggcgggtgccggggctggagacgagctgctctgcccgttctgcagcgaggagctggacgcggtggggctgtggtgccatatggacgacgagcaccgtgctgaggtgtgtccaatttgcacagataaggttgatatgaacttgattgtccacatcagctcacagcatcgaggtttcttgaaggataagtggagaaatcagcaaggttcatctggggtgcgttattcaacacttgccttattgaagaaagatctacatgagaggataagtggatcatctcgtgctgccccagtcagcacggtgcctgatcctctactgtcctcttttgttggtagcttttatgaagtcgatttgccaaaggatgctaaaaaagagtccttggttgagacagaagtgagaagtgataacatagagcagagagcagcggagagctttgatgagcctttgctccctgaggtgaaggaggagaaaaccaggaggagccaatttgtgcaggggcttgtcttgtccctgatgtttgatgacatcttatgaagagcacatcccaaaaggggaagggagaaggcatattttgctaccagcaaacgtttcgccggcacagctgttgtaacgattcgctgatttgccatcggaagatggtgacattgctctgggataatgggggagatgaactgtggatatggatgtttcgtagtactatgcatcatcattgcatgaataatagagtatatgtatgtatagtttgttagcatcatggtactggatattctggggctctgtatgtatattgggaggccgaaatggaccctacctatcataaatcagccatttgataatgtgcatgtggtgtttttctggaagcctgggatgtgcgtaggtaacaccagacacatctgcctgtggttgtcgtaccgacttttcaacaaatcctttatttcaaaaataaaatggcatggtttggttaaatttggacgaaaggattcacgttttttttgttcaaaaataaaacggcatggtttactttttttagtggtgtgatgtatcggcgttcggttcccatcatcgacaagtgtgaagagtaa

SEQ ID NO: 5689 - DNA, 1084 bp, Zea Mays
ccacgtcccacccctcctgcatttcaaaataatatctccctgcgcttttcctagccctttgtcatccaaggatacaataaacaaccggcgcttttacacccccgccaagaacaggagcaacaacaataaggctcctcgcaacaatccattctcatccatggcgaagctcatgaacaagctggtcgattcgttcgagcacgacgagatactggacgtcggctgcgtgcgcgccgtgctggccgagctcgtcctcaccttcctcttcgtcttcaccggcgtctccgccgccatggccgccggtgaccccggtgcacgccctgggcaggggcatcagcccgatgcagggcctggtgatggaggtcatcctcaccttctccctgctcttcgtcacctacgccatgatcctggacccgcggagccaggtccgcgccatcggcccgctgctgacgggcctcatcgtcggcgccaacagcctcgccggcggcaacttcaccggcgcgtccatgaacccggcacgctccttcggcccggccctggccaccggggactggacaaaccactgggtctactggatcggcccgctgctcggcgggcccctggcaggcttcgtgtacgagtcgctgttcctggtgcagaagatgcacgagccgctgctcaatggggaagtctgacgaccatcagcccctgtgttgtggcgcatgcttcatgcttgtttctgtaaaacaggtcattctctgcaagcatggtacatacattggccaaggtaattagagaggcttgctgtaaagcagtaggattgctggctgtagaaattgttgatgggctttttttgggggtttcctgccaaggaattctttcttttatataatctcaaaaaagttttttttttttggtatgggctgggttctatcaagggtttgttaaggctattagtttaccatgtagcagaaaaactagtgggacgtgaagttttttcacgtacattgtaatactttggtatttttgtctaccagatgaaactggaagtacagagcaaaaacttctctatcaaacagtatttatgcctaccgcattttagtagaaa

SEQ ID NO: 5690 - DNA, 2225 bp, Zea Mays
ctgagatttcgcgctccgttcacccaaaatttccccatctccgacctcccccttcctctccccctgccgctccccgcgccgagaaggagaaccccagccgccgcgcagcgcgccgcccatggcctcctcgtcggagaacgcggctgtgccgccggaggaggagccccaggccccgccgccgccggacacagagcctaccgaggcggcgcccggcgaggcggaggatgagccgcaaaccctagagcgggcgcaggagctcttcgacaggggttccaaggccatcgaggatgaggacttcgtcgacgccgtagactgtctcagccgagcgctcgagatcagggcttcacattatggagagctcgcaccggagtgtgccagcacatacttcaaatatggatgtgccctgctatacaaagctcaggaggagagtgatgttttgggaaatgttcccaagagcttgccaaatgaagactcagtgaagagtacagctactaaagatgacagtggaacctcaaaggtctctggtaccgatgcggaggatgctgcgtcatcagaaaaagttgatgctgaagaagttcattattaggtcacaactcaaatggcaaaaatcaggagaatgggaatggtgaagttgagaaagatgatgacgacgtcgacgatgatgagaagatgggagatgaagaggataatgatttggatctttcttggaaaatgttggacattgctagggcaatagttgagaagagccaagataacactatggagaaagtaaaaatatattctgctcttgctgaagtggcaacggaaagagaggacatggacaactcactcagtgactatatgaaagctttatccatgttggagcatttggttgagcctgaccatcgtcgagttgtggaattgtatcctctttgtcatagttacactattttgtctgctaaagagagatattacaacctgcagtcagaattatatgacattaggatcatcaaattgacttgaatgtaattcttacgtcatatataatgactggagtctggaggtagtattattacataaataagcatctgcaacctggtcgtgccttgctctatttttcatgcctttattttatagttatttgtagcctgataaacttataatttgggttggtaaagaatgccttttttatattcaataaattagttcagttgttttggtggaatgcgtatccataacattatttacttgaacgcacatgctactttagatgatatgattgcttcccagggtcagtttgttgatcttcctttgttatttgccttaatccagtcttagaaacttccgcatttgtttggtttatgaactagtttccaagatcggagaagcaatttcatactgtgcaaaagcaatttcgctatgcaagtcacgcatacagagcctgaaaagttccaaggatgctttgttggctggtatagatggtgatgcatctgctgctgaagctgaaggaggctcagaaaaatctgccattgaaaaagagctagagcagcttactagcatattgcctgatcttgagaagaagcttgaggacctgtctgaagcaaacccaagcgctgacatggatgagatggtgaaggcaatcgtgtccagggtaactgatgtgatgccaaaagctgcatcttttacttcttcccagatggcaacctcaagcaatggattcgactcctcggttatgtctacggcagcgacaaccggaagctctggaagcaccgtgactgaccttggggttgtaggcagaggcgtcaaacgagctagcatcaagccgatctctgctgaacctgctgctaagaaacctgcacttgattcaccatctcaacaaggtgacagcagcatcaactctgaggttgttcctgcaacgcagactggagacgagtcagtatctaagtaaattacaatttcattagccctactgtaatgttaacttgctggaacatattagctgctatgtaaacgcttaagaagggactgctggggccatagactcatcgtgagctgaccattgaaatgttaaattgctgagatcatcatggcggtaaatcatgtctgctatatcaaatatgcttggtgagatgtgtactttctgatttttttgatgtatctgaccgtagtagcccatcacttgcctatccactgctgtggctgtgctacgataggacatttcgtttgttaccatgatgttgtcttct

SEQ ID NO: 5691 - DNA, 3019 bp, Zea Mays
ctagaactaggcgtggctcaccgttcgagatggccgcggcagtgactcgccgggtcggtctccacgtcgaggcgaccaatggcggcgccgacgacgagagcaggcgcaatagctcggcagctgaccactcgccagtggccaagcggatcaacgacgccgccgccaacgccaagcgcaacgacgtctgggtggccgcccaggagggagaaatgcctgcagctgcaggcaactccagccagccgcccctgctgttccggaccatgaaggtcaagggcagcatcctgcacccttacaggtttgttattcttctgcggctggtcgccatcgtcgcattcttcatatggcgcatccggaaccggaaccgcgacggcgtgtggctctgggccatgtccatggtcggcgacgtctggttcggcttctcgtgggtcctcaaccagctcccgaagctgaaccccatcaagcgtgtcccggacctcgccgccatcagagaccagtacgagcagccttccgcctccggcggcgagtccaacaacaagctgcccggcatcgacgtcttcgtcaccaccgtcgaccccgtagacgagcccatactgtacacggtgaactccgtgctctccatcctcgccaccgactacccggtcgagaagtacgcctgctacctctcggacgacggcggcacgctggtccactacgaagcgatgctcgaggttgcgagtttcgccaggctatgggcgcccttctgccggaagcatagcgtcgagccgagagctccggagagctactttggagtgaagaggcgccaaccgtacacgggaagcgtgcagggagagttcacaagcgatcacaggcgcatgcgcagggaatacgaagagttcaaggtgaggatcgactctcttttcagcaccgtctgccaaagatctcaagcgtacaacagaaagcatgccaaggacgacgaagctggtatggtgatgaaggcgacgtggatggctgacggtacgcagtggcctgggacatggattgagcaagctgagaaccatagaaaaggacaccacgctggaattgtcgtactaaaccatcccggccataaaccagagctcgggtcgccagcaagcatcgacaatccatttgacttcagcaacactgacacgcgcctccccatgctcgtctacatgtcccgcgagaagcgcaccggctacaaccaccagaagaaagccggcgccatgaacgcgatgctccgggtgtccgccttgctctccaacgcgccgttcctcatcaacttcgactgcgaccactacgtcaacaactcgcaggctttccgcgccagcatgtgcttcatgctggacccacgcgacggccggaacacggctttcgtccagttcccgcagcgcttcgacggcgtggacccgacggaccggtacgcgaaccacaaccgcgtcttcttcgacggcaccatgctctccctcaacggcctgcaggggccttcctacctcggcaccggaaccatgttccgccgtgccgcgctgtacggcatggagccaccgcggtggagaacgactggcagcgtcaaggtgatagacgacgacgacgaccacaagggcaaggagtacggcagatcgacattgttcagaaacgcagtactagacgacgccgcgaaccaagaacgatctatcacgccagtgttcctcgatgacgacgagacgacgacgatcagcagcgaggtggcgtcgctgatgacgtgcgcttacgaggacgggacaacatgggggagagacgtcgggtgggtgtacaacatcgcgacggaggacgtggtgaccgggttccgcatgcaccggcagggctggcgctccatgtactgctccgtggagccggccgcgttccgcggcaccgctccgatcaacctcaccgagcggctcctccaggtgctccgctggtccggcggctccctcgagatgttcttctcccacagcaacgcgttcctcgccggcgctcggatgcacccgctgcagcgcgtggcgtacctgaacatgtccacctacccggtcgtcaccgtcttcatcctggcctacaacctgtttcccctgatgtggctcgtctccgagcggtactacatccagagacccttcggcacgtacgtcctgtacctcgtggcgaccatcgccatgatccacgtgatcggcatgttcgaggtgaggtgggcgggcatcacgctgctggactggtgccgcaacgagcagttctacatgatcggcgcgaccggtgtgtacccgacggcggtgctgtacatggcgctgaagctcgtcacggggaaaagcatccacttcaggctcacgtcgaagcagacggaggcctgctccggcggtgacaagttcgccgacctgtacgtcgtgaggtgggtgccgttgctggtcccgaccatcgcggttctggccgtgaacgtcgcggcggtgggcgtggcggtaggcaaggccgcgacctgggggctgctcacgcagcaggcgcagcacgcgctgcttgggatggtgttcaacgtgtggatccttgtgcttctgtacccgtttgcgctcggcgtcatgggacggtgggggaagagacctgccatcctgttcggtgtgctggtgatggccattggtgcggtcgctgtcgtgtacatcagcttccgtgccacgtactacccaacaggatggtcagaaatggaaactacttctgctcttggtaaggcggaatcattcttttaatgcactactctatacttggtgtaataatttggatgtcttcagatcatcagatgtgatcttggcttaagggggtgtttggtttgtagggactaatatttagtcccatcattttattccattttagactataaattgccaaatttagaaactataatagagttttagtttctatattaagcaattttgtaactaaaatggaataaaatgtagggactaaaaattagtccctagaaaccaaacaccccctaagtaagagatgtttgatgttgaatggaaaattttca

SEQ ID NO: 5692 - DNA, 2721 bp, Zea Mays
atgattattttgtttccacgagcattctagctagggttcagacgaatttctaggaggaggtcgcgcgacaccgtccatccacggcgaaagcaggctcgccccacaacagctttgttccattgcatcctccccaactcatgttgtgctgtgcctggtggtcaggaaagaggctcctccctttccctctccacctcgccgtgcttctccagtccacctcccccctcgtcgttgcttcttccctccccttccctcgtcgtcgcgctatcccgccggtgcgcgggcgtggggccaagcgccgccgaaaggtagcagcagaggagaagacggacacggacgcaatagcgtccacccccgtaggcaccccccgcccaaagactggtggcaggcctcctacaggcagatgctaggtgcgtttttctcctccatttgcctctgcctgtcagtggtgatggttgtgcgtttggattagtcatgattagtgtggtggtaatgctcaagttggggcactgtcactggccggattgagtgtcattttttggttttatgtcacaatagctaacattacagttttaggtgtgattgaccactaggtctttatctctgctctgagtactaagctggcaggatcgaaaagttcaatttttcatttggtggtctgaaactaaagctccttcaccttcagccctgtgttttcactatgggaatggtcttccttagtccatatgaatattacctgtggcctacggatatgaacatgataattattttatagctttgtgattgatattgccatgctattcagcctcctagcagcaccggtaccaacctttctattttcacagtacattggcttcgtttctttttgttgcaaataatttcttagaaaagtttgactctctaaaacctaggttgttgagtagatacataacatcacataagttgtacggaaagggtagtagtgatgctctttatgagaatctttgaggaagagagatgaccccctaacacatcaaatccaaacttatttttgaactattatttataagataatctcatttgtcccagttttaccgagcaaaacttcaaacaagtacttaaaagggactttcctgtttatagatgccattttgataactgatgctgtctcaatattactgtgtccttctggtgcttcaccattagttttatttccaaccatatgattgacattgaaaaggacaccagccggcttagcctttcggtgactctaaacaccacgacacattcagagccatgtgactccctaccaaagaatatcctggcaaaaggattgtcaactttaatgcctcccacatcaccaccgacccctactgggtggctgccagggccacttggtacggtgcgccaaccggcgctggcccctatgacaacggtggtgcttgtgggttcaagaatgtgaacctacctcctttctcggccatgacatcgtgcggcaaccagcccctgttcaaggatggcaagggctgtggctcgtgctaccagatacgttgtgtcaaccacccggcatgctctggcaacccggagactgtgatgatcaccgacatgaattactacccagtcgccaagtaccactttgatctcagtggcacggcgtttggtggcatggcacagcccggccgcgacaatgagctccgccacgccggcatcatcgacatccagtttaggagggtgccctgcatctaccccgggcagacagtgaccttccacatcgagcacggctcaaaccccaactacttagcagtgctcgtcgagttcgaagatggcgatggcgatgtggtccaggtggacataatggaggccaactctgggtggtggatgccgatgcgggagtcgtggggatccatctggaggatggactccaagcgccggctgcaggggcccttctcgctgcgcatcactaacgagtcaggcgagacattggtggcttaccaggtcatcccggcaaactgggcgcccaacagctactaccgctccaacatccagtacgaggcttttggctctgctgctggacaggctactggctctgctgttggactggtcattagctctgctgctcgactgcacacgttaattaccaggatcattggcttgatctgtttggtattattgtatcatttgcaagggattgaggtgccttagttttaattagcacttgacatgttgggtgtcctacgctgtaggtggtgttgtgtgtttgctggaggcgtcgtcggtccagagtttcatcttttcgaaaaagttttgaaaccaaataattttcctatgaatttcgttgattcctgcgtgacaggtagctgatgtagctctgtgggagatgtacacatgtatttggtgctagatagctgggctgtcctgtcttgttctggctgttgtaaggggctcactgctttcaactgttctataaatcttactagtcggttgcccgtgcgttacgacgcttacaataatacccacgtaaactatccaccaaaaagatctcaagattttttattgattgtctcagctctctgtataatatttttttatttggctaaccgatgttattgtttactccatgcaatatgtgttggtacaacacggccaatgaagtgaacgattagaaaagagtttacaacgactaactgaatgaatagagattataaaatgatataattctaccatacagagaccaaataagataaa

SEQ ID NO: 5693 - DNA, 1602 bp, Zea Mays
tatctctaccccactccatataaggcagcaatacatcccttttcccttgtactatcactttcctcgtgtttttcttgcctgtctccatactcatcgatcggttgctttttgtcgtcagttcttttgaggagctgagctacaatcaggcaagggatatttccgaggttttacagggaggaatgcatccaggtgttggaccattgtcggtgccaccaggcttccgcttccatccgactgatgaggagctcctctactactacctgaggaaaaaggttgcttatgagcccatagatcttgatgtcataagggagattgatctcaataagcttgagccctgggatctcaaagaaagatgcaaaataggcactgggcctcaaaacgagtggtacttcttcagccacaaggacaagaagtacccaacgggaacgagaacgaaccgtgccacgacggcgggattctggaaggcgactggccgagacaaggccatcttccttggcagcgccaggaggatcggcttgagaaagaccctggtgttctatatcggcagggcgccgcacgggaagaagactgagtggatcatgcacgagtaccgccttgatgaagagaacgttgaaattcaggaagatggatgggtggtatgtagggttttcaagaagaagaactatgagcagagaggccacaacatggctgagatggcggcactggacgacgatgagctccagcctttcacggttcctgtcgtccctgctggcactagctccctgccaacaacagaccacaagaacaaccctcacctcatgcaatatgacttcccttctttcgacccttccatgcagctcccacagctgatgagcgccgaccagcccgtgccaaccctattccccagccatcctggcgtcgccacggccatgagctcatcaatcgacgttgagtgctcgcagaacctgctgacgatgctgacatccaacggcagcgacgggatgctccacgtccgcgctggtggtgctggagctggtgtcgaccgcttcgctggcacgacagattggtcgatcctagacaagctcctcgcctcgcaccagaacctcgaccagctcttccacggcaaggtcaccgcagcatctgcctccccaatggctccataccatcagcagctcatggaactcggtggctcgtcgtcgtcgtcgtccttgcagaggcttccactgcagtacctcagcggcgagacgaccgatctcctcaggttccccaagtaattattggatcgacctcaagtttagctaccttgttgagcagtgaccatatcaggattttggttgactactaggctgcttaattcggcctacttcgtatggagtttagtgcttttaaatgtatatatggtgcaactgtttggggcatgcaggcatggaatgccatcgatctaccatggttgcttgcttggccaagaggatgttttcgatgtttccattttggcttagggttgctcgttaggttcttttggagaaaaaatgtgaagagatggcccggtaaattaagaacttctatttgtttcccacagattggtcttttggttgttcgttcaactataataatataggatgg

SEQ ID NO: 5694 - DNA, 1937 bp, Zea Mays
agcgggcccggcagtcccacaagatcacagcacatacgcttcctccattccactcggccgcgaccgcgaccgcgacggcgagcgaggggccgaggtgggacgccgcgccgcttctgcagaaagaaaaaggccaggtgaggtgctcgacgcgggagcgggaccggagtagcgccagcgtcccattcccggccaacctccctgttcatctccatgccgacctgactcggactcttgatttgctcctcgcgggggttcggtcccatggcggcagctgcgctggcaatggcagagcaggtggtggccgagctccgagtgaggtgtgagacgccgccgtcgatgctgcgcgaggtggccgtggagatggcccgcgagatgggcgcggggctggagaaggacggcgggagcagggtcaagatgctcctctcctacgtcgataagctccccacagggagagaggaaggattattctatggattggacctaggaggaacgaatttccgcgtcttgaaagtgcaactaggtgggaatgcgaagcatgtcgttgaccgtgactccagagaagtcggcattccgccacatctgatgtcagggagctcctcggagctttttggtttcattgcttctgaattggccaagtttgttgacgatgatgagaagtgcgctaacatttcgaatggcaagaagcgagaaatagggttcacgttttcgttcccagtgaagcagcgttctgtagcttccggtaggcgaagatgtggtggctgaactgcaaacagccatggagaagcaaggtctggacatgcatgtagctgcattgattaatgatgctgttgggacgctggcgggagcaaggtactatgacaaagatgttgtcgctggtgtaatatttggcactggcacaaacgcagcatatgttgagaaggcaaatgctattccaaaatgggagggtgagctgccccattcaggagacatggtcatcaacatggaatggggtaacttcttctcatctcatctccccatcactgaatatgatcaagaattagataaggagagcttaaatccaggagaacagatttacgagaagttaacgtcaggaatgtatttaggtgaaattgtaaggagggtgctccttaaaatatcattgcagtccgccatttttggtgatattgaccacactaagcttcaaacccatttccttctgcggactccacatatttcagcaatgcaccatgacgaaacatctgatctgaagattgtggccgaaaattttgaagaaaacctagagattacaggcacatccttggaggctcgtaagctggtcgttgaaatctgtgacattgtggcgacaagagcagcccggctggctgctgcggggcttgcagggatcctcatgaagatcgggagagatcacagcgtcgaggaccaacggtcagtcatcgccatcgacggaggactgttcgagcactacaccaaattccgccggtgcttggagaccacactgggtgagctgctaggagacgaggcgtccaaggcggtggccatcaagcatgccgacgacggttcaggaataggtgctgccctgattgcagcttcacagtctcagtacaaaaacgacttagtggccgtcaagcatgcagatgacggttcaggagtcaagtatgcagaagacaagcgtgcagatgacggatcagaaataggtgctgccctgattgctgcctcgcaatctcagtagagagatgtccgagtggtatagaggtagcaagtagctatgatttgtttccaacgtcttaactgtccagcgtctgcagtttagcatgctagagctggatgcgatctgtaaccaaaaccaggcttggccaactggctgttcataattccaataacagcagggttgcagatgtctcctaaccccctacgatcttaaaaacttttgaatgttt

SEQ ID NO: 5695 - DNA, 1574 bp, Zea Mays
gtctgttctacgccgtcgcggtcacctccagccctagcgccatctgctctgtacccccaccgctaacctcctcagctctggcctgcccgcgctcctcctcgttgcctggatccggcagcccctccatgctcatccgcccctttcccgctctctcctcgaccggctcgctcccgcttgcaaccacccacaccctgttctgctccagagacagtcctggcggcgctgaaggaggagacgcagcagcggatggatgacgcatcgattggaggtcattggtggccactcacgcctcctcagacctcaccctcacttcgtcgtcagcgcaggtttggccaacggcccccgaccggatcgcaggtcctcctcacggtgaggcacagagtcgagccggacatcacaaccatgaccatgaggcatcgtcgcagcagtcggagtcatttttgctgccccctcccgacacctgtaaattttgtatgccttcacgccgtgaagccacatttgcggccattggcaatggctgtatccactgtttcgatccatatatttggtgatgtcccttcttcacctcttgttgggctgcttcaggacaaaatcaataactggagggagacatctcttatattgacatccatccttttcgctgcagttgtgttctggttcattggtgtgtctgaggctgcacaagatgctcttgatcatcttttcaaccaaggccacaatctcgtaacagaaaatgagatttctgatacctttactaggctggttgaaaggctaccacaagtggtacttggaagcgaggagacaaccacactttcacatgctaggatgttgttggctctgaccttttatgctggtcatagctcacagttttctggttccatggacaagctaattgtatcaaagccactatctatcgggtatctttattcagttgctgagttgaagagtggcgcctattctaaagatacaactaacatatctctgcatgccacgtcaacatttgcagcctccaaaatatctgttatccatgataatgctttgccaaattcattacttggtacagttgaatatgagttgccccatgtgcctccatggtttattcatgctggtatccagaagctttatggggttcttgctggaataattagacttgttggcctatcaacagtgtcagtgggctggtgtggtctgcttagcagcaggtagcactacaaccagcaatgtatggatgaattgaaggtagtaaagaacgcatgcaatcttatagaaactctacatcttgaaactggcatgattgacaaagaagctggatgcatcctttggattggtgtcttcttatcatcaagcagtaatgtgaagcaagttcatttgttgactaagaacagatgagcacaaatcagtgaagagttcattgcactagagatggaggatggataggtggtagatttcaatatggctttgatactattgtttctctttacaatctttgtacataacaagaaaaatgacgttgtatgtggatactattgtaattcaagaatttatttctgaataataaatatatttgtttataa

SEQ ID NO: 5696 - DNA, 1946 bp, Zea Mays
gtttgaaccccgccctccaccgccaccatcagctcgcatcgtcgtcttcgcagagacagtcctggcggcgctgaaggaggagacgcagcagcggatggatgacgcatcgattggaggtcattggtggccactcacgcctcctcagacctcaccctcacttcgtcgtcagcgcaggtttggccaacggcccccgaccggatcgcaggtcctcctcacggtgaggcacagagtcgagccggacatcacaaccatgaccatgaggcatcgtcgcagcagtcggagtcatttttgctgccccctcccgacacctgtaaattttgtatgccttcacgccgtgaagccacatttgcggccattggcaatggctgtatccactgtttcgatccatatatttggtgatgtcccttcttcacctcttgttgggctgcttcaggacaaaatcaataactggagggagacatctcttatattgacatccatccttttcgctgcagttgtgttctggttcattggtgtgtctgaggctgcacaagatgctcttgatcatcttttcaaccaaggccacaatctcgtaacagaaaatgagatttctgatacctttactaggctggttgaaaggctaccacaagtggtacttggaagcgaggagacaaccacactttcacatgctaggatgttgttggctctgaccttttatgctggtccctagtttctgataaatcatcttcactgttctcctgtattgctgctcgtttctttgattgtttgggtttatgcataggtcatagctcacagttttctggttccatggacaagctaattgtatcaaagccactatctatcggcctccaaaatatctgttatccatgataatgctttgccaaattcattacttggtacagttgaatatgagttgccccatgtgcctccatggtttattcatgctggtatccagaagctttatggggttcttgctggaataattagacttgttggcctatcaacagtgtcaggtaccttgtgaattattttgcttgtcaaatctacgattcatggactgttctattttttcatgctgagtcagtactaaaccaaagatcataacccgttcctaagaggaacccaacaatatgtaactaaaatttattatcagttccattatctttatctgttcatgactttgcttattgtttcctactcaagatggtcgtgcatggagcattatattacaatatgcagttgatgggttcgattccttaaagctaacagtagtggtcactagcccttgaaaaataaattttggatagcagctttgactactattgaagttgatctttttactactttagattgtcgttgatgtaaatgttcttagtggtgctttgagatgactaaggatctatatttgtcttaagatttgtcttttccttacaagtgaagagattgcgtggttcaatgaagtattaacctatgatttatgggccaggtctttgatgagtaccttaacttgcaggatagcatactcatacagtaatattgttgcatgtcgctcttaacaaatttcatttaggaaccgggccatgttgatgttcaaaagagttgtcagaagttcatgacatctggtatttattatatcttcttttgtagtgggctggtgtggtctgcttagcagcaggtcctacatacatgatgacgacccgcttgcatgtgtccactctgttgctgactcctacacaggcatggcctttcgatgctttcgagctctgcttagcagcaggtccatgaaaaagaccaaagttgaagaccacgcttgaaaaatgaaaatttagatttcttcttcttctactactactgcgtcgtcgtcgtcatcatcattatcatcatcgtaccattcattccacatcaaagtattatatgtatttaagctgcatggtactggagtgggc

SEQ ID NO: 5697 - DNA, 1814 bp, Zea Mays
cttaaaattcccacttatttgtcttccctctttttttcctcccgcttccgaccactcctcgtctcctccgctcacactccacatgccgacggtggtggtggcggcagcggcggcggagtcgtaggcgcccgagtaagcggtcttgtagtgacgccggaaccgggggcgtgcggggggacacgatggcggcgccggcttccgcggcggccgggcgcgccgggggcatgtcgtcggacaacgtcaagggcctggtcctcgcggtgtcgtcgagcgccttcatcggggccagcttcatcgtcaagaagatggggctcaggagggccgccgattccggcgtccgcgcgggatatggagggttttcttacttagtggagcctctttggtggataggcatggtttctagtgaaattgctaattttgctgcttatgcattcgctccagctattcttgtcactcctcttggtgcactaagtataatcataagcgctgcactcgcacatgccattctacaggagaaactgcacacatttggtatactcggttgtgttctctgtgttgtcggatccatcacaattgtgctccatgctccacaagagcgtgacattgattctgtaaaggaagtttgggatcttgccactgaaccagctttcctttgctatgcggctatagtagttgcgtcagccttagtgcttatatattttgttgtccctcatcatggacaaacaaacataatggtgtacattggagtttgttctcttctaggatcacttacggttatgagtgtaagagctcttggaattgccttgaagctaacattctcaggaacaaatcaattattctatcctcagacttgggcctttgcagtaattgtagctacctgtgtgagcacccaaattaactatctgaataaggcactggatacatttaatacagcagtagtctcaccaatatattacgtgatgtttacatcactaacaattatagctagtgtgataatgttcaaggattgggaccatcaaaatccaacacaaattgttacagagatgtgtggcttcatgactatcctatctgggacgtttcttcttcacaagacaaaagatatgactgagagtcctggacaatgtttgtccacacggcggtcaaagcatgctagtcagaatgcgtttgcaattgaagtcgtgccactaaaatgtcaagattctatagatgatgagaccttgactttgtcacttccccaggttgaaaatggttacctaaaggaagagcatcttcttagatacaaggactcgagtattgtctgatagataattctccgccaacatttggcaggaagctcttggggaccattttgctctcagacatgattgattgatgtagaactggagttcacagttttacatcaacctggcctgggatagattgatattgcagattataagttgtcaactgtggtttgcctgtatctaggtgatgattttgacaaagaagcaaaccataaggatgccacattcaggccaattaagtgctagtcatccaagaatactggttctggaaaaggaaaagcgttcgaagtgtacttagtagatggtggtgttgccaactatactaccccccccccttcatttgaggacgtcatgtggtagctgcaatgcaatcttatctggtttctatcaggacgacgccaaatagaaaatcagtcttcatttttacctgtaattacctcaaattgctgcccaggtgtcattgtgtatatttggtctgtgacacctggatgcagaaagaaacgaaagtgattttttaagggaggaccaaat

SEQ ID NO: 5698 - DNA, 2326 bp, Zea Mays
caaaatcgcctcacgcttccgtttcgaatccttcgtcgcctcacgctcacgctcacgctgcttgctcctcctcccccccatccctccgcccctcccatggcgtccctcttcggggctcgccgccggcgatcgccggagtacgacggcgaggacgatagatccggcggagggagggccaagcgccggcgcctgtcgccggaggaggcggcggcgtcgccggcggagccgggcgcggcgacggggactagccacggctggctctccggcttcgtctccggagcgaagagggccatttcttccgttttgctgtcctcttcgcccgaggagaccggctcgggggaggacggggaggtggaggaggaggacgacgacgtatacgaagagggcatcgacttgaatgaaaatgaagatattcatgatattcacggggaaatagttccttatagcgagtcaaaacttgctattgagcaaatggttatgaaggaaacattctcaagggatgaatgtgataggatggtagagctaataaaatcaagagttagagattctactcctgaaacccatgagtatggaaagcaagaagaaatcccaagtaggaatgcaggcattgcacatgacttcacaggaacatgccgctccttgagccgtgataggaatttcactgaatcggtcccattctctagtatgagaatgagacctggtcattcttctccaggctttccactccaagcatcacctcagctatgcactgcagcagttagggaagcaaaaaaatggttggaagagaaaaggcagggactgggcgtaaaacctgaagacaatggatcatgcacattaaatacagatatatttacgtgatgactctgacaagggttctccagttgatttggcgaaatcatacatgcggtcattacctccttggcaatccccattcttaggccatcaaaagtttgacacatcaccctccaaatactctatctcgtcaacaaaggtaactacaaaggaggactacctttccagcttttggacaaaattggaggaatcacgaatagctcgcattggatcatctggagattctgctgttgcttctaaattatggaattatggttccaattccagattatttgagaatgacacttccatattctcattgggcaccgatgagaaagttggagatcctaccaaaactcataatggctctgagaaagttgcagcaacagaaccactcggtagatgctccttacttattacaccaactgaagatagaactgatggtattactgagcctgtggaccttgcaaagaataatgagaatgcaccccaagaataccaagctgcatctgaaattatccctgataaagttgcagagggtaatgatgtgtcttccacaggaattactaaggatactactggccatagtgcagatggtaaagctctcacttcagaaccgcatataggggaaacacatgtcaactcagcttcagaatccataccaaatgacgcagctcccccaacccagagcaaaatgaatgggtcgaccaagaaatcattagtcaacggtgttttggatcaaccaaatgccaactcagggctagaatcttcgggaaatgattatcctagctacactaactcgagcagtgctatgccacccgcgagtaccgagttaattgggtctgcagctgctgttatagatgttgattctgctgagaatggcccaggtacgaaaccagaacaaccggctaagggagcctcgagagcatcgaaatccaaggttgttccacgaggacagaagagggtgttgcgaagcgcaacaagaggaagagcgacgtaggggcattgctgcgctacattgttgtgtactaatatatgttgacggcccagaagggcaacatgatccctaggttaactagagctagcgccgactggtcgtttccacgtacgatgcactgcgcatcagcctgtatccatgttgtattatcgtagggcttgtaatgaccacatgccctggttagagttgatcattaggaccagtagctgcttgatttgtgtctcggtgatctagctttgggtagtttgtgcagttggaaggagacagtttgttggttgtattgtattgcagcgcacagctagcaagtgttgttgtagccatcaggtacgtgttgtgtagtgaatccaggtccagggacagagctgttcctctgtatggtggaccctgaccctttgttttgtgccatggggcctttctgtgttgtgcttacatgagctggagctgctttatttttctttttttatacgattaatacgctgctgatgagtcttttttttt

SEQ ID NO: 5699 - DNA, 2395 bp, Zea Mays
aagagaagagaagagaagaggggagtcgaggtcgagagcagcagggagagggaaaatccactaatccccccaccccggctctctcgaaacccgccattcccctccgccgcaaacacgcgtcggagctcgtggcgagcgccgccaccccgcactcgggctggggggcgtccctccgcccccttcgatctagagccggcggccgcgatcccgccgcgggtcctcgcggccgccgcgaattgggtttgtactgacgttaccggtgggcggaggcgctttgatcctgtagctgccgggttgggttcagtagatggcgggcaaggagcagggcggtggaggcccgccgcagaggcctcccatgcccgcagcgtccatgcagccgccaatcaagaagctggtaaggcagctggacttcaactcggcggcgttggcggggaaccccgcgatggcggcagcggcggccgccgtgtctagggctcttcagccgagggcgttgcccgcggggttccagcatccgcagcacgtgagggctgccgtgccgatggtggtgccgcagcagctgcaccagcgggcgctgccggtgatgcgcccgcatccggtggtgggtcatgtgccgcggcacgcggtgccgctggcggtccctgtaccgcagctccgtccgatgccgccacagccagtccagcgtcccccggtcgccgttcccttgaaaccagactcaccaaaaccgtgggcaagactttacgaagggaaagatagcactcccacgaagaaaaagtgctgcaactgcaggaactccagatgtttgaagttatactgtgaatgcttcgcttctggtactcactgtgatggttgcaactgcaccaactgttttaataatcctgagaatgaggttgccagacgtgaagctattgaagctacattggagcgtaatccagatgcttttaggcctaagatcgggagcagtccacatacgaataggaataattgtatggattgcaagaattttgaaggaagtgaagagagaagaaatcttttccaaggggatcataaaaatgcaattaacattcagcaggcgacaaatgcagctgtaaatggtgctattggaaccacaggattcccttctccctccacgtcaaggaagaggaaacatattgatccttcacttgaccattcaaacaaggaacatgcagcgcacaggaattgtcacatacctcagaaaaatgcagtgcctgatggttcaattccaataagccagtctgcacatcctccaactctgggcccctttaaagttacctacaggccccttttagcagacattgtccaagcagaggacgtaaaggagctatgcaagcttttagtggtggtatcaggagaagccgccaaaacatatgctgaccggaaagcgaaggaagagagggttggcaagaaggaagatgaaagggcagaacaaaaggaagatgacagggcaggttccctagcattgacaaaccatgacagagaaggaaataatcaagatccagataaaaaagcatcaatcgatgaccattcaagcagaggaactcatacgggcaaagctaatcaagaagaatccagacctaactgcgctgatgatcagaagtccaatagacctatgtctcctggaacactagcactgatgtgtgacgaacaagcgttcgagaaaatgtgtgacgaacaagatacagtgtttacggcttctcaaaatgctgttcctcagcagacagttactgtcaaccaaaaccaatctgcactgtacgcagaacaagaaagaattgtgctgacagaattccgtgattgcctccgcaaacttgtgacatacggaagaatgaaagaggaaaggtacgccatggaaatcaaatctgaaacatctggccatcctggacaggtaaatggtgtttctcaagtaccatattcaaaagtagaggtgcctgttgtaaaaacagacccacagagttccagcagccatcctgttgctggaaaacctgttactggccttttggacaaaaactgaagcctgggtgttccaggtttgtattcggggtgttgcaatgatcaagggaatcatgttttcaccctcctaatttgttgatcagatacatgtatcagtcttgatagataatctagattttagggaattccaatttattctcattggtcagagtaagtgtgatgctggaatgtggatagttagtttagtcataaatgccaaccttgtcgtattttctacattgtagtttctcccttttcttttccttgtctacatttcatcattttgccatccacctaattcgagccaagatatggctgggtggatgtttatttcaaaataaaataaaaagtcaaaaggaagaaaaggtaacactggagagatgagcctaga

SEQ ID NO: 5700 - DNA, 1148 bp, Zea Mays
tatgtaaaattgcagtctgttttatctgattgttctgaggaacatcgatagtgcatatcagatttaagtatggtagtctaactctatctaaccacagggatgcatttgttgagtactggatggatgacaataagattacaatggatatggctagtcaaatatttgaaattttaagaaaaccaggttgcacatatctcactcaggatgacttcaagcctgtcctgaaagaactacttgcaactcaccctggcttagagtttttacaagggacccccgagtttcaggagagatatgcggagactgtaatatacagaatcttttactccataaatagatctgggaatggccatctgactctcagagagctcaaacgtggaaatttaattgctgcacttcagcagttagatgaggaagaagatatcaacaaagtgttgagatacttctcatatgagcacttttatgtgatctattgcaaattctgggagctggatgcagaccacgattttttgattgataaggagaacctcatcaaatatggaaatcattcgttgacctataggatagttgatagaattttcacacagataccaaggaaattcacaagcatgacagaagggaagatgggctatgaagactttgtttattttatattatcagaggaagacaaatcatctgagcctagtcttgaatactggtttaagtgcatcgatcttgatggtaatggtattttaacttacaatgaaatgcaatttttctatgaggagcaattgcaccgaatggagtgcatggcacaggaacctgtggtttttggggacatattatgccagatgattgatatgattggaccagagaatgagagctattttactctacgggacttaaaacggtgtaaactctcaggaaatatattcaatattcttttcaatctgaacaagttcatggcatttgaaactcgtgatccattcctcattcgccagagaatatattagattgtccatggaagaagatggtgaagatgcttcaaatggaagtggtgatgtgtgggacgaatcacttgaggctccattctgaatggtggtctgttcggttcctagggagcagacaccgggaacgattcctaaccggaaggtttgcctaatttatataag

SEQ ID NO: 5701 - DNA, 519 bp, Zea Mays
tttatgtatagtttggagttccgacgatcgaacttgaggccggtcattccattgagctgcccagcagcgctgaagcttctgattgagcagtgttggtcctggcaaccagaaaagaggcccgactttcagcagatagtttctatcctcgaagatctcaagacagttcttgaaacagacggaacactccacaaggtcccaagctcgatctgccaggccttggaatccaatgatcagaacaagaagaaggccggtaactggatccagaggctgtcatacgctcaacctgatttctccgggcctccacccccaaagttactgtagctacgcgtcttcttgttcttggtagcttgtttatctggttggtagcaactgtgtaaattgaacctttcttgtttcttgttgagagaccacagatttcgtcatggtatatactcggacaaagtacatacatcaattcttttttcggctaccttaacaacttctatcttgatgatacatgggagcgatatgatagcaatc

SEQ ID NO: 5702 - DNA, 1595 bp, Zea Mays
atactgaaatttggaacagagcaactcagcgagtataagctaacctgatcgttttcctcatttcaccttccaccctcccccactttctcctcaccgagtcacaaagccaaaccctaattcacggccgccggagatgggacaaggttctcccggcgggatgggcaagcagcccggcctcccgggcgaccgcaagcagggagacggcaagaaagagaagaaatatgaaccacccgctgccccttcccgtgtcggccggaagcagaagcggcagaagggctccgaggcggcggcgcggctccccgccgtggcgccgctctcaaagtgccgccttcgcctactcaagctcgaacgcgtcaaggactaccttctcatggaagaggagttcgttgccagccaggagcgcctgcgccccagcgaggataagacggaggaggaccgatccaaggtcgacgacctccgcggcactcccatgaacgtcggatcgctggaggagatcatcgacgagagccatgccatcgtctcctcgtccgtcggtcccgagtactacgtcgggatactttccttcgttgataaggaccagctcgagcctggatgtgccattctgatgcacaacaaggttctgtcagtggttggtattttgcaagacgaagttgatcctatggtttctgtgatgaaagttgaaaaggcacctttggagtcttatgctgacattggtggcttggatgctcaaattcaagaaatcaaagaagcagttgaacttcccttaacacatcctgagctatatgaggacattgggatcaggcctccgaagggagttatactatatggggaacctggaacagggaaaactctactcgcaaaggtatgatgctcattctggtggtgagcgtgagattcagagaaccatgttggagttgttaaatcagctggatggttttgattcaagaggagatgttaaagttattctagcaacaaatcgtattgaaagtcttgatccagccttgcttcgcccaggtcgaattgacagaaagattgaattccctttacctgatgtcaagactaggcggcgcatcttccagatacacacatcgaaaatgacactggctgatgatgtaaacctagaagagtttattatgtcaaaagatgagttttcaggtgctgacatcaaggccatttgtactgaagctggcttgcttgctttgagagagcggcggatgaaggtaacgcatgcagacttcaagaaggccaaagaaaaggttatgttcaagaagaaagaaggcgtgccggagggcctatatatgtgagactcatcagcagcgctattagtctttgtgagagaactggcgtttgtaatctgcttaaatggtccgaaaatgtttgcttacagcatttattttggttggaaacacacaactcaaacaaacagttatcctattatgagtacttggatatatgaaatggcagcatcgagtcaagatgaggttgaatgttggttgtctgtgcaggcgtggacatgtatgacaagcatcctaggtttcaatcctaggttaatatgataattttatttttttatataaattgaagtctattaatga

SEQ ID NO: 5703 - DNA, 1677 bp, Zea Mays
gtctctctcagtctctctcctgccctgtccgtcccactccccgtccagcggagagagaccctgtgggctgtggccgggcagccgtttcccctccccttccctctccgctccctccagagtctactgtagcgcagtgccgtagggtttcgcgtcctatccttcctcgcatcctccatggccgatcctgacgacctcggccgccgcctcgccgcggtcgccgtatccgagtctcctaccgccgccgcggctgcgctggagagcagcaacaacaacctgttccaggtgatgcgcgccgtggaggacgcggaggccaccatccgccagcagctggaggagaacagccggttgaaggacgagctgatgctcaagacgcgggagctccacagaattaggtcagaagccacagaccaagcttcctctcatgggatccgtatccatcaggatcgcgctcttggtgcccacacagacacctcctccactgctcccatcaggactaccgctacagcagcagaggccttcgaatggggagctggggatgccggcatcaaccacaagtaccttgaggccaaccaggctaatggaattccccgtaaatcaccgagcgctcccgatagcgctttcccatctcagctatctaccccgtcttcgcgatccctttcaccaactaggcaccacaaagaaacagactatgattctaggctcaacttatccggacaaggcgcactgcctgtttcagacctcaactcaaacgtcgtcatctggaagcaggatctccttgttaaggtcaaagaacaaggggaggagattgcacagctgagaaggcatctttctgactactctgtcaaggaggcccaaatacttaatgagaaacatgtcctggaaaaacgcattgcatatatgcgcatggcatttgatcagcagcagcaagatctggttgatgctgcatcgaaagctttgtcctacagacaggatattatcgaagaaaacatccgtcttacatatgcattgcaggcagcacatcaagagagatctacattcgtatcttctttattgcctcttctatcagaatataaccttcagcctcctgttcttgatgctcagtctattgttagcaatctgaaggttctgtttaagcatttgcaagaaaaacttattattactgaggagaagctgaaggaatcacaataccagattactccttggcatgctgaatcttcaaataatacaagtgctgctgcacagtcgccttctcatcctcctggaaatgcattgatcaaagccaaccttgacattgtgccccagcaagcatattctcatgtacattctccagtttcttctcctgttcaaactaggcgtgactgggatttgttagggaatgaaaatcgtcaggtcattcgaagtgaggttgccacaacaagtgcagagcatgataatgttgggaggacctctccttcaaccaggttgctggtggttacttcaaaaattcaataggatgtgttcttagctattttttgccgtttcacaattacaataatttcactatgtacatcccatttttgccacatgatgaaaatcttaatagtagtattagtctagctagcccccttttcttctttgttctgatgtaattaatttttgtacagtattttgaaaccatttctccaactatgattgttc

SEQ ID NO: 5704 - DNA, 1147 bp, Zea Mays
ctctaccacacacacatcccccttcccttcccttccccgcaactaccctctactctctactgcacgcttctactatctaagaaacaacgcacacgggccgaaactaaatttctccaagcgcgcaatcctgtcgccaaccccggccacggatcggggatgtcgtctgctgcgggccgcgcgccggcgccgacgccgatgggctccgccgatcgctgtaagtcactttgcaacgcctgtgggatccggtaccgaaaaaagaggaggcaagagcttggcctagaccgcaagctgcagcaacaacaaaataatggcgaggcgaagacggatgaagcaaaagacagctctagcaacagcagcagcgggagcagcaacttgcaggtggtgcagaaacggaggctgctaatgggagtggaggaggctgctctgctgctgatgaccctatcttcttcgcccacatccacgttgcttcatggataaggaccctcctccaacgccagatcagcagtgtacatacaacgtaccccctgcacagtgactgccgaacgattgcaggcctatctcagggttgtgtgatcttgtgattggggcggattattagtgccaagctaatcactccgttgatcgtcttgtcttcctctgttttcgccgcacccgtagatcttgatgccagccagccatatatcttctacgtgatttgtggtaggctccataatcagaggtctgttgatcccattccccccgcacatcttttttctcttgtcttttctctttttggttttttgtatgtactttgatgttgccccatttgtgagggatgggtgatcaaagaggagacgccatcccttctcgttctggaataatggtccaaataataaaggatttgagctgttttgttttgtttcgtagtttcagtaaggatttttttttctgattaagagaacaccgtcaaatcgaagcagcttcggggttcatgttcaggtatgacttgagcgtcatgacagggctacgggcttccacagttccactgtttcgacagaactttgtccattcatccgattcaccaccgcggctgtggcatgcggcatgcctggacaaactggtagcggaaccaaagcaagcatgcgttgcttgcgcgccaccgttggcg

SEQ ID NO: 5705 - DNA, 1508 bp, Zea Mays
cgccaccactctgatgcaggtcaccagcgataggccccaccggccaccacccagcctcttcccctccacccctgctctcaaatttgagacccaaactatcccgtcgtcgccagtcgccacgccgtcggccacgccccgacgaccaacacctgctccctccgccgccgcccgtgtcctcccgctccgtccgcgcgccgccctcatacctccaagcgcggttggatctgctctgggtccaagtccgctcgatcctcctctcgtcggaaactttatgtgtgccttcatccacgaagagctgaagatatcacatgactagttgcagttagtgtggcttttctccctgcttggtcctgattgtgtgctttgccttgcaaaggaaggaatcatgacctctgttgttcagagcgtttcagggctgaggatcaaagtcatcagaagaagcaaactgaacctggggaccagcaagaagccccagttactagttcagatagccaaccaacagtgggcacaccatcaacagattatgtggcaccctatgcccctcatgacatgagccatgcaatgggtcaatatgcttatccaaatattgatccatactatggaagtctttatgcggcggcttatggtggacatccattgatgcatccaacattagtcggaatgcatccggctggcttacctttgcctaccgatgcaattgaagagccagtgtatgtaaatgcaaagcaatacaatgccatattaagacggcgtcaatctcgggctaaagctgaatcagaacggaagcttgtcaagggccgcaagccctatctccatgagtcacggcatcagcatgccttgaaaagggccaggggagctggaggtcggtttctcaattcgaagtcagatgacaaggaagagaactccgactcaagtcaaaaagagattcagaacggagttgcgccccaaaagggtggccaaccgtcaacccctccgtctcccaacggtgcgtcgtcagcttatcaggcgcctagtcgtgaatgatgattcggaactcacaactgaagagattttagtccctgacgctagttgtggcagcagctttgtacagtaagtgctagcgggcagcagcgaaatggtgtcatagaaaaacgttgacgagtcagacaggttttggagtcttggttttttttcctctgtttattttacctgtctgcaattttagtagctttgtgtcccttcccctggatagttttttggtcagcgcttaagaaagtttaagggctgatttgttgatcggggatcccgaggggatccatgggagaaaaatcgtcttgctattcaaaattgtattgtaaggggattcctcgcctatggatcctctcgagatccctaaccaccaaatcagccctaagtgtgtagcatattggtctattgtttgcttttgctttgacttggagatttgggagtggagttcataaccttaccggagatttgggagtttaatgatgtgtttggtttgtggagtc

SEQ ID NO: 5706 - DNA, 1365 bp, Zea Mays
cgcgccgcgcgggcaacggataacaaacgctcggcttgtcgccgtccgtcccctgccgccacccatcacctgctatcccgccgggatcgtacgccaattcgccaaaacgatggcggcggcggcggcggcgggcgcggcatcttccatcctctcgtccacgcccccgcgccgcctcaccttccctcccgcccacatccgcaaacccctcgccgcggccgcccccaaggccctcaacctgtcatcgcagaaactccccccgctctcttcatctgccacggcctcgccaccacctccgcccgacggggacgataagccggaccccatcaagctcgctttcgcccgcgctgccgcatacaagaaggggagggacagtcacagcccgagcccgagcccggcgccggccccgcctcccacgccgccgccacagtcttcaccaccgtcgcagccgcaggcttcggtcagtgagcccggcagtaaggaggcttttaagcgggcgttggagtaccgaaacggcaacggggccggagcgggcgcggctggtggtgactccccgctgctgggaggctcgccggattttgtatggcggtggaagaaatatacgccttggtggagagactcaaagtgcagaagaaaaggcagccaaagataagcgcaccaaagagctaatagctgcatataggaatcgacagaacatggtaatcgatgcaaagacaaaagcagagtgcatcaagttttcatctttgctttaatgcacatgtatttgttacgtatttgtaaaattgtcatatggaaggccttgagggaaggtgatgagatgatgaatactggaaggcttaaacaagcattaccttattatgaaaaagtgatggacgctgtggactttaagactgaatttcatggaagggctgctctgcaatggtccatctgtcttgattcactttgcaggtccaaggaagcaatgagcatgtatagcaaacttaaaaaccacccgaatagtgagatcagcaagaaagcaaacatgttcgtgttcagctttcaggcaatggatttcatgaaggtgagcagcattccagtgcccaaaagcacaggctacgagacgtacttcaccaaatttggcagcaagaagaattactacgcgagcttagaagagccggagaaatcatggacgagttgctgaggttttaataccgtataggagcacatagcttggcaatagaagattattattatgatttttttgttttcatcaaaagagcaaattattttgtgtagctgagctagggactaatttttaatcccttttctttaggccctgttccaatcctataagataaattttagcagcttctttttagctacttttag

SEQ ID NO: 5707 - DNA, 2706 bp, Zea Mays
atagccacgcgatccccacacccacacaaccgcacctcgcacccattgaccagacggcggcgctcatctcctcccccacggttctccccatcggcctgctggcttctccccggcttccccgatactgatcctcatcactcatgtctgctgaagttgctggaggacacccttatttcctctcgtgctacttctggttcatatactgcataaaattccgagattttacttgatacaagtggaacactcagagttttgtgcgaatacttcctaccatgtgaatcagttgtagctggtgaatttggcaagactcaatttctctcatctgagttcagaaacgtttgcttggtctcctgcttcccttgagtcttgccaaccatagttttctctcatctctttctgtgacttgaccaacatctcttttggtcctgtcagtctcgcaatactcccttccaaagacttgtctagaggttggattgccctgctctctgctggcactgcagcctgctgaagtctttacttgctgcattctgtgctcacttttgaaagctgctctcttctgctctgcgttgttgatttctgcactcaagcttctcttgcctgtgcactcaagcttctctcttcctgggcaactagtgatctccttgaagcatttcagcttttacctagagatctttctgttgttgaaggcaagagaggctttagggtgatggcgcaaactagcctgcctcctggttttcgtttccacccaaccgatgttgagctcgtttcctattacttgaagaggaagatcatgggaaagaaacatatcgtggatgctatagcagaggttgatctgtacaagtttcctccctgggatctatgtgacaagtcctctcttcgaagtaaagatcttgaatggttctttttttgtcctcgtgacaagaagtatcctaacgggtctaggacaaatcgtgccacaccaaatggttactggaagactagtggaaaggatagaataattatgcttaactcccgcaccgttgggatgaagaaaacattgatatttcatgaaggcaaggcccctaagggcgacagaactgattgggtgatgtatgaatacagaatggaagatgaggatttggtttctgctggtttctcaaaggatgcttatgtactctgcaaaattttcaagaaaagtggccttggtccaagaatcggagagcaatatggggctccatttaatgaagacgaatgggataatgcagaagtcgaaacttctctgtttcctttgacttgttcagaagtgaatccaacagagggacaacgtgctcagcctactgtcctggctggtgctcttctggaacccgaaccacctctacataattcatcttctacatgtgctggagaggaatcatcatttggtcatgccactgctgaggacttaacttttagccatagtgttgctagctctgctatccaagatacacctgctcggatgtcaggagacggtgtggtttctgtgaacaacatatccaatgtggccaatgacatgcgtagtcctcgtgactgtgatgaatttctatcggagttgtctagatttatgaatgattctcctctgcgtaacactcctcttggagagtgctctggtcttcctccgatgtctgaagctgaggctcatgcttttgaagtcaactcttttggcctctacaatgaattatcagagcttgttgggttaggatgcgcggataacaacttaaacaccagcaatgtggaaactacggattatctcatgttgccacctgacagagaactgtcggctaatgattacatggaactaaacgatctccttgctcctgacccaagcttccccagtgaattttctgctcaggacaatcaatatatgcagcatcctcttgctcagtacaatggacattatgatctgtcaggtccttcggagccaacaatgcctagcattttcgatgtttttcctcccaataatggagtcctcgcaacagatgatccagccaactacttggacccagccatgcagttccctttctcatgattggttaccatttgtcatggagtggctttcaaaagtgccctcgaattcattgactcaggattgataagtagacctgctcgtcatagagttgcactcggccaaaagaaaggacatcaagtgccaccaccggtagagaagacggctgcatcgacgagcgcgccgcgtgacatgatggctttctcaagaaatataaaggccggaaggagaatttgagtgtccacctaaattctatgaatttagtagatgccttattttgtttttttgtctggtgatcgatatttagctacgaggggttgaatagggacgtagagagtaacctttttttttgtttaaagtgcggtctgggcctgccaccggttcgaatattatgggaatcaggaagtaagtaaatactccctccgtttctttttatttgtcgctggatagtgcaattttgcactatccagcgacaaataaaaagaaacggagggagtattggactgccaactgcttccgaaacttttacgtccatccttgaaattgaattacattctaataataataatttatatgtatatcaattaagctaattcgatttatgtaaaataatatttatgtaatattatcagtaagatgtcggagatatttatgtactacattttttttattatagaagagtaagc

SEQ ID NO: 5708 - DNA, 593 bp, Zea Mays
aagaaaagctcatgaattcgatgccaagatcgagcggaaacgggcgcgcgagcaagacaggctcgccagcaaactggcagcggtgagccaccgagcggaggcgaagagggaggccgcggaggcgaggcgggaccaggaagccgcgagaacggaggagcaggcggctcagatccgagaaaccgggcacacgccttcctctttctcatgctggtgctggtgcctgtgactctgattccttcactgcatgaccagcacagcacgtcacccgactgtaacatagcatgacccgtgagactgtgatctccggccatggtagaaaaatttgctcactgtacgacttgtgtagtgccttggtctaatggtgtccagttttttggtacctcgcgattaatatgggctgttaggccggttgggctgtggacggtagataaggcccgtagaggatttttggagatgggctcggatcgtcagctcggcctaggaattggatcgcaggcaaatcccaacggctcctgtcgttccttcccatgaacaggaggaaaaccttctggttcttttttttcttcagaaaggaggatcccccatttcattat

SEQ ID NO: 5709 - DNA, 1546 bp, Zea Mays
ataacacgcagcaacagacgcagaattcttgcgtctcgctcggtcgctagcgcgcaatctgccgccgccgctaaatcgcattaaattaattaacaaatcccaccgccacaaatctacaactacaagacccacacacccgtcggtaaatgcaaagatcgcaagtccacggcccaccccccaaatcggccaatctccacttcttaagcctccctgttgcctcgcacggcctccgcctcctcgtcgtccggcctcccgcgccaccaccggggcctcgccgccacgaatggagtacgagcgcatccacgagccgctcccgcgccgtcaggtcttgcccatcctgatttgcttaaacttgcacacgatgcttcaatagttgatggaccagctcctgcagttaggtctgtctctatgagagacatggggaccgagatgactccaattgccagccaggagccttctcggaccgcgactcctatgattgcatccagtccaacctcctctcggacaccaactcctcaacgcaccacagaattcagtgtgagcaatatagattctaacaagatggcgatgtctgaagaggaggtccatataagtacaagacaggaaattatggatcttggcgaaaggttaggcaagactactatagctgcatgggcaagcaaggaggagaaagctgctgcacgttctacggatactgcagccgataatgctgttgatgtcaacagggagaatcgagcggcagattggcaggaggcagagaaggcaaagtatcttgcaagaaactaggtttaggatcatctgggctctgtggtaaagaactgcagaacgtacggaagctaggcgaaacaggaggttgcagatttattgtttctttgaccttaaacattatgcaggtttcatagggaggaggcaaagatccaagcttgggaaaatctccagaaagcgaaaattgaagctgaaatgaaaaggatagaggccaagatcgagcggaaacgggcgcgcgagcaagacaggctcgccagcaaactggcagcggtgagccaccgagcggaggcgaagagggaggccgcggaggcgaggcgggaccaggaagccgcgagaacggaggagcaggcggctcagatccgagaaaccgggcacacgccttcctctttctcatgctggtgctggtgcctgtgactctgattccttcactgcatgaccagcacagcacgtcacccgactgtaacatagcatgacccgtgagactgtgatctccggccatggtagaaaaatttgctcactgtacgacttgtgtagtgccttggtctaatggtgtccagttttttggtacctcgcgattaatatgggctgttaggccggttgggctgtggacggtagataaggcccgtagaggatttttggagatgggctcggatcgtcagctcggcctaggaattggatcgcaggcaaatcccaacggctcctgtcgttccttcccatgaacaggaggaaaaccttctggttcttttttttcttcagaaaggaggatcccccatttcattat

SEQ ID NO: 5710 - DNA, 1636 bp, Zea Mays
cttgtcgcttccgcccgttgtttcagcttttcttcgtccggcggattctccccagctaagctgcgagcgatgcttcgcgggctagagaaacaccagcgcaacagcggcgaggacacgtcgccggaggccaacgactccggcgagctcgacgaccggaggagcttggaatgctccacctccaccgagatgtcgagcaacagcggccacaggtcaaggaaccgggccccggacgacgacagcttcgactcggagagcagctcgtcggggccgcccacggtgaagaggtcggccgcggtggccgctttgctgccgcccttctctcgcccaacgccgtccaagtgggacgacgccgagaagtggatttccagccccacgtccaaccgtactggccgtgccgggcctaccgctggaactatgccaaagaagtccgcattggcatttcctgaacatggagcccgccagccagccgttgctaaggtggtcacggatgtgcctactatcgctggaccattggttaagaattcagatggtcttgcccatcctgatttgcttaaacttgcacacgatgcttcaatagttgatggaccagctcctgcagttaggtctgtctctatgagagacatggggaccgagatgactccaattgccagccaggagccttctcggaccgcgactcctatgattgcatccagtccaacctcctctcggacaccaactcctcaacgcaccacagaattcagtgtgagcaatatagattctaacaagatggcgatgtctgaagaggaggtccatataagtacaagacaggaaattatggatcttggcgaaaggttaggcaagactactatagctgcatgggcaagcaaggaggagaaagctgctgcacgttctacggatactgcagccgataatgctgttgatgtcaacagggagaatcgagcggcagattggcaggaggcagagaaggcaaagtatcttgcaaggtttcatagggaggaggcaaagatccaagcttgggaaaatctccagaaagcgaaaattgaagctgaaatgaaaaggatagaggccaagatcgagcggaaacgggcgcgcgagcaagacaggctcgccagcaaactggcagcggtgagccaccgagcggaggcgaagagggaggccgcggaggcgaggcgggaccaggaagccgcgagaacggaggagcaggcggctcagatccgagaaaccgggcacacgccttcctctttctcatgctggtgctggtgcctgtgactctgattccttcactgcatgaccagcacagcacgtcacccgactgtaacatagcatgacccgtgagactgtgatctccggccatggtagaaaaatttgctcactgtacgacttgtgtagtgccttggtctaatggtgtccagttttttggtacctcgcgattaatatgggctgttaggccggttgggctgtggacggtagataaggcccgtagaggatttttggagatgggctcggatcgtcagctcggcctaggaattggatcgcaggcaaatcccaacggctcctgtcgttccttcccatgaacaggaggaaaaccttctggttcttttttttcttcagaaaggaggatcccccatttcattat

SEQ ID NO: 5711 - DNA, 1886 bp, Zea Mays
gcgaacccaacgtgtcgtatgaacccagccgagccacaccaaagccacattctttgagcttctaccggctccaattccacccctcgccgccatctccgtctctctctctcccgcaaccaagcagttcaactcacacccgaagcggcgccgctagggtttgctccgacagccgcgaaacctagtccttactgcgccctcccacagaggccgtcattcactaatctacctgctacgcttcgcttcccgctccgattgggagctagggtttagcttatctccgagctcagcttcgggtcgcggcacgcggcatggcggggtacggggaagagaaccagaacgccatgaacgggtacgaggaggaagaggaggaagaagaagttgaagaagtcgaggaggtgtacgaagaggaggaggagggggacggggagggggaaggagacgagggggcagccgccgaggcagcagcgatggcggccgagacgagaagtgtcgatggaggccggggcctagcggaggccgttgggaatgttgatgccggaggcgaggatgagagggatgcagattctagcggcggtgacgcttcggggaaggttttcgtagggggtgtagcctgggagacaactgaagaaacattcacaaagcattttcagaagtatggagctataactgattctgtgatcatgaaggacaagcatactaggatgcctcgtggatttggatttgttacattttccgatccgtctgtgcttgacagggttctagaggatgaacatgtcatagatggaaggacggttgaagtcaaaaggactgttccaaaagagctgtcgtcgaaagatggccctaagacaaaaaagatctttgtgggtggtatcccaccatctcttactgaagataaattaaaggagcacttctcatcgtacgggaaggtggttgagcatcagattatgcttgatcatagcactggacgttcacggggctttggatttgtcacatttgaaagcgaggatgctgttgaaagggttatgtcagaggggagaatgcatgatcttggagggaagcaggttgaaattaagaaagctgaaccaaagaaacctggcgctggtgattcaagctcaaacggaagacacagccgtggtggtggtcatcgtgattcataccgtggtagtggtgtttctgtgaacagcggtggcggctatggatatggtggtggttaccgatcagctgctgcagcatattatggcagcacagcatatggtgcctatggcagagggtatggatatggtgctacttctggctatggctcaggttatggctctgcatatggtggctccatgtatggaggtccatatggtgcctacgggtcatatggtggtgcctatggaggatatggcagctacggtggtgctggaggcatgggtgggggtggcagcgctggtggtcggggctccagcagataccacccttatgggaaatgatcatccattctgtgtttctctaggatctgataataaagccatacctttcctcgtttctgctactgagaaaatggaacattccattcgtcttgttgaatcagcggcatctggacatttttttccttggaacttgcattgcacatcaacgattctatagtctatagtcgctgaaccctgaaccgcccccaccccgagctttctgtagaagctgcagctgaaattctcgtagtctggcatgagccttagaatgcccttgaaactattatctttgtggtagtaacattatggtgtaatggaacagatgtacgttgttgtaacattcactcactgatcagagacttgctatctctacatatgtggagagaagctttgcaaatgattgactgatactattaaattgtgtgggttgct

SEQ ID NO: 5712 - DNA, 1790 bp, Zea Mays
cgcgcctgacgcctgacgggcgacggctgggcgtgggggagcgcgcgttggctttgcgacttgcgagtcgcttgtcgccattcgattcgcacgaggcgcagagcgcgggggattgacattggctcgccaccggctgtacgccctctcctcctcctcttcttcctctccctcggcctcggtccctcccgtcgcgctctcgcctctgcgtctgcgcttctctccagttctccttgtcgtcgagcgggagcgccgagagagagagatgcgaccgcgatgcccccactcgtcccctcgctgctcctcccaatcccagccttgatcctacccgcgccacctcgcctctcccgccaccgctgcttcctgcccgccgtgtcctcctcctcctcctcctcgtcgtccccgcactccagggagccataccgccgccgccgacgcgacaccccgagccagacaccgacgcctgcgccgcgcccatcctcccagccgcagccgcctccgcgccgcgcaaatgccgccacgcccggcgctcggagtcaggaggagctggaggcggcgatctacgacttcatgtgccgctccgccaagccgggagccttccccacccgcgaggagctcgtcgcggccggccgctccgacctcgcggccgccgtcgcgtccagcgggggctggctctccctaggctggtcctccaccgccgcggagggccccgcgacgacggctgcaccgtgctcatcaggcgggggccaccctgactacccgcctgagacgggcgtgtattaccgtggtgatctagcgcccgtctcggtggaggactccgagtgggaggacgacgaagaggatgcctcaccatctgggcgggagtcgggaacagaggaggccagcgaggtccggctcaacgcaggaatcgaggggatgctcaccaggctgcagaaggatagagagcgagcgcggccacctccacggactagtacccacgacacacagggccaaagtgacgatgatgcgggcaacagtggcgctcctagccatacagcggctggtggcaggcatattccaagggctcctgagaatggaagtgtccatggatctcattctcaaaatggaacaatagagggcaacagcacctttcagggttcgaacgatgatgcatggcaaacatggacccttggcaagggcgatttatctcattttgaagctgctgaggtcttacctattgaaagaagaaaagtatcccgacatgatgacattgcatccgtgcaaaatgacattcacaggtcatctaatggtgtggctgtaagcgatttttctagcgatggtgttggcactggaagagatgagatacattcacggcttcaaattctggaattggacctttctgctgctctcaagacattaagatcaagatttgacaaagttttatcagatttgtcaaatagtaatggagcaactgtgttggatgacatctctgatgattgggaatttgaggagacaaaggtaatgcaagctcaggaggagttaagatcaatccgggctaaaatagctgtgttagaagggaagatggctcttgagataattgaaaggaacaaaataattgaagataaacaaaggaggcttgataaagttgagaaggcactgagtgagctccgtactgtctgtattatgtgggccaaccctgcttcagatgttttagtggttgggtcctttgatggctggacaagtcaaaaacattgtaggcacaaggatgaatggggccagactggcaaatggtggttgatctaatgatctgggag

SEQ ID NO: 5713 - DNA, 4018 bp, Zea Mays
cttacctcggtttatcccgtcactatgaattgattcaccttcatggcgctctggggctcagtctgatgacattgtaattaaggcaacaggtggtggagcattcaagtatgcagatgtcttcaaggaaagattgggagtcagccttgaaaaggaagatgaaatggactgtcttgtggctggagcaaactttttgcttaaggctatacgtcatgaagcttttacacacatggatggccagaagcaatatgttcagattgatcagaatgacttgtttcccttccttcttgttaatgtcggatctggtgttagtataatcaaggttgatgggcatgggaaatttcagcgagtaagtgggacaaatgttggtggtggtacgtactggggattggggaggctaatgacgaagtgcaaaagttttgatgagttgctagagttgagccagcgtggagacaatagcaccatggacatgcttgtaggagacatatatggtggtctggactactccaagattggcctttcagcatctacaattgcctctagttttggaaagataatttcagaaaacaaggagctatcagattatagacctgaagatatatcgctctctctgttacggatgatttcatataatattggccagatttcctatcttaatgcacttcgttatggactcaagaggatattttttggtggattcttcatccgtggtcatgcctacactatggatacaatttcttttgcagtgcatttctggtcaaaaggagaggcacaagctatgtttctgcgccatgagggctttctaggagctcttggtgcatttatgagttatgagaagcatggtcttgatgacttaagggtacatcatttggttgaacgcttcccaatgggtgctccatatgttggtggaaagattcacgggccacctcttggagatctcaatgagaagatatcatggatggagaagtttgtgcaaaagggtactcagattatagcccctgtacctatgggagttccagctacgacaggtatgggaggctttgaaaggccgactgctaagggtgacatcttgcggtcagatgcaagtgcagcgctaaatgtcggtgttctccatcttgtacccacattggatgtatttccattgttggaagatccaaagacgtatgaaccaaacacaattgatcttgaccaggatgagttcaagtactggttcaagattttgtcagatcattcgccggacctcgtggacaaggcagttgctagtgaaggtgggactgatgatgccaaaagacggggtgatgcatttgcacatgccttttctgctcatctggcaagattgatggaggagccagctgcttatggaaagtttggtttggccaacctgttggaattgagagaagaatgtctgagggaatttcagttcgttgatgcatatattagcatcaagcaaagggaaaatgaagcttcactggctgttttaccggatcttctgatggaacttgatagtatgaatgaggaagctaggctgcttgcactaattgaaggtgtccttgctgcaaatatatttgattgggggtctcgagcttgtgtagaactttatcacaagggaactataatagaaatctatcgcatgagtcgcaagaagatgcaacgtccttggcggattgatgactttgacatgttcaaaaagagaatgcttactgataggaaggaccaatcatacaaaagagcactgctttttgttgataactcaggtgctgatgtggtccttggaatgcttcctttagctagggagcttttacgccatggaacagaggtagttcttgttgcaaattcgttgccggctttgaatgatgttaccgctaatgaacttccagaagttatagctgaagcctcaaagcactgtggtatccttcggaaagctgcagaagctggtggattgatagtcgatgcaatggctggcatccaagatgatctcaaggatgagacagtgtcagtgccactaatggttgttgagaatggatgcggcagtccatgtattgatttccggcaggttagctcagagcttgctgctgctgcaaaggatgcagatttgttaattttagaaggcatggggcgatcactgcataccaacctcaatgcccgttttaagtgtgatgctctaaagcttgctatggtcaagaatcagcgattggcagaaaaactcttcaatgggagtctatacgactgcatctgtaaatttgaaccagttccttaacaacatggtagcgactgcggaggcaactagcagaagcagcttgattggtgtagccggtgagacagaaacaatcatacagcgtacggcataaccgatccttccataaatattgaagggaaaagtttgagccagcaactggagttcgtgtttaagccagaactagttagcagcctaccatggcgaaagtaacatactcgaaccaatcttggaaagatcctgtcattcttgtgccatgctcgaatcaatccataaattgttcagacactgccgggacaatgccatcactcaaatgctaagaatcagttattagtcttcgcatgtgggcaactataataaatcaataaacgacacagtagtcacgagacatgtaaaacaagaggggatgtgaggcattttttcttcagcatacaccagttgatccactaatcaacaagccgtccatcgctccagaaactaccagctctaggcaaagttgatgtcatacgccttactgccgtccgccctgaagatgccaaagtggcgctcgaactcggggccgggcttgccgtcctcgtcgtacaagtcgaacaggaacacctccacgggcacgccgggccgcttcggcgtgccgacgccgcgcgccgccctctccacaatcttggcgttgtacgctgcggcgttctgcggggtggcggccgggtgccccgcggttggccacccggtctcggtcaccgcgaccggcacgccgtcgaacccctccttctccagcgcggccaccagcgcgtctaccgtggcgtcgaacaggttcgtgtacaccagcgcgccgtcctgcaccggcgccgcgcccgctccgaagagcgcgtacgcgagctgcacgttcgccgggtcgttcacgtggctgatgaaagggtaggcgttcaccatgaagggcgcaccggtgtcggccaggaaccgcagcatggggcggaggacggggagggaggcggcgtcgaacgcgccggcggagggcgggtacgaggcggccagcaccgaggaggcgtgcgcggaggagaccttgaccctgccgtccagccccagggtggcgagcgcggcgtgcaggttccgcatggccggcacgaggtgaggcgcatagaactggttgttgtacagcacctcgttgccgacggcgaggcaccggacgcgctcggcgggggcgtgggccaggaccgcggaccgcagccactgcgccgcgccctcgggccccgccgcggccaggaaggtgaggttctcgttgggcacgcccaccatgaggtcgatgcccgccgcggcgaaggccgggagcacggccgggtccggcaggaagagccgcgccttggtgatcccgttccgcttgagcagtgccgcggcggccgacggcggcgggaggttactgccaacgcggccgtggcagatgccgatcttgcccgcgtcaccggccgccgccgccactgccatcgacgcgacggcgaggaggacgtggccgagaagacacaaggctattctcgtggccattggtgaaggaaagaaggaaggaagaatgccacgctttggttgtgttgtcgccgttaaatagattctgctttggcaagaattgtatggttctggttgcttgtagttgtagttgtggcagatcgaggaagttaaggttgagacttgaggatgggctttgtggcagatccacgtgggtcactgcttggttatgatgcttatggtcttttgatgggctgtttggatcgggttggtagtggccgttgacacacatagccg

SEQ ID NO: 5714 - DNA, 4112 bp, Zea Mays
tacctcggtttatcccgtcactatgaattgattcaccttcatggcgctctggggctcagtctgatgacattgtaattaaggtggtggagcattcaagtatgcagatgtcttcaaggaaagattgggagtcagccttgaaaaggaagatgaaatggactgtcttgtggctggagcaaactttttgcttaaggctatacgtcatgaagcttttacacacatggatggccagaagcaatatgttcagattgatcagaatgacttgtttcccttccttcttgttaatgtcggatctggtgttagtataatcaaggttgatgggcatgggaaatttcagcgagtaagtgggacaaatgttggtggtggtacgtactggggattggggaggctaatgacgaagtgcaaaagttttgatgagttgctagagttgagccagcgtggagacaatagcaccatggacatgcttgtaggagacatatatggtggtctggactactccaagattggcctttcagcatctacaattgcctctagttttggaaagataatttcagaaaacaaggagctatcagattatagacctgaagatatatcgctctctctgttacggatgatttcatataatattggccagatttcctatcttaatgcacttcgttatggactcaagaggatattttttggtggattcttcatccgtggtcatgcctacactatggatacaatttcttttgcagtgcatttctggtcaaaaggagaggcacaagctatgtttctgcgccatgagggctttctaggagctcttggtgcatttatgagttatgagaagcatggtcttgatgacttaagggtacatcatttggttgaacgcttcccaatgggtgctccatatgttggtggaaagattcacgggccacctcttggagatctcaatgagaagatatcatggatggagaagtttgtgcaaaagggtactcagattatagcccctgtacctatgggagttccagctacgacaggtatgggaggctttgaaaggccgactgctaagggtgacatcttgcggtcagatgcaagtgcagcgctaaatgtcggtgttctccatcttgtacccacattggatgtatttccattgttggaagatccaaagacgtatgaaccaaacacaattgatcttgaccaggatgagttcaagtactggttcaagattttgtcagatcattcgccggacctcgtggacaaggcagttgctagtgaaggtgggactgatgatgccaaaagacggggtgatgcatttgcacatgccttttctgctcatctggcaagattgatggaggagccagctgcttatggaaagtttggtttggccaacctgttggaattgagagaagaatgtctgagggaatttcagttcgttgatgcatatattagcatcaagcaaagggaaaatgaagcttcactggctgttttaccggatcttctgatggaacttgatagtatgaatgaggaagctaggctgcttgcactaattgaaggtgtccttgctgcaaatatatttgattgggggtctcgagcttgtgtagaactttatcacaagggaactataatagaaatctatcgcatgagtcgcaagaagatgcaacgtccttggcggattgatgactttgacatgttcaaaaagagaatgcttactgataggaaggaccaatcatacaaaagagcactgctttttgttgataactcaggtgctgatgtggtccttggaatgcttcctttagctagggagcttttacgccatggaacagaggtagttcttgttgcaaattcgttgccggctttgaatgatgttaccgctaatgaacttccagaagttatagctgaagcctcaaagcactgtggtatccttcggaaagctgcagaagctggtggattgatagtcgatgcaatggctggcatccaagatgatctcaaggatgagacagtgtcagtgccactaatggttgttgagaatggatgcggcagtccatgtattgatttccggcaggttagctcagagcttgctgctgctgcaaaggatgcagatttgttaattttagaaggcatggggcgatcactgcataccaacctcaatgcccgttttaagtgtgatgctctaaagcttgctatggtcaagaatcagcgattggcagaaaaactcttcaatgggagtctatacgactgcatctgtaaatttgaaccagttccttaacaacatggtagcgactgcggaggttgtgtcatcttgcagcaactagcagaagcagcttgattggtgtagccggtgagacagaaacaatcatacagcgtacggcataaccgatccttccatgtacggggtacaagaaacgccctttcaataaaacaataacagtgttttctgaaacgatataataaaggctctaaaggctctttccagaaatattgaagggaaaagtttgagccagcaactggagttcgtgtttaagccagaactagttagcagcctaccatggcgaaagtaacatactcgaaccaatcttggaaagatcctgtcattcttgtgccatgctcgaatcaatccataaattgttcagacactgccgggacaatgccatcactcaaatgctaagaatcagttattagtcttcgcatgtgggcaactataataaatcaataaacgacacagtagtcacgagacatgtaaaacaagaggggatgtgaggcattttttcttcagcatacaccagttgatccactaatcaacaagccgtccatcgctccagaaactaccagctctaggcaaagttgatgtcatacgccttactgccgtccgccctgaagatgccaaagtggcgctcgaactcggggccgggcttgccgtcctcgtcgtacaagtcgaacaggaacacctccacgggcacgccgggccgcttcggcgtgccgacgccgcgcgccgccctctccacaatcttggcgttgtacgctgcggcgttctgcggggtggcggccgggtgccccgcggttggccacccggtctcggtcaccgcgaccggcacgccgtcgaacccctccttctccagcgcggccaccagcgcgtctaccgtggcgtcgaacaggttcgtgtacaccagcgcgccgtcctgcaccggcgccgcgcccgctccgaagagcgcgtacgcgagctgcacgttcgccgggtcgttcacgtggctgatgaaagggtaggcgttcaccatgaagggcgcaccggtgtcggccaggaaccgcagcatggggcggaggacggggagggaggcggcgtcgaacgcgccggcggagggcgggtacgaggcggccagcaccgaggaggcgtgcgcggaggagaccttgaccctgccgtccagccccagggtggcgagcgcggcgtgcaggttccgcatggccggcacgaggtgaggcgcatagaactggttgttgtacagcacctcgttgccgacggcgaggcaccggacgcgctcggcgggggcgtgggccaggaccgcggaccgcagccactgcgccgcgccctcgggccccgccgcggccaggaaggtgaggttctcgttgggcacgcccaccatgaggtcgatgcccgccgcggcgaaggccgggagcacggccgggtccggcaggaagagccgcgccttggtgatcccgttccgcttgagcagtgccgcggcggccgacggcggcgggaggttactgccaacgcggccgtggcagatgccgatcttgcccgcgtcaccggccgccgccgccactgccatcgacgcgacggcgaggaggacgtggccgagaagacacaaggctattctcgtggccattggtgaaggaaagaaggaaggaagaatgccacgctttggttgtgttgtcgccgttaaatagattctgctttggcaagaattgtatggttctggttgcttgtagttgtagttgtggcagatcgaggaagttaaggttgagacttgaggatgggctttgtggcagatccacgtgggtcactgcttggttatgatgcttatggtcttttgatgggctgtttggatcgggttggtagtggccgttgacacacatagccg

SEQ ID NO: 5715 - DNA, 1907 bp, Zea Mays
agggtttttggcgtctagcagtccgccagtccctttctgctgcgaacttgcgcgacctgcactgcgtccctctctccactctcccgtctctcgggtctcggctctcgccgtcgccactcgccgcgagcgagatgcagggcctagccgtatcatgccagcttcctcctgctgcggccgcagctcggtggcggccgcgcgcttcttcctctaatagggaagcagttttacaatgttggaagtatgaattaagtcaagaccactatttgggaggccccctaaggataggtcagtctcaaggaagtttgcacagacatcgctctacaaattttctcagaccagctgctgcagctatttcagttgaacaagatgaagtcaatacttatcttccaaaaggtgatatgtggtctgtgcacaagttcggtggaacctgtatgggaactcccaaaagaatccagtgtgttgcaaatatagttcttggtgattcttctgagaggaagctgatcattgtttccgcaatgtccaaagtaactgacatgatgtacaaccttgtacaaaaggctcagtcacgggatgattcatatgcaatagcactggcagaagtttttgagaagcatatgactgcagcaaaggatcttcttgacggagaagatcttgcaagattcttgtctcagttgcattcagacgtcagcaacttgcgagccatgctccgtgctatttatatagctgggcatgcgacagaatctttctctgactttgttgttgggcatggagagttgtggtctgcgcagatgctgtcgtatgcaataaagaagtctggggcaccctgcagttggatggatacaagagaagttctagttgtaacacccagtggttgtaatcaagtagaccctgattacttggaatgtgagaagcgacttcagaaatggttttctcgacaaccagctgagataatagttgctacaggatttattgcaagtacagctggaaacattccaacaactctaaaaagggatggaagtgatttctcagcagccatagttggttctcttgtcagggcacgccaggtcactatttggactgatgttgacggggtatttagcgcagatcctagaaaagttagtgaggctgtgatcttaagcactctgtcttaccaggaggcctgggaaatgtcatattttggggcaaatgttttgcatccgcgcaccattatacctgtgatgaaagacaacattcccattgttattaggaacatgttcaacctctctgcccctggaaccatgatttgcaagcagcctgccaatgaaaatggtgatttagacgcatgtgtcaaatcatttgctactgtcgataatttagcacttgttaatgttgaaggaactggaatggctggcgttccaggtacagcaagtgctatatttagtgctgttaaggatgttggagctaatgttatcatgatatctcaggctagcagcgaacattcagtatgctttgctgttccagaaaaggaagttgctgtagtttctgctgagttacatgataggtttcgtgaggcattagctgcagggaggctgtctaaggttgaagttattaatggttgcagcattcttgctgctgttggtctgaggatggccagcactccaggagtcagtgcaatactttttgatgcattagcaaaggcaaacattaatgttcgagcaatagctcaaggttgcagtgaatacaatattactgttgtattgaagcaacaagattgtgtaagggctctgagagctgctcactcaaggttcttcctctccaaaaccacacttgctgttgggatcattggacctggtttaattggtggagcactccttaaccagttgaagaatcaggagagctgcgtcattttattaaggtagataaaaaag

SEQ ID NO: 5716 - DNA, 2906 bp, Zea Mays
gcgcgacctgcactgcgtccctctctccactctcccgtctctcgggtctcggctctcgccgtcgccactcgccgcgagcgagatgcagggcctagccgtatcatgccagcttcctcctgctgcggccgcagctcggtggcggccgcgcgcttcttcctctaatagggaagcagttttacaatgttggaagtatgaattaagtcaagaccactatttgggaggccccctaaggataggtcagtctcaaggaagtttgcacagacatcgctctacaaattttctcagaccagctgctgcagctatttcagttgaacaagatgaagtcaatacttatcttccaaaaggtgatatgtggtctgtgcacaagttcggtggaacctgtatgggaactcccaaaagaatccagtgtgttgcaaatatagttcttggtgattcttctgagaggaagctgatcattgtttccgcaatgtccaaagtaactgacatgatgtacaaccttgtacaaaaggctcagtcacgggatgattcatatgcaatagcactggcagaagtttttgagaagcatatgactgcagcaaaggatcttcttgacggagaagatcttgcaagattcttgtctcagttgcattcagacgtcagcaacttgcgagccatgctccgtgctatttatatagctgggcatgcgacagaatctttctctgactttgttgttgggcatggagagttgtggtctgcgcagatgctgtcgtatgcaataaagaagtctggggcaccctgcagttggatggatacaagagaagttctagttgtaacacccagtggttgtaatcaagtagaccctgattacttggaatgtgagaagcgacttcagaaatggttttctcgacaaccagctgagataatagttgctacaggatttattgcaagtacagctggaaacattccaacaactctaaaaagggatggaagtgatttctcagcagccatagttggttctcttgtcagggcacgccaggtcactatttggactgatgttgacggggtatttagcgcagatcctagaaaagttagtgaggctgtgatcttaagcactctgtcttaccaggaggcctgggaaatgaactggaatggctggcgttccaggtacagcaagtgctatatttagtgctgttaaggatgttggagctaatgttatcatgatatctcaggctagcagcgaacattcagtatgctttgctgttccagaaaaggaagttgctgtagtttctgctgagttacatgataggtttcgtgaggcattagctgcagggaggctgtctaaggttgaagttattaatggttgcagcattcttgctgctgttggtctgaggatggccagcactccaggagtcagtgcaatactttttgatgcattagcaaaggcaaacattaatgttcgagcaatagctcaaggttgcagtgaatacaatattactgttgtattgaagcaacaagattgtgtaagggctctgagagctgctcactcaaggttcttcctctccaaaaccacacttgctgttgggatcattggacctggtttaattggtggagcactccttaaccagttgaagaatcagactgctgttctcaaggaaaatatgaacattgatctgcgtgtcattggaataactggctcaagtacaatgcttctgagcgacacgggaatagacttaacccagtggaaacagcttctacaaaaggaagcagaaccagctgatattggtagttttgttcatcatttatctgataatcatgtatttccgaacaaagttttggtggactgcacagcggatacaagtgtggcatcccactattacgattggttaaagaagggtattcatgtcatcacgccaaataagaaagcaaattctgggccacttgatcagtacctgaaattacggactatgcagcgtgcctcatacactcattacttttatgaagcaactgttggtgctggcctcccaatcatcagcaccttgcgaggtcttctggagacgggtgacaagatactgcgtattgagggcattttcagtggaactttgagttatatatttaacaatttcgaaggaacaagggcgtttagtgatgttgttgccgaagcaagagaggcgggatacactgaacctgacccaagggatgatctatctggaactgacgttgcccgaaaggtcgttgtcctcgcgagggaatctggtctgaggcttgaactttctgacattcctgtgaagagccttgtgccagaaacacttgcatcatgctcgtcagcagatgaattcatgcagaagctaccgtccttcgacgaggactgggccaggcaacgcagtgatgctgaggctgcaggcgaagtcctgcgttacgttggagcgttggatgcggtgaacaggagcggacaggtggagctacgcaggtacaggagggaccacccgttcgcgcagctctccggctccgacaacatcatcgccttcaccacgtcgaggtacaaggagcagccgctgatcgtgcggggtccgggtgccggcgcggaggtgacagccggtggcgtcttctgcgacattctgcggctggcgtcttacctcggtgctccttcttgagcttctactagctacaggtgccagtttcaggaagcagacggagacacactgccatgcatgatgcctcccctccgtgtttgggctatgctcacatgttgtaatgttgttctgaataagtgccaggaaataaggcctctagcgtatgtcgagagagagaggtcgttcggctttggaatagccgattaggtgttgtttttgctgcatgatgcaaatgaattatcgtaccaatgaagggatgtttgcttgtgcctactgccatgtatgctcataaaaaac

SEQ ID NO: 5717 - DNA, 1415 bp, Zea Mays
gtctggatgagcttttctaagaaacctgcttttggaaaagctccacccgcagaaactcaaacagacatgcaagtgattctccagatgtcgggaacccgtgagaggccacaaggaagaagataatgcgaagggatgtcaaataagctgggtttgaaccttggatgttagcaagttcagggatgtgaaactgcaaattaatagttccaggacttacatgcatctctggacaagctcaaagatgctgatgttctctacccactctggaagaattaaaatgtttcctgaaagaaataacaccagaggacaattgggctcctctcaagagaatgcccgcaagatctatccttaaaaggacaatcagtcaaaggaagatcaaaagtaatgctacattaagcaccatcaatgaagaaaacatagatgatgctgccaccatggattctgttgcatcaggaaagaggattataaactcgaagtttgcatcagagaactcactggaagttagtggtggaacagaaattactttggatgctttggctgcttacctaaaatatcttgaaggcacaggaaatgctagttggcaagagttgcatgataaagtgcgtttagctgaaaccagatatggtgcttcattctacatcttgtttggtcctgcaattcaacttggagtcatatctaggaggaaagcttacactgagactatccaatatgaaaaagatcgcaatgcaggttttctatcaccatttgggtactcaacacctacagtaacatcagcagtagatgctatatgttcaatggagtggtattggctcttggcatcaaaatcccaagtatgcatcgaggggaaatattctataagaatttggagatggaagggttatcttgtacagtacacctttcttggcaacgaaggtccacctgttcttcttgtgcatggttttggagctttcctggagcattttcgtgacaatatagacaagattgctgctacgggccaccgagtttgggcaattactcttgttggctttgggaaatcagagaaaccaaatgtcaactattcagaacttttctggtctgaactactgagggattttattgttgaaattgtgagggagcctgttcatcttcttggcaactctattggaggttatctctgtgctattgctgctggtttatggccttctcttgcaaagtctctggttcttttaaactcagctggttcagttgttccaaattactccttcatcccactgagtgaagaaagacgaacatcatggatttccaggttgcaggcacagctccttttgctcttcttgaggtcaagggcagaaggcattcttaaagaatattatcctacaagaactgaacgggtggacaagccacttctggaccagattaaggtttccttgacaaataaa

SEQ ID NO: 5718 - DNA, 2397 bp, Zea Mays
tgatcattgagcttaagagtttacatgtctcgtttttacagaagaagaagttgaatatagagtgcgtgatgttcttgccaatgttgaatcatctttatctaatgggtcattctcatggggaagccctcccaagatagtggcttggagtgccccattgtatgactataagaatctgggagcagtaccgacatcacatgacgattttttaaagaaaaaattaccattggccacaccttcttgctgcggcgaccttgcctgctctaaatttggagttagacacagataagcccagaagcaggtctggatgagcttttctaagaaacctgcttttggaaaagctccacccgcagaaactcaaacagacatgcaagtgattctccagatgtcgggaacccgtgagaggccacaaggaagaagataatgcgaagggatgtcaaataagctgggtttgaaccttggatgttagcaagttcagggatgtgaaactgcaaattaatagttccaggacttacatgcatctctggacaagctcaaagatgctgatgttctctacccactctggaagaattaaaatgtttcctgaaagaaataacaccagaggacaattgggctcctctcaagagaatgcccgcaagatctatccttaaaaggacaatcagtcaaaggaagatcaaaagtaatgctacattaagcaccatcaatgaagaaaacatagatgatgctgccaccatggattctgttgcatcaggaaagaggattataaactcgaagtttgcatcagagaactcactggaagttagtggtggaacagaaattactttggatgctttggctgcttacctaaaatatcttgaaggcacaggaaatgctagttggcaagagttgcatgataaagtgcgtttagctgaaaccagatatggtgcttcattctacatcttgtttggtcctgcaattcaacttggagtcatatctaggaggaaagcttacactgagactatccaatatgaaaaagatcgcaatgcaggttttctatcaccatttgggtactcaacacctacagtaacatcagcagtagatgctatatgttcaatggagtggtattggctcttggcatcaaaatcccaagtatgcatcgaggggaaatattctataagaatttggagatggaagggttatcttgtacagtacacctttcttggcaacgaaggtccacctgttcttcttgtgcatggttttggagctttcctggagcattttcgtgacaatatagacaagattgctgctacgggccaccgagtttgggcaattactcttgttggctttgggaaatcagagaaaccaaatgtcaactattcagaacttttctggtctgaactactgagggattttattgttgaaattgtgagggagcctgttcatcttcttggcaactctattggaggttatctctgtgctattgctgctggtttatggccttctcttgcaaagtctctggttcttttaaactcagctggttcagttgttccaaattactccttcatcccactgagtgaagaaagacgaacatcatggatttccaggttgcaggcacagctccttttgctcttcttgaggtcaagggcagaaggcattcttaaagaatattatcctacaagaactgaacgggtggacaagccacttctggaccagattgtaagagcttcatatgatcctggtgctgcaaaagtccttgagagtgtattcaacttcaatctttcaattcctcttaacttcttatttgattcttttggagggaagatattagttatccagggtatgaaagacccccttacaaaatctgaggcatttgtcaccatgctccgagaacattgcagcaaggttcaaatcagagagttaaatgcaggtcatgctccacatgatgaagttccagatgaagtaaataccatactatgtaaatgggtggagcagattgaagttaagccagccctggagaagaccaaggcaatataggtcagtaggtcatcactcactcgatcagtttcggccaacacgtcgatttgctgcatatacacgtattggcgccacacgcgtggatggcattaatttgagcatcatggctgacaggtgaaacagtggagcaagctaacaataaaacctgcgtcagttgatgtgtatctggtcatcactgtttccgtcaactgaaatactactacgaatgagtatctagccactcattgacaaatgctgctaacgtgtactggcatgctcatgagatcacatcagcaatgttctggggtttggtcacttggagtctgccactgcaaataccttcattagtacgtattgtgcaacctgctgcaactttgattaatccataactgtcacacccggatttcg

SEQ ID NO: 5719 - DNA, 2872 bp, Zea Mays
ctgctctgttgcgcgtttccctggcctctgctgcgaacctgcaggtgcggacttgcggctgcggcgccccactgcagcactgctgtactgtactggccgcagcgttcgccgtcctccgccacagaaaattcacgcacgattccgagcagccgccctccgccacaatttcgccatgggcgcgccctagccccgcccttcttatccccgctcttccccgcctatggctgccgctgctacagctgacgcctccgcgcagcccctcccatggctctgcttgcgctacggttcgggccgcttctccctgccccgccccaccaccgtcgggtcctgcggaaccgatgccgagtccggatcgtcgcctccaatgcccccacccccgtgagggacgggggcgctgccgcggtggtgtggtttaagcatgatctccgcatcgacgaccacccgggcctcgccgccgccgtctcggagccgcggcgccccgtcgtgccgctttacgtcttcgaccgacgcatcctcgccggctattcagataaaatgctggaactgctgctatttgctctgaaagatcttaagatgacgttgaaatctcaagattctgatttgctcataggcctgggaaacgctgaagatgttgtgctgaagcttgtgaatgaggtcactatgcaaggtacaagcaggtctcgtttttacagaagaagaagttgaatatagagtgcgtgatgttcttgccaatgttgaatcatctttatctaatgggtcattctcatggggaagccctcccaagatagtggcttggagtgccccattgtatgactataagaatctgggagcagtaccgacatcacatgacgattttttaaagaaaaaattaccattggccacaccttcttgctgcggcgaccttgcctgctctaaatttggagttagacacaggttctctacccactctggaagaattaaaatgtttcctgaaagaaataacaccagaggacaattgggctcctctcaagagaatgcccgcaagatctatccttaaaaggacaatcagtcaaaggaagatcaaaagtaatgctacattaagcaccatcaatgaagaaaacatagatgatgctgccaccatggattctgttgcatcaggaaagaggattataaactcgaagtttgcatcagagaactcactggaagttagtggtggaacagaaattactttggatgctttggctgcttacctaaaatatcttgaaggcacaggaaatgctagttggcaagagttgcatgataaagtgcgtttagctgaaaccagatatggtgcttcattctacatcttgtttggtcctgcaattcaacttggagtcatatctaggaggaaagcttacactgagactatccaatatgaaaaagatcgcaatgcaggttttctatcaccatttgggtactcaacacctacagtaacatcagcagtagatgctatatgttcaatggagtggtattggctcttggcatcaaaatcccaagtatgcatcgaggggaaatattctataagaatttggagatggaagggttatcttgtacagtacacctttcttggcaacgaaggtccacctgttcttcttgtgcatggttttggagctttcctggagcattttcgtgacaatatagacaagattgctgctacgggccaccgagtttgggcaattactcttgttggctttgggaaatcagagaaaccaaatgtcaactattcagaacttttctggtctgaactactgagggattttattgttgaaattgtgagggagcctgttcatcttcttggcaactctattggaggttatctctgtgctattgctgctggtttatggccttctcttgcaaagtctctggttcttttaaactcagctggttcagttgttccaaattactccttcatcccactgagtgaagaaagacgaacatcatggatttccaggttgcaggcacagctccttttgctcttcttgaggtcaagggcagaaggcattcttaaagaatattatcctacaagaactgaacgggtggacaagccacttctggaccagattgtaagagcttcatatgatcctggtgctgcaaaagtccttgagagtgtattcaacttcaatctttcaattcctcttaacttcttatttgattcttttggagggaagatattagttatccagggtatgaaagacccccttacaaaatctgaggcatttgtcaccatgctccgagaacattgcagcaaggttcaaatcagagagttaaatgcaggtcatgctccacatgatgaagttccagatgaagtaaataccatactatgtaaatgggtggagcagattgaagttaagccagccctggagaagaccaaggcaatatagcaatttcatgagagaagccaattgtaatcaccttgttgaactattctccagcaaggtgagctgctggaacttttagtgaaggatttgaactggatgtgttagtattcttttgttatagtgcagccgtgaccctctagagcttgatctgggttctaagtttaaacgtaggatcagagcagacccggacgcctggtttcaatatcagcacatgccatcataggctcacgacgacgaagaggtaaggcggttatttacgccgatattttttgagctgtcagtcatcacagtccctagtgcggctgtgttaatcagaagacactggattatatacgtatagattatataatagagagaccaagttcggtgtcgtagtttgtcaaatgctcccctttctgcttgcgtattgtaccccttcttttccgtactgaacaattcgtgctcggttgttcagtatggaacacacttgtcgacac

SEQ ID NO: 5720 - DNA, 3353 bp, Zea Mays
ctgctctgttgcgcgtttccctggcctctgctgcgaacctgcaggtgcggacttgcggctgcggcgccccactgcagcactgctgtactgtactggccgcagcgttcgccgtcctccgccacagaaaattcacgcacgattccgagcagccgccctccgccacaatttcgccatgggcgcgccctagccccgcccttcttatccccgctcttccccgcctatggctgccgctgctacagctgacgcctccgcgcagcccctcccatggctctgcttgcgctacggttcgggccgcttctccctgccccgccccaccaccgtcgggtcctgcggaaccgatgccgagtccggatcgtcgcctccaatgcccccacccccgtgagggacgggggcgctgccgcggtggtgtggtttaagcatgatctccgcatcgacgaccacccgggcctcgccgccgccgtctcggagccgcggcgccccgtcgtgccgctttacgtcttcgaccgacgcatcctcgccggctattcagataaaatgctggaactgctgctatttgctctgaaagatcttaagatgacgttgaaatctcaagattctgatttgctcataggcctgggaaacgctgaagatgttgtgctgaagcttgtgaatgaggtacaagcaggtctcgtttttacagaagaagaagttgaatatagagtgcgtgatgttcttgccaatgttgaatcatctttatctaatgggtcattctcatggggaagccctcccaagatagtggcttggagtgccccattgtatgactataagaatctgggagcagtaccgacatcacatgacgattttttaaagaaaaaattaccattggccacaccttcttgctgcggcgaccttgcctgctctaaatttggagttagacacagataagcccagaagcaggtctggatgagcttttctaagaaacctgcttttggaaaagctccacccgcagaaactcaaacagacatgcaagtgattctccagatgtcgggaacccgtgagaggccacaaggaagaagataatgcgaagggatgtcaaataagctgggtttgaaccttggatgttagcaagttcagggatgtgaaactgcaaattaatagttccaggacttacatgcatctctggacaagctcaaagatgctgatgttctctacccactctggaagaattaaaatgtttcctgaaagaaataacaccagaggacaattgggctcctctcaagagaatgcccgcaagatctatccttaaaaggacaatcagtcaaaggaagatcaaaagtaatgctacattaagcaccatcaatgaagaaaacatagatgatgctgccaccatggattctgttgcatcaggaaagaggattataaactcgaagtttgcatcagagaactcactggaagttagtggtggaacagaaattactttggatgctttggctgcttacctaaaatatcttgaaggcacaggaaatgctagttggcaagagttgcatgataaagtgcgtttagctgaaaccagatatggtgcttcattctacatcttgtttggtcctgcaattcaacttggagtcatatctaggaggaaagcttacactgagactatccaatatgaaaaagatcgcaatgcaggttttctatcaccatttgggtactcaacacctacagtaacatcagcagtagatgctatatgttcaatggagtggtattggctcttggcatcaaaatcccaagtatgcatcgaggggaaatattctataagaatttggagatggaagggttatcttgtacagtacacctttcttggcaacgaaggtccacctgttcttcttgtgcatggttttggagctttcctggagcattttcgtgacaatatagacaagattgctgctacgggccaccgagtttgggcaattactcttgttggctttgggaaatcagagaaaccaaatgtcaactattcagaacttttctggtctgaactactgagggattttattgttgaaattgtgagggagcctgttcatcttcttggcaactctattggaggttatctctgtgctattgctgctggtttatggccttctcttgcaaagtctctggttcttttaaactcagctggttcagttgttccaaattactccttcatcccactgagtgaagaaagacgaacatcatggatttccaggttgcaggcacagctccttttgctcttcttgaggtcaagggcagaaggcattcttaaagaatattatcctacaagaactgaacgggtggacaagccacttctggaccagattgtaagagcttcatatgatcctggtgctgcaaaagtccttgagagtgtattcaacttcaatctttcaattcctcttaacttcttatttgattcttttggagggaagatattagttatccagggtatgaaagacccccttacaaaatctgaggcatttgtcaccatgctccgagaacattgcagcaaggttcaaatcagagagttaaatgcaggtcatgctccacatgatgaagttccagatgaagtaaataccatactatgtaaatgggtggagcagattgaagttaagccagccctggagaagaccaaggcaatatagaaacaaatcagcagtgcttccaccagtcatgagccctggtgaccatccgagaaatctttgggcgcgcatcagtgaggccataaaacaaaagcgctgattgggatcgcccaaccaacgcaccttatcagctttccccctctctcttggtttcaccaaatctgacggtgacgcgcccggtgcatggcctccggaagatgtcaagttgcaggtcagtaggtcatcactcactcgatcagtttcggccaacacgtcgatttgctgcatatacacgtattggcgccacacgcgtggatggcattaatttgaggtataagctatataaatatatttttgttccattcatctgttccttgaaaaggcatcaatccgatggggtgcgtgtttaactcgagcgagattcatttggtggctgcttagcatcatggctgacaggtgaaacagtggagcaagctaacaataaaacctgcgtcagttgatgtgtatctggtcatcactgtttccgtcaactgaaatactactacgaatgagtatctagccactcattgacaaatgctgctaacgtgtactggcatgctcatgagatcacatcagcaatgttctggggtttggtcacttggagtctgccactgcaaataccttcattagtacgtattgtgcaacctgctgcaactttgattaatccataactgtcacacccggatttcg

SEQ ID NO: 5721 - DNA, 811 bp, Zea Mays
aactgcacgtctcccgctttgtgctattcccgcagccagaaaaccctaacttcccggccgccgctttcctttccctcgatccacagctcgcgccgttcctgcaagtgcgcacccatcgtcccacctacgcactgccgcccaacgatctacgagctgccatggctaactcggcaccgggaggaatgaggtcgttcctgcaggccgtgtctacggtcaccgaggaggcgccgacgccactccgcgtcgtccagatggagggcctggctgtactgaagatcatcaagcactgtgaggagtttgcgccagctttagttacaggtcaattgcttggtttggatgttggtagtgttctggaagtgaccaactgttttccgttccctatcagggaagaggatgatgaagcagatgcagatggtgccaattatcagcttgagatgatgaggtgtttgagggaagttaatgttgacaacaatactattggatggtaagctaagctaatttcattcagttgatttagaaagtcagtggtggctcgagtttttttttacttgcacattgacacaaaatccatcaacttggttacttgtggattatatattcaatgatcttggacaagcaaatagtaactcttgagtatgtatgactgatatgttcacaattgaccttagttttcttggccttaagtgtcttttcatatcactttaattttactatgtttttatgttatttttattatgcagcggaacaatataggcatgtacgaagtagttttaaatgaaattgtgagatacattttctgttatgtggtaca

SEQ ID NO: 5722 - DNA, 1001 bp, Zea Mays
agaacagaaaccactgcaatattggagatggagagagagcatcaggagatgtgtgtgcattgtctatgacccatctagatctagtcaaggcgtgctagctctcaaagccttaaagcttacagactcgtttatggatctttaccgtaacaatggtttaactggggagaagttaagggagaagaaattgtcctgggttgatatttttgaggagataccaataaaagtttccaactcagcgcttgtcagtgcctttatgaaggagctggaacctgagtcacctgttacccagtgtgacctggaccgacttaaattgtcaaccgccccctttatggaaaggaacttggaatttctgattgggtgcatggatgatctttcatcagagcagaacaagttccaatattataaccgcaatctctcaagacaacagtcacagcagcaggcatggcttcaaaagagaaggcaggagaacatggcgaggaaagcagctggtgaggagccactaccagaagaagatccatccaatcctatatttaagcctattcctgagccctcacgattggagggctatctagtaactaatcagatctccagttactgcaaccatatcaacggggttgctggtcagaatttcgacaggctatacctgatgaaggccttgcatgaggattagaagactgggctgtgatgaatgctgttagaattagcttgtgatactgctcaaaatcgtaattttgtgatgtacctttacatggggcgtgcctgtcctctacttaatgtttccatggaccagatggttagctcgtgatacttaatgtacttgcatatgtatgcgttgccgtataaaccaattttctccattagtatttttgtgacgctcagtttgaagtccatagtgtagcttgttttcgttctcgatttgggctgttgtcaaatggtaggtactgttggagttatctatctcgtcttatcagtttaaaggttttaggtttaacaggtagtgc

SEQ ID NO: 5723 - DNA, 4855 bp, Zea Mays
ccgctccgccgccggcactcaccccagctgcactcccgtgggccgtgccgccgtggcacgccggcgcggcggatgcagtcgccacgaatcaggacaagcagcaggcgccaaaacccaaaccaattccctcccttccgttcctactacgatacccacctcgacgcgccgtctcgccggcgacgtcactggcaagtaccaaactgcccctacctcctcccgcttagttctataaatacgggggggtcgtcttcctccacaagattctgccaaaagatcctctcggatgcccccgcccccgcccacccatttcgccagtcgccatcgagctctcgcttccgccgcccgctgccgctctatcaccccggtgctgagccctaggatgtgactggcggacgtctctatggccgagccgtaggtggaggcggcacctcggcgccgtgggagatggaggacgatgacaccgagggtgtaggcgagagcacctgtccccccgccgccgaccgaggaggctcctcctcggccggcggcggcggcggcgactcgcacagttacactgacatagagaaggaggtcttcgaccgtctcatggagaagagaatcccggaggtcgtcgcggacccggtggccttccgcgaagagctccgccgccacttcgagcgcctgccgctgagctacgccgtcgatgtgaacgtcgacaaggcggaggacgtgctgctgcaccggaggattctcaacgagtgcgctcaccctgaaaatcgccccatcttccatgtgggcttcctgaactgcatcccgccctcggtggatccacagtataacactcagtccatctctacgagcgaaaacggtaattgtgggggttctcaggattccactttgagaaaatttgagccatgcgaagggatcgaggacctcagtttaactggacaaaaagttgtggttgactctgtggccagttcttcgaggggagatgaagaaatcctccatgttcatgaaattattttttctaccattgacaaaccaaagctcctcgctcagctatctgctttgttgtctgaagttggactgaacatccgtgaagctcatgtcttctcaacgactgatggcttttgtttggatgtatttgttgttgatggctgggatacaaaggagacagatactttgctacagattctcaaggagacagcggcacgaaatcatgcctcattatcaaacccaaccaattctgcagcctcagaaagagtactggaactacaagagaagattggtgattcaaatattgacaggaattttctgcagattggggagaagattgcatctggatcttccggggacttgcatcgaggaacttatcaaggtatggatgttgcagtaaagttcctcagaaccgaacatgttaatgactcgtcaaaggtggagtttttacaagaaataattattctaaagagtgttaatcatgataatgttgttcgattctacggggcatgcacaaagcagagaaaatatgtcatcgtgacagagtatatgcctggaggcaatctgtatgattttcttcacacgctaaaaaatactttggatctcccaacggttctcaggattgctatcggcatctccaaggggatggattatttgcaccaaaataacatcatccatcgggacttgaagactgccaatttgcttatgggctctgattatgtatgcatattgttgagtctgtatttactaattactaattcaaggttcatcaagcattgggtggtcttggaaaataggttgtgaagattgcagactttggagtctcaaggaatccatctcaaggtggagacatgactgctgaaactggtacctacagatggatggcacctgaggtaataaaccataagccgtacgatcacagggcagatatcttcagctttgctgtggttctgtgggagctggtcacttcaaagataccatacagaaatctgacacccttgcaagctgcactgggagtaaggcagggaatgcggttggagatcccgtcatgggtcaatccacaactgtctaaactgattcagcgttgctgggacgaaaatcctaacctgcgcccctctttctcagagatcactgcagagctggaaggcatgttaagggatcatcaggcctccaagggaagcaacaaacattcgaaggcaaaggcacacaaaaaatcgcagagagaggcagaataacgaggttgtcagttaccaccttgtgaaaagcttagtggagcttggctatcatcgtccaagattctgaggctactacaaagatgctgctagtgtacaattgtcaaatattgtatatgattggtgtgtgtgtgtgtttctattactcccaaaaacactatatacgggagaagcgtcgacaatacagcgggacaagcaaagacacggaatccttgtacaaaatggcttgcaagcagcataaaatgccctctagtttttgtatacaaaacatgaaaaatatatgtgcatgagccgtgcgtgcttcctgtgattctgtatctccatgaatcctgttctttgattctacatctcctgccaaagttacatttcttcttgaatctgaaagtagctctgacgttttctttctgtttcatgagccattgcattcttgggcctggtctgtttgctctataagggcagtaggagaaagggcccacataacgatcatgggccgttatcgtatttacttacgtgatttgccgtgctctcccgtcttctcgcgatggggagcaccggcgacacgacgatggccgaggcggaggcgccggcgccggtgggtgactacgagctgctggagcgcctgggggggcgtcccccgtacacgtccgtgtggcgagcggtctcccggtccaccggcacgcccgtggctgtgaagcaggtgcggctcaccggcctccccgcgcgcctccgcgacagcctcgactgcgaggtccgcttcctcgccgccgtcagccaccccaacatcatccgcctcatcgacgtcgtccagacccagagctgcctttacctcgtcctggagctctgcgagggcggggacctggcggccttcatccggcgcaatgggagcgtagacgagcgcgtggccagaaattttatgaaacagatcggtaatcaagttgttgatccatgattgtttgactcaattgtgtcgtccaccgtctggggatgtgatctgtgagaaatggcccctgtggcaggagctggcttacaagtgctgcaccggcaccatgtcgtccaccgggacttgaaacctcagaatatcctgctctcttctccgagaagcagcgatgcgatcctcaagatatctgattttggtcttgcaaggttccctgcagggttcttggactagtcttttgaaatgaaatctaaataagaaaaaaactgaaaacatggacggattagtattttgacctagatgagattccctgcaggtttcttggacccggggagtacgcagacacatcttgtggttcttgtttgtacatggccccagaagtgatgctgtttcaaaagtacaatgacaagacatgtggagcatcggcgcgatcctatttgagctcttgaatggctacccgccattctatggcagaagcaacgtgcagctgcttcagtacatcaacagaagcacgtctctcccgttctcggaaccactggcgtctaccttaggccccgattgtgtcgatatatgcaccaggctactatgcactaatccagtgaagcgtctgtccttccaagagttcttggaccaccgcttcttcagagtatgagtgcccaagccatggggaccaccgggcagcgacatgatctgaagaacatcaagaagtttcttgtccttggagtgctgactgactctgttataaagcgttcagaaattgatgcccagtgctcgtcgtcttggttttctgttcgcgtccatttccttctccaaagagccatgtggccaacgtttcaatctgttgtgatctggtctgtactgtttcaatctgctaacagtaggagttttaaagatatttagtccaaaacagaactccatcttttattcaaagcggcataaactatcccattttattgagcaaacatatgcctatcctttccttgtaccaaagaaaaaactacagggagacaaacaaaccacagaaatgcgaagtggctatcggttcagccactaaactttcaattcaacatcaacaataacccagacaccatgctctcttacgctcggctcgacttctaataaaatgcaatgaatcaagtaccagcatgcatcagttcacagcagccacttccttcagtgactccactgtcttcaagacttcctcccccatccgcttgcatccaaccagtgtctgccaattgataacatgagccactcagaacgagatgaatcaaaattcaaatacaattcatgacttcgcaaactagccactattttcttccacgagactacgaaagagttaatatacttgaggcactatgaaccagagccaacaaagatactatattacactacctgaatgtttgactaatgaggatcttcataccttgtctaggtgaggaccaagtacttgacattaaacatgtagagtataaagctaaaacgctttagccttttttttaatagaggtgggaatagaacttcattaagagaactaaacaatgcaaaagcatgaatgttggattcactccaccaaaattcatgggatggactcatgatggaccatcacaatctcaactaaggatggggtgattcctcaaaccagacacactcgtaatccattgataatggttctgcaagaaaatctatcttactgttccaggagaatatatgt

SEQ ID NO: 5724 - DNA, 1403 bp, Zea Mays
ttccctgggaaataaattgccacgaaatttaaacaccaacctctgatttcctctcctccgtgtcgccggccacccactgatccatccactcgccccaatggatcacgccgccgagcacctcgaccccaccgccccggcaccctcgtccgcctcctcctctgctgccgtcgcggaggtaaatgcgtggctggcctccctcgccgcggatgtgggagggcgaggcggtggcggaggtgcggcggcggagctgtcgctgggtcccgaccccacaccgcgcggggtggcctacctccgcgcgctggcctctgcttcgcaggggcggtcccgcgctgccggaatcgcggctgcggggctgcgtgcgcaggcggccgagtaccgcgccgaggcggcgcggttgcgggaggctctcgagcgggcggggctcgcgagggacgcactcccaccacctgcagccgcggcggcacgagccgttgctgcagtcgctaacctcctcgccatccgtgacaccgagatgagcagctttgtagtggcaagtgcagacttgtctctgaggcgagcagaggtggaggagaagagggacaaagtgcataaggagtccaaggcactacttgactacacacggaaggccataaacaagcttactgagctgaagaagatgctggagaaatttaagaatgatgtggagaagcaacaagtggagcaaatgactgattggcaaacaaagcttgttatgatggactccaaggaacggcaatatatcctccaagtctcaaattataaggcaatgcttaatcgagtgggttatacgccagagatcaatcatggtgtgttgatggaaatggctgagcataagaaggatctcgagaggaagactaaacccatagctgacacattaaggagctaccaggatttacctccagataaagctttagctgcactagctatagaggacaaaaagaggcagtatgcagccgcagagaagtacctagaagatgtgttgcaatctgctctaaccacaagtggcctataatgtgcatagttttgtttgctgtgtcttatatgttgccatcgattgaaggtgaaatggaagcagatcgatggtatcctacaaatgtgaagacgaaatcctacgagtgcgagctctactatatgtataaattgtgatgcacatcttgtttaaatgttctgataacgctattctaccccttggtgctaacagatgttccttgtcttgccttaccctgtttcctgtaaactgtaaatataatagtgaagaaaatgtctacttgactgtaaaatatattttcatttgcagtcttgtttcctgtaaaaacggttcacattctcttaagggtaccgtagaaaattccttatataattaaaagaatgttgccgaatcactc

SEQ ID NO: 5725 - DNA, 2454 bp, Zea Mays
acccgaaacccgccgcaacaaaactaacgactcccgcacgcccgaatgggtcgcaagtcgcaacccacgctggctctctcccggctccgaactgctaagccccccgccggatcgggttgcgggtcgccatccccgacccagatccaccacagctcgccgccggtcgccgccgccgcagagtgggtgatagtgtacgtggtaacatgctggagccaacagcaatggaagtggtcgttgctggctcagtgagcaatgcagtggtgcctgcgcctgtggttcacaacccacgggcacgcaagctgcggtctgcagtttggcaggacttcacgaaggagcgtcgtgccgatggtaactgtgtggctgtctgtaaccactgcaagaagcagctcacggcaactagccggtcaggcacaacgcacctccgcaaccatctcgcaatctgcaccaccacctccacacggcgtgctggtaagcgccggaagcttgttgtgcgccgtattctccacaacaaatcctccatcgatgggcgctcgggtgagggtcacgcctcaggtgaggacaatgataatgagggcacacactttgatcaagaactcagccgccgagaccttgtgcacatgattgtccagcatggctaccggttttcgattgtggatgatgtgggcttccaaaagtttgttaagaacctccagcctcagtttaggatggtgtcgtatgaaacagtgagggctgatagcatggaaatatatgaaggtgagaaacttaagctacatgatgttctctttaagatcccctgcagggttagcatatcagttgacatgtggcggtcaaatacacagatggaatacatgtgcttgacttgccactacattgatcatgccaatgatgagtggaaagtcaggaaaaaaattctcaactttgtgcatatggaggcaccttttacacttgatcagatggttaatatcattgtagagaagttgcatagttggggtattgacagaaagctagctgctgttgtgctagacaactgcagcagcggtgaaattgttgctagagagcttcacagagttttccaggctcggaggcttctattgaatggggatttgttccaagtacgctcttgtgcacatattctaaatctcactgtccaagaaagctgggaacgggcatctgatataactgatagagttcgcaagatgattaactatgtcaagtttgaaaggttccaaaagtttcaggatattgcaaaggtattgcgtatggatcaaaagctgctagttattgattctcctgataactggccgtctacgtacttaatgtttgactctgcatgctactatcaagatgtgtttgtgcgcctgacagaacaggaaggtcattatgatgtttttctgtctgctaatgactgggctgatgtgaaagccctcactgaaatactggacgtagtctatcatgctatggagaagtttcctgtagaaaacccaactgcaaacctctatttcaatgagatgtgtgagatccacgtgcttttgaaaacctggtgcaagagtccatctactgttgttgccaaagttgctggccagatgctttctaagtttgaaggttactgggatctcactaggcctgtaatggcatttgcatctattcttgatccccgttacaagatgaagtccctcgaatacttttttcggctcatttattctgatgagcaatttacagcaaagacaatgatagatgtcatccagaatacctttcacaatctgtataatgattataaacatcagtcatcagactcatggaagaatccatctgttctctgttactctagaaacagtaattcttgcatgggctctgtgtacagcaatggggatgattctaagaccttttcgcgtatcacattatctgatgctcgacggggacttgatcagtatatacaagagacctcatcagggcaatccttgaagtctgacttggagatgtatctcgaggaagcagtttttcgtcaaaaagaaggaaatcaggataattttgacattctgggatggtggaagtcctttgccgccaagtatcctgtactttcacaaatggctcgtgatattttagctatccctgtatctatcatccctttggacagtgaagcccgtacactaaatgagtatctcagtactatggatccttcaacggttcagggattagtgtgtgcacaagattggttacgggatgacccagaagttgttgctggttcaggtggtcatggagatgatggagtaccgcgtggtgacgaacttattgtggtgccaaaatagagtggagtattctgatacaagtcttttgaagaagacgtgggcggcgatggtaaactacataacttattgcgcaagaacatatagtactctgctgtaaatgcatctttctagttctagaggctgatatgtacaatgaacctgttggggg

SEQ ID NO: 5726 - DNA, 2318 bp, Zea Mays
cgagagttggcccagcagcgagtgatcacttgaggagctcaacaagtgagtacatcgaggaagaatgatccgcctctagttcttgggatccacctctctctcttgtcttaggctcggagaccttccgaagacgagaagctagatatggctgcgctggcccgcggcgcggccatgaaaggcggcggcgacaagaataagaaggtggcggcaggtggcaggttgctgtccgtcgtcgccgtcggctgcttcctcctcttcgtcgtcgtcgtcttcacgctctcctcccgacgctacgccaccctcgtcctcgacgctcgtgatcgtgagtgcgcttctgccttctcgatctgcttccgatctgagcgacccacgtactgtcgtgcgcgcgtgcgtgtgtacctgcaccgttatgctatacatatatgattttgtgggcatcatatcctcgtgcatgcatcggctctcaatcgatcaatgaactgatgatcacgagccacttacacccactgatttgtacgcacttgttctttcaggccgaggtgacttccacccgtcgcagctgcaggggggcagccacggcggcggcggcggcgagggtgacctcaagcatctgcttgttgctcagcggagcaacgacgacgacgacaaggcggtcacggaagcggagctggaggaatcagggatcagaggaaagatcagcatcaacgtcgtcggggccggggggcaagcggagatggaggaggcggcgccagagagcagcgccgccgccgccgccgccgccgacgcgacatctaactccgacgacgaccgagcaaggccaggagacatcatgacacgtgcagctgcagcagcctccgtgaagcagcagcggcaaccgctgtgcgacctttcgggctcacgagctgacgtgtgtgacctcaccggcgacatccgcttgaatgccactgcctccgaattcatcgtggtggacccagcggccgcggacgacgggccaacaacggcgtacgagatcaggccgtacgcacggaagggcgacgccacgagcatgggccgcgtcaccgcggtcaccgtgcgcgtgcgggcgacggccgacgcggcgccgcgctgcacggtgacgcacgccgagccggcggtcgcgttctccgtcggcgggtacacgggcaacctcttccacgacttcaccgacgtgatcgtgccgctgtacggcacggcgcagcgctaccgcggcgacgtccgcctcgtggtcaccgacgcgggctcgtcgtcgtcgtggtggctggccaagtacgacgcggtgctgcgcgggctgtcgcgccacccgccgctccacctgcacctcgccaaggccgcgggcgaggtgcactgcttcggccacgtcgtgctcggcctgcgcgcgcgccgggagctcatggtcgagccggacccggacccggaccgcggccgcccggacggggtcgggatggccgacttcgcgcggttcctccggcgcgcgctctcgctgccccgggacgcgcccacacgccccgccgccgccagcagcgacgacaggaggaagccccgcctgctggtcgtctcccgccgcggcacccggcggctgctgaacgcggacgccgtcgcgcgcgtggcggaggaggtgggcttcgaggccgtcgtgagcgagctggaggtgagccgcgacgccgcgggcgtgggccggctcatcaactcgttcgacgcgctggtgggcgtgcacggcgcgggcctcaccaacatggtgttcctgccgccgggggccacggtggtgcagatcgtgccgtggggtggcctgcagtggatcgcccggatggacttcggcgatccggcggatgccatggggctcaggtacatccagtacgagatcgccgtgcacgagagctcgctcgcagacaagtacccgagagatcacgagatcttcaccaacccgaccgcgttgcacaagaagggcttcaagttcttgaggcacaccttcttgatcggacaggatatcacactcgacgtcgatcgcttcagggtggtgctactccaggcgctccggaacctcaccgagtaatagctatcgcggctgaaggacgccaccggccatggcaggacctagggctaagttgggctcgctggtctattttgtttttttgggccgggctaagctaaagatgtttccgttctctactgtttattctctttctttttttctttcatttatatattgcatttcatattgtactagaaaactacgataatacatttatatagtcttgtctataccaatatataggcgtatttgctagtatacttaatattat

SEQ ID NO: 5727 - DNA, 3250 bp, Zea Mays
agtcactccacataatcctcgcgtttcgagagcagataaatttcccgaaaaccccaaagattaattcatcttcccttttcgattttctatattccttgcgggtttattttggtttaagtccacgagagaagagaagggaagcaaagcaacactgagcggaggcgagctgtgcgcctcgctcccctcccctgctctcgtcagatccaaaccccacgcgggaacacaaaccctagcacccgttcgcgccaccgcagaggctaagaggcgatgaggggcgttagggcggatggcggcggtggcgcgttctcttcttccaccgcagagaactcgtgcttcgatgcggcgcagtactctttctttggcaaggcgcccatggagggggcggaactcggtgggttgttggagggaggtgtcgacggcgatggtggtggattcggtggacatgatgacgctggttaccagttctcttctacaggcgaagagattgattgtatgagtaatttgtcggaaattgatgatcttgcaagcacttttgcaatgttgaaccgaaatattagcggaacaaggaaccctggcattattggtgatagacgatcaatttcgagagaaagttctttgactgctgattgggttcaagatgctgacttctccaattgggtagatcaggatatactagatggcgatgaatccctggacagcaaacaatggtgctcgcagttgcaatcttcgcctcactttggagagtctaaaccactgtctcgtacatcttcgtaccccaatcaaccactacagcaccgctcaagcgaacctattcttctacacagatctacctcgtttacatcctatcctccatcaggggaaagtcctggattgccttatcctgctcaaggtcttacacggcactcaagcattccatcaccagcaccagagattagcaccaggccagccgcctcttcagaattacataaacatgcagcctcacctgttccatcaccatcaacctcctgatgttccttcaccaagagacaaacgatcaaggtcaggaagaggaggaaagcacaacatacgcttttctcaacagccttctgatgctggtagccagcatagtgagagttcagggataaagttcagatccaagtacatgtcatctgaagagatcgaaagtatcttaaaaatgcagcactctgcaaatcacagcaatgatccttactttgatgactactaccaccaagcttgcaaagccaaaagatctgtaacttttcagaagtccaatttctgtcctatgtcaataaaggacttcccctcaaaatccaggtctggtgttgatcagcattcatatctacaggttgacgctaatggaggagtttcattctctgccatacgtagacctcgtcctcttcttgaagctgatttgcctggatctggtgatggtttttatgatcataagtcatccaagaggtcactggagaaagaaccaatgcttgcagccagaataaccgttgaagattctcttcgtcttcttctggttgttgatgatattgatcggtttttacagtctagccagccacaggacagcagtttccaactgaagcgaaggcgagaggtcctgcttgaaggcttagctacatcactccagcttgttgacccttttggccccaacaaacatggccattcgggtgggttggcccctaaggatgacctaatttttcttcgtattatttctctgcccaaaggacgtaagcttttggcacgctatcttcgacttcttttctctggaagtgagctgacccgaatagtctgcatggctgttttccgacaccttaggagcttgtttggtggcttaccgtcagactatagtgctgcagaaacaaccatcgttcttgccaaggctgtttcctcttgtgtgcgccatatggaactcagtgctctcagtgcctgtctcgcagctgttgtctgttcttcgcagcagccacctctccggccactcggtagtgcctctggtgatggggcctctctgataattaaatctgtgctggatagagcgaccgagctactggcggatccccattccgcagccaactacagcagatcagcacgttcgctttggcatgcgtcatttgatgctttctttggactgctgacgaagtactgtgacagcaagtatgaaagtatcgtgcagaggtttgccatgcagggatccaactccatgggaggacctgaaaccaccaaagcagtcagcagggagatgcccgttgagctgttacgtgcgagtcttcctcatactaatgagcagcatcgtcagacactgctagattttgctcggaaatctacgcatctgcctggtttcagccctactgctaaccgtggacttgtcaattctgaatcagttccaggttaacgccactgaagaggcctgatggtcgtctgttttgatttatatatggcacgtaaggtgtgagcttggagaagttccattggctcagcgaagctggcattcaggatatgactgtgtaggatgttatttatttatatatagaaaaccaactttatgtatgtatcctgctgtaactgtgtagtgctgaacagaacatctgttggatttggaggtaagctagttgacttatttcctcccaaagagaacaattgtgagtgcatagcaacagcttaaggcttaagcttgtttgggaacaatggaattggagaagattgagcgctggttcggaggaaatctcattctattcaattttaaataacaagagatttttttcctcgtggactccccttcaaatcccatgtcaccaaaccaactcaaatcccatgtcaccaaaccaactcataagggctaaaatcctcttgaatatcaaggggattttagacaattcaggagccgttcggttgtctaggaacggtgacctgaaaccattccgagtcggatcacttctttaatttatataagttttgatcaacgagaaaaaatctggagctattcccggagaaacgaacatggcctcaatcctcttcaatccatttgctcccaaacaagccaacgggtgtttggtgcaggagctatgtgctcgaacaatttaatcaacaggttcttctgctgcagttacggcattttctgtgctcatttatctatgctgtctgttctaaattataagacgctttgttatgtctatatttgtggcttgtattatgtatcaaacacaatatatatataccggtgttataaaagatacagatgtagaaa

SEQ ID NO: 5728 - DNA, 1215 bp, Zea Mays
gtgcttggccagttggccacatgccttgccttgcctttgcctacctgttgatcgagccgagcgagcagggagagacacggcaccgagtgaggccgccgcatcctcctcctctccgatcctccagtccgcctgctgcctgcctcaacggatcgacgcgacaggagggagggaggaaggagacggtcgatcagagtctgagacggaggccgatccaccaccgcagcgacgagcgggaggagatgaagatcatcattgacacggatcccggcatcgggaggaaagccgcacgttgctgacttcgttcatggacctgatggcctcgggaacgtagatcttcctgatcccactatcaagaaagtggaggaaagtgctaccgacttcttggttgataaggtctcgcgatttcctggagaggtctctgtgctcgccttgggtcctctgacaaacatagcattggccatcaagaaggatccctcattcgtgaaaaacgttaagaagatcgttgtgctgggtggagcgttctttgcggctggaaatgccactccttccgctgaagcaaatatccacagtgatccggaggcagccgacatggttttcacttctggggcggacatctacgtcgttggcctcaacatcacaacgcaagtcagcttcacagataaggatctcctggagctaagaaactcgcaagggaagtacgcacagttcctatgtgatgtatgcaagttctacttggactggcacaccgagtcttatggtgctcctgtgattttcctccacgatccggtcagctttgccgcgctagttcgtccggagctgttcacgttcaagaagggcgtggtgagggtggagacgcagggcatctgcgtcgggcatacttccatggacatgttgctgaagaagtggaactcagagaacccgtggactggctactcaccgatttcggtcgcatggacggtcgatgtgcccaaggtggtcgcgtttgtgaaggagctcgtcaccaagccgtgaaccaagttaactaacgtgttgtggtctcgcgcaccagatgtgcagcaaatttgagatgtcgatatatttactcacattcgaagcactgcaaacactattatctcaatagttggttcctgtggaggattgcaaatcaatttgagatgttttaaattgcagcatgtgccttcggccattgaatggtatgatgttttttttttcttc

SEQ ID NO: 5729 - DNA, 1219 bp, Zea Mays
gtgcttggccagttggccacatgccttgccttgcctttgcctacctgttgatcgagccgagcgagcagggagagacacggcaccgagtgaggccgccgcatcctcctcctctccgatccttagtccagtccgcctgctgcctgcctcaacggatcgacgcgacaggagggagggaggaaggagacggtcgatcagagtctgagacggaggccgatccaccaccgcagcgacgagcgggaggagatgaagatcatcattgacacggatcccggcatcgggaggaaagccgcacgttgctgacttcgttcatggacctgatggcctcgggaacgtagatcttcctgatcccactatcaagaaagtggaggaaagtgctaccgacttcttggttgataaggtctcgcgatttcctggagaggtctctgtgctcgccttgggtcctctgacaaacatagcattggccatcaagaaggatccctcattcgtgaaaaacgttaagaagatcgttgtgctgggtggagcgttctttgcggctggaaatgccactccttccgctgaagcaaatatccacagtgatccggaggcagccgacatggttttcacttctggggcggacatctacgtcgttggcctcaacatcacaacgcaagtcagcttcacagataaggatctcctggagctaagaaactcgcaagggaagtacgcacagttcctatgtgatgtatgcaagttctacttggactggcacaccgagtcttatggtgctcctgtgattttcctccacgatccggtcagctttgccgcgctagttcgtccggagctgttcacgttcaagaagggcgtggtgagggtggagacgcagggcatctgcgtcgggcatacttccatggacatgttgctgaagaagtggaactcagagaacccgtggactggctactcaccgatttcggtcgcatggacggtcgatgtgcccaaggtggtcgcgtttgtgaaggagctcgtcaccaagccgtgaaccaagttaactaacgtgttgtggtctcgcgcaccagatgtgcagcaaatttgagatgtcgatatatttactcacattcgaagcactgcaaacactattatctcaatagttggttcctgtggaggattgcaaatcaatttgagatgttttaaattgcagcatgtgccttcggccattgaatggtatgatgttttttttttcttc

SEQ ID NO: 5730 - DNA, 1417 bp, Zea Mays
gtgcttggccagttggccacatgccttgccttgcctttgcctacctgttgatcgagccgagcgagcagggagagacacggcaccgagtgaggccgccgcatcctcctcctctccgatccttagtccagtccgcctgctgcctgcctcaacggatcgacgcgacaggagggagggaggaaggagacggtcgatcagagtctgagacggaggccgatccaccaccgcagcgacgagcgggaggagatgaagatcatcattgacacggatcccggcatcgatgacagcgtggccatcctgatggcattccagatgccgggcgtccaggtcctagggctcaccaccatcttcggaaactgcaccacagagcatgccacacgcaacgccttgatcctgtgcgagaaggcaagccatctagaggtcccagtagctgagggcagccatgagcctctcaagggaggaaagccgcacgttgctgacttcgttcatggacctgatggcctcgggaacgtagatcttcctgatcccactatcaagaaagtggaggaaagtgctaccgacttcttggttgataaggtctcgcgatttcctggagaggtctctgtgctcgccttgggtcctctgacaaacatagcattggccatcaagaaggatccctcattcgtgaaaaacgttaagaagatcgttgtgctgggtggagcgttctttgcggctggaaatgccactccttccgctgaagcaaatatccacagtgatccggaggcagccgacatggttttcacttctggggcggacatctacgtcgttggcctcaacatcacaacgcaagtcagcttcacaggtcctgaagcaagatgaatacgataaggatctcctggagctaagaaactcgcaagggaagtacgcacagttcctatgtgatgtatgcaagttctacttggactggcacaccgagtcttatggtgctcctgtgattttcctccacgatccggtcagctttgccgcgctagttcgtccggagctgttcacgttcaagaagggcgtggtgagggtggagacgcagggcatctgcgtcgggcatacttccatggacatgttgctgaagaagtggaactcagagaacccgtggactggctactcaccgatttcggtcgcatggacggtcgatgtgcccaaggtggtcgcgtttgtgaaggagctcgtcaccaagccgtgaaccaagttaactaacgtgttgtggtctcgcgcaccagatgtgcagcaaatttgagatgtcgatatatttactcacattcgaagcactgcaaacactattatctcaatagttggttcctgtggaggattgcaaatcaatttgagatgttttaaattgcagcatgtgccttcggccattgaatggtatgatgttttttttttcttc

SEQ ID NO: 5731 - DNA, 3312 bp, Zea Mays
ctggaatcttctgccgtcccgccgtccctcccaccccggtggcggcggtgggtgtcccagtcgcctttgattccttccccagtcttcccctcagatctgcgatccttatccctcccggttccccgtcctctcctcggccccagtcgaggagacgccgctgcggctctcgactcctgttgcaataattttgtaggcgagaattgggagagtctggaggctgccagccggtctagtggctcggccaaggcgagcggtggtcccagcgccgttctttccgcctggtgccggagtttcagtcttcaaggctgtgctcggagtttctgtgttctaggggccgggaggctgtgaacttgcagacaacaacagatcgcagcaatcagaaggtttactctgaaaatcagaaatctgcttttactgagatattggatgttctaagagctatttgtcatgcacacatgcttcctttggcccttacatgggtccctacatcaaatggcatcgctaatggtttttgtgttggaaagaatattgggatagatccgcaaccaggaaaagcagcacttcgtatccatgaatcagcttgctatgttaatgatgcaaagatgcaggggtttcttcatgcatgtgctgatcgtcatcttgagaaggggcagggtattgcaggccgagcccttaaatcgaatctgccattcttctcacctgatataagagagtacagtatcgaagactacccgcttgcacaccatgctcgtaagtttggtctgcacgctgctgtagccatacggctgaggagtacgtacaccagttacgatgactacatactagaattctttctcccagtcaactgcaagggctgtggagagcagcagatgttattaaacaacctttccagcacaatgcaaagaatatgcaaaagcttgcgaacagtctctgaggcagagattgaaaatgttagtgctactgcagcaatgtttgagaagactagtggaacttgtttaccaactggtaactctgaaagttcctcacatgatgaccagccaatcacagaatctgcactccaggatctatctttgggtgacaaacaaggagacagagaacctgacaagccacagagaagctcaatgcgagttgcagataaaaagcgcagtgcatctgaaaagaactttagtctggatgttcttcgcaaatacttctctgggagcctgagggatgctgcaatgagccttggtgtttgtccaacgacattgaaacgaatatgcagacaacatggaatttcccgatggccatctcgaaagataaacaaggtcaatcgttcattgaagaagatagagaaggtcattaaatcagttcacggtgtggatagatccttgcagtacgatcctgctactgggtctcttgttcctgcaacctctcttccggaaaagatgccattctctgcttgcgatacattgcctacttcatctcttgggagagcagtggaggaaacatgtagcccaaaatcagaacaagatttctcttcgcctgatgggtggcaaagagaaactagccaatttcatgtttctggtatacctaaaaggggaggcgatgaagttcggacgttggcaaacaacaacaaaggcagaagaaactatgtttctggtattgcaaatatcacacagcattcaaactctgaaggcacacatggtccttcatatcccaatcccattggtgctgttaattctctgcatactggagaaacaggcaacatcgattctctgacctccctccacccaagcatggatggcattgaaggccaaacaacagtaaggaactcaccatttgtgcaacaagcagatgtcactatggtcgatggtcatgacaccaaggagcagacactcccttccacctctggcatgaccgattcttcgagcggcagcgcctcaagcgagcctactttcaaggggaacccaggacgtgccctcaaagaccgaagcagccctgcactgaccgtgaaagctacctacaatggcgacaccgtccggttcaagtttgtgccagcaaggggctggtaccacttgctggaagagatagcaaagaggttcaagctgacggctggagcattccagctcaaatacaaggacgatgaggacgagtgggtgatcctggcgaacgatgccgacctccaggagtgcatggacgtcctggactcgatcagctcacgcaacatgaagctgcaggtgcgcgacctctcctgccacgtgggcagctcgggcagcagcagcagctgcttgcaggtggaagcgcatagctcgtgacagaacagaagcctaggttaccgcccttagcctgttgtagtaggcccagtatcctgttgtcgccatagaggttccttgtccatgttcacgccatgttgtcgtatggaatgtacaaatggcgagtgtagaaaaggaataaagtgtcatactcttcgcacggttgaaacacgaaacgatgccgtgaaggtttttgtcataatctgttgttggtttcaaaagtcctggcaataatctgttgtcatgaagatgagttcatggcttaagctgcgatacgaagtttctgaacttgctgtgttccaaaatttcagtctggttcttccggtccccttcggtctgtatcattgatggtttgctggtggtaccctgtagtgttacagaaccatgtggacgtgatgcagtttggagtcgacttccagaaatcttttctccgatctcctgcaagtgacaacctgacattgtggctttgattgcccgggttggaggttgctttccagtcgcagcgagtgggttgggcgtgctggtgccgctgaaggcgtggagcagctggtgagtctggacgggagagctactgtttgtattcatgcatcaggctgatcagaagtcgtccagctgggaagaataacagctcgccctcgccgtcagggaagggcaagctcggcgtcgagtggaatcaggcttatctgctaccaatggcgcgacttgcagaatgcttccctggtagggaacggctgggctgtcaattcgcctggaagtggggaagctttatgctactgtgtgtgaaggtggtagtgcatgcgcgcccagtctcctagatgtagcgagccaaatatgtaactagtagtttggctcaaaaaattagaaacggcgagaagcattgtatatttttaaagggtcaatgtttttttaatttttatataagtttcaatctcttacgggatggacttcgaagttgatacatgttcttacataattgatctataacttatcatacgagaaaaccagttcttaatagccgtcc

SEQ ID NO: 5732 - DNA, 1366 bp, Zea Mays
aaaccgaaccgaagtgcaaccatccgtcacatcacaaaccgaaaaaggccgcgacgagccgaccagctctactgcccccttccggccttcggcgaccgtgacgagcaacgacgaccacggcgacgatggccgcttcctccctctgccacgggcacttgctcctgtttctcctcgtgtccgtcacatcggcctgcctcggtaccgcggcagcgcatcaagccgggtctggagagggttacacgatcgccggccgcgtcaagatcgatggcatgagtgagaagggctatggtcttccagccaagacatcaaacacaaaagtgatacttaatggcggccaaagggttacatttgccaggccagacggctactttgcattgtatcctacaaatgattcattaccctggaactcatctgattgaggtctcctcaattggttacttcttttcccctgtccgagttgatataagtgcaaggaatcctggatatattcaagcagcattgactgaaaccagaagggttctgaatgagcttgttctggaacctctgaaagaagagcagtactatgaggttagggagccgttctccatcatgtcacttttgaagagccccatggggttaatggttggttttatggtcttaatggtctttgtgatgcccaagatgatggagaacatagatcccgaggagatgaagcaagctcaagaacaaatgaggaacaaccctgtatcattctctggcttgctcgccagagcgcagggctagagaagtagactgtagacatgaggatactgcaaaggtcaaacattctagaatgtgagtaagagcactattaaagtgcttggcacgtcactcactcggggcaatttcctggggataagaaggaaatcctttccccctgtttttaccgtattttagggctagtttgggaacaccaatttcctaaaagatttatattttcccatgggaaaatgaactaatttcccttgggaaaataaaaatcttttggaaatttggggttccaaactagcccttaagttgtaatttgtctgcggtgtagaaccttctgaaacctctgagctagtgatgcgtcagattgagatattttgttcaatgtttgctgtttgaatcaggtgaatctttgacaccttgcttagtcatcatcagaccacggcggactgtggacatttttagacttgtgtagtgatgcgtcagagacctcgccaggatggacagagggatacccatgcaaatttgtgcacttatgcatccagctaggggtgtaatcggatcgaatacagagtatccagccatccgattcgtatccaacacatgtcagcgaatatgagtaatttttttaaaaaataaa

SEQ ID NO: 5733 - DNA, 1380 bp, Zea Mays
aaaccgaaccgaagtgcaaccatccgtcacatcacaaaccgaaaaaggccgcgacgagccgaccagctctactgcccccttccggccttcggcgaccgtgacgagcaacgacgaccacggcgacgatggccgcttcctccctctgccacgggcacttgctcctgtttctcctcgtgtccgtcacatcggcctgcctcggtaccgcggcagcgcatcaagccgggtctggagagggttacacgatcgccggccgcgtcaagatcgatggcatgagtgagaagggctatggtcttccagccaagacatcaaacacaaaagtgatacttaatggcggccaaagggttacatttgccaggccagacggctactttgcattgtatcctacaaatgattcattaccccacaacgtgccagctggaactcatctgattgaggtctcctcaattggttacttcttttcccctgtccgagttgatataagtgcaaggaatcctggatatattcaagcagcattgactgaaaccagaagggttctgaatgagcttgttctggaacctctgaaagaagagcagtactatgaggttagggagccgttctccatcatgtcacttttgaagagccccatggggttaatggttggttttatggtcttaatggtctttgtgatgcccaagatgatggagaacatagatcccgaggagatgaagcaagctcaagaacaaatgaggaacaaccctgtatcattctctggcttgctcgccagagcgcagggctagagaagtagactgtagacatgaggatactgcaaaggtcaaacattctagaatgtgagtaagagcactattaaagtgcttggcacgtcactcactcggggcaatttcctggggataagaaggaaatcctttccccctgtttttaccgtattttagggctagtttgggaacaccaatttcctaaaagatttatattttcccatgggaaaatgaactaatttcccttgggaaaataaaaatcttttggaaatttggggttccaaactagcccttaagttgtaatttgtctgcggtgtagaaccttctgaaacctctgagctagtgatgcgtcagattgagatattttgttcaatgtttgctgtttgaatcaggtgaatctttgacaccttgcttagtcatcatcagaccacggcggactgtggacatttttagacttgtgtagtgatgcgtcagagacctcgccaggatggacagagggatacccatgcaaatttgtgcacttatgcatccagctaggggtgtaatcggatcgaatacagagtatccagccatccgattcgtatccaacacatgtcagcgaatatgagtaatttttttaaaaaataaa

SEQ ID NO: 5734 - DNA, 1323 bp, Zea Mays
atccaattttgggtccgcagaacctcctcctctcgctccgccgccgccttcccctcgcccaccacgctttggtcccaaacccacggtcgctcatcctggacctccacgccatcgaggcagtgaagctgggctcattcgtgcaatcgtgctcaagtctggcatcaactcccccatctaccgggacctccacgcgctcgtctcccacccacgcctgctctccgttgttgcctcgctcctccatatgcccggcctcgtctgcaacgtcccctacacagcgctcccgtcgtcgtcctctgcgtcgaccgctccatccccatgctcatgcgccgcaaggaggccaagccttacgacatgattgaggataggcactggagagtttgacttgcgatatttgagtacatcccattgctggcgctccgagtatctggccatactattgattcacataccagctaaatttaggaccatcccgattgaaggctcttcccacttaactgtttctgcaaagaggtcgtcttgactgatcgcaatgatgaagttctggagtgttgttgttatgatgaaggcagacccaagtattgaaagggatgatctgattttgctctaggagattgccatgtacatgcttcttgcatgtggagctgtctatgtgatcttgataagaaagatttgtggatgttgacccaacaggaaattgctactgaggtgcaaagtgaatccaagtgaaagtaattaggggagttagctatgtcaaatggaaagagagtggttgctaaaggataggaagctgaagctggatgaaggaagcaactacatgcaaccgatggcaataatgcattgcagggttgaggctcgttagaaatgtcaagttggtcccggacgtgggtatggtgcccgcaaggccgacagagctgagatcaagcactgagatcgtgccctcgtgcctacggctgcatgtcacacctggccagaggcataggctaccactactgttctaagaggacaacctgctcgatagctagcctaggatggccttcagttccagcaaggcttgtcggctcgtctcactgcagaacgctattgttggcgcctaattgaacgaagttgataccggtaggatcccatgaagcaacataagcagcagaagtctgacgaggaatgacatagatgcagtgctttcgtttgttgctactgaaaaaagatctgaaccaagtatttctgtaagtataccaacaagttagttgctactactttgtatattgatcttcgttggccgaatgtttgagtttttttcaaggcacaaacactttattttgagatcta

SEQ ID NO: 5735 - DNA, 1331 bp, Zea Mays
atccaattttgggtccgcagaacctcctcctctcgctccgccgccgccttcccctcgcccaccacgctttggtcccaaacccacggtcgctcatcctggacctccacgccatcgaggcagtgaagctgggctcattcgtgcaatcgtgctcaagtctggcatcaactcccccatctaccgggacctccacgcgctcgtctcccacccacgcctgctctccgttgttgcctcgctcctccatatgcccggcctcgtctgcaacgtcccctacacagcgctcccgtcgtcgtcctctgcgtcgaccgctccatccccatgctcatgcgccgcaaggaggccaagccttacgacatgattgaggataggcactggagagtttgacttgcgatatttgagtacatcccattgctggcgctccgagtatctgggcatctggcttggtgtttcttgtttggtgatacctgtacaagcaaatttggtgacctgctacttaaaaactgtttctgcaaagaggtcgtcttgactgatcgcaatgatgaagttctggaggcaagtgttgttgttatgatgaaggcagacccaagtattgaaagggatgatctgattttgctctaggagattgccatgtacatgcttcttgcatgtggagctgtctatgtgatcttgataagaaagatttgtggatgttgacccaacaggaaattgctactgaggtgcaaagtgaatccaagtgaaagtaattaggggagttagctatgtcaaatggaaagagagtggttgctaaaggataggaagctgaagctggatgaaggaagcaactacatgcaaccgatggcaataatgcattgcagggttgaggctcgttagaaatgtcaagttggtcccggacgtgggtatggtgcccgcaaggccgacagagctgagatcaagcactgagatcgtgccctcgtgcctacggctgcatgtcacacctggccagaggcataggctaccactactgttctaagaggacaacctgctcgatagctagcctaggatggccttcagttccagcaaggcttgtcggctcgtctcactgcagaacgctattgttggcgcctaattgaacgaagttgataccggtaggatcccatgaagcaacataagcagcagaagtctgacgaggaatgacatagatgcagtgctttcgtttgttgctactgaaaaaagatctgaaccaagtatttctgtaagtataccaacaagttagttgctactactttgtatattgatcttcgttggccgaatgtttgagtttttttcaaggcacaaacactttattttgagatcta

SEQ ID NO: 5736 - DNA, 1425 bp, Zea Mays
atccaattttgggtccgcagaacctcctcctctcgctccgccgccgccttcccctcgcccaccacgctttggtcccaaacccacggtcgctcatcctggacctccacgccatcgaggcagtgaagctgggctcattcgtgcaatcgtgctcaagtctggcatcaactcccccatctaccgggacctccacgcgctcgtctcccacccacgcctgctctccgttgttgcctcgctcctccatatgcccggcctcgtctgcaacgtcccctacacagcgctcccgtcgtcgtcctctgcgtcgaccgctccatccccatgctcatgcgccgcaaggaggccaagccttacgacatgattggtgagaccagaggagcacgagcgcaacctccgtcacccctaagatctcctcaccattgtggccatcctgcaagatcagtactcattatctattaagaagaggataggcactggagagtttgacttgcgatatttgagtacatcccattgctggcgctccgagtatctgggcatctggcttggtgtttcttgtttggtgatacctgtacaagcaaatttggtgacctgctacttaaaaactgtttctgcaaagaggtcgtcttgactgatcgcaatgatgaagttctggagtgttgttgttatgatgaaggcagacccaagtattgaaagggatgatctgattttgctctaggagattgccatgtacatgcttcttgcatgtggagctgtctatgtgatcttgataagaaagatttgtggatgttgacccaacaggaaattgctactgaggtgcaaagtgaatccaagtgaaagtaattaggggagttagctatgtcaaatggaaagagagtggttgctaaaggataggaagctgaagctggatgaaggaagcaactacatgcaaccgatggcaataatgcattgcagggttgaggctcgttagaaatgtcaagttggtcccggacgtgggtatggtgcccgcaaggccgacagagctgagatcaagcactgagatcgtgccctcgtgcctacggctgcatgtcacacctggccagaggcataggctaccactactgttctaagaggacaacctgctcgatagctagcctaggatggccttcagttccagcaaggcttgtcggctcgtctcactgcagaacgctattgttggcgcctaattgaacgaagttgataccggtaggatcccatgaagcaacataagcagcagaagtctgacgaggaatgacatagatgcagtgctttcgtttgttgctactgaaaaaagatctgaaccaagtatttctgtaagtataccaacaagttagttgctactactttgtatattgatcttcgttggccgaatgtttgagtttttttcaaggcacaaacactttattttgagatcta

SEQ ID NO: 5737 - DNA, 3004 bp, Zea Mays
atccaattttgggtccgcagaacctcctcctctcgctccgccgccgccttcccctcgcccaccacgctttggtcccaaacccacggtcgctcatcctggacctccacgccatcgaggcagtgaagctgggctcattcgtgcaatcgtgctcaagtctggcatcaactcccccatctaccgggacctccacgcgctcgtctcccacccacgcctgctctccgttgttgcctcgctcctccatatgcccggcctcgtctgcaacgtcccctacacagcgctcccgtcgtcgtcctctgcgtcgaccgctccatccccatgctcatgcgccgcaaggaggccaagccttacgacatgattgaggataggcactggagagtttgacttgcgatatttgagtacatcccattgctggcgctccgagtatctggccatactattgattcacataccagctaaatttaggaccatcccgattgaaggctcttcccacttaagtgattcttccttctgaatccattttttagcttattcattcggattatgacccataattatgtttttttgtttgcttgaattcggtcaaacaaactgagaaaagcgtggatcctctgaagaatgtctgaaaaaaatgatagacaagtccctagatttaccccaatttcacttgctctatagatttatagttctataatatgtgcttccttatcaatctttgttactcaattatgctagataatcacttgtccttaatctaattaacagtgttgtcatcatagatgaagctgacaacttagttgattccttgaataagatatacaagtcaaagcttacatcttcttaggttactctcacctttcattaacctttccatcacagtctggcaaatagtattttgccttgtgccataggtcattatacttagttgcaattgtattgctttgtgtttcattcaatgaacataaacatctacattccatgttgtccattagttatgatttttgctggaacataaatggcatatagctctgtattttgtgtgcctgatgctcattcagtactattgtcaaagcacaaaagggagatttaggaatttatttggcttataaaggggcataaacaaagagggtcttttagtggtggagttagcttagcttgcctatggggttgtatggcacattataagagattctatatatggtttcatctggtttaggtttagaattttcattttgaaagcaacattcagtccatacatgacttgagcatgctttctaaattgacatttttggtgtttacttgggctaaaaactaggattcttgcatttttctgccatgtgctgtttacaggtgaaattgtgttgttcagaaacaaactttggcatccgtttctcattctcctaactgcatttacatgtattcattttccttttggattgtagctgaaagcagtcctttcccacctagatgaataccttaatagattttacaatgttttgggagctaggaattgatgatacatccagaccttggtagttttaacaaggtcttccacacatgttctgatcaacaatcaagatggtagcactgtgtcttctatgaccacaaaccaattcttgttttcccttgacatcgataacataaacatagttgaattttgtcactttgtgaaagacatcaatataatccacaaggtaaatttcttaatctataaccactgtttgaaattggtagtctacaatctatttgatgctttaagtgaactttagaagtttatatcatttccaagaaaagtttacattaccttttccaattaatgttgactcaacatatataagtaactaccaaaatttatttggaatagaaattgaatattaacaaacaaaaaatatcttgtacttaaaatttgtatactaatataacagaactgcgacaaactcaatgatgggcacaaaagagctttgcacaatctcattccaggatcaacgactcatagatgtttttatcaacactgcacacattgtttgctgaaattagctcatgttattgatggtgtttgaaagaaacattaaagttttgcttcgacaaatgtcttttgctcagggcatctggcttggtgtttcttgtttggtgatacctgtacaagcaaatttggtgacctgctacttaaaaactgtttctgcaaagaggtcgtcttgactgatcgcaatgatgaagttctggaggcaagtgttgttgttatgatgaaggcagacccaagtattgaaagggatgatctgattttgctctaggagattgccatgtacatgcttcttgcatgtggagctgtctatgtgatcttgataagaaagatttgtggatgttgacccaacaggaaattgctactgaggtgcaaagtgaatccaagtgaaagtaattaggggagttagctatgtcaaatggaaagagagtggttgctaaaggataggaagctgaagctggatgaaggaagcaactacatgcaaccgatggcaataatgcattgcagggttgaggctcgttagaaatgtcaagttggtcccggacgtgggtatggtgcccgcaaggccgacagagctgagatcaagcactgagatcgtgccctcgtgcctacggctgcatgtcacacctggccagaggcataggctaccactactgttctaagaggacaacctgctcgatagctagcctaggatggccttcagttccagcaaggcttgtcggctcgtctcactgcagaacgctattgttggcgcctaattgaacgaagttgataccggtaggatcccatgaagcaacataagcagcagaagtctgacgaggaatgacatagatgcagtgctttcgtttgttgctactgaaaaaagatctgaaccaagtatttctgtaagtataccaacaagttagttgctactactttgtatattgatcttcgttggccgaatgtttgagtttttttcaaggcacaaacactttattttgagatcta

SEQ ID NO: 5738 - DNA, 4140 bp, Zea Mays
atccaattttgggtccgcagaacctcctcctctcgctccgccgccgccttcccctcgcccaccacgctttggtcccaaacccacggtcgctcatcctggacctccacgccatcgaggcagtgaagctgggctcattcgtgcaatcgtgctcaagtctggcatcaactcccccatctaccgggacctccacgcgctcgtctcccacccacgcctgctctccgttgttgcctcgctcctccatatgcccggcctcgtctgcaacgtcccctacacagcgctcccgtcgtcgtcctctgcgtcgaccgctccatccccatgctcatgcgccgcaaggaggccaagccttacgacatgattggtgagaccagaggagcacgagcgcaacctccgtcacccctaagatctcctcaccattgtggccatcctgcaagatcagtactcattatctattaagaaggttacggttagcttggtgtgtaagtgtgttggacaaatgaggtcccgtttttttactggatttatttgccttttcttttctgttttggatatttgaagtcttatttactagctattaatacattgtttttaagtcatcggccttgcaagcattgcctctttctttaaaattatctgatgactggtgaattctgttttgatcttttagattattggcattgaccttttatctcaaacgctgcgacccgtcattgttgaacttgcagaggataggcactggagagtttgacttgcgatatttgagtacatcccattgctggcgctccgagtatctggccatactattgattcacataccagctaaatttaggaccatcccgattgaaggctcttcccacttaagtgattcttccttctgaatccattttttagcttattcattcggattatgacccataattatgtttttttgtttgcttgaattcggtcaaacaaactgagaaaagcgtggatcctctgaagaatgtctgaaaaaaatgatagacaagtccctagatttaccccaatttcacttgctctatagatttatagttctataatatgtgcttccttatcaatctttgttactcaattatgctagataatcacttgtccttaatctaattaacagtgttgtcatcatagatgaagctgacaacttagttgattccttgaataagatatacaagtcaaagcttacatcttcttaggttactctcacctttcattaacctttccatcacagtctggcaaatagtattttgccttgtgccataggtcattatacttagttgcaattgtattgctttgtgtttcattcaatgaacataaacatctacattccatgttgtccattagttatgatttttgctggaacataaatggcatatagctctgtattttgtgtgcctgatgctcattcagtactattgtcaaagcacaaaagggagatttaggaatttatttggcttataaaggggcataaacaaagagggtcttttagtggtggagttagcttagcttgcctatggggttgtatggcacattataagagattctatatatggtttcatctggtttaggtttagaattttcattttgaaagcaacattcagtccatacatgacttgagcatgctttctaaattgacatttttggtgtttacttgggctaaaaactaggattcttgcatttttctgccatgtgctgtttacaggtgaaattgtgttgttcagaaacaaactttggcatccgtttctcattctcctaactgcatttacatgtattcattttccttttggattgtagctgaaagcagtcctttcccacctagatgaataccttaatagattttacaatgttttgggagctaggaattgatgatacatccagaccttggtagttttaacaaggtcttccacacatgttctgatcaacaatcaagatggtagcactgtgtcttctatgaccacaaaccaattcttgttttcccttgacatcgataacataaacatagttgaattttgtcactttgtgaaagacatcaatataatccacaaggtaaatttcttaatctataaccactgtttgaaattggtagtctacaatctatttgatgctttaagtgaactttagaagtttatatcatttccaagaaaagtttacattaccttttccaattaatgttgactcaacatatataagtaactaccaaaatttatttggaatagaaattgaatattaacaaacaaaaaatatcttgtacttaaaatttgtatactaatataacagaactgcgacaaactcaatgatgggcacaaaagagctttgcacaatctcattccaggatcaacgactcatagatgtttttatcaacactgcacacattgtttgctgaaattagctcatgttattgatggtgtttgaaagaaacattaaagttttgcttcgacaaatgtcttttgctcagggcatctggcttggtgtttcttgtttggtgatacctgtacaagcaaatttggtgacctgctacttaaaaagtccgtgtttggtttacttgcttgttggcaccattgcaaaattgcatgttccttgtttggttgtatgaaaactgactatattatgacttgttgtatgcattattggtgtattatgcagctgtttctgcaaagaggtcgtcttgactgatcgcaatgatgaagttctggaggcaaggttcagttgtttaggaattcattcactgatacatcttattattcagttgaagcgccacatatattggtagataaatgctactgatacattcaagtgatgaaccagtccattcatgagctaataagtgcagtaatcagtacaccgcagagagcataaacatacccaactattatggtggtggtggctatattatatgttatataacatgctgcataactgttaagatcatgaacattttagatgttgaataccttgcttgcaaggagtgtcacgaataccgaaacttgttctcgcacatgctgaatcgtatcacattcctattcctctgtctatttcagcccttctatttttggtttctggcagtgttgttgttatgatgaaggcagacccaagtattgaaagggatgatctgattttgctctaggagattgccatgtacatgcttcttgcatgtggagctgtctatgtgatcttgataagaaagatttgtggatgttgacccaacaggaaattgctactgaggtgcaaagtgaatccaagtgaaagtaattaggggagttagctatgtcaaatggaaagagagtggttgctaaaggataggaagctgaagctggatgaaggaagcaactacatgcaaccgatggcaataatgcattgcagggttgaggctcgttagaaatgtcaagttggtcccggacgtgggtatggtgcccgcaaggccgacagagctgagatcaagcactgagatcgtgccctcgtgcctacggctgcatgtcacacctggccagaggcataggctaccactactgttctaagaggacaacctgctcgatagctagcctaggatggccttcagttccagcaaggcttgtcggctcgtctcactgcagaacgctattgttggcgcctaattgaacgaagttgataccggtaggatcccatgaagcaacataagcagcagaagtctgacgaggaatgacatagatgcagtgctttcgtttgttgctactgaaaaaagatctgaaccaagtatttctgatcactgcgttgaaaaggaaaaaaagagagacaaaaccagaaaaaaggaggaaaactggctatatgggcctaccttggcccactgcggggatgcgacccactgcaaaagccggcccgcgcgcggccttctcgcacagaggcggtggtcacattccaatcagaatcctataattattagtaataactcgcagcctatgtgtactgttttctattgttcattggactcgatcggtttgcgctcaacactcctaggagtttttcttcttcttcttcttgtttcttggatgcatgcttgctagttgctacgtaacacttctttttaatgcaagtaacttattagcgttgcctgaaattcatgtcggtacattttgcacgtcaaaatccaagtttggc

SEQ ID NO: 5739 - DNA, 2256 bp, Zea Mays
ccggagctgaactgcagactgctactagactgctggcgcggagtggaggacgagtggtgttgcccacgcagcgcagacgcagtctccttttcatcatcaagtccggagggagagccggagaaccggttcagccagcagagtcgccaaaacaaaagcaaaatgaggagctccgtctctgagcgcagcctcatcatcgagagcgacgacgacgacgacgaccatccccaatcccggtcatccgccgccgcccgcagcagaagacgccaccaccaacacgaggaggactccgccgcaggatccgactccgattccggttcctcctcgtcctcctgcggcaccccgcgcggtccggccaccgactcctcctacacccagcaatggccacagagctacaggcagtccatcgacattcttagtagcgtgcagtcaccaaatctgagcttcttgggaaccccaactctaagcagattgtccaactcttttcggggtaaaacccctgaaatcatctccaatcttgttaagccacttcttcgccccactacaagtgatgaccaccaccaccaccaccagcagcagcctgaagaaagaaagagttctcagtaccttctgccttcgagaaaaccatctttgcaacagattcctgaggatcaaaagccagtgccagttgctcatgaggtgtctccgtatcataaatgcacttacacccaagcagttgtgaatggaataaatgttctatgtggtgtgggaatcctatcaacaccttatgccatcaaacaaggcgggtggcttggactggtgatactctgtttatttgcaattctagcttggtatactggtgtgctcctgcgccgctgcctggacagcaaggagggccttgagacatacccagatattggtcatgccgcctttggagccaccggccgtatagccatctcaataatcctgtatgtggaactgtatgcctgttgcatcgagtatctgatattggaaggtgacaatttatcaaaattattccctaatgcgcacctgagcgttgggagcttgacaatgaactcccatgtacttttcacaatcttgactaccatcatagtcatgccgaccacttggcttcgtgaccttagctgcctgagctacctttcagctggaggtgtttttgcatcaatccttggagtcatctgcctattctgggtaggagttgttgataatgttggctttgagaacaaaggaactgctctgaacctccctggaatccctattgcaattggattgtatggttattgctactcagggcatggggtgtttccaaacatctactcttctctgaagaagcgcaatcagttcccttcaatcctttttacttgcggtgatgggatacaaaatgtttggtgaagccacacagtctcagtttacactgaacttaccagagaatttagtggtttcaaagattgcagtttggaccacggtggcaaatccaataaccaaatatgcattaaccataaccccactgactatgagtttggaagagttgcttccaccaaatcaacagaagtactcaaacatagtcatgcttagatcagccctggtggtgtcaaccctcctcattgctctatctgtacccttttttggacttgtgatggccttagttggttctttacttacgatgcttgtgacctatattctaccttgcgcgtgctttttagcaattcttaggagaaaagtgagctggcaccaggtagcagtatgctcgttcatcatcgtggttggggtttgctgcgcttgtgtgggaacatactcgtctctgtcaaagataatccagaactacacatgatacagttgttcctgcaatccaaatttatgtccaaactcaatgagccaaactgcccagcaaattagtcaagtcgatgtatcataaatttgtgagatgtccatgtttgcatgttaatggatcaacacaaataatacgtttgtggcaaggatttgagacaatatttctgaacaaaagatgaggttgattttgtgttgtggatgtctcgtgtcaagattctttgcgagcaaatggagaagaaaattaaattaagagaaggaacctgcattgttgttgttgggcagaagaattgcagcgaagaatgtgagggggtttgcttcctgcttttagggatcagtttttgaatccatgtttattcgtttaaaatctacgtgggatatgcctaacagtcacagctttgtttggaaccttaaaattggcaaacaccctcc

SEQ ID NO: 5740 - DNA, 2368 bp, Zea Mays
cggagctgaactgcagactgctactagactgctggcgcggagtggaggacgagtggtgttgcccacgcagcgcagacgcagtctccttttcatcatcaagtccggagggagagccggagaaccggttcagccagcagagtcgccaaaacaaaagcaaaatgaggagctccgtctctgagcgcagcctcatcatcgagagcgacgacgacgacgacgaccatccccaatcccggtcatccgccgccgcccgcagcagaagacgccaccaccaacacgaggaggactccgccgcaggatccgactccgattccggttcctcctcgtcctcctgcggcaccccgcgcggtccggccaccgactcctcctacacccagcaatggccacagagctacaggcagtccatcgacattcttagtagcgtgcagtcaccaaatctgagcttcttgggaaccccaactctaagcagattgtccaactcttttcggggtaaaacccctgaaatcatctccaatcttgttaagccacttcttcgccccactacaagtgatgaccaccaccaccaccaccagcagcagcctgaagaaagaaagagttctcagtaccttctgccttcgagaaaaccatctttgcaacagattcctgaggatcaaaagccagtgccagttgctcatgaggtgtctccgtatcataaatgcacttacacccaagcagttgtgaatggaataaatgttctatgtggtgtgggaatcctatcaacaccttatgccatcaaacaaggcgggtggcttggactggtgatactctgtttatttgcaattctagcttggtatactggtgtgctcctgcgccgctgcctggacagcaaggagggccttgagacatacccagatattggtcatgccgcctttggagccaccggccgtatagccatctcaataatcctgtatgtggaactgtatgcctgttgcatcgagtatctgatattggaaggtgacaatttatcaaaattattccctaatgcgcacctgagcgttgggagcttgacaatgaactcccatgtacttttcacaatcttgactaccatcatagtcatgccgaccacttggcttcgtgaccttagctgcctgagctacctttcagctggaggtgtttttgcatcaatccttggagtcatctgcctattctgggtaggagttgttgataatgttggctttgagaacaaaggaactgctctgaacctccctggaatccctattgcaattggattgtatggttattgctactcagggcatggggtgtttccaaacatctactcttctctgaagaagcgcaatcagttcccttcaatcctttttacttgcattgggctgtctaccattttatttgctggtgcagcggtgatgggatacaaaatgtttggtgaagccacacagtctcagtttacactgaacttaccagagaatttagtggtttcaaagattgcagtttggaccacggtggcaaatccaataaccaaatatgcattaaccataaccccactgactatgagtttggaagagttgcttccaccaaatcaacagaagtactcaaacatagtcatgcttagatcagccctggtggtgtcaaccctcctcattgctctatctgtacccttttttgaatggaataagttaatccattaccacatcattccttatgggggtgtttagtttgaggaatcactccattcaaaatgaggacttgtgatggccttagttggttctttacttacgatgcttgtgacctatattctaccttgcgcgtgctttttagcaattcttaggagaaaagtgagctggcaccaggtagcagtatgctcgttcatcatcgtggttggggtttgctgcgcttgtgtgggaacatactcgtctctgtcaaagataatccagaactacacatgatacagttgttcctgcaatccaaatttatgtccaaactcaatgagccaaactgcccagcaaattagtcaagtcgatgtatcataaatttgtgagatgtccatgtttgcatgttaatggatcaacacaaataatacgtttgtggcaaggatttgagacaatatttctgaacaaaagatgaggttgattttgtgttgtggatgtctcgtgtcaagattctttgcgagcaaatggagaagaaaattaaattaagagaaggaacctgcattgttgttgttgggcagaagaattgcagcgaagaatgtgagggggtttgcttcctgcttttagggatcagtttttgaatccatgtttattcgtttaaaatctacgtgggatatgcctaacagtcacagctttgtttggaaccttaaaattggcaaacaccctcc

SEQ ID NO: 5741 - DNA, 1003 bp, Zea Mays
cgtcttctccctctcccctagatccttcgacgccgccctccctcagctcattccctgccgccgctcatctgctggccttgtctcactgccgcccaaccattttcctccctcaagctagcacgcagcctcaactcctctcccacctcacgcacgtctctcccagccgttccttcatttctctggctcgtccttctccatgaggtcgcgccctgctgcgccgtcgtgctggtcgccggctgagcccccttcagtgcctgacgccgcatctccctgccacctcccatggacgccagccctcagccatggatgccgaaccccctctctttagtgcctttctttacagcccctgcgtcgccgtgcgtgtaaggtgtttgtataaatgctcaagaggagtgacgtgtcatggccaacccttttggcgtcgtcggatgtttgatgttttgtgcatcccgtctacgacgccgtcgaccatcggagcgaaatccgtgaaatctaggtgaagaagagacggagcacgtcgtcgtcatggttgcagctttgcttttgtcgtcgtggagcctccaccagcgccgtgtagcaggactgctcttatgtgttattggtgctattccgcttgtacggccaacgaaataggtcctactacacaaggtacgtacacgagggaaatagaggataccatactcttagctttacagaagcctgaagtgtatgatgacattgctcgcgctacatgctgcaaatttgggatagatagacctcaagttgtacctgtgcaaggactacctcaggaaaagatgaaatggaactcaaattttagtggtcgcacaagtgtggagccagttgatgaccaagtttttcaattagtattttagtttgaatttagagtacacatatgtatgagttatttgacaatgcttgtttatgagagattgaatgatacctatctatattatattaattataatgttattaaataaatgtgtatatgtatatttctctttca

SEQ ID NO: 5742 - DNA, 2454 bp, Zea Mays
cgtcttctccctctcccctagatccttcgacgccgccctccctcagctcattccctgccgccgctcatctgctggccttgtctcactgccgcccaaccattttcctccctcaagctagcacgcagcctcaactcctctcccacctcacgcacgtctctcccagccgttccttcatttctctggctcgtccttctccatgaggtcgcgccctgctgcgccgtcgtgctggtcgccggctgagcccccttcagtgcctgacgccgcatctccctgccacctcccatggacgccagccctcagccatggatgccgaaccccctctctttagtgcctttctttacagcccctgcgtcgccgtgcgtgtaaggtgtttgtataaatgctcaagaggagtgacgtgtcatggccaacccttttggcgtcgtcggatgtttgatgttttgtgcatcccgtctacgacgccgtcgaccatcggagcgaaatccgtgaaatctaggtgaagaagagacggagcacgtcgtcgtcatggttgcagctttgcttttgtcgtcgtggagcctccaccagcgccgtgtagcagtgagcccctcgctagtagtccgttgttttttgcatccctagtgcttgataaaatgttgaaccgttgtgtgtcgttaatcgcagccaccgtcaacgttgtgccttgcgcttcaccaatgcgatgaaatgttttagttgtgtgcgataatatggttgtcgttcgaatggaaagtagaattaatctatatatgtgattagaaagtgccaagcacatgataattataggagtaaattgaatacttgctgtttggactgtgttcagttttagtatgcaggtagtttagtgaagtaaaccatgttttctgtagaaatgttatataggaaagttgtagatcacttctttatcttgcttgtgtataaatttcatgaccacaggtttagtagtttaggagttatgatttttccaagtacagtatacgaatctatccagattctgtacagatttcgaaaactgtcttgtttgattaagttaaacttagaatcagttcttagtaattataaagaagttgtagtacttttcttaagctttccaaaaaaatttggatcaccctttttggtgatctataaattaagttagtgctgtttgagttaggatctctgaatctgtcccaatttggacagcagagcctttctcatattttctgaccttgatatatattaaattaacctgggatgttcataaatgaattgtagagaattctattagctttctaaaaagtctaggatcacctgatttggatgcctgaaactccagttatgatttttttaaagtaagtagtcgaattctgtccaaatctggacagaatttacgtctagcattgtttgaccattctaaatgtcaagtctcactgtgatgataatacaaaagttgtagaggacttcttaagctttctagaaagtcttagttcacaatttttggatgaatattttgtaagttatgagcaaaaccgctgactgctgtactgctatccaaaatcagcaagtattaaaatggttgtttagagaagtcgatgctttgctctagttgtcgtattctatattcacttgattgtgttataaaagggtgtgccagataaccaagttattaacaccctaaaactgcagtgcgaagcaagctatagacgaccaaatggcaactgaattataattactaagctttgtggccatatgaagctttttggctatgtgttcttatgagatgatttgtaacttctgttcttaactaacagttcaggaacaatggaaccaaaatacaggacattttcctacttcacgtctggatgccatccaattaatatcttctctgcgatattgcaatggaagggactgctcttatgtgttattggtgctattccgcttgtacggccaacgaaataggtcctactacacaagggaaatagaggataccatactcttagctttacagaagcctgaagtgtatgatgacattgctcgcgctacatgctgcaaatttgggatagatagacctcaagttgtacctgtgcaaggactacctcaggtttgaaccatacttatggaatgcatgtaagaggtttgtgttggagcaccgggctggcgagaaccgtgctccaatcatttcagatgatagccccaacaaagatatcaacaatgccttctataatatcgtgatgctgaaaaagaaaagatgaaatggaactcaaattttagtggtcgcacaagtgtggagccagttgatgaccaagtttttcaattagtattttagtttgaatttagagtacacatatgtatgagttatttgacaatgcttgtttatgagagattgaatgatacctatctatattatattaattataatgttattaaataaatgtgtatatgtatatttctctttca

SEQ ID NO: 5743 - DNA, 1632 bp, Zea Mays
ccggataaaggccgccctcctcgcagtacagcaaacggcggccaacaacaaccaccccggtacacgcttcccaccaaaagcaaccctgaccctgacctgcgctgcctgtgaccccgccgatccgagcgtctccatggccgcttcgtcctccgaggctgccacagccacgcccacgaccaccgtcggactcggagggagcgggaccccaggccctccgccgccaacgccatcgaaccaccacgcggcgccgtcctccgcggctggtggggccacggacgcctcgctctctgctttcctgcaccgcctcctcctctcgtccccggctccacagctacggtctccactcgcagctcggtcgcaggcgtcgccgccctcgcttccgcctctcgtctcgctcgagtcccccgaccagcgcgccctccgcaacgccgccgacgtgggctacttccacctcgccggccacggcatcccttcggggctaccgtcgtccgcgctcgccgagctgtcccggatcgacgcgtccacgcgcctggagtctaatcttcgcacgctcggcttctccgtggaggaaggggaagagcaggatgtggacggcggcgccgacgatcccgcggtagtgttcgacgcctgcgagggggacttggacgcgctcccggctgcggcggagtacgcgcgtcggatgaaggacgtgggcatgcgggttgtcgcgcttctctccgggtgccccgacacgggcttccgggagaagcccttcgcggaggggaggaggaagccgcggtgcctgctgtgggcctcccgggtctccaccgccgatacggcacctccggccgtcgggaaggcgaaggcgtacccgtacgtcgtggcgcttcattgccagtgggaggcatcagggcaggaagaggcgccgccaagctgggttatgaaccacggcggcgagtggacggcagtggccgcccgcgacgacgcgatgcttgtcaccgtcggcgacattgcccagaacgtacagcatcgagcggcagagatggcgagcatccgttttgtttatgcagcggccagcgcccagcggcatcaaattctaaagtgtggagcaatggcaagttgaagaaagtgagagggatggctcgccccacatccgcaccacccatggcggcgcagcatggcgagaccgaccgtctgtcgctgacggtccttatcactctgcctttggacaatatcgtctcgcccttggtcccgctctccaatgcggccggagaaggccgcgaggccgaggcaaacggtgccggagccgacgacgaggatggatggaggtttcactctttcctactggaggactatgcgtggagggtgtacaaccagcggcttcagttcaaggatccattggtccggtatcggatatgatatttgccgcgatgatctatagcgcttctttttttccttttggtgtgccaatatgcaactcatgtcatgtgtgacttcgtgttgtgatctactatttgccttcggagtggtttgagtacatcccgccttgggtttcaatgtatgttgctgacgttttgacctttgctcaaatacctgagccgctgagggattcggacaagcagtaggattctatacgaacttccaaaaatccct

SEQ ID NO: 5744 - DNA, 1049 bp, Zea Mays
cctcccgaacggcaacatttcttttctccaaaccatataccctagcccgtgcacaggtgggcgcccgccgccacctgcggctcggtggactccggcatcgacacccctggcccccagcgccgcagatcgcaagctctcagcaacgcgtgcttggtaggaacccgtgccgaccgactcttcctctgcgggacggtctcgagtttggtcgggagatgggtgacgggagctgctgcgtctgcaaggaggcgccgcccaagtacaagtgcccttcttgtcgcacgccctattgctctgtcacatgctttaaaaagcacaaagaggaatcttgtcaaaagatattgcatcaggaagaaattagcaagtcagcattgcaggaggaagttacactgcacaccacatgcactgcagaatctccaaatacagcgtgccctacaaaagctcttgaagttgaggacctaagctggcttgttgacaacaatagactaaggtccttagcggaactgaaagggatccaagacgctctcagggatcctgaactgcagagaatgatacttcaaattgatgggtcttccgaatcagaaaaagaattggagaaagtgatggaaggtcaagcttttcgcgagttcactgataagattcttgacattgtcaacccacaagaataaccgtctaccctgtttggatggtataattcataacatatcttgagtcgcctgtttttccatgatggggtagactttagaacacatactgtgtcgcctggtgaaaggaaattacgtctgctgaaaaatctctcttgccaaatatagtttttcttctgtattctagtgttgtattctagtgtggtagacagcgactctacactgactactgagggtgtgtttggtttggttttgacttttgctctctaaaaacgaaaagcaaacggcccgagccagaaagcagcttttttcaaaagcatgctttcttgcaatgcaaattgaaagcacatttgaatctatttttagcggcttttgaatggaaccatgtaaataatatggaagaacttg

SEQ ID NO: 5745 - DNA, 700 bp, Zea Mays
gttctgcaatccaaacatccgatggagcccctatcctgcacgcccgcagaaccgtgccaccgcccctcccgagacttccgccacgcctccccaccgtgcgagattgccgcccccggccgcgagtgtgctgtgtgcccgtcgagacaactgttgtctccttccccaacctgcagaatcgtgcccaccaccgccacctctcgcgcgaggcccgggtctgcggccaccggcacagccagcatccttccctgcctgctcgctatgcatcatgtccgcgttcagcgagacaaccgtcgtcctcccttgctgagttaagtctccttgtgtgcagatgaaggcaatggagtatggatctgtgccagtatagataagcttttccagctatgaatcaagatcaagggtgggatggttaggggttcgttgcggccatagccttcattgcaaggcttattcctccataaggaagctgtgaactgggcatctgctagagaaccacatgacctacatgaggcaccaactcctgaaattaagggtacaagtatcttatttttaaaggagggagagcaaggatctgtagccttgagaccccatacagatagatgcacaatatgtgtgaacaaaaaaaaacaaacaagaattatttcctataaaaatatatgtacaaatctgtgttggatgattctaatctttgaacacagggctt

SEQ ID NO: 5746 - DNA, 1749 bp, Zea Mays
  misc_feature (1749)..(1749): n is a, c, g, or t
gtgattcggcccattgtagccccgagacagcgtccgcctacggcctatccgcgtcagcccgccggcgagtcgcgcacgagacctgcgaggcgcgatggcaggccgcggcggcgccggccggcggcctcgcgccgtcttcatggccttcggcactcagggcgacgtcttccccatagcagcgcttgctgcagcttttgcgtgtgaccaacaggagtatgctgtggtgttcatcactcattcagcgcaccggagtttgtcagcacatctagcagccagcagtgttagatacatgcctgtgtcaagcccgcctgtcctcgctgccgaacagttagagaatatctcaagtgattctattcaatcaaaccatgagcgtgagtccttttcaatgcggaaaaaagccattcaagcggagcacaggaaagaatgcttgtcttttgtggaagaagtttttggaaacgacccaagcatcagtggggattttattgtgatcaatttcttcgctttggaaggttggcaccttgcagaactattccaagtaaagtgcgtcattgctgctccctattttgttccatataggtctgctggactgacattatccattggatgtgggcactcttcatggaaagttggggatcatggagaaatgattgtctgaatcttagccccattcctttcacagatccagtaaccaatcttcctttgtggcatgtgcgagaggagtcacctttattactgtatggtttcagcaaagaaattgtggagtgcccaggatattggccgttcaatgctcatgcttgtggcttttggtttctacctatggattggcaattttcttgtgacaaatgcatggagttgtctggaaatatcaattcttcatttggtggtatgttgtgtgcaaaccattcttccctggaacacttcctcacaaggaatgcttattcatcaagacctatatttgtaggattaagttccattggtagaatgggctttcttagaaatcctaaagcatttttaatggtgcttaaggctgccatagagtcaacggattatatgttcatccttttctcatctggatacaagccattggattctgcaattcaatctattgcttcatcagtaaatgaatcaagaggggtggattcaccttctcttggtggtgacagcgctctcctttttaatggccgccttttctgctttttaggatcaataccgtacagttggctttttcctaggtgtgcagccgctattcaccatgctggcagtggatcaacagctgcagcactacttgctggtatccctcaggtaacatgccctttcatgatggaccaattttactggtcagagaggctacagtggttgggagtggcgcctgaacccctacaaagacaaaatctagtcccagataatgatgacgccttgagcatccacaatgctgcagatgtgctagttggagctatcaggtcagctttatcgccggaaaccaaagctcaggcggccagaattgctgataggctttcttctgaggatggaattggagaagccctcaggatattgaaggcgagagtgttgactcagaacaaaatcatcagctcattcatcgcaagtaaataattagtactgatatgatatgaggcattgatttaaaccactaaatttaagaaatggacttctaatgcaccgccccatgtaagatagagtaatttctcaaaccaatcaactttacggggcgtttggatccctttattttan

SEQ ID NO: 5747 - DNA, 837 bp, Zea Mays
ccgtcgtatatatatatatagtatactagtgcgtctagctcggcactcttcgcccctcttccttggtccaatggcgtcgtctctcggctccgacgacagtgccggctccgccgccgccgtctgctgcatgtgcggcgaccatggcctgccgctggagctgtaccggtgcgacctctgccgcatccgtacacagcacagcgacctgtacccggcggcggcggcggcggggccgtaccggagctgcaactggtgcctcaggcagggcggcgcagacgtcggagggggttgtcattcgccgtcaccggttaataaggtgtccgcggcggcaggaacaggaaccagacggaggatcagcatcaacggttctcgtggcgacggcgagtcggcgaccgctatggatgctccagcaggtcagcgttctcggcggaccccaggaagccgatcaagaagcctgaaaagggccgtgaagaaagagcggtgcagcggccggagccggtgctcacgacgttgtctaaggaaacgaggggggtggtgcagcctgccaagccgcggttcaaggtgaagaaggtgcggcggtacaagttactcgcggaggtgatctgctagtatcagtaatttagtatagtagtagtcagtggcggaggactaaataaaattaagatatagactgggtcgctgggccattgtagtttggatgaattgcttatgaaatattacttattagtctatggttagcagatcatgtatatagtcatgtaaaataatttttactataggatgtactatttatagaatgaactctaaagtaaaagattatataaagtagcaagcttctag

SEQ ID NO: 5748 - DNA, 1531 bp, Zea Mays
cacggccacagtaccacacagaacagtagcaccgggctccgggcaccagggcaggcgaattcctaggttcgctggagcctggtccgagggatggccgccgcctcgctcgcgttggcgagtcctctccggcttctcctccgcgtccgtcacccgcgcggagccatcgccgtcccgtgctacttcatctcgcgaggacggtatagcaccgccattgccgttgcagcagcgagggatttggcggtgaaaggaagcgtggacaggaattcagcggaggaagtcaggaacattctgaatatggcagaaagggcttcccaacgaagaaatgtttttcacaccaattttcttactccacctatagtgaaagaggctatgctggcacttgaaaagtttgcagataccaaagcagtagctcagggtggctaccctcaggctgagaggtgccgaatatctgttggacacccggacgtcatgacaagtaacccagatgtggttgctgctttgaggaataacaagggagaaagttggagatattcttttgcagggggaacgaggtgcccaggtccttgttgacccagaacttgttgactatctgatttctacccttgaaaaggtggggaaagttggtgtttcatgcactcagattcctttgcttgctctagaatatgaaccaccaaggaccaattcatttaaaactgtagaatcatcgctcagggttgatgcccttgccagtgcaggatttaaaatctcacgcacgaagcttgctagcttgataagttctggtgatgttcgtgtgaattggacaccaacaacaaaaaatggagttaccctcaaatctggagatgttgtttctgttagtgggatgggaaggttaaagattggggaaattgtgactacgaggaaaggaaaatatgcggttgagttgattcgctatttgtaatcatggaactggtctactttcatgtctgaaactctgaatttaacggttgaagcaaaagtcccgtggctcctgtgtttttttgggtcaaattattagctactatctcacgaaaaacatactcagaatccttgtacactgaagtattgctgtatttttagctaaatattatctatatgtcgctgtgtttggttagatgtaggaatgggagtttagaggtttgtttgtttggtggggataagagttttgactggatggggatgggagaatagggggtaaactcccaccaaatttttacgtggaaggtggatgcccccgcactgtccatcatgatttatgacgcaattttttactctcaagtctcaaaccctcacataaacaaaggtcatgaagtcattttccaactatcacttttgatgctttcacaaaccaacttccaagtgaatttcctccgccaacatctattgctactgctgaatccaatgctcttgccacttgccagaggcaccgtatgtggttgcccatgtttagagtcagagagagtaccatgggccttctggctgaaagaagctgcaaccactctcctgttcttaacaa

SEQ ID NO: 5749 - DNA, 1063 bp, Zea Mays
caaaaaaaacatgtgtggcgcgcaaattagtggctgccccaaataccagccgcgccgccgcagcccaaaaccctatctcccttcccgtaattccagtcgtcgcgctccacccaaaaattgatgccgccgccgccaatcgccgtccacagccgcgcgccctagccggccggttgcaaccgccgtcccagccgcgcgcccaagcaggccggcccccaacgccgtcgccgtgatcctattacctgatgcggcggcaccaaacctcgcaaggtcgaagcccgtacgccgccctttgtcgcccaccgcaatattcagaggtgcgatgaaaggcaaactgatagtgtcttgcccccttcctcctgagaggataccaagattctaacttcttttcaaggatgtctgagaaaactgcagctcatcacgtgcacacaatcagctacctagcccaaggtttgtatttaatcacgttcatcaaatatgatgggtatagatttcttgtttggtctactagtcaagcaagagaatgcccttcgttttgctgaggatgcaaaccagttgtgctatggcacctgcctttagtgtcttccttacttcctattcatatggcgattctatgagtatggcacgagcagtagaagctataaaggagggaggtcctagaggtagtaagtcacttgtttactccatgatgacaatagcaagcagatcgcggtggtgcctatggatgctacaacaagaaagatcaaaagttcttttggatggatgcagctagatattttgttttgtattttctccaaaagagaaatttgcaagtgaacttaaaattgtgaaaccaacatgtggttgtactagctagtatctctaagctttcacaagccaaacttagtgttgttgctgcttattttaatctttattacaacaaaagcaaacttgtgaactttatgtgaatgcagtacaattgttattgtcatgaatgaaaacatgagctatgtatgaatgcagtacaattgctatgtatgaatgtagtataattgttatctgatgttgatgataattggaaactgct

SEQ ID NO: 5750 - DNA, 1256 bp, Zea Mays
caaaaaaaacatgtgtggcgcgcaaattagtggctgccccaaataccagccgcgccgccgcagcccaaaaccctatctcccttcccgtaattccagtcgtcgcgctccacccaaaaattgatgccgccgccgccaatcgccgtccacagccgcgcgccctagccggccggttgcaaccgccgtcccagccgcgcgcccaagcaggccggcccccaacgccgtcgccgtgatcctattacctgatgcggcggcaccaaacctcgcaaggtcgaagcccgtacgccgccctttgtcgcccaccgctcccagctatctacgtcctactcctgcccctggctatacctatgactgcgtctcggcagccggcgccctgtggaagccctccgcttcatatccccgtgctgtcgtgcagccagctgccaggagggacacctgaccacacaaaatggataggtttttttagcagcaaacaagactttatcgatgtagttgaggcaatattcagaggtgcgatgaaaggcaaactgatagtgtcttgcccccttcctcctgagaggataccaagattctaacttcttttcaaggatgtctgagaaaactgcagctcatcacgtgcacacaatcagctacctagcccaaggtttgtatttaatcacgttcatcaaatatgatgggtatagatttcttgtttggtctactagtcaagcaagagaatgcccttcgttttgctgaggatgcaaaccagttgtgctatggcacctgcctttagtgtcttccttacttcctattcatatggcgattctatgagtatggcacgagcagtagaagctataaaggagggaggtcctagaggtagtaagtcacttgtttactccatgatgacaatagcaagcagatcgcggtggtgcctatggatgctacaacaagaaagatcaaaagttcttttggatggatgcagctagatattttgttttgtattttctccaaaagagaaatttgcaagtgaacttaaaattgtgaaaccaacatgtggttgtactagctagtatctctaagctttcacaagccaaacttagtgttgttgctgcttattttaatctttattacaacaaaagcaaacttgtgaactttatgtgaatgcagtacaattgttattgtcatgaatgaaaacatgagctatgtatgaatgcagtacaattgctatgtatgaatgtagtataattgttatctgatgttgatgataattggaaactgct

SEQ ID NO: 5751 - DNA, 938 bp, Zea Mays
ggaacattccagtccggtccatccgggcccacttgtcatctgactcagtgtgtgtgagtgggctactaggcgtcttccactcttcctctcctttccagaccccagagccagagatcaaccacctgcggcggcgatggggatcggtgagcacttcgagggcgtgaagcagcactgggcgagcaacttcgccttcctcgactactacaagaaggtctacggccgcgccgagcccctccccaagtggtccgacgccgacgtcgacgagttcatcgcctccgacccggtctacgggccccagctcaaggccctgcgggagtcgaggaagtttgcgctcgccggggccttcgccggcgccgcccacctcggcggcgtcgcgctcaagtactccaaggcgccgcacggcgtcgtgctggcgaccgggttcggggcgatcacgggcgccgtgctggggtccgaggtggcggagcactggtaccagctctacaagatggacaagcagggggccaaccttaggttcatctactggtgggaggacaaggtctcaggtccgtcctgtcccccgtgccatcttgtcctctctgacgatccagttcctgtttagtgtacgtggttaattctggacagaagagctgaaccatgttgaattgaatgatgcctatttgagcattccagtttgacaaaaacattgatgtctattatctgtaatccttattgttttgttttgtttcctagtttttctctaataaggtgcgtatcggttgtggaaaccaactggacgatgtatttttcatctctgtcagtagtgacatttatccttagtacttacaatgtttatggtcaatctggtgcaaacagcaaatcctctccgttttcaagtgggactgtgctaaaacgcccattctgctggtccgctaccaccatgcctacgtcaagcaaac

SEQ ID NO: 5752 - DNA, 1631 bp, Zea Mays
atcatattctcctgccaccactattgtattgtctattgcagttgatatggatgcaaaagagggcacaactactggggtatctgccaaggacagggcaaaaacggtcatgactcttgcatctcctgactctaagcctgaggacctcaaccgccctggtcatattttccctttgaaatacagagaagggggtgttctgaaacgagctggacacaccgaggcatctgttgaccttgccatgttggctggattacctcctgttgctgtcctttgtgaaattgtggatgatgcagatggttctatggctcgcctaccaaagttgcgtgtctttgctgaaaaggagaacttaaagattatatctattgctgacttgattaggtataggaggaaaagagacaggctaattgaacgcgcttctgttgcacgcttgcctttgaaatggggcaatgtccatgcatattgctacaaatctgttattgatggcattgagcatattgccatggtgaaaggtgatattggtgacggccaagacattttggtgagggtgcactctgagtgcctcacaggcgacatttttggatccgcaagatgtgattgtggcgaccagcttgcgatggcaatggagatgattgagaaggctggaaggggtgtattagtctatctccgtggacatgaaggaaggggtattggtctgggccacaagcttcgtgcttataacttacaggatgatgggcgtgatactgtggaagctaatgaggaacttggtcttcctgtggactcacgggaatacgggattggcgcacagatattgcgggatctaggagtccgttcaatgaagctgatgactaataaccctgcgaaatatagtggtctcaagggctatggattgagcattgcgggcagggtgcccttgattacgccaattaccagtgagaaccgtaggtacctggagactaaaagaacaaagatgggacatgtatatgggttggccaatgcgcaggccaacctagcaaatggcagccagagcacagaagagaatcattaggcccccaagcatgtttccattattattccagcaatccagcttggtgacacaaaagagtgatatgattcttcgtttggggagttcctgaaatcttctcccccgatatttccgtagattctttcgcaaaaaagccgatatttcggtagatcgatttgttcttcaattgtaactgtaggtttcaaggtggctaatgagtaatgagcctaataatgaacggtaggtttcaagatggccagtaatgatatacacggagttagtcgtcataatgtactgtgttgagttttacgactttatcgccttggtgtggttgtcctgatggagttgtgatcgaatggtgtggcttttcactgccctttccttcacccactaaaaagcatagaatgtggagaattttaccttgagccattatagaagtttataatactttatgtgccacgaaatttttggttgtccctcttcatttcttcgtgcaaagttttctggttgtgtgtgccacttctgtcagtctcgtcacgtcgaagaatcagttcttatctgaggtctcttatctcatctcctattatgtcttttatttcaaactttactataa

SEQ ID NO: 5753 - DNA, 788 bp, Zea Mays
atggataggggagtcgtccacaaatcatcggcggctctagtgcgcgagatgggggaggcaggccatagccatggatggtggagcatgaataatttgctgaggcccccctttgagcagcagcaccacgcttctcttttcatgccgtccacaaccaccagcagcagcaccgccgccgccgcgccctcttcttcttcgtcgtcgtcgccgcctctccaatccttctcctctctgctgctctcgaaccactacccgctgcctaccaccaccagcacgtcgccgtggcagcacgacaccagcatcacaagtagccatggccagccggattcttggagccagctcatacacagcaaggaaagccagcagatggcgtttccaactacgatttgttcggaatccggaggcggcggcagcagctacgtcgtctacggtgccgcagcggctagccatgggagcagcacaagtgatgtcgagatccagttgccatggggaagcagcagcgtactccagcagcagcagaaagcgtcctctcctaggtcttcttccagaaccacagcgacgacgacctctcccggaagcaacatgctggagttctccaacaacagtagcagttcaccacgtgagtgcatcagtacagtatctggatcagctttcaagaaggctaggacccaagaaccctccccggctcaatctactgtgaaggtgaggaaggagaagctaggggatcgaataactgctctccaccagcttgtctccccgtttggaaagttatatgttggagtggatcaaaa

SEQ ID NO: 5754 - DNA, 1824 bp, Zea Mays
gaggggggcaagcaataggtgccctgcacgtccttgctttgtgtgtgagacagtgagagagagagagggagggagggagggatcagagggaggagaatatggataggggagtcgtccacaaatcatcggcggctctagtgcgcgagatgggggaggcaggccatagccatggatggtggagcatgaataatttgctgaggcccccctttgagcagcagcaccacgcttctcttttcatgccgtccacaaccaccagcagcagcaccgccgccgccgcgccctcttcttcttcgtcgtcgtcgccgcctctccaatccttctcctctctgctgctctcgaaccactacccgctgcctaccaccaccagcacgtcgccgtggcagcacgacaccagcatcacaagtagccatggccagccggattcttggagccagctcatacacaaggaaagccagcagatggcgtttccaactacgatttgttcggaatccggaggcggcggcagcagctacgtcgtctacggtgccgcagcggctagccatgggagcagcacaagtgatgtcgagatccagttgccatggggaagcagcagcgtactccagcagcagcagaaagcgtcctctcctaggtcttcttccagaaccacagcgacgacgacctctcccggaagcaacatgctggagttctccaacaacagtagcagttcaccacgtgagtgcatcagtacagtatctggatcagctttcaagaaggctaggacccaagaaccctccccggctcaatctactgtgaaggtgaggaaggagaagctaggggatcgaataactgctctccaccagcttgtctccccgtttggaaagactgacacagcgtctgtactccttgaagccattgggtacatcagattcctccatagtcaaattgaggctctgagctccccgtacgtgggcggcagcaatggaggtgggggcggctccaagcagaatcagcagctccacgaggctagtgcgcagagagaaagcaggcacagcatatttccagaagaccctggccagctcctgcatgacagcagcgcaataaagaaacgggccggactgcagcctgctgatgaaagctgtgatgaagagaagaagaaggatctgagaagcaggggcctgtgcctcgtcccggtgagctgcacgctggacgtgggtgtggacgtggtcgctggccccgcagactactgggcggcagctgcgccggctttcggcatggggttcggtgcgtagatgatgctggccaggacgtacgatcgatgctgtgaggaacacttgtgtgtgtctgtgtgcgccatatgcatgtatgggctgcacctgcatgcatagcatcaggagcagccatcctggtggaagctggagaatgctcaagaaggctggctcctcttgatgctatatatgcgtatggtatatggtgcacacaccgacaatgcatgcatgggcatatattatatagctacagagacgctgagagtatatgacttgcgtttctgtgtttgtgtgtacgtgatgagatcttgtctagctagctagagcgagatcaaacaatttgggtgccatggagaggggcgctatagctgcagatatttaattgttaaggctaggagtactgcgcgcggatctgtaagcaatgcaactcttttaagtcttcgtcattgaggcgtcactgtgtgctatatatatatgcatggccgaaatgtgtaataagtttgtgcgtgcatgctattttccccaaagtttgatcaatttatcgcatcatgccacgatttgtaatctaggttgaatgcac

SEQ ID NO: 5755 - DNA, 1081 bp, Zea Mays
cgtccgcccaggccagccccgcccccgcccgcccactctcccgaggttctcaacacaacagacaacaccgctcaccgcatatatatatatatagatgggttccgaggggccttctcccgtcaccgtccacgtcaccggattcaagaggttccatggagtcgccgagaacccgacggagaggatcgtgcgcggtctccagccattcatggagacgagagggttgcccaagggccttgttctcgggagctgcaccgtccttgaggccgccgggcagggcgcgcttggcccgctgtatgaactgctggagtcgaccgtctccggccgggaacgtcaggagcgagtaattctgctccattttggcgccaacagtggttcacataggtttgctcttgagaatcaagctgttaatgaagctactttccgttgccctgatgagctaggatggaaaccacagaggacacctatcatatcgtcagatggaagcatcttacacgcaagacagactacactgccagtggaggagataagcaagtctctccaacagatgggatacgacgtggtgccttcagacgacgctggtcgatttgtgtgcaactacgtctactaccactcactcaagtttgcagagaagcatgggatcgggtctctgtttgtccatttccccctcttcctggcaatcgacgaggaagtccagatgcagtttgtcgcttcccttctagaggtcctcgcttccttgaacttccagtgaacctagtggtagatctaccacttcccggtggtgtattgttcccagattatttgggaaaggtttaagttgttcccaacttacctgtggagaataagatcgaggaatcattcgtggaattatgtgtgtggttcaaaatgtgtaggggaacaaaaacaagtcttctcaaagaacatgtacatgcagtccagatgttaatatcccaagcggtttatatgacaggtgctgttgcagcgttgttctcagagatgctgcttatggatatactgttcgctttagattaaaaccggttgtttagactgatacaactgtaatttataaaaacaaaaacactgt

SEQ ID NO: 5756 - DNA, 1640 bp, Zea Mays
agcgaactagcagactgctctctgttgcgagctcactacagaatcacttctgtcctgtgaaaatggcggatgaactacgctcaacgtctgtgggtcagaagttccatgggcagtccgtgctgttgagcagaatctcttcctattccgccatgaacaaccctgtattcaacaatgcctattctgcttacaatgtgccccagaggtcatatcatgggatgaatgcaactgctggactctcatctgtcatggcaccatctcctgtctttgcttctgccccaaaagagaaaggcttttctggatttatgatcgactttatgatgggtggagtttctgctgctgtctccaagacagctgcagctccgattgagcgtgtcaagcttttgattcagaaccaggatgaaatgctcaagactggcaggctttctgaaccgtacaagggtattggggactgctttggccggacaatcagagatgagggttttgtctcactgtggagaggaaacacagctaatgtcatccgttacttccccacacaggcattgaactttgcgttcaaggatcacttcaagcgcatgttcaactttaagaaggacaaggatgggtactggaagtggtttgctggaaatctggcttctggtggagctgctggtgcttgctctctattctttgtctattctctggactacgcccgtacgcgtttggccaatgatgccaaggctgcaaagaagggtggtgagaggcagttcaatggactcgttgatgtttaccgcaagacccttgccagtgatggtattcgtggcctctaccgtggattcaatatctcttgtgtggggatcattgtgtaccgaggtctttactttggtatgtatgattccctgaagccagtgcttcttgttggtaccctgcaggataacttcttggccagcttcttgctcgggtggggtataaccattggtgctggccttgcctcctaccccattgacactgttcgccgtcgcatgatgatgacatctggtgaggccgtcaagtacaacagctccttggacgctttcaagcagattgtcgcaaaggagggtaccaagtccctcttcaagggtgctggcgcaaacatcctccgcgctgtagctggtgctggtgtccttgctgggtacgacaagctccaggtggttgtcttcggcaagaagtacgggtctggtggtggctaaggatgtataatgatgatgacgacgaacaacaaacatgatgttttaggtgcctcctttaagtaaacatacgtacggaccctcgacaccattttaagttcgctctcgcagaggctggtgagtttgtagcgtggctgtgaccgcacctctttttatgtcagagattggaaataagtgacgttagaaattgctgtcttgctgcatcagttttttatactccgttttttgttttgcgcgtgcaaagggttgctcgaatgtatctatgtaggtttcggaatcacagcttactatgtttgatgaaggtgtatgttctgtgacctttggcagcatcacttcatctgtctagcgctacatgattttaaggatcatctggtattattacggtaacactcgatgtttgatgggggtagtgaatgctcatatgagtgggttcgagag

SEQ ID NO: 5757 - DNA, 1921 bp, Zea Mays
cttctccgctctcctgtgttcttttccgacgaagcagcagctgcaacgactccttaccaatcaaaccaatcccccgtcatcttcaagctccggggatctcagccgccaaatccgggccgtgctcgcgcttgggcatctgcggcctacgatggggagcgagtcggagcccgccaagggcctgttgccctacctgcagcgcgccgatgagctgcagaagcacgaacccctcgtggcgtactactgccggctctacgcgatggagaaggggctgaggataccccagaaggagcgcaccaagaccacgaactccatcctcatctccctcatgaaccagctcgagaaggacaagaaatcgttgactttggggcccgacgacaatcttcatttggagggatttgcattaaacgtctttgttaaagcagataaacaggaccgtgctggacgagctgacataaacactgctaaaactttctatgctgcaagtatattcttcgagattcttaaccagtttggcgagcttcaacctgatattgagcaaaaacagaaatatgccatctggaaagctgctgaaataagaaaagctctcaaagaaggccggaagcctgaagctggaccgcctggtggggataaagatgaagcacctgtcagtaccaccaccatttctcaagatatggggcaaagtccttccttcagcagtgtacaccagggcagtgaagcatcacctcgacctgtcaacatgtaggcgggatagcttttctgctgtgcagccaggaaataacgtccctcaccaaagtacagagttcaatgatcatccctctacccagttaccctattcaccgccaccaccctcacagtcccagcatccttctccatcacaatcttattcctctccctcgtatcaggcaacaacagattacccttcttctgattttcacaaaccatcccccaattattcaactcccggctacacaagcacagatttccctaccaatgaggtccacaaaccaccttccaattattccccacctccttacacaaggacagatcgcccttccaatgacggctacaatcctcacagcaatggtaaaccagatgtttcggcttaccctcaggcatatcaaccctcaccctacacatttgaccctcagcacaactctcaaaactactactccacggaagccccagctgttccatacaactaccctaatttccagtcatatcctagtttccaggacaacacgtcagcttctgttctgacgcatcagtcttcattctatcctgaaagtgatgatcccgcagctacatcacacactcctgcctcaaattcttctgtcccaacgcactaccacccaaccgctgactgttcacctcaagtcactcctccagctgcgccaccagctagccagtatagatatgatagcagttaccagcctgaagttgagaagattgctgaggcccacaaggcagccagatttgcggttggtgctcttgcgttcgatgacgtatctgttgctgtggatcacctgaaacgtgcactggatcttctgacgaacccatctgctgaaccccattagctctttgcaccaccgagctcttgtcagaagcatcatctgtacaaatacaagattggtataccaccatggatatattgccaggtcgcgtacatatgagaggggttaccacacaaatctaggagataataagcgagccgtgtgggcttttgaagtcacacttaaggaaaccttattgtgcaaaattcaattatcttattcagagttctgttctacgtaatccattgtattcatttgaatattcttgaggtctggtatggtattttgggtatggacggatgatgcagtgcctgctttgtttgtctcttccatgatttgtcatgctgctgtcaccctcgtgaagatgattt

SEQ ID NO: 5758 - DNA, 2912 bp, Zea Mays
cacattgcatccaatgtactccatccattataaattggcgagcacaattgtcctggaataatcccactagccatcaaggatgtcttcagcatgatccaagatagtcctggaagagaatttttgctccgtgtgtcgtaccttgaaatctataatgaggtgataaatgatctacttgatcctactggccaaaatttgcgtgtgcgggaggatgcacagggaacctatgtagaaggaataaaagaagaagtagttctgtctccaggacatgctctttcttttattgcagcgggtgaagaacatcggcatgttggctctaacaacttcaacttatttagcagccgaagtcatactattttcacattgatgattgaaagtagcgcccgtggtgatgagtatgatggcgtcatgtattcacagctcctggctctgagagctccaagacagagactacagggctaagaagaagggaagggtcatacattaacaagagccttttaacgcttggaacagtcattggcaagctcagtgaagggagggcaacacatataccctatcgtgattctaagttgacccgtctgctacagtcatcattaagtggccatggtcatgtctcactaatttgcacaattaccccagcatcaagtaacatggaagaaacccataatacattgaaatttgcaagcagagcaaaacgtgttgaaatttacgcctctcgtaaccggataattgatgagaaatcattgatcaagaagtatcagaaagaaatatcctctctaaagcaagaactcgatcagctaaggagaggaattgttggtggtgccagccaggaagaaattatgagtttacgtcagcagttggaggagggtcaggtcaagatgcagtctcgtctagaggaggaagaggaagcgaaagctgctctaatgagcaggatacaacgcttgaccaagttgatacttgtttccaccaaaaacaatattcctgccttgacagatggtcatcagcggcataattctgtcagcgagcaagataagttaagcacttcacaagatagctctacacttgtccaaaatgagggcacaacaaaagaccacctaccagactccttagatgagatcaaccaattaagatctggcagtggtgaacattcttcagctacttgttctgctacagattcaatgcagatagagaatttagagcgtgaaatccagcaaaagagaagacatatgcgagccttggaaaaacaaatcatggaaagtggcgaggcatcagttgctaatgcatccatggtggatatgcagcagactattacaaaactaactgctcagtgcagtgagaaggcttttgagttagagttaaagtcagctgataatcgtgttctccaggagcagctacaacagaagaatgcggaagtcaacgatttacaagaaaaagtttttcaccttgagcaacaactctccgcaaaagtgggtatatcccctgagcaggaaactgattgcgcacagcaggaggctattgatttgaaatctaaacttcagtccaaggaagctgaattcgaaaagctaaaattcgagcatctgaaaattactgaggaacagtgcgacttgatcaatcaaaaccataaattaagtgaggaagctgcatatgcaaaagaattggcatcttcggctgctgttgaactcaagaatttggctgaagaagttacaaagctatctgtactaaatgtgaagcaagcaaaggagttactagttgctcaggagatggcacattcaagggttcatggtagaaagggtcgtacaaccagtaggggtagggacgaggttgggacatggagccttgatttagaggacatgaaaatagagctacaggccagaagacagagggaggctgctttggaagctgctttggcagagaaggagcttctcgaagaggagtacaagaaaaagtttgacgaggcaaagaaaaaggaactgtctttggaaaacgatctagcaggcatgtgggttcttgttgctaagttaaaaagaggggctttaggcatatccgattttaatgttgatgatcgaactgttaacctagctgatataactaatggcacaaaggaaaacaaaggtgaaaagaattttgctctagttgagaagcaagtttcagaagattctgtgaagtcgctgagcacagaagaacatagaagtccagagtttgaaccacttcttgttcgtctgaaggagatgaaggaaaaggacactgatcccctgagcgataaagatgggaactcacatgtctgcaaagtttgcttcgaatctgcaaccgctgcagtattgcttccttgccggcatttttgcttgtgcaagccttgctcgcttgcctgttcagagtgccctctgtgccgcacaagaatagcagacaggataatcacgttcacatgaacggcgtgctagcttcaggtgccaaacacttagatgcttgcatgttggtgctcatgccaacgctatccctctgaaatgtacctaatgatgtgctgtgtatctctgacaggccattctgaagcatggcgcactcttgtaaaatggtcggtggtatatgtttctctttttttccttagcaaagaaggtgccttttatgttccttctgtgttgtatcgccattctttgggttcccctatatggctatatagcttcaccttacgttctttatcaaggagctgcaaacgatgagaccccattggaatgcaggaattgtacaggaatttcacaaaagttcattttcatagaaaaaacacaacaaaaaggcaaaattactgtgttctagtggagccctgacttctcgctctgcaaatctctatctctgcaaatttttcaaaaaaactcctacatttttttataatcaatctgtacttatagtctcttatctactat

SEQ ID NO: 5759 - DNA, 1589 bp, Zea Mays
ggaagctttttaggatgttttgctggatttcctttgtttggtactgtggctgggtggatcaaagaaggttgctgctgtgaaaaaggtcatagagaatatgcaagagcaggcttcctatccagctgaccaacaagtccttatacatcaaggaaaggtgctcagcgatgacaccacattagaggaaaatcaagtgactgagaataatttccttgttataatgctcagacagaacaagggatcatcaagtgcagcaccggctaagacaactgcgaatcaggcacctcctactcagacagtgcctgttgttccacctcaaacgtcagcagccccagctgcaccagcacctattgtacctgtcagtgcactggctgcaactgctacagcctcagcagctcctgctgttgctgtatccaccgaggcagatagttatggtcaggctgcctcaaacctagttgctggcagcaacttggaaggaacaattcaatccattcttgaaatgggtggcgggatatgggacagagacactgtactacgtgccctgcgggttgcgtataacaacccagagcgcgctgttgagtacttatattctgggattcctgaacaaatggatgttcctacatcacctccgagtatccagccagtcaatcctgtccaggctgcacaagcagctcaaactgcagctccatctggaccaaatgctaaccctctagacctctttccccaatctcttccgaatgcttccgccaatgctggcacaggaaaccttgatgttttgcgcaataacgtacaattccaaaacctgcttggtttggtgcaggctaatcctcagattttgcagccattgcttcaagaattgggtaaacaaaatccccaggttatgcagctaatccaggaaaaccaagcagagttcatgcggatgatcaatgaaccacttgagggagacgaagagaatgaaatgatgctggaccagatggcggatgcagctgagaccattgcagtgactccagaggagaacgaagctatacttcgtcttgaagggatgggctttgaccgggcactggtcctggaagtgttcttcgcgtgcaacaagaatgagcagctgaccgccaactacctcttggatcacatgcacgagttcgacaacgatgacgggctcggagggccaccgctatgagggcgctctcgatccctacatcatgcgaacgaaggctgtagggcagtagtaggaaaacgttttgggattcgtcccgtctgttcgctcactctacatattcgtttggctttgctgtttagtacagaatttctagatttacggacttactacttgatatcctgatatagaggtcacggccaagcttactttttttccccctggatcaacttgttagcttactactatgttttgtgctacttcttgccgcattgggccagcggttcaacctggcaagcgctggctgcagcagtagcaccgagatgcttgtgggtttcgcggtggttcgtttaggctttggcttctacggattggagcccgggtttgattcctagttagattatttctctaatttatatagattctgatgagctagaat

SEQ ID NO: 5760 - DNA, 3372 bp, Zea Mays
tttacttggaacatttgggctagtttgactcaggctgtatattctacttcacctcccaaaactgcgacgtctgcgccgaagcaaaaccagagcgctgcaaagcaaaacggaacagttgggagcagcagtgcgagcaaatccccggcgcctgcggtatctgaatccaaagctgaaccatctgctcctgtcaccaagacagaaaccgatgccagtgcgaaggttgaagagctgaagccctcagtggatgatgctaaacccgtagaaagcataggcatccctgagccggtggatgctaaggtggacgccgctgcagctactgatgccgcggcgagtgctgctgatgacactgaagacaaggaacatggccctttggctgggcctaatgtgatgaatgtcgtcgtggtggcttctgaatgcgctcctttctgcaagacaggtggccttggagatgttgtgggtgctttgcccaaggctttggcgaggagaggacaccgtgttatggtcgtgataccaagatatggagagtatgcagaagcccgggatttaggtgtaaggagacgttacagggtggctggacaggattcagaagttacttattttcactcttacattgatggcgttgattttgtattcatagaagcccctcccttccggcaccggcacaatgatatttatggaggagaaagatcggatgttttgaagcgcataattttgttctgcaaggccgctgttgaggttccatggtacgctccatgtggtggtaccgtctatggtgatggcaatttagttttcattgctaatgattggcatacggcacttcttccggtctacctaaaagcctactaccgggacaatggtttgatgcagtatgctcgctcagtgcttgtgatacacaacattgctcatcagggtcgtggccctgtagacgacttcgtcaactttgacttgcctgaacactacatcgatcacttcaaactgtacgacaatatcggtggcgagcactgcaacgtttttgccgcagggctgaagatggcagaccaggtggtgaccgtcagtaatggatacctatgggagctgaggacatcggaaggtgggtggggcctccacgacatcataaaccagaacgactggaagctgcagggcatcgtgaacggcatcgacatgagcgagtggaaccccgctgtggacgtgcacctccactccgacgaatacaccaactacacgttcgagacgctggacacgggcaagcggcagtgcaaggctgccctgcagcggcagctcggcctgcaggtccgcgacgacgtgccactaatcgggttcatcgggcggctggaccaccagaagggcgtggacatcatcgccgacgcgatccactggatcgcgggacaggacgtgcagcttgtgatgctgggcacggggcgccccgacctggaggacatgctgcggcggtgcgaggcggagcacagcgacaaggtgcgcgcgtgggtggggttctcggtgcccttggcgcaccgcatcacggcgggcgcggacgtcctgctgatgccgtcgcggttcgagccgtgcgggctgaaccagctctacgcgatggcgtacgggaccgtgcccgtggtgcacgccgtgggcgggctccgggacacggtggcgccgttcgacccgttcaacgacaccgggctggggtggacgttcgaccgcgcggaggcgaatcggatgatcgacgcgctctcgcactgcctcaacacgttccggaactacaaggagagctggcgcggcctggaggcgcgcggcatggcgcaggacctcagctgggaccacgccgccgtgctgtatgaggacgtgctcgtcaaggccaagtaccagtggtaagtgagttacgccgacgcccttcatgtcgcgggacagtcctggacgccctgggcactgcgtgctcttctcacgcggctttgctgcgtgcggcgcatttgctcaattggcgcggggcgatggtggttggcctacgtcggcttcggctaggtgccttcggattttcagcttcttaccaccaaaacaccaaaagctgctgcggactattaaacgctcagtttttcagttagcttctataaaaatcgatcgtaaaaatcatctataatcaacataaacacataatggacggagtacttttaataatagaaatctatcgctttgtagatcttaccctatggacaccttcatcttgaaaattgtttggttgaaataacagtgagttgtatattctataagaaatatccatcattatggcattgtgaagagggtatacaagaaatatttgttatgacattgcgaagacggtatatatgctaattggttggattaaaaggtagctaatacaatagatatatgtaacctattttttctcataactatattatcgttcactaaccaaagcattaactttattctatagattcttggaaatctatttagccttcgtaaccttttgtttagattttagatacttttcacagtcagattctctacatagtcagattttcaaaaaaaaaaactggtaagaaaaaagctaaactaaacagacggaatttgggtgggcgcgatgataccactgggcacgggcacaggataatatgaaagcgacggagtgatgtatttgagctacggtaatggcctgcatttggttcttagtctacggctatgttttgatccactacatttaaagaaactagtttctaaacttggtttctaaaaactaacttttagagacagagaactgaatagaggtgtttgagtccactagtttttttaaatggtttatagctttttctataagtattgactgaccatcaaaaactgattttggatggagtaactggattcttggtttttaagaagccagaaaactagtttttagaaattgaataaaaaattgacctatttggaggactttaaggttttaaaactagtttctaataaactggatagatctaaacaggacctagatcacgttggacctggttcgagccttcgaggtgttctaaactattcagtattgagttggagatgaggcacatagaattcccactaataaatggggagttgtatgttacttatcgccacctctgttgtatgtttattggtgcaaccaagtttttcattccaggttccagtatataaggcataaatcacctttattttaaagcccaatgaatgtatttaattccctctatcaatactagtactaccacattgatgtatgtgtatctagaaagaacatgctttatgttatgggacaaacaaaaaatagttatatgtattggttacgtcttgtatccttcctattcacatcgaattgcttgctcgtcatcgatgtggtttttc

SEQ ID NO: 5761 - DNA, 2122 bp, Zea Mays
ctctgcccaaaaatttgaaatccttttcgcttccatcttcaccgacccccgagcaccctatctagatggcggatccaccgcctgtgctcacgctcctggtgaagaagggaccctgcgaggggaagaccgtgcatcgccgcgccggcgccacggcgctccgtgtcggccgcgttgccaagggcaacgacctctccgtgggcgacgctggcgcgtcgcagaggcatctctccgtcaagttcctcccgccgcctgcggcccggtggtccgtcaccgatttatgctcctccaacggcaccctcctcaacggtacgcctctcgtggccactatccccgccccgctctccgacggggacctcatcaagatcggggaggccaccgtgctcgccgtctccatatcgaccgaggcaggcccggtaccgggcgccgccgcgactaggcgttccgcgcgcaacgcagcagccgtggcgacggcggcggaggaacaggtggccgctgtttctcgcagggtcggacggaggaaggccgtttcggctgaagcccccgaagctgggaatgaagtggaggaggaagctgcactcccgactcgccgaggcgggcggaggaaggccgttgagcccgctggggtggagacggaagaggaagacgaagaggaggaagcggcaataccgcgccgtagcaggccgaggaaggctgcagcgacggttgtccttccgccacagccgcaaaatatgaggtctacgagggctgctgcaaggagagttgaggttttggggtgcgaaaacgatgagggagaagtggtgaggaccgggtccgggaggggtcgaggacgggttacaagggcaaatgcaaggaatggtacgggtgttactcccggggaggaggaagacgagagtgaggtggctctggccagagatcgggaagggacagctgccgagcgcaagggtgaagtggtgccggcggctgggagaggacgatcaaagaggagcagaggaggccgaggccgaggaagggctacgagggcaagtacaaggaagcctgagggtgctattgttgggaacgatgaaaatgagcaagaggaaacggatatagttgatggcagagaacgattgagtgtgttgaccgtaaatgatggttctcaagaagataaagtggcaaatgaggttgataagttggatggaaactcaaagacacccttagaggatgagaagatggtggatgtggagcatgcgacattgacagagaggacgatagaggggagggtcaatgctcagcattctcctgctgacagtggtggtctggaagaagaggaggtgaagaatttgaccaagggaggggaaatcgaagtagaaaaggaattgagggaaagagtgtcaccagagtcaaagctggatggtgttggagaagtggaaaagaatgacaagagggaagttattggtgccggtggagagaaaggccatgtgtgggagcgcaaaggaagacacagattagagaatatgacattgggggagtggtttgttcaaatcgagaaataccttctagcaaagaatgaagaggctgctgaaatggcgatatctgaagtgcaagagaaacaccggcggttttgtgaacatgttaaaacgttcgagctcaaaaagggtactgctccttgagattccatggataatctggaaatattttggacagcctagtgttggataatttgacaccatcagatatcacaatgaagacaataacactgaagcgttgcaaactgtagatgtcagaatgattcctggagtccagtcctgaacaaacgaacaaggtcgctgagctgccggggtgaggccactgttcaagccactggggtgaagacactatgatcttatcgctggagatatagcagggtgctacatttcactagcattaccgtttgtaatttgattcaccctcctttgtacataagaattcgtgatgttaaaggtcggaacaataaagttccattcgttgtttggccaaagaattgcacatatatcagataaaagaaagcagagtgatcttcaaatatctaaagaatttcatgtgcaatgcaacatgccaacatgctatactatatatacaaatttgtacggtttcatgacatttt

SEQ ID NO: 5762 - DNA, 2144 bp, Zea Mays
ccgtgagtccccgactccacaacagcggccggcactcttccccaactctgcccaaaaatttgaaatccttttcgcttccatcttcaccgacccccgagcaccctatctagatggcggatccaccgcctgtgctcacgctcctggtgaagaagggaccctgcgaggggaagaccgtgcatcgccgcgccggcgccacggcgctccgtgtcggccgcgttgccaagggcaacgacctctccgtgggcgacgctggcgcgtcgcagaggcatctctccgtcaagttcctcccgccgcctgcggcccggtggtccgtcaccgatttatgctcctccaacggcaccctcctcaacggtacgcctctcgtggccactatccccgccccgctctccgacggggacctcatcaagatcggggaggccaccgtgctcgccgtctccatatcgaccgaggcaggcccggtaccgggcgccgccgcgactaggcgttccgcgcgcaacgcagcagccgtggcgacggcggcggaggaacaggtggccgctgtttctcgcagggtcggacggaggaaggccgtttcggctgaagcccccgaagctgggaatgaagtggaggaggaagctgcactcccgactcgccgaggcgggcggaggaaggccgttgagcccgctggggtggagacggaagaggaagacgaagaggaggaagcggcaataccgcgccgtagcaggccgaggaaggctgcagcgacggttgtccttccgccacagccgcaaaatatgaggtctacgagggctgctgcaaggagagttgaggttttggggtgcgaaaacgatgagggagaagtggtgaggaccgggtccgggaggggtcgaggacgggttacaagggcaaatgcaaggaatggtacgggtgttactcccggggaggaggaagacgagagtgaggtggctctggccagagatcgggaagggacagctgccgagcgcaagggtgaagtggtgccggcggctgggagaggacgatcaaagaggagcagaggaggccgaggccgaggaagggctacgagggcaagtacaaggaagcctgagggtgctattgttgggaacgatgaaaatgagcaagaggaaacggatatagttgatggcagagaacgattgagtgtgttgaccgtaaatgatggttctcaagaagataaagtggcaaatgaggttgataagttggatggaaactcaaagacacccttagaggatgagaagatggtggatgtggagcatgcgacattgacagagaggacgatagaggggagggtcaatgctcagcattctcctgctgacagtggtggtctggaagaagaggaggtgaagaatttgaccaagggaggggaaatcgaagtagaaaaggaattgagggaaagagtgtcaccagagtcaaagctggatggtgttggagaagtggaaaagaatgacaagagggaagttattggtgccggtggagagaaaggccatgtgtgggagcgcaaaggaagacacagattagagaatatgacattgggggagtggtttgttcaaatcgagaaataccttctagcaaagaatgaagaggctgctgaaatggcgatatctgaagtgcaagagaaacaccggcggttttgtgaacatgttaaaacgttcgagctcaaaaagggataatctggaaatattttggacagcctagtgttggataatttgacaccatcagatatcacaatgaagacaataacactgaagcgttgcaaactgtagatgtcagaatgattcctggagtccagtcctgaacaaacgaacaaggtcgctgagctgccggggtgaggccactgttcaagccactggggtgaagacactatgatcttatcgctggagatatagcagggtgctacatttcactagcattaccgtttgtaatttgattcaccctcctttgtacataagaattcgtgatgttaaaggtcggaacaataaagttccattcgttgtttggccaaagaattgcacatatatcagataaaagaaagcagagtgatcttcaaatatctaaagaatttcatgtgcaatgcaacatgccaacatgctatactatatatacaaatttgtacggtttcatgacatttt

SEQ ID NO: 5763 - DNA, 2411 bp, Zea Mays
gcactcttccccaactctgcccaaaaatttgaaatccttttcgcttccatcttcaccgacccccgagcaccctatctagatggcggatccaccgcctgtgctcacgctcctggtgaagaagggaccctgcgaggggaagaccgtgcatcgccgcgccggcgccacggcgctccgtgtcggccgcgttgccaagggcaacgacctctccgtgggcgacgctggcgcgtcgcagaggcatctctccgtcaagttcctcccgccgcctgcggcccggtggtccgtcaccgatttatgctcctccaacggcaccctcctcaacggtacgcctctcgtggccactatccccgccccgctctccgacggggacctcatcaagatcggggaggccaccgtgctcgccgtctccatatcgaccgaggcaggcccggtaccgggcgccgccgcgactaggcgttccgcgcgcaacgcagcagccgtggcgacggcggcggaggaacaggtggccgctgtttctcgcagggtcggacggaggaaggccgtttcggctgaagcccccgaagctgggaatgaagtggaggaggaagctgcactcccgactcgccgaggcgggcggaggaaggccgttgagcccgctggggtggagacggaagaggaagacgaagaggaggaagcggcaataccgcgccgtagcaggccgaggaaggctgcagcgacggttgtccttccgccacagccgcaaaatatgaggtctacgagggctgctgcaaggagagttgaggttttggggtgcgaaaacgatgagggagaagtggtgaggaccgggtccgggaggggtcgaggacgggttacaagggcaaatgcaaggaatggtacgggtgttactcccggggaggaggaagacgagagtgaggtggctctggccagagatcgggaagggacagctgccgagcgcaagggtgaagtggtgccggcggctgggagaggacgatcaaagaggagcagaggaggccgaggccgaggaagggctacgagggcaagtacaaggaagcctgagggtgctattgttgggaacgatgaaaatgagcaagaggaaacggatatagttgatggcagagaacgattgagtgtgttgaccgtaaatgatggttctcaagaagataaagtggcaaatgaggttgataagttggatggaaactcaaagacacccttagaggatgagaagatggtggatgtggagcatgcgacattgacagagaggacgatagaggggagggtcaatgctcagcattctcctgctgacagtggtggtctggaagaagaggaggtgaagaatttgaccaagggaggggaaatcgaagtagaaaaggaattgagggaaagagtgtcaccagagtcaaagctggatggtgttggagaagtggaaaagaatgacaagagggaagttattggtgccggtggagagaaaggccatgtgtgggagcgcaaaggaagacacagattagagaatatgacattgggggagtggtttgttcaaatcgagaaataccttctagcaaagaatgaagaggctgctgaaatggcgatatctgaagtgcaagagaaacaccggcggttttgtgaacatgttaaaacgttcgagctcaaaaagggataatctggaaatattttggacagcctagtgttggataatttgacaccatcagatatcacaatgaagacaataacactgaagcgttgcaaactgtaggtttgtgatataaccatcattagcagggtggtgacattggaaattgtttattccagacttaggccttgtttgataatcttgctatggacatatgtattggaaactggatacatatgctgtacaagaaaatgtagaggtcaaaactgtttgtgaaaagaatagggcaccatgaaaaccgggcggcttttttttgcattataggcccgttcggctttcacggattcatggcccggaacgatggctagttcttacttcatagacagattgattatctaatttatataagattttttattagatgtcagaatgattcctggagtccagtcctgaacaaacgaacaaggtcgctgagctgccggggtgaggccactgttcaagccactggggtgaagacactatgatcttatcgctggagatatagcagggtgctacatttcactagcattaccgtttgtaatttgattcaccctcctttgtacataagaattcgtgatgttaaaggtcggaacaataaagttccattcgttgtttggccaaagaattgcacatatatcagataaaagaaagcagagtgatcttcaaatatctaaagaatttcatgtgcaatgcaacatgccaacatgctatactatatatacaaatttgtacggtttcatgacatttt

SEQ ID NO: 5764 - DNA, 2013 bp, Zea Mays
gccccagcttatacaccagcagtgtgaaaaaataacattgaaagataaatccttgggggattgcaagctttcgctgtgcggttgcggtcgctccccttcccgactccggccagaagcagcgacggtgccggcagccggttactccactcggcggcggcccatcctttcatgttttctcctccagtcctacaaatacaggacacaacacgcttgctcttgtgatactctattaaggtacggcctgaagatgagagtcctcttcatctgaatgttttgcttgaggaactactggtcgcctgcatttgcttcagtaaaggaggggcctgttcgacatcatataaagtttaattgtgtagtggtttgtggtgccaggggtccaagaccgagatatccccgtgtatggaaaactcgtaagaaaattgggactatttccaagtcacagaagcttgttgaatgtattaaaggtctgtctaatgtaaaggaggaagtttatggagcgcttgactcttttgttgcatgggaactggagtttcccttgatagtagtaaagaaggcactgaagaaacttgaagacgaaaaggaatggaaacgaataattcaggtcattaaatggatgttcaacaaaggtcaggggaagacaatggggagctattacaccttgttgaatgctttgatcgaggacggacggattgaggaagcagaagagttatttagaatggtattctcacgatatatggagggtttgcctcgtacatttttcatgagaattatttctttctattacagtgctggagagcatgataagatgttcgagatttttgctgatatggaggaactaggcgtaagaccagatggttctattatcaggatgctaggtgatgtatttcaaaagatagagatgatggacaaatacgaaaagttaaaaaagaaatacccaccaccgaaatgggaatatcgatacatcaaaggcaagcgcattagaattagagtttaccctgatagtaaaactgaagagacggcaaaaggagaccatgacaatgatgaactcggagaggtagaaagtatacagcttgataatgaattggaagaagaagcaagctcaggcctcgacaggagtgtattggacgatgcaacttgtggagaccttgaatatatataattcagagcttccatttggttttttttaatgcctgcttaatcaaagcggcctggagcaaattgaaccggtaacatcctagaacccatgccgttgtacttctaaaacacgggcatcgatatcttcagatctattttacttggattgactagaaactatgtgtcatgcgttttcccatcagcagtccttttcatgacattgtggtgattttaccacgagatgtgttcttcagagttcggttacttgatttatctgattcacaagcatgaggctcatgcttttcttgaaagcttccaaccatgttaaaattgtagcaatggtattaggtacaaacagttatcgtttttcctagtgcttatgatgcgtccatattcctgctttcctcggttgtgctgcagattgagatttttggtgtagccaatttgctactgctgccatgttaggaaatataaaagatcagccctcgtgttcaatggatttacggcagtttatcctcgcgtattctgtcaaatggtctggtaatcctattccattggtacacctacatctgactgcattcctgaacatgtggttgattgttggaggcaatatcctggacatgagagcagcaaccattatatcattcgtatggccctggcatggaaagacaccgtttctgacagagacttgtgttatctgctctagccatatccagtgtgggggcgaaaaccttcgcaggacatttgcgtggtcgattaccaaattaattagggcaggggagtggctggctgtactattctggggctataggagtaattaagaaaaactggggaagcgatcactccataaggacatgtacaaggccaattaatgactcg

SEQ ID NO: 5765 - DNA, 4430 bp, Zea Mays
gacgggaccaccaaaaaccactctcttgtgcgcgagcatcgttaaaattggccacgccgccgccgccggccggcgaggagccggtactgtctgcttgctcttcttttcaccgaaccaaaacgcccgccggaaagggtcaaaggggaaacagagatctcggtttgcagtgatgaagcttcgctgatgagctggcgcccgtccactcgcaacgacgctggacaaaagactagccgtcccgtcccgtcacggcccggcgacctggcaaggagaactgcagcgacagcgacagcgacctctggacaatcggctgtgacggtctttctcgtttgttttatagataggaaagaaataaagataagggttaaagctttctcgtagcctcctcagaacatacgggcgattgtcttttcgccggtgagccattaattccgtcgagctgatttcttcttgctggttttgccggttttatttttttcttttattggtaattcttggccgtggcgactgacgattccttttggcgcttgtaatagcacaagcatagctaaagtcgtcccgtttcctcctggtttcaatctgtttggaacttttgttagttccggtccatagggggaatcgtactatcctgtggtcaaaattgtcgcttctttcttttgtcgctctctctatacacaccaaaaagaaggaaaaaaaaccacgattttttctcccaactttgagtaattaccgagtgtttcttcaagtcggagctcggctctgtgcttagccgggaccctatacttggggttttggcgggtccatcggaatggtcagcgggaatctgctctaccggaggaagcgctcgtggcgtgccgatgagttcgtgagccggagcacgctgcaattgctcgactttgatgatggctcaccaccagagcatgcatggagaaggaaactaagtagtcatgctaatagattgaaggagttcaatgtcacattcagagaagcaattagaatgatgaaacttggtctccgactttggtcatacattcgggaagaagcttctcacggaaggaaagcaccaatcgatccattcactagagagggcaacaagccctcagcctcgcaaggagtacctcttggagtggtagtatttcaagaggctttaggggagaattcaagcattggcagataactcctggttcttgtgaaatgtcacctgtgatggccaatcaattttcgatctttgtcactcggggaggaaccaagaaatacgcttcagttttgtcgcctggtcaacttgatggtttgaagaaatctactgatgatggtatatcatcctgggactggaaattaaagggtgatcgttcaacgtatcatgctttgtttcctcgagcatggactgtttatgatggcgagccagatcctgaactgaaagtatcctgccgtcaaatatctccatttattccccatgattaccaggagagcagccttcctacctctgtttttgtatacactctagtgaatactggaaaggaaagagcaaaagttagcctattgatgacttgggcgaattctataggaggactttcacatcattctggggatcatgtaaatgagccattcgtagggaaaaatggagtttctggtgttcttctacatcacaagacagccaataataatcctcctgtaacatttgcaattgcggcatgtgaaaatcaaaatgtaaatgtcacagtattgcctgtttttgggctttctggagaaagttctgttactgctaggggaatgtggggcacaatggttcaggatggttcctttgatcaagataatctcaatactggtcctagcatgccttctttgctgggcgatacagtttgtgcagcagtttctgcttccacctgggttgaaccacatggaagatgtgcagttgtatttgcattggcttggtcttctcctcaggttaaatttaaaaaggggagtacatactacaggagatatacaaagttttatggaacttctccaagatcagcagtaaatttggtagaggacgctttgatgaggatgacacatgctgcgggagcaggacctcttcttgacagtggtgcgtgactggaattttcaagagcaggcctacgccaagcgctactacgacggctatcatcgcgacctcaagttcttcgttgacaattaggtgtggctgcgcttcctccattgccaagccgcctcccttgtggcccgtcccaacatcaagcccggccctcgctatgtcgggcccttctatgtcaaagagcgcatcggcgctgttgcaaaccacctgcagctgctcaagggtgctcgcatgatgttttccatgtcgtcctgctcaagttgtgccacaacgctcctgctcctcctttcggatctccaaaacttccactgcttgtcttcttgtaggccctgcacgccaatcttcgcctaagcgccggcccccatcccccgtacaacactcctacgatccctgcagtgcaggctctaacagattcactactgcttcctttaatttgtggtgtatttatttctctactagttactttcttacttgagaaaatttgcttattaatgtgactttcagagtataaacattgggaagaagagattgataagtggcagaccccggttctccaagatgagaggcttccagaatggtacaagattacactctttaatgagctgtacttcctagttgctggtggaaccgtttggattgatagtggatctttggtgtctgatgctgataacaagtcgaatccagaggaaagtaatttgtcacatgagatcgatgacaaagaaaatgttgggaaatttttgtaccttgaaggaatagaatacttcatgtggtgcacctatgatgtacacttctatgcctcctttgctcttttggatctgtttcctaagattgaattgagcattcaacgtgattttgctagagctgttttgcgggaagataacagaagagtcagatttcttgctgatggtacctggggtattcgtaaagtaatcggtgctgtcgcccatgatcttggagcacatgatccttggcatgaattgaatgcttacaacatacatgacacaagtagatggaaagatcttaatcccaagttcgttcttcagatttacagggattttgctgcaacaggtgacaagtcatttggcaaggatgtctggcctgcagtctgtactgctatggaatacatggaacaattcgatcatgatggtgatggtatgattgaaaatgatggatttcctgatcaaacttacgatgcttggacagttcaaggagtaagtgcatattgtggttgcctctggcttgctgcccttcaagctgcggcagcactggccggaagccttggacatgatgactatgctgagaggtgcatgacaagatttgtgaaagctaaaactgtatttgaagccaggttatggaatggttcacacttcaattatgacagtggtacaagttatagtagccgttccatccaggcagatcagctggctggacaatggtatactgcatcgtcaggtttgcctcctctatttgatgaggataggataaaatgcacgcttcagaaaatatttgactacaatgtgatgagggtgaaaggaggacgtatgggagccgtgaatggtatgcatccaaatgggaaggtagatgaaacctgtatgcagtcaagagaaatctggacaggagtaacatatagtttagcagcaacgatgctgctccatggaatggagcatcaggccttcactactgcagaaggcatttatactgcaggatggtctgaagagggctatgggtactggttccaaactccagaagcatggacaattgatggccattacaggtcactaatttatatgcgcccccttgcaatctgggcaatgcagtgggccttgtcgcctccaaggtcgatactggaggcgccgaaggtaaatacaatggacagagctcacatttctccaggcaccttccaatttctccaggatagcgttagaaagatgacaccaaaaaacggttgttttggaaacactgtaattaacttggattgctgatgtgacggtagcacttgtatctcgcactgtccaatgtatgtttacggagcacctcatttagaaaatgttgagtgtgaaacgggtgctatattctgttcagcctttgcagttatgtggtgtacctctctgatgtaaattgcatctcacagtgggccggactttgtaaattgttgtacagaaaacgtacatatgataatgccgtgttaccctgatattcatgacaccgtttaccacaaaaatctgtacagtttattgttcatatagtattttagaacgagtacttgtcagattggcgtaagacaatgtcctcttagcgctgtactcttgatggtatatatagatgtacatgtgaatgattt

SEQ ID NO: 5766 - DNA, 1700 bp, Zea Mays
cactcccccacttcgacccgggggcgccctctctctgtctccggaacccttccagccttctcgctcctggaacccagacctcaacccttccgtccccgaccatcgacccccgaaggacctggcggtgtccagatttccagaagcatcccccatccagcccccggcgatcgtgcggaacctggcggctggggacgcgggagaagcggcgagggctagctggagatggacacggcggagaagatgcggtggcccttttcggacggcagcgtcaccgatctcctggacgcccgcagcctccacggctcccccgacattaagaaaaaagcacagtttcattcttctctagtgcaaaagcttgctttggaaaaggagatggagggtcatgttggttgcgtgaatgctatcgcgtggaactcaagtggttcgcttcttgtatcaggatcagatgacactagaattaacctctggaattataataatcgagagctggtgcatgatattgacactggccattctgcaaatatcttttgcaccaagtttgtccctgaaacatgtgatgaagtagtagtttctggagcaggagatgcagaggttcgtgttttcaatatgtctcgattaagtggcagaaggcctagagaaatttctatggaaccaacaatggtttaccagtgtcactcaaaaagggtcaagaaactagctgttgaacttggcaatcctaacgtagtgtggagtgcaagcgaggatggtactctgagacaacatgattttcgggagtgtagttcctgtcctcgtgcaggatccgctaatcaggaatgtcacaatgtgcttcttgatctacggtgcggagcaaagaagtctttagccgatttacccaaacatccattggcactgaagtcttgtgacattagctctgtttgtccccatcaaatcattgtcggtgggagtgatgcatttgctaggctgtatgataggagaatgcttccaccattgagctcgtgccaaaccaaaacgaagccgccaccgtgcgttaaaatgttctgcccattgcatcttgctaacagtaagacatatttgcaccttacacatgttgcattcagcccaaatgggaaggaggttcttttaagttacagtggtgaacatgtttatctgtttgatgttgacccagataatctgagttcagttagatacacagcagactatgtacgggaacaattatttgtacccccttttcacaaagtaccagcaaaagaacatgcaaaagaaaagaagacttcagtaaatacagctccaagaaatttgtctaggatatgtgcaagaaatttatgcaagttgcaacaagatctctggagataggcaagaacttaatgcacgggattgaagcatgcagtgaagttcttgaatcaacggaaccagatattgatgatgacatgaggcatgggtttttgtgtactcgagcagcattgtacctaaagaggaagtggaaaaatgatgtttacatggcgattcgggattgtaatagagcgcggaagattgatgccacatcatatcaagcgcacctacatatggctgaggcactattgcagttaggaagactgaaggaggcatctgagtatgcagaggcagcaaataggcttcttccccctcattgtcaattgagccagcaggtggatgatttcaagcaacgcgttgcttcaggtgag

SEQ ID NO: 5767 - DNA, 1704 bp, Zea Mays
cactcccccacttcgacccgggggcgccctctctctgtctccggaacccttccagccttctcgctcctggaacccagacctcaacccttccgtccccgaccatcgacccccgaaggacctggcggtgtccagatttccagaagcatcccccatccagcccccggcgatcgtgcggaacctggcggctggggacgcgggagaagcggcgagggctagctggagatggacacggcggagaagatgcggtggcccttttcggacggcagcgtcaccgatctcctggacgcccgcagcctccacggctcccccgacattaagaaaaaagcacagtttcattcttctctagtgcaaaagcttgctttggaaaaggagatggagggtcatgttggttgcgtgaatgctatcgcgtggaactcaagtggttcgcttcttgtatcaggatcagatgacactagaattaacctctggaattataataatcgagagctggtgcatgatattgacactggccattctgcaaatatcttttgcaccaagtttgtccctgaaacatgtgatgaagtagtagtttctggagcaggagatgcagaggttcgtgttttcaatatgtctcgattaagtggcagaaggcctagagaaatttctatggaaccaacaatggtttaccagtgtcactcaaaaagggtcaagaaactagctgttgaacttggcaatcctaacgtagtgtggagtgcaagcgaggatggtactctgagacaacatgattttcgggagtgtagttcctgtcctcgtgcaggatccgctaatcaggaatgtcacaatgtgcttcttgatctacggtgcggagcaaagaagtctttagccgatttacccaaacatccattggcactgaagtcttgtgacattagctctgtttgtccccatcaaatcattgtcggtgggagtgatgcatttgctaggctgtatgataggagaatgcttccaccattgagctcgtgccaaaccaaaacgaagccgccaccgtgcgttaaaatgttctgcccattgcatcttgctaacagtaagacatatttgcaccttacacatgttgcattcagcccaaatgggaaggaggttcttttaagttacagtggtgaacatgtttatctgtttgatgttgacccagataatctgagttcagttagatacacagcagactatgtacgggaacaattatttgtacccccttttcacaaagtaccagcaaaagaacatgcaaaagaaaagaagacttcagtaaatacagctccaagaaatttgtctagggtagatatgtgcaagaaatttatgcaagttgcaacaagatctctggagataggcaagaacttaatgcacgggattgaagcatgcagtgaagttcttgaatcaacggaaccagatattgatgatgacatgaggcatgggtttttgtgtactcgagcagcattgtacctaaagaggaagtggaaaaatgatgtttacatggcgattcgggattgtaatagagcgcggaagattgatgccacatcatatcaagcgcacctacatatggctgaggcactattgcagttaggaagactgaaggaggcatctgagtatgcagaggcagcaaataggcttcttccccctcattgtcaattgagccagcaggtggatgatttcaagcaacgcgttgcttcaggtgag

SEQ ID NO: 5768 - DNA, 1320 bp, Zea Mays
tgggccaggatattcacattcgcgtttggggagctggcgagaccgtgagggcgaggctgcgcctgcgcgcgagcgagcggtggccgaggggctgtgcggcggcgggcagccggctggggcactcgcgtaggtgcatgtagtactcgcgcagcggctcaggcacgcacggggcttgctttggcggtgctgctgctaggcgctcgacgccggcggctcgtcacctcggcggtgcgctggtgctggcgtgctgctgctaggcgctagcaggggcgcgagggtgctgtgttgctgctcggcgccttagagattgaagtgactcagaagggagcaaacaaagggagatgaagctcagagtcgtgtgcaggaagctgtatgactatgtgcggtatgacctcaaggagatagccttcccgtcgtcactgccggaccctcctcacatcaagaagcggcccaagctctcatggcatgaacgctggtgcatcctcaaggaggccacccggctgtacggcgcgtcatgggtccgggacatcggccctgagctgaggcccaacgactacaagaaggcagccgaggacgtggaggagcagtcgtccaatggcagccaccccagctctggtagtgacaggaaggggaaggcgagcagcgagccaactgtgctggaggacctcgctgtcgccgctaggggtggcgcagagacgctgaagcctgccctgcggcggatttacatggcccgcgcgtccacgtacaccgacgcgatgaagaatttcgtggagacgtaccaggaggggctcaaggaccagctgcaggagaaggctcatggcggagaaggtggtggtggtggtggtcgttatcatcatcaggagcagaaggaacatggcaatgaggatgaggcatcaaagccacctccgccatgacatcatggttgtgttctgccagtgatggcatcaagtagtacttatttcagttcatccacccaaagtagaacaagatggttttggctagcactgtagagtgcagaccctgttggcactgcagtaggagtgcttgagaaggatcaccaattttgcccggtttatatttctaccaaatctcaatccgggtcctgccgaactactttacttgtaaactttggctggtgttgcctataatgatgtgtgatcctcgttactctccagcctgttcctacttgctgattgcaatgtgttttgcttgcgcttctctctcttttatctgtcttttgtgtatgtcttctttgcaatctgtctacattgacttattggtcaactatgaaaaatatgtatgtgctggcgtttttgttgt

SEQ ID NO: 5769 - DNA, 2363 bp, Zea Mays
caacggaaacaaaaactaaaataatcgtactgtccagaacggaaactgccctcgcttcgcttcctcctgttcttctctcccctcctgctactgccgcccggctccgctccgctcccctcccgaaccccgttccacctccacccgccgctcccgtcccgtcccgtccatacccgcgccgctctcgactcgctcctcgacctcaaggctacctacctcgacgggccccgcaccgtacccgcccgctagctcccgcggctgcagcagcaggacgagctcgccgccgccgtgcactagaagaagaggtcgctgtcggtcgccccgccccgcccaatcctggttcctggacctgcgccgcgtcgtttcgcctcaggttccagtgtctcgatttgccaggataacttgtataattgaagctttcctttgtacgatgatgggggcatgccatggaccagaactgagggggctagggtttgctatgtggtagtagctcctgcttcaggtggcgtcagctgttctgggtggggtaatatgatgaaacagatatttggacggcgcaaggcgtccaaaaccgcagacaaggagttcactggtgggaggacgttcagccagctgtcggggtctggagttgctgacctgagtggccaaccgccaattctgtcgagtactgggcacgcctatgggagtggaaaccgtacggggttccaagactcgaggataaatgataatttgttttcttccaacttccgtccgttgccgagctttaaggatgtgccgaatacagagaaacagaatctgctcatcaaaaagttggacgtttgttgcactctgtttgactttacggatgcgtcaaagaacatgaaggagaaggaaataaagacgctgatgttgttggagatagatgagtatgtaaggactgctaacgtgaagttccctgagatcgttgtggaggcaatcacaaaaatgatttcggtgaacttgttcaggacactaatttccccacctagggagaagaaggcgcttcaagcttttgatctagaagaggacgaaccgttgatggaccctgcgtggccacatttgtaccatgtgtatgagttgctcttgacatttgtccagtctccacaaaatgatgctaagctggctaagagatatattgactattcctttattctgaggctgcttgacctctttgactcggaggacgctagggagagggatcgccttaagatggtgcttcaccgtatctatgggaagttcatggtgtatcggccatttatccggaaagctatcaataacatattctaccagttcatatatgaaacagaaaagcacaatggaattgcagagctcttggagatttttggaagtatcatcaatgggtttgctttgccactcaaggaagagcacaaactgttccttcacaaaggaggtactgttcttgggtgagttggaagaggtactagatgcaacacaacctggcgagtttcaaaaatgtatggttcctctttctcaccagatcgctcgctgctcgaacagccctcacttccaggttgctgagagagtattgtttttctggaacaatactcacttcgagaatcttgttaagcaaaacagtaaggtgatcctgcctatcgtcttccctgcattggagaaaaatataaatgggcactggaatcaagtcgtgcgaagcctcagcctgaatgtccgaaagctattctccgatcgtgacccccaaatgttcaatgaatgcttgcggggttatgaggaagacaaagacagagagaaggaatttagactgaagcaagagttggcatggaaacgtctcgatgagattgcatcagcaaaagtcacaagtggtgaggctgtcctcgtgtctccaaccttgcatcgtcaaccttcagtcttgtaggaacctgcgctacatgagtggtccttgcagagtcgttagacattgtacaggattgggttgtagataaaagcgggtatatgaagccaccaaggcaggtgtgcgaaatcgaggaaagagagatgaggagccagtagtgcatcatttctgtacatcccgtgccatggcttcttttggcatcctggtggttcactttgctgctgtagtccgttgtttgggagaatggatgttttttttcttcttataatggaaaatgtcgagatggcgtgcagtcagtttaaatgataaaagttataagcttttcctttcgcatatagttttgatacaatttgtcatggttgtgaatgcaagcgaatcatatcaaatccctgagaatgctgtaacgcggtggtcacatgtgtggggatttttttattttatccccaggaaaaaatattttaattttcatcacagggagtgc

SEQ ID NO: 5770 - DNA, 1632 bp, Zea Mays
cgaagacgtacgttgactcgagtctgccccggctcagcccaatcagcttgtcggccagctcctctcgtcgatcgtttccaccaaatccaccggtctgccggccccgtcttccgctccgacgacccggagccggaggtctgtccagttggtagtcgcctcaagcaccaattcgcccctccgccgaagctaagctgctcggtcccaagggcatccctagctggctgaggcggatcggtagcaaaaccgatactgttacgttgccacggaggcagtttgatttggtggacctaacggccttgcggatctcttgggagccagagcgatggcgcgcggtgctcgcttcctccttgttctcgcgctgctggtcgcgctacttgccgtcgtcttccagctttatcgcctcaggaagccgaggttgtggacagtggaggagctatcgctgtacaatggaaccgatgaggggttgcccatactactcgcgattttgggctcagtgtttgacgtcacaaaagggaggtcacattatggccctggaggaggttatcatcattttgctgggagggatgcatcacgggcatttgtttctggaaattttacaggtgatggtttgactgattccttacagggtttatcaagcagtgaggtaaacagcattgttgattggaggaagttttactttgaaagatatatatttgctggtaaacttattggacgttactatgacagtcaagggaatcctacgaaatatctgaagggtgtagaaatgaaggcaaagagaggtgcacagcttcttgaaaagcagaagagtgatgaagctaaaatacctggctgcaattcaaaatggagccagcaagaaggtggagaagtctggtgcgacacgggctatccaagattggtgaggaggccaggtgacatagctctgaccggacaagttagccaaaggtgcgcttgcttccaggaaaacgagctggacaaagccgggctagtggtgtacgaagggtgtgattacctgtcccagtcttgcaaagtaaactaggccgtgcgtctcccttccacggacttgttgctttggggggtactcaaacgcaaggttcatcagttacgggggcgctgcgacattccacgagcacccaccagccacgcatgcatcatgaaggcgggcctttctgctctgtcccgcgtgaaacacctggtgcaacgtcgtggttcagttcagatgcctagatacgcaattgattggaagatacccgcgatcgaatcaaatgatggtaacgctgcgccgccacgggcaagatctcgatcctaaaggctgtccgtgttaataggcatggggccttgggctgtcgattgatcgaggctgccttgcaagttgcgccgtctgcaccataggctacctccatcaatgaaatgcatttttttggagagtcattttagccatttgcatagcgaacagtgtgtgcgtgtgtggtacgcaaatttttgtttctccaagttggatcatgcatatgcagatttatacagtgccgtgcgagaggcattttacgtttgcatacccctaacccctttgcgtgatctgttggagatagatcccaaactcattctctctgctgcaaaatacacgctctttggatt

SEQ ID NO: 5771 - DNA, 1191 bp, Zea Mays
tccggtttccccattcccacccagaccccactaccattaccaaccagagcgacaagcccgaccgcccgcttccttgcaaacgaaacaaaacaaaacaatggcgacagcgagtgagatcgcggcggtgggcgtaataggcgcggggcagatgggctcgggcatcgcccagctcgccgccgccggaggctgtgccgtacttctcctcgacgccgaccccactgccctctcccgtgccgtcatctccatctccgcctccctacggcgcctcgccgccaagggccagctctcccaggccgcgtgcgaggactcaataaagcggataaggtgcgtctccgccgtgcaggatctcagggacgcggatcttgtgatcgaggccgtcgtggagaacgaagctgtcaagaagaagctattcgtggagctggataaggtcacgaagccctcggccatcctcgcctccaacacgagctccatctccataacccgcctggcttcagctaccaaacgcccctctcaggtgataggcatgcacttcttcaaccctcctccggtaatgaaactgatcgagattatccgaggagccgatacgtcagatgaggtgtttgctgcggtcagatctttctccgaaagactcgggaagtccgttatatgctcgcaagattacccaggattcatcgtgaaccgcatcctcatgccgatgatcaacgaggccttctgggctctgccttcgtccgtcaggccgaagtcgtctctgtaggcgtgagagcaaactgttgggcgaataaaaccaggtgcgtgttgcaattgcacgtcagagaaaaagggagcacagcctagttcagaggtactcagtcggacgcttcaggtcgtgtagattcgtaatggcagggtttgctgctctatgtagaaaagatggttcagtgtttttaatctgataagtggaagtcatgaaacatttccgcagtttgcgttctgctcgagagggtgggagaaacagaaaagctatacttcttttgtattgtaatcctctgtaaactacaaacagacagatctcactctctgaaccggtaaaggaaaccaatgagtttctattgtgaaaaggtgcaacgtagatggtgagtccatctaggatgcttctcatttggaccaaattttatgaaaactttagataatccaaatatggcctgttgtttg

SEQ ID NO: 5772 - DNA, 2382 bp, Zea Mays
gctagccgaagctccgagtcggtcaatctatttccaccagtccccatccagtacaggccagcactgccgctgccgtgtcgccaccggcccccggctggctctccagcgactccgtcggcggcttgccttcccgcgccgcgccgggcccggatcgctcgccctttccgactgtcctgctcaacgccgccaccagcacgtcctttcccgcgccggaggtcccgctcgcctgccacagcggtgcggcgcaagctcccccaagcgtttctcaagtgacgagaagaagaaagagggggagaaggaggttggcgtcagtgggtcccgcggaccaatcagctagagagctgagtgatgtctcgcaagcgatgagcctcatgagatcggatcggaggccatcattccacgcactggtgatgaaaagctcgcttggtgcccctagctagctagtggcgaagcaaggaagctagccagccaagatcctgcttgtgagaaaaaaaagggagtagatccagtaattttaagaatctggtcaacatacctacggcaagatggctgatattgtaatccgcgacctggagagggtagtcaaagtcgcacttgcgatcaagaaggccgtggaaacagctaagcagaacaaggaggattgcgttaagatcggtgagcgtgcagctgaggtcagtactcatatgaagcggctgaaggagaatacaaaagcaatggaggaccctttgatgagcgatacgctcaagagtatggaagagacactccaacgcgctcttaagctcgtcaacgagtgccagaggaagcacgtcgtgctccattacttaaatgccggcggcatgtccaagaagctgcgccaggtgcaggaggatatatcatataaattgtggaatggggtcttggccaccgttgtcgacacaaggattgctttggaaaagcagatccaatctgctattgatgcccctctgcaccaacaccaacagcgtgcagggcaggtggaaacctcacaaagtagtcattcaagaactgatcaagctagcgagaaaggaaaggccatgttagcaagagtaaaaagggagcagtctgaacttttgtctggtgttcctcagttcagtttgtctcaactgaacgctgctacaaacgaattttcagagggctgtgtggttgaaagaggctactacaagggagtattacacgacggactagatgttgccatcaagaagttagcagtctctgatgatactcaagagaggcgcctgcaacttgagcttaatattcgtgcaaagcttgaacatggaaacatacttaaacttctgggatattgcctcgatgcccaagaaaaagaaaagctatactttctggtcgaagaatacataccgaatgttgaaagcttggagaaatttattaatgtctctcgactcgattggtcctcgtgtttcaagataattcaggggatagcaaagggcttacattgcttacataagcatcatattctctatatggatttgaatccagccaacatcctcgtccgttcagatatgaatcctgtggtcatcaattttggatcatcaatagtgctggatcgtgatgatgataaggtcaccggggatgccgtagcaggcacactgggttatgtcgctccagaaaaacttatggaagcttatgcatcaatgatgtctgatgtgttctcttttggaatcatcatcattgagatcattaccggcaggagagcttcacctttcgttgatttaccggaatggttgatgagatgattacatcagcgaaagggttatttgatccggcgctagctaacgagtctcagctgatgaagattaataggtgcagagaggtcggactgaagtgcattgagcgggatccgaaacgtcggcctaccatgggaaatgtccttgagatgctaagtagctagagtgacaggcaccgatttgaggtgttctcggttaggagtggattgaagcggattagagataatcaaatctcttgctagtcaaaactgaatagaaatgggtttactttccctcaatcccctcctacctatgcaaccaaacaaggccttatgggtttcaacaatttggtttgatgtattgtcacaaattgatcatttgtaacattcaagatttatgcgcaaatgtattggcgtgtggattagagagtttctatcttataggctggctcttgaatgatatggcaaacataagctagcaaaccagttcaactactgagggtgcacatgaacctcgtgtttactagcatttttttttcgtatgctatttcctagttcaagtttgcatctcaaacctttttcatgtatgtacatgtattgtaaatgtgtcaagtgttaattttattgaaacaattgaaatgtgt

SEQ ID NO: 5773 - DNA, 2409 bp, Zea Mays
gctagccgaagctccgagtcggtcaatctatttccaccagtccccatccagtacaggccagcactgccgctgccgtgtcgccaccggcccccggctggctctccagcgactccgtcggcggcttgccttcccgcgccgcgccgggcccggatcgctcgccctttccgactgtcctgctcaacgccgccaccagcacgtcctttcccgcgccggaggtcccgctcgcctgccacagcggtgcggcgcaagctcccccaagcgtttctcaagtgacgagaagaagaaagagggggagaaggaggttggcgtcagtgggtcccgcggaccaatcagctagagagctgagtgatgtctcgcaagcgatgagcctcatgagatcggatcggaggccatcattccacgcactggtgatgaaaagctcgcttggtgcccctagctagctagtggcgaagcaaggaagctagccagccaagatcctgcttgtgagaaaaaaaagggagtagatccagtaattttaagaatctggtcaacatacctacggcaagatggctgatattgtaatccgcgacctggagagggtagtcaaagtcgcacttgcgatcaagaaggccgtggaaacagctaagcagaacaaggaggattgcgttaagatcggtgagcgtgcagctgaggtcagtactcatatgaagcggctgaaggagaatacaaaagcaatggaggaccctttgatgagcgatacgctcaagagtatggaagagacactccaacgcgctcttaagctcgtcaacgagtgccagaggaagcacgtcgtgctccattacttaaatgccggcggcatgtccaagaagctgcgccaggtgcaggaggatatatcatataaattgtggaatggggtcttggccaccgttgtcgacacaaggattgctttggaaaagcagatccaatctgctattgatgcccctctgcaccaacaccaacagcgtgcagggcaggtggaaacctcacaaagtagtcattcaagaactgatcaagctagcgagaaaggaaaggccatgttagcaagagtaaaaagggagcagtctgaacttttgtctggtgttcctcagttcagtttgtctcaactgaacgctgctacaaacgaattttcagagggctgtgtggttgaaagaggctactacaagggagtattacacgacggactagatgttgccatcaagaagttagcagtctctgatgatactcaagagaggcgcctgcaacttgagcttaatattcgtgcaaagcttgaacatggaaacatacttaaacttctgggatattgcctcgatgcccaagaaaaagaaaagctatactttctggtcgaagaatacataccgaatgttgaaagcttggagaaatttattaatgtctctcgactcgattggtcctcgtgtttcaagataattcaggggatagcaaagggcttacattgcttacataagcatcatattctctatatggatttgaatccagccaacatcctcgtccgttcagatatgaatcctgtggtcatcaattttggatcatcaatagtgctggatcgtgatgatgataaggtcaccggggatgccgtagcaggcacactgggttatgtcgctccagaaaaacttatggaagcttatgcatcaatgatgtctgatgtgttctcttttggaatcatcatcattgagatcattaccggcaggagagcttcacctttcgttgatttaccggaatggggttcagttgatgagatgattacatcagcgaaagggttatttgatccggcgctagctaacgagtctcagctgatgaagattaataggtgcagagaggtcggactgaagtgcattgagcgggatccgaaacgtcggcctaccatgggaaatgtccttgagatgctaagtagctagagtgacaggcaccgatttgaggtgttctcggttaggagtggattgaagcggattagagataatcaaatctcttgctagtcaaaactgaatagaaatgggtttactttccctcaatcccctcctacctatgcaaccaaacaaggccttatgggtttcaacaatttggtttgatgtattgtcacaaattgatcatttgtaacattcaagatttatgcgcaaatgtattggcgtgtggattagagagtttctatcttataggctggctcttgaatgatatggcaaacataagctagcaaaccagttcaactactgagggtgcacatgaacctcgtgtttactagcatttttttttcgtatgctatttcctagttcaagtttgcatctcaaacctttttcatgtatgtacatgtattgtaaatgtgtcaagtgttaattttattgaaacaattgaaatgtgtattttttaattaaaaaaaga

SEQ ID NO: 5774 - DNA, 2444 bp, Zea Mays
gctagccgaagctccgagtcggtcaatctatttccaccagtccccatccagtacaggccagcactgccgctgccgtgtcgccaccggcccccggctggctctccagcgactccgtcggcggcttgccttcccgcgccgcgccgggcccggatcgctcgccctttccgactgtcctgctcaacgccgccaccagcacgtcctttcccgcgccggaggtcccgctcgcctgccacagcggtgcggcgcaagctcccccaagcgtttctcaagtgacgagaagaagaaagagggggagaaggaggttggcgtcagtgggtcccgcggaccaatcagctagagagctgagtgatgtctcgcaagcgatgaggtctttctttcaccctttcctctctcctgcattggattggaaaccggctgaggacgccgtagcgattagggagtgctagtattgtacgtgtaatggttggagagtgcttgacagcctcatgagatcggatcggaggccatcattccacgcactggtgatgaaaagctcgcttggtgcccctagctagctagtggcgaagcaaggaagctagccagccaagatcctgcttgtgagaaaaaaaagggagtagatccagtaattttaagaatctggtcaacatacctacggcaagatggctgatattgtaatccgcgacctggagagggtagtcaaagtcgcacttgcgatcaagaaggccgtggaaacagctaagcagaacaaggaggattgcgttaagatcggtgagcgtgcagctgaggtcagtactcatatgaagcggctgaaggagaatacaaaagcaatggaggaccctttgatgagcgatacgctcaagagtatggaagagacactccaacgcgctcttaagctcgtcaacgagtgccagaggaagcacgtcgtgctccattacttaaatgccggcggcatgtccaagaagctgcgccaggtgcaggaggatatatcatataaattgtggaatggggtcttggccaccgttgtcgacacaaggattgctttggaaaagcagatccaatctgctattgatgcccctctgcaccaacaccaacagcgtgcagggcaggtggaaacctcacaaagtagtcattcaagaactgatcaagctaggtgttcctcagttcagtttgtctcaactgaacgctgctacaaacgaattttcagagggctgtgtggttgaaagaggctactacaagggagtattacacgacggactagatgttgccatcaagaagttagcagtctctgatgatactcaagagaggcgcctgcaacttgagcttaatattcgtgcaaagcttgaacatggaaacatacttaaacttctgggatattgcctcgatgcccaagaaaaagaaaagctatactttctggtcgaagaatacataccgaatgttgaaagcttggagaaatttattaatgtctctcgactcgattggtcctcgtgtttcaagataattcaggggatagcaaagggcttacattgcttacataagcatcatattctctatatggatttgaatccagccaacatcctcgtccgttcagatatgaatcctgtggtcatcaattttggatcatcaatagtgctggatcgtgatgatgataaggtcaccggggatgccgtagcaggcacactgggttatgtcgctccagaaaaacttatggaagcttatgcatcaatgatgtctgatgtgttctcttttggaatcatcatcattgagatcattaccggcaggagagcttcacctttcgttgatttaccggaatggggttcagttgatgagatgattacatcagcgaaagggttatttgatccggcgctagctaacgagtctcagctgatgaagattaataggtgcagagaggtcggactgaagtgcattgagcgggatccgaaacgtcggcctaccatgggaaatgtccttgagatgctaagtagctagagtgacaggcaccgatttgaggtgttctcggttaggagtggattgaagcggattagagataatcaaatctcttgctagtcaaaactgaatagaaatgggtttactttccctcaatcccctcctacctatgcaaccaaacaaggccttatgggtttcaacaatttggtttgatgtattgtcacaaattgatcatttgtaacattcaagatttatgcgcaaatgtattggcgtgtggattagagagtttctatcttataggctggctcttgaatgatatggcaaacataagctagcaaaccagttcaactactgagggtgcacatgaacctcgtgtttactagcatttttttttcgtatgctatttcctagttcaagtttgcatctcaaacctttttcatgtatgtacatgtattgtaaatgtgtcaagtgttaattttattgaaacaattgaaatgtgt

SEQ ID NO: 5775 - DNA, 1734 bp, Zea Mays
cctctggtggtactacactgtgctctgtctctcagcccatgattccaagcggctcattggtagaagatttagcgatgcttctgtacagagtgacattaagcactggcccttcaaggtcatttctggacctgatgacaagcctctgattgttgttcagtacaggggtgtggagcatcagtttgcagctgaagagatctcctcgatggttctcgtcaagatgcgggagactgctgaagcctatcttggcaccaccatcagggatgccgttgtcactgttcctgcctgctccacggacttgcagaggcaggccacctggaatgccggagtgcttgctagtctcaatgttatgcgcatcatccctgagcccactgctgctgctttggcttatggtcttgacaggaagtctgctcaggttcagggtttatacaatgttctcgtgtttgaccttggaggtggtacctttgatgtctctgttctcgacaaagtggagggtgtctttgaggtcttagccacagctggtgccgctcaccttggaggtgaggacttcgacaaccggatggtgaaccactttgttcaggaattcaagagaaagacgaaggaggacatcagtggcaaccccagggctctcaggagactaaggacggcctgcgagagggcgaagaggaccctctcctccactttagaggccaccattgagattgactgtttgtacgaggacatcaacttctactcaaccatcactcgcgccaggtttgaggagctcaacatggatctcttcaggaagtgcattgacattgtggaggactgcctcagcgatgctaaaatggacgtgggctcggttcatgatgttgtccttgttggtggctcctctagaattccaaaggtccagcagtttctccaagagctcttcaacgggaagaagcttttcaagagcatcaaccctgacgaggctgttgcttacggagctactatccaggctgcaatcatgagtggagaggatgagatacaggactacctcatgaacgatgctacgcctctttctcttgggttggccacggatgggggtgtgatgaccgtgctgattccgaagaacgcaaccatccccacaaggaaggaggtggtcttgtcaactgactccgacaaccagccttgtatccgtatccaggtgtacgaaggtgagggggccatggctcgcgacaacaacctgttgggtgagtttgagttctccattcctccagcccccaagggtgttccacagatcactattacatttcatatcgatgccgactgcatcctcgatgtcgcagctgaggacaaaactaccggcgagaagatgaggaaaaccatcaccaagaggttccgtttaaagcattaaattatttattatttatcaccatatgtaattaaaaagagatgaactctagaaattctgacagaaattagaaacatagcaattttctaattttagtttcatagacattaatgatcaacgccaataatatccaatgggtggagtcttttgggtgctatggattttgagtttgttcttgtcttgttgaggtatgttgtcagttttgctgttttgcagcacgaccaacattccttgcgtttagaagtttagtaggaaaagcacatggaagtgcttctcggtgatggttcttggcctgcatttgcatgcagcaccgtgatgctttcttaccctatatactgtcaaaacatgacgtgtcacttctc

SEQ ID NO: 5776 - DNA, 1577 bp, Zea Mays
gtagaatattggatgggttcagattaaaaaggcagttaagctcgatggatgcgtgtgatgattatataaaggacattataaatcaacgggagcaaaggaaaggaaagggagaaaatttcatatagcaattgtttcgcgtataggagggagaacaaaggtcgcgtctcgaaagttcttgccttgttgggaagggatggcgtcggaggtggaggacgacgcggcggtgccgggcgcgccgctggtcgccaatggtgcagccgacgtccgccggaggagggatcaggctaaggcgattttgtccaagcaggccgtcaagatcgccaccaaggccgagcagcacgagcgcttcatctttaaggtcacacacttgctgggtgttcttggatttgggggattttgctatctcttgggtgccagaccacaggatgtgccatatgtgtactgcctgttctatgtcatattcgttccgctccgctggatttactaccgctacaagaaatggcattactatctcctggacttctgctactatgccaacacctttctccttgtaatgattctcttctatccgaaagatgaaaaacttttcatggtttgcttctcgtttgcagagggattgttctattcactatccggtggtgggatccacaaacatttgctgccatgcacccggaaggaagagatgccagagtcacatggccatatgtggaggacaaatcatatatgtggacatggcttttttttgttccactagctgcttacaccctgtggcaacttatgtatttcctcatagttaatgtcctgcgccggcagaggttgttaagggatcctgaagtcatgacatcctacagagagctctcaaagaaagcacagaaagcaaacaacatctggtggaggctgagcggactgctgggtgaccggaaccggcaggtcatgtacatactgctccaggcgctgttcacagtggcaacaatggccctgacggtccctatattcctgtcctaccggatgcacgtggtgttcctgatactcaaggtgtgcgcctcgacatggaacggtggcagcttcatcttggaggtgatgcctcgacaagtagaacggaagcagcagaagaaactgggcatgaagcccatcgaacaggggagctggacacaaggggcgccggctgatggtacgtacattgggtaaccaccaccaagcacacatctgaggagaaaatccaggagtgaggaaatcgaagctggatgtaacaatagattttactgtttgcaaatgcaacctttgttttttttttctgggtgttcttcgtgttggaggtttttttagctctgccctagttgtgagttgtgacatctttagttttaggctgaagtctgaacgatatggggtgagagatcatgcgtgcccatggttgtcttgggattggacatgcataagttgagatgttctccttttctgtaggagttttcttttcgatgtgaccgttgtgaattgcgtgaagcttttttttcattgttcgtttaattttttttagagagaggccccggggcctattcaagcccgcgacattatattaa

SEQ ID NO: 5777 - DNA, 796 bp, Zea Mays
aaggcaggcagccacagcacctgaccaccacaacccatcgagcttcccatccggaccggaccccatcaggagcagaggcagagtcgagagtctctcagcgaagccaccgtccgacgccatgtgctaccaggtgaggtgcggcacctgcggcaagaccacgtgggccgggtgcggccgccacgtcgcgtcggtgcacgcgcagatctcggagggccagcactgcgcctgccgcgactggcccggcgtcgaccccgccaccgccccggccggcgtcaagaaggccgccagcgccgctgacgacgctgggaaggactccggcaccgccgcctccactcccgcgcagggcggcgctgcgcagtgaggtcaaaaggtaaccagctccgccggcctcggagacatcgtccacatcgacccagatttcttcagataccttcgcttcgacttcgagtcgagggggaagcttcagctagaggggcgaagccagcgggagccatcagccatgtgctaccaggtgaagtgcgggtcgtgcggcaagtccacgtgggcgggctgcggccgccacgtcgcctccgtgcaccgccagattccccagggccagcactgcgcctgccgcgattggccgggcgttgccccggccggcgacaaggcggccgccgcggaggggccttcgtccacgtctgtctgcaccatcctgtgatttgagcccgcgcatgttacctctggtgtaggggatgtgcgattgtaataatggtgcatcgccgctgtttccagcaagtcttttaaaaggcgaaggggt

SEQ ID NO: 5778 - DNA, 867 bp, Zea Mays
aacacaagctcatcatcgtctatatattctgaaatacatatcaatggctgtgctggagcggcgttcccgcctcccggcggtggcgcagcttgccgtggcgttctggctggcggccaccagcgcctgcctgtgccgtagcgtcatccctgacccggacctggaaccgggccgcccgtgtgtcggtcgtctgttctgtcgttggccaccgctgccgctaccgtcgccgccgccacctccagtcgtcacacctcctcctccggagacgacgactccgccaccgcgacaccaccatacccctccgttttgtccttcccctctgtgtcgtcatcgcctgccgccccacctgccgaggccgatctacccaccaccgacaccgttgtccccggagtccccgccgctgcctccaccgccgccggtcgtcacccctcctcgtgagtccagatcctgacggcctttttgcatggcggccggcacgcgctcttacgtgcgtctttgagcgtacgtacgtgtagcgtttgctagcaagtgcatcgtctcatgaactcgttttgcagctccgacgccgcgacatccataccctacccctcgtccatgtatttatccgttctgtcctcttcggccgccggtctgcttatgtagtatatctatgtttgaataaaaagtaataatgtagtatttgtactgtagtatcacgcgatccgagaaaccaaaattattccattttataacaacatgtgataaaaaaaccgtgatgcatgattttaaggagacaatcaagctactctccgatgtccctagctccctctataagaaaggagatcaatatagtggagattggcctctctgcaaggaaggggcactaccgaa

SEQ ID NO: 5779 - DNA, 4661 bp, Zea Mays
atagagtacacagggatggaagactaccactctcaccatcacaaggcgaccagcacggctcatgagcgatgccttccagcctggcagtttgttggatactttatcaacaaggggctgcagcgctgcatttgtcagtttccgaattgacagaggaagtcctaggtaattgcatggaaactcctttaactcacaaggcaacagctcagagataacagccaaatcatcgtctccacactggataggtgtgactgaacttttggtaatgttggtcttgaggcctgtagaatgcccaaaaatatcaaggagccgagtgaccataaggaggtcagatcttagtggccggaggaatatgacaacatcatccgcataaaaagaaatacgatgtttagcctgctgatgagcaatgggctgtaagagatgctcctgagttgcaaaatgaacaatagaatttagaacttccatgaccagtataaatagcatgggtgacagagggtccccttgacgaaggcctcgacggtgagagatgcagtccccaggttcaccattgattagaattctggtagaggatgtggacagcagcaaactgatcagattacaccacttgcgaccaaaaccaagatgttgcagaagctccaacaagaaagcccaggacacagaatcaaaggccttggaaatatccagttttaagagcacatgaggctccttatgatgtaacgtccttgcaagctgctgcaccatcaaaaaattatccaggatgctcctccctttgacaaaagcactttgattgatggtgacaagcttgggcagatgaggagccagacggttagcaaggagtttagccaccagtttagcaaaactgtgaattagactaataggcctgaaatccttgacatgtagggcttcagtctttttaggcacaagagtgatgaaagcggagttgataagcctgaaattgaaaacatggcccctctgcacagcgaggagcgcagccaagacgtcatccttgattgaattccaacagaccttatagaatcggcccgtgaaaccgtcaggccctggagctttgtccaatggaatctctctgatagtagcccagacctcttcctcagtaaatggcacctcaagctcagagaggtcatgctgctgcacgcctaaggaaagaaaatccagagtgaagtctctttgctcagccgaaccgatcaaagcatcataaaaatcgagggctgctcgaagtttgtcttccggagatgtgacaacccgatcattaacaataaacttggcaatgatttttttttcttgcggtaatgtgcctgttggtgaaaaaaggaggtattgtcatcgccctcccggaggtaaagaatacgggaacgtaatcttgcaaccgtgtgctcaagagaggccagatcgagggaatgcatctttaatttttttttctaaaacgctcctcatcagctgagagggcacggctatctcttgcaatttccaagcgatgcgctgaagtttcagaaatatgcgctccaccgggtagctagaagcaactggagcattccaattttgtgagacagcatccatgaaaccaggaagtttgggccagaaactttcgaaatggaaacgtcgtttgccctgagtgacaatattcagacccaggaccagagggcaatgatcagatactccagaagctgcactctggaggagagaatcaggaaaaatatcatcccagtcagcacagcaaaaggctctatcaagccgcacaagggtgggggacgacctctcatttgaccagcttggtagatcatgttgaagtcgcctgccagcaaccaagggccaacacagagagctctgacctctcttagctcctgcaagaattgtagcttcagatcatcctcttgggggccatagacaccagtgaaccaccaattcctaccctcttgctcacaaactggacagaaaccgaaaatctgtccacacgggaagagattgcatgacagcaggcccctttccaagcaatgaacacgccacctcgagtaccatcagcggggagagccacgaacttgtcaaaagcagacccaagagcagagaggaggagctgtgacgacacgcttgcaatcttggtttcttgaagacacacgatgtcagcgctggaggaaaggacagtgttgcgtacagagtttcgcctggccgtcagattgaggccccccgggtgttccagactaggatggatgacagattcatgaggaacacgaggcacgaccaaaaggacaaaggttcctcagaaaccgatcagcagctccctctccaggacgtcctcatcatgatctgtctgccaaccgaaaatagcagcaagagcagcaagctccacatcagacagaggcgtctcgaataattactatatacaatgtcgtgcaacaaaacgttcacccgtaacgccacgtcgccttcttaatatcagccatctgatatgcatcacacggttgttcctactcttccgcttatctctgctaggctgccctcgctccttttggaagcggcttcgtcgctttttcaccgacgacgccatcctttttcgccgccggcaacatctgtgagactgtgaccgcgtaaggttcctgcttcacttcgcgtcgcttgcgatttctctctcttcttctactttccagcctctctggcgatgcaccacagaggacacagcacgcatgcgacgagctccaagcagcttgcattatttggagctttgtctgcaagacgggagccttcggctgccttactcctcttcttcgccctgggcccgagctaggccggcgtggctgcaccgctccgtcctcgacaagcccgcgtcaccgagtgcctcgtcggagacagcactggcactgtcctcgtcgccgcccgcacgatcaggaatgttgcttgcggctcgctttgctctcctctctcgtcccggcgtggtcgcacccgcgcagcgcctccaatggcgacgacgacgaagacagcaagtctcagcatggggcgagtctgagtgcataggctacgccctagcaaagtcactgctaaggccgaacattgtacaccatggtggttatctctctccaattccatctactcaagaatgtctcactcatggatgatgcacaccacgtgctcgatgatttggctctataacaatttttggtgctagcctcagattatttctgtttgagagttatgtaaggcatgacctggaaaactgcttagctgatgctgtaacattttgatgtctctgttctctgctttctggaggtgccatcccctctctttggggaggcttctggttaaacttgcttcagtcacgatgttactgtgctggataaagaagatgccaaagctgaactttgaggttgctaaaccatgcacccagaatcggagttttgtagttgaagctccatgtgagttgagatacttgcaactatacacaatagaatgttcttcgaacctcaagctgcagctcttgctccaactattacttgcctactttgtttttcctatcacgtcttcttgtctccctcgacattgcccgtctgcttccttgcgccttgcttgtgctgtgggctcccttgtctcgcctcttttccagccgtggccaattgtgtccattgctgggtttgccaccaccttcccgtgtcaaggcaaacccctccatttcgagcacgttccaaacccaaacttcacattgccttcttttgagagctacgtaaggttccaaatttgaaactgacaggtcctagccgtgctgttctgctggtggatcctgtgactattgaggctgacctgaaagttaaaggccgtactgaatctgaggataaacacttgagctttctagcagtgccattcttggtcatgatcccgctcgagtcatgcctgcgtacaagagatttcaccagcaagcttagcacgctgaggtttgctctcgcaattgttgttctctcagtggaggctacaattagtgtgcgagttcgtggtgggtcatggcctgatggtctccgtgcccagtttgctgcccacacggtgagtataggtcgtgaggaagttgtcttgcttgattctggggacgataaactgcctgtttctgatgatggcactatcaaacttggtcgtcgagttgcatctgttgaagtgagtggggagctgaacgtttctgtcaaggcatggcaaggtggtgaagtctttacgcacagagagaggggtttcaaacctaaagaggcaggttggagttatggcactcttgacgttggcttctgccaaatggatgtatctgtggcctggtcgcttctttcgtcgtacggtgaaaatgaagctttgtaagagtcggtgttagccgtggtcgttgcttcgattctctagcatgtaatgataagttcacattgggatatgcttgctgttttgctgtaatgataagttcacattgggatatgcttgctgttttgctttttatttatttttcttgatcctctagcatgtaatagagtatcctccaagtagagtttttttttccttgatctccctgcataaagcccaagttgctcattgcttatcctaattgttttcttgtttctagtactgcaaggctaaacctggaattatgagtaactactgcacactggttgagcaaaaaaaaaaaaaataccaga

SEQ ID NO: 5780 - DNA, 2099 bp, Zea Mays
agctagcgtgcctttttctggatcggcccagctagcgggtgtgtcctttataaggaacgaatagcatgtgttggacgggacacgggaaggccagtacttctctccccgttcccggcctggatgccacccacaacgttttgatccgccccgatcgcaactccgcaccgcgctcctgttctcagcatggggatggtagtaaacagcagtgcagtcccgttctccatcgcgctgcttgccgtcgtcatcgcggcagtagtaatcaccaaggctgcactgggacgacgacgacgacgacgaacagccgcagccaacaacccagcaccaccaccccgcaacgacgtcgacaccggccggcggcgtccccccgcggccatcaccggcgtcacctcagccgtccgactcgtgcacgcgctcgccaccaagggtttcgaagccacgctgtacgagcagtacgcgaagctggggagcgtgttcacggtgagtctcttcgggatgaagacgacgacgttcctggccgggccggacgtctcggcgcacttctaccaggggcccgactccgagatcagccacggcgacctcctcgagttcaccgtccccatgttcggcgagggcgtcgccttcgccgtcgacgccgccacccgcgccgagcagcatcgcttctacctcgacgcgctgaagccggccaggctaaggtgccatgtcgctcccatgctccaggaagtggaggtaagttaagtagcccacatgacatgacatgcatcccataataacatgcatgccttgcctacgactacgatggatatgttcacttcactgcacgtacgcaacgcatgcacatgcaggagttcttcgcgagatgggggcagcagggcaccgtggacctgaagcaggagctggagcaggtgctgatgctgatcacggcgcggtgcctgctggggaaagaggtgcgggagaggatgctccacgaggtcttctccgcgtaccgcgacctcacggagaacagcctccatctcaccagcctgctgttcccgtacgcgcccacgccggcggcgcggcggcgcgacagggcgcgcgccacgctctccggcatcttctccgagatcgtccgctcgcgcaggcgctcgggccgccgagccggggacgacgacggcgacgtgctgcagagcctcgtggacgccaggtacagggacgggcgcggcacgacggaggccgaggtcacggggctcgtcatcgccatcctcttcgccgggaagcacacgagctcggccaccagcacgtggactggcgcgcggctgctgcgccacgcggagtgcctggacgccgccgtcgacgagcagcggagggtcgtggcggagcgcgggagcggcgtcgactacgacgccctggcggagatgggcttcttgcactgctgcatcaaggaggcgctgcggatgcacccgacggcgccgctgttcctccgtagggcgcaccggggcttcaccgtgcggacgagggagggggccgagtacgatgtcccgagcgggcagaccgtggccagccctctgctgatcaaccactacatcccctacgtctacagggacccgcacgtgtacgacccgcggaggttcggtccgggcagggaggaggacagggtcggcgggaggttctgctacaacgcgttcagcggcgggaggcatgcctgccctggagaagcgtatgcgtacatgcaggtgaaggtgatatggagccacctgctgaggaacttcgagctcaagctggtgtcgccgttccctcggaccgattggatgaagctttcgccggaggcgagagggaaggtggtggtgagctacaagaggcggatggtgccggttgggagcgtgttggagaactgatgtctctgatggttacttttgtatgagctgtgtgtttgtatgcaatgtgtgttgagcaccatttgtgacgctggcacggtcggacggcttggccctgaagactggacggtccggctcgcggacggtctgcgaatagatcgaataagacacaactaatttctttttcgtgcgagtttattcctctaaatccatggttgctgtcgggagatgactagaaatggatccaga

SEQ ID NO: 5781 - DNA, 1800 bp, Zea Mays
caaatattctagaattgaagtacataataatctgtcgtgacaatctactcagtgcctatgccgtgacattccctttctaccaagaagccaactcgtaaaagagacctcaccagataagctacgacagcattttaacatcgtttgaagtaggaacctcacccagattcattgaaccgccagctctgccatcttatccttgccacgtgaagtgacgttcttggcgaccccatcaatctcctcgatttggatgtccacgagcttattgagctgttgctcctgcgtcctgagatcctctggctgctgctcaacagtttgttcatcctcatccccaatctcatgtgtccaatacacagcaaaagatgcctccttattgaaactggttggcatctgcaacagacgcttcctgttagttccagaggcactgccaaggatctcccccttcatgaggtcatatatgcaggccctgaagttgtccatgctcttatgatcctgagagtcgaggcttaggaagatcagaatttcccagcaccggaggaactgtttcttctttatcttcagcttctaacgaacagtctccatcaggtcagccggtggaaccattctcaaactttgggccctttttgacaggttggtctccttcagagacgagacaatagcaccaagtgcaggtttgatcggatcaaacatgagcaaacggaggcagtcaacggatgatctcacatactgcaggtcaagaagcggaaggcgcgggtgcctctcgacgtcgccgacgccgtgatggagccagtacggcggtccggccggctcgccaacctcccggataagcccgtgtaccgcgagaaggttcccgattttgggatgaagattaggaggacgtacggatcggtgagaagagatctgaccaaccgggtgtacgcgaccgacgatgcgaggagctacgccatctctaaggcggaggatctggagcaagagctggactccagcttccccatcttcatcaagcccatgacccagtcccatgtcaccgggggcttctggctgggccttccgattcatttctgccggaagtatctgcccaagcgtgacgagatgatcaccctggtggatgaggatgatgacgagtccgacacgctgtacctcgcaatgaagcgggggctcagtgctggatggagagggtttgccgtccagcagaagctggtggatggagattgcctggtcttccagctgattgagcaaacaaagttcaaggtctacataactagagcaagttcctactacgaaagcgaggactgatgaaactagtagcttgtaatctggtgattggagctcagttatggaggtggctgcgttggacaagcttgcatctgggaatcgctggggtgtcttgaaactttttggtggcagaaagttagctgatagaattgcggaggtcgtggagggaagaggtgagacgacgagggactgggtgccaccgccgaaactgtagtcatcgctggagaggaactggccattgctgttgtagcctgcaggcgcaggaggatgcggcggcacagacaggaggggcagactctgttgtatggttttcgcttagatttttttggtagcagttgtatgttctatatacaaactaccccttcttcttgagaggagagagtgcacaccccttcatcaaattgaatagcacgtatgtgtaccgctatctccagcagcttattagctcctatttcttattttaaactccactgtatacagtacaaaacactatatacatggtcctattggccatagcttagtaaccag

SEQ ID NO: 5782 - DNA, 1734 bp, Zea Mays
caaaaaagttagcaaaccattggatcgtattcctctagatgtagaagctaaatcaagggaggcgcgcatcaaaatcgcagtcggcgccagcgtctcggcgctggcgcttcttctagcagtcgctggtctcctcatctggtcatggaggagaaggctaacaagaacagacggatcaagtaaatggagtagctcccgccccaccggccgccggtacgagggaagcagccacggtgacgacctggagctgccaatatttgatgtggggacgattgcagctgccacggatggttactcgatcgaaaacaagcttggcgagggtggatttggaccagtgtacaagggtaagctcgaggacggaatggaaatcgcagtgaagacactctcgaagacgtctgcacaagggcttgacgagttcaagaacgaggtcttgttgatagccaagctccagcatcgcaatcttgtccggcttcttgggtgcagcgtcagtgggcaagaaaggatgcttgtttacgagtacatggcaaacaagagcctggactatttcctgtttgagaaggacaacgttgtgctcgattggcaagtgcggtaccgtataatagaaggcattactcgaggtctactctacctccaccaggactcgagatacaggatcatccacagagatctgaaggcagctaatgtccttctggacaaggagatgacgcccaaaatctcagactttggcatggcgaggatatttggcaacgaagagacagaaatcaatacccgaaaagtggtcggcacgtacggttatatgtctccggagtatgcaatggatgggatcttctctgtcaagtcggacgtattcagctatggagtattgctgctggaaatcgtcagcggtaggaggaacagaggagtgtattcctattcaaacaaccaaagccttctaggccatgtaagtgacaacttgcctcgtctagtgaacaaataccagttgtatgaaacttctgaaacctggtaaccgttttcccccccgcaggcatggagcttgtggaacgaggagaagagcatagagctagcagacgaaagaatgaatgggtcgttcaactcggacgaagtgcacaagtgcatcagagttgggctcttgtgcgtgcaggagaacccagacgaccgtccgctgatgtctcaggtgcttctgatgctggctagtaccgatgccacctcactgccaactcctaagcagcctggcttcgccgctaggagagttctgatggaaacagacacgtcgtcaaccaagccagactgcagcatatttgacagtgcaacaattaccatgcttgaaggcggcggacaacaggagaggcggcggcgaccaacaataagtatgcagattagtctgataaggattagaagatttaggagataaggtttgttagaaagaaaagagaagatctcatacagattagttagatgatgtttaggagattaaagacataaagtttgttagagagaaaagagaggatcttagatttaatctctttagaaaaggactagaaggaagtataaatacttgtaaacaccactctatatgaattaagtagaaaattatttagcatatttcctctaaaggaagcacgtgtgttttcctctcctaaaaccgttgatcagtgtccaccgaagaatagcgcggtcacagtgcccttgtccgccgcgcccccgtcctgcgccagcccgcaatgccctatccctaca

SEQ ID NO: 5783 - DNA, 3421 bp, Zea Mays
ggcgggaacatcgataatatgccgccgttttccttccccgaaccctccaccttcgccggcccgtcagccacgaccgccaccattcaatccttccacttccatccctactccgtctcctctaccgtccacccattccggcggagctccccgccagaatggaggcggcgctgaagggctatttcgggtactcaacgttccggccgtaccagagggagatcatacagaaggtcctggatgggcgggattgcctcgtcgtcatggccaccggaagcggcaagtccatctgctatcagattcccccactggttacgaagaaaacagctgtcgttgtaagccctcttctgtccctgatgcaagaccaggttatgagtttaaaacaaaaaggtgtgaaatctgagtaccttggcagcacccaaacgaatagctccgtcagtaatgaggcagaaaaaggcacgtttgatgtgctttacatgacaccggagaaagccatttcacttccttcaagattttggagtaacttgcaggcttctggaatctgcttgttagctgttgacgaagctcattgcatatcagaatggggccatgatttcaggacagagtacaagcagctgcattcattgcgcaaccttcttgtgggtgttccctttgttgctttaactgctacagccacagaaagggtacgccaagatatttctacttccttggttctttgcagtcctcacgtggtggttggttcatttgatcgtcataaccttttctatggtgtgaaaacatgcaaccgatctatgtcctttataagtgaacttgtgaaagatgtttcaaagaggagtgatgtgggtgagtcaacaataatatattgtacgaccatccgggacacagaacaggttcatgaggctttagttacttctggaatcaagactggaatctatcatggtcaaatgggcagcagagctagagaggaatcccatagatccttcattagggatgaagttcttgtaatggtggcaactatagcttttgggatgggtattgataagcctgatgttagatgtgtaatacactatggatgtccaaagagcctagagtcttactaccaggaaagtgggcgttgtggaagagatggactgccttcaatctgctggctatattaccaaagaagtgatattacaaaagctgatttctattgttctgaggcaaaaaatgaaacccagaggaaagcaatcatggattccttcatggcagcacaaaaatattgcttgcttgctacatgccgtaggaggttcttattgcaatattttggtgaagaatggaacattgactgtggtaattgtgataattgcacagcagtgaaaaatgagagggatttgtcaaaagaagtctttttgttgctgtcctgcatcaaatcttgtggaggacgctggggcctcaatttacctattgatgttctccgtggctcacgagccaagaagattgttgacaacaattatgataaactacaaatgcatgggcgtggtaaagattattcgtcaaactggtggaaagcacttggtggtcttcttatagcacatgattatttgaaggagactgttcgtgatacatttagatttgtcagaaatgcttaaggacaaccgcccctaacccgcgtctatatattcagtgtcagtccaaaaggggtcaagtttctctctactgctgataaaatagatggagcaccactggtatttcagctgactgcagagatgattgaactagaggagcacggtagttcacatcataaagaaggtggtttgaatcttgtgccaacattagaatctgaaaaattttctgaggatgaatcaaaactctatcaaaggctcctgaatgttaggatgaagattgctcaagatattggcactgctccgtatgctgtatgtggcgatcagacaataagaaactttgcaaagatgagaccttctactggagctagacttgctaatatcgatggtgtcaaccagcattttatttcacgtttcagtaacattttcatccaaaatattgcggaattgtcgaaggagttaaacctcccgttggataattcaccatttccaccaccaccaccaacaaatccagctgcagaaaatattgctggtataccaaaacctgtacaaaacaatcttcctgggatcttgggtgatgcaaagctgactgcatgggaattgtggcataagcaggagtactcattcctgaaaattgcttatttccgcagagcagtgccaataaaagagcaaacagttattgcgtacattcttgatgctgctcgagaaggatgtgagatggactggagtaggttttgcagggaagtagggctgacacctgatatagccaccgcaattcgtcttgcaatctcaaaggttggatcacgtgagaaaatgaagccaatcaaagaggagctcccagagaatgtaacttatgacatgatcaagacattcctgactattgaggggtgtggattgtcagagcaagtctttggtaacggtaccgctgacggtgtctctagtagaatagcagagtcaccaatatcttcctgccatgcaagtgaagcaggcggaaatggtgtcccagcagcggcagaggccagtgatgcaaacccttcagcaaagagaggtcaaactgtttgtgctgaggagccagcaacaaaactgcaaaggacatacgagcatggagctgagttaactggcacggcgactgctactgtagattctgtgctagatctggttgcgagctgcaatggggtatcgctggaggatgttgccaagcacttcaagggatccaagagagaatcggtcctggagatattggagggccttgaatctgaattcacaatttacaagaaaaacgggaactacatggtcctgtgacaaacttgcccgcgtagtctgggaaggggatatgcctcagctgtgtgtgtatatatatatatctatacgatggtgggtgacttactgactttggactatggtagcaaggttgttggctggtgtgcatgtgctcattttggggattgggcagaactagcagatgtacgaacgtgtgtgtttggagctgggatcctttctgtcatctcgcatatgagtatcttggactaattgaccccgcgtattttcgttgggttttgatgcgttcaccctactcgttcaacagcttaagatcaggtttgactcctattgcaattttcctacgtgtccatttggagcaaattatcaaaggttttagaaccacacagaattcctatagaatgccttaacaattcgtaagaatttcggaggaaacattccatggtaaaaacttccgccacagatatcaaccaccactcttaccatacattttctttgctccgatgatattttatgattattacggtctagcgaaatcacgtgatgcc

SEQ ID NO: 5784 - DNA, 2626 bp, Zea Mays
cgcagctctcctctaccagaaccagactcccacgcccccctcccctcgtgtctcaaaagcatagcgcaccaccacgggccacggcaatacggcatcatctccaaactcccgaggggggaccatcaccgctgctgagcacgcccgccgcctgcccttcctcctcccacccgtgccgcagctttcgattcctgcccgcctcattgctacctggtcgggccgcggaattaatgtcgcgcggaggaaatccggtaagctccggcccgattttcaactctcccctccctcatcctcgattggggttgagaaattgaatcaaaccccccacacccacccacccaaaaaagtcgcccttcctcggacgagatccccccaatcagttcttattgtggccgatagattgattgcctcacttgccttccgctcgcttttggggtgctaacctaatcggtgaccctccttgtgtgctcggattgggttctcgttctcatcagcattgacctcagcggctttcttttggacaatgctgctgttttactgcttgtttctaccatctacggccgtgtaggtgtgtccgacacgccacaaaaacttttcgttatgttcagcaggtaaacaagtctagctgaagtgacgattgccagcattgttcgaccgtgcggcttctgtttggctggaaccgtgatggatccagaaaaacaaaatgagatgagcctgatcgacaagagagaactagtatacgaagttgcaagatggcctcaaggtgccatggagattcttcggtgctggacccgcagggaacttcttgagcttatttgtgttgagttgggcaaagagaggaagtataccaatgtcccaaaagctaagatgattgcttacctattgaaattagtttcacggaatagtggaaagaatggacaactcaagaatgataatccgaatgttatgttattagggcaggataacaaagatgaaatacaaatgaaggaatctgatgaacaatcacgaccactcaaaactgcaaactctgactcatcaataagcagagaggcttgtgccggtagttcagtggtgtgcagcaatgttgcatgccaagccacaccaaatgcaggagataaatattgcaaacgttgctcttgctgcatttgcaataaatacgatgataacaaagaccctagtttgtggttggtttgcagctctgataatccatacagtggttgttcatgtggtgtctcttgtcacctaaactgtgctctaaagaataaaagggctggcattgtcaagaatgggtgcaacaagttagactgtagtttctactgtgttagttgtgggaaaatcaactggctaatgaggtgtttgcagaaacaacttgcaattgctagggaggcaagaagagttgatgtgctttgtgagcggttgtcattgagccataaaataatacaagggtctgaacgttacaaggaaatagcgagcataatcagctcagctgtgaaaacacttgaaatagaagttggtagtgcattggatcaggtctctgtgatcacggggcgtggcatcgtgaaccggcttacttgtggtgctgaagttcagaagctttgttcaagtacattagaaattgtagactctaaagtggataacatcttggagttcgagtccaataatagtccaaaactcctaggtcctcagccccaaatcctttttcatgagatcactccattttctgtggttattgtgttgaactatcagcatgacatcggtaaggagcagattgatggttccaaaatttggcaccgaagtgccagggtttgcaactattcatcagagcccacatgccacatactgaggccaaacactaggagcctggtttctggtctgagcccttcaactgaatacttcttcaaggttttgccttttagcagcacacatgggtttactgagtgggagacaaaatgcagcacacgcagcctggaccatggcagcagccagtgctcaactcagaactctgagagcatgtgcctcaaagacgattcaatgcagcatcacaaaaaggatttgaatgtgcagaatcaccagagaaccattcaatatgattcacctaagggttctacaaattcaagtgagaacaatttatcatgtgatcggtattccaagcgggctaaggttgcaaggctagatggtgcaagcgacaacgatgaaagccagttgccgccaacttctgaagttttaccatttgcaagctccaactcttctccttccgaagctccaagtaaacctgacttgcttattggcaccccagattcggcctccaagaactatgtggagcagcagtacgagtactgcgtgagggtggtcaggtggctggagcatgaagggcacatggacaatgacttccgtgtaaagttcctcacttggttcagcctgaaggcaacaacacaggacaggcgaatcgtgggcgcctttgtagatgttctcatcggtgatcctgcaagcttggttggccaactggttgatgcattcaaggatgccatctgtatcaaggagaagccctctcaagcacaacagaaagatgcatgctgcaagctggaagaccaggcaatctccatccaccagcttctgctggacggcaaac

SEQ ID NO: 5785 - DNA, 3160 bp, Zea Mays
agctctcctctaccagaaccagactcccacgcccccctcccctcgtgtctcaaaagcatagcgcaccaccacgggccacggcaatacggcatcatctccaaactcccgaggggggaccatcaccgctgctgagcacgcccgccgcctgcccttcctcctcccacccgtgccgcagctttcgattcctgcccgcctcattgctacctggtcgggccgcggaattaatgtcgcgcggaggaaatccggtaagctccggcccgattttcaactctcccctccctcatcctcgattggggttgagaaattgaatcaaaccccccacacccacccacccaaaaaagtcgcccttcctcggacgagatccccccaatcagttcttattgtggccgatagattgattgcctcacttgccttccgctcgcttttggggtgctaacctaatcggtgaccctccttgtgtgctcggattgggttctcgttctcatcagcattgacctcagcggctttcttttggacaatgctgctgttttactgcttgtttctaccatctacggccgtgtaggtgtgtccgacacgccacaaaaacttttcgttatgttcagcaggtaaacaagtctagctgaagtgacgattgccagcattgttcgaccgtgcggcttctgtttggctggaaccgtgatggatccagaaaaacaaaatgagatgagcctgatcgacaagagagaactagtatacgaagttgcaagatggcctcaaggtgccatggagattcttcggtgctggacccgcagggaacttcttgagcttatttgtgttgagttgggcaaagagaggaagtataccaatgtcccaaaagctaagatgattgcttacctattgaaattagtttcacggaatagtggaaagaatggacaactcaagaatgataatccgaatgttatgttattagggcaggataacaaagatgaaatacaaatgaaggaatctgatgaacaatcacgaccactcaaaactgcaaactctgactcatcaataagcagagaggcttgtgccggtagttcagtggtgtgcagcaatgttgcatgccaagccacaccaaatgcaggagataaatattgcaaacgttgctcttgctgcatttgcaataaatacgatgataacaaagaccctagtttgtggttggtttgcagctctgataatccatacagtggttgttcatgtggtgtctcttgtcacctaaactgtgctctaaagaataaaagggctggcattgtcaagaatgggtgcaacaagttagactgtagtttctactgtgttagttgtgggaaaatcaactggctaatgaggtgtttgcagaaacaacttgcaattgctagggaggcaagaagagttgatgtgctttgtgagcggttgtcattgagccataaaataatacaagggtctgaacgttacaaggaaatagcgagcataatcagctcagctgtgaaaacacttgaaatagaagttggtagtgcattggatcaggtctctgtgatcacggggcgtggcatcgtgaaccggcttacttgtggtgctgaagttcagaagctttgttcaagtacattagaaattgtagactctaaagtggataacatcttggagttcgagtccaataatagtccaaaactcctaggtcctcagccccaaatcctttttcatgagatcactccattttctgtggttattgtgttgaactatcagcatgacatcggtaaggagcagattgatggttccaaaatttggcaccgaagtgccagggtttgcaactattcatcagagcccacatgccacatactgaggccaaacactaggagcctggtttctggtctgagcccttcaactgaatacttcttcaaggttttgccttttagcagcacacatgggtttactgagtgggagacaaaatgcagcacacgcagcctggaccatggcagcagccagtgctcaactcagaactctgagagcatgtgcctcaaagacgattcaatgcagcatcacaaaaaggatttgaatgtgcagaatcaccagagaaccattcaatatgattcacctaagggttctacaaattcaagtgagaacaatttatcatgtgatcggtattccaagcgggctaaggttgcaaggctagatggtgcaagcgacaacgatgaaagccagttgccgccaacttctgaagttttaccatttgcaagctccaactcttctccttccgaagctccaagtaaacctgacttgcttattggcaccccagattcggcctccaagaactatgtggagcagcagtacgagtactgcgtgagggtggtcaggtggctggagcatgaagggcacatggacaatgacttccgtgtaaagttcctcacttggttcagcctgaaggcaacaacacaggacaggcgaatcgtgggcgcctttgtagatgttctcatcggtgatcctgcaagcttggttggccaactggttgatgcattcaaggatgccatctgtatcaaggagaagccctctcaagcacaacagaaagatgcatgctgcaaggttgcatctgaattgtgtcgagacagacattgggcacttgagataaacttttaaggttataaaagacgataaaatgctgtagatgcttcattcggcattcaggtccatctgatctctcatttatttattccaattcagtcgatacgcggactattgatccatgaaggcaatcgtggtggaaccatgtgctgatgagacatggttcatggaccggttgagtttaggtttcaactagtgaagtagttggagtttgttagcagacaagcaattgtatgcatgtggaatgctatcttggatctgcaagctaactaatcatatcatgactttggtagatgtttattgttattagttgatagttgactcattcttttcgtgtgacgtgtttgaagtgccggaagtagcagttcatgtacagtcttggagccttagaccgtgtccagcagtctattcgtagcttacctaaaatattgtttttgcattgcctaaaatattgtttttgcaatgttctgtactgtagacttgtagactgtattgttcacatagtagagtaggtatgaggatgtgtaagctgttagaaatagcctta

SEQ ID NO: 5786 - DNA, 907 bp, Zea Mays
gatcctcctatttcttgctttctaaatgttgcaaactgtgtatatcaccaccccgttgaaatgtcgccgccgttgccttggtatattggtggctgcctcttcacaccaagcagcgatttctcttggttgggcctatggtctaactatatcggcatcaaagtaggcatatgctcttcggaatttgtccaggtcagacaccccaagtcctccaagctcctttggcttggacactattggccactttactaagcagtatccttcgttggcgttctcttcccccttccaaaggatcttcagattttgaggggaagatggtgaggtgatatatagacatggacaacagaaccgagcttgatcaaatagtggttgaaaatgttctggcattcgacgcaggtttctgggttcgactggcagctagaattgatctctgcaaatcagatgatgataaaaaagattatgaagagctggcggaaaatgtcatgaacattgttgaccggcttgttcacaagactaatcaaaagattgaacaatcaactgatgtgctgaaggcaattattagtcctgcaatgcatgaaggagatgtgaagtggccaccaagagatccagatacactcaaattgatggagaaagaaataacacgccgagaacaagaaggacaacttgatgagggatttctgtcagaagttagtgctcagttgaggcaattatctttatatgtgtttaggctaaacaagacggagataagccagggcttcaggctatgctgcaaaaggtgttgcagttatatgcttctaaatctctccaaaaacgtagttatgcatacaaaggggggcaagttgtagttcctgaaaagtttctcgaatgtgtaatacagggtctgtatttccacgtagagattttcttcgtt

SEQ ID NO: 5787 - DNA, 1075 bp, Zea Mays
gttctagccactccccactcctcacggctcacgagggtacggcacctcgccgtggcccgcggctgtttccgaggcaagcggactcaccggcgtcctgcgcacgcgaggcgagcagcggctccgtcgacctgcgagccaatccgtctttatttctccaccccaatatccaaacataagataaaaatctatccaacactcatttcccacgccactcccccactccctctccaccctgcttccgttttcggccggcgatggcgacgaccgccgccgcatccacgtcgctccggccgctgtcaccgtccccacctcgcatcgcgagtttgccccgtcggtggtgttggggaatcccggtgcagtcctccgggcggagcgcattccatgctgaacggcggaggcggagcactttattatgcgctgctgataaagctcctgaagaatccctcaagaagaccattgaagtggataggcttattgatatgctgagggacgcaaatcctagagaggtaaatgtgaatcttgatcaaatagtggttgaaaatgttctggcattcgacgcaggtttctgggttcgactggcagctagaattgatctctgcaaatcagatgatgataaaaaagattatgaagagctggcggaaaatgtcatgaacattgttgaccggcttgttcacaagactaatcaaaagattgaacaatcaactgatgtgctgaaggcaattattagtcctgcaatgcatgaaggagatgtgaagtggccaccaagagatccagatacactcaaattgatggagaaagaaataacacgccgagaacaagaaggacaacttgatgagggatttctgtcagaagttagtgctcagttgaggcaattatctttatatgtgtttaggctaaacaagacggagataagccagggcttcaggctatgctgcaaaaggtgttgcagttatatgcttctaaatctctccaaaaacgtagttatgcatacaaaggggggcaagttgtagttcctgaaaagtttctcgaatgtgtaatacagggtctgtatttccacgtagagattttcttcgtt

SEQ ID NO: 5788 - DNA, 1083 bp, Zea Mays
tttcttatccggccgtcttggttctagccactccccactcctcacggctcacgagggtacggcacctcgccgtggcccgcggctgtttccgaggcaagcggactcaccggcgtcctgcgcacgcgaggcgagcagcggctccgtcgacctgcgagccaatccgtctttatttctccaccccaatatccaaacataagataaaaatctatccaacactcatttcccacgccactcccccactccctctccaccctgcttccgttttcggccggcgatggcgacgaccgccgccgcatccacgtcgctccggccgctgtcaccgtccccacctcgcatcgcgagtttgccccgtcggtggtgttggggaatcccggtgcagtcctccgggcggagcgcattccatgctgaacggcggaggcggagcactttattatgcgctgctgataaagctcctgaagaatccctcaagaagaccattgaagtggataggcttattgatatgctgagggacgcaaatcctagagagcttgatcaaatagtggttgaaaatgttctggcattcgacgcaggtttctgggttcgactggcagctagaattgatctctgcaaatcagatgatgataaaaaagattatgaagagctggcggaaaatgtcatgaacattgttgaccggcttgttcacaagactaatcaaaagattgaacaatcaactgatgtgctgaaggcaattattagtcctgcaatgcatgaaggagatgtgaagtggccaccaagagatccagatacactcaaattgatggagaaagaaataacacgccgagaacaagaaggacaacttgatgagggatttctgtcagaagttagtgctcagttgaggcaattatctttatatgtgtttaggctaaacaagacggagataagccagggcttcaggctatgctgcaaaaggtgttgcagttatatgcttctaaatctctccaaaaacgtagttatgcatacaaaggggggcaagttgtagttcctgaaaagtttctcgaatgtgtaatacagggtctgtatttccacgtagagattttcttcgtt

SEQ ID NO: 5789 - DNA, 2604 bp, Zea Mays
tgcaaacatatcctttcttatccggccgtcttggttctagccactccccactcctcacggctcacgagggtacggcacctcgccgtggcccgcggctgtttccgaggcaagcggactcaccggcgtcctgcgcacgcgaggcgagcagcggctccgtcgacctgcgagccaatccgtctttatttctccaccccaatatccaaacataagataaaaatctatccaacactcatttcccacgccactcccccactccctctccaccctgcttccgttttcggccggcgatggcgacgaccgccgccgcatccacgtcgctccggccgctgtcaccgtccccacctcgcatcgcgagtttgccccgtcggtggtgttggggaatcccggtgcagtcctccgggcggagcgcattccatgctgaacggcggaggcggagcactttattatgcgctgctgataaagctcctgaagaatccctcaagaagaccattgaagtggataggcttattgatatgctgagggacgcaaatcctagagagattttatagtgtgctcagttagagcttccatcctgtgttgcctgttcagaattttcggagccaaacgaagaactcattgacaaatctatcaccggacctaagttttatcaactgctttgactatagagctagatgacagcttgttttttttgaacaaatggcaggagctctgcctctcaattaagattgaagagtttatgtacagaaaattccgaaggctacaggctcccataggcgcacgagcattaagcacacacccaactaaggcaaattactcaacaccctcgtgtgtaggtcaatgtcctccttggctctacaggccacctgccgtgcatctagcaagctgctttcaaagatcctcctatttcttgctttctaaatgttgcaaactgtgtatatcaccaccccgttgaaatgtcgccgccgttgccttggtatattggtggctgcctcttcacaccaagcagcgatttctcttggttgggcctatggtctaactatatcggcatcaaagtaggcatatgctcttcggaatttgtccaggtcagacaccccaagtcctccaagctcctttggcttggacactattggccactttactaagcagtatccttcgttggcgttctcttcccccttccaaaggatcttcagattttgaggggaagatggtgaggtgatatatagacatggacaacagaaccgaggtgactaatgtcaaacacctgactttgtttaatagctttcctttctgtaggaacatatgaggaggctagaactgcattgattcattgcataacagggtagagaggttacacatatataggcaaggatcacagggtttatagaaatacccaatcacagattgatccttgcctaatcagctcatataccctacctattctggttagaatacattgggaaggtaatcatatgtctagccctgattttagcttaccaaaactgactaacactttccaacctggaagtctctgccacattccatgagaggttgcacatgcactttttggagaggcctggtatgtattgtagcccaaggtagcggcagggaaaagtgcctctggctcccaagaaaggtgagatcacttgatcaaggtctatgtcctcacaacgaattgggtggatggagcttttagcaaagtttacatgggtctgacactttgctgaaggcgtcaaggatggatttaagtgcctcgtgcctcgatatcttcgttcaaaaaaaagtgcctcgatatcctcttttacttttgacttatttctttgtcttcttactatcccgttctacaccttctacatgcttgcacagtgtttgggtttgtctaaaaggtatccctagattggacaaatgtgtcatgtctctctctctctctctttaaatgaaggccttattctctgctgaatgaactggaagaatccttgctcgttttattgtttatttttaaatagtagttcagattaaagtactaatacacctttttttttgtaaacagcttgatcaaatagtggttgaaaatgttctggcattcgacgcaggtttctgggttcgactggcagctagaattgatctctgcaaatcagatgatgataaaaaagattatgaagagctggcggaaaatgtcatgaacattgttgaccggcttgttcacaagactaatcaaaagattgaacaatcaactgatgtgctgaaggcaattattagtcctgcaatgcatgaaggagatgtgaagtggccaccaagagatccagatacactcaaattgatggagaaagaaataacacgccgagaacaagaaggacaacttgatgagggatttctgtcagaagttagtgctcagttgaggcaattatctttatatgtgtttaggctaaacaagacggagataagccagggcttcaggctatgctgcaaaaggtgttgcagttatatgcttctaaatctctccaaaaacgtagttatgcatacaaaggggggcaagttgtagttcctgaaaagtttctcgaatgtgtaatacagggtctgtatttccacgtagagattttcttcgtt

SEQ ID NO: 5790 - DNA, 3177 bp, Zea Mays
acccggctcgctcgcatgaagcaatcgccggcgtctactgcagtctccgactctgggatgctgggccgccgcctcgccttgctcccggcggcgaccgtcgggcgcgggggtaggacgacgcgggcgcggatgacgatggggtgcgtgctgctcgaccacgtggcgccgcggctcgcggtggcctcggccacgctcgtgggtgcccgggaggtgatcgcggcggctgccgccgcgggcgcggggggaagcggcgcggtgcacggcgccgtggcgtcgacgctcgcgcaggtagcggtcacggccgtggcgattgcatcgggggcgtgcctttcgaccaaggtcgacttcctctggcctcgcatcgaccagttgccagatactcttatatttgaaggagtggaggtgacaggataccagatatttgaggatcccaaggtgcagaaagcaatagaatttgctagtacagcccaccttgggcaatttaggagaacaggggatccatatattacacactgcatacacactggaaaaattttagctgccttggttccgtcaactggagaaagagctgttaacacaattgtggctggcattcttcacgatgttgtttgtgatacatcagagagcttgaagagcatagaagagcagtttggggctgatgttgctagcttggtatctggtgtatcaaaattaagctacataaaccagctacttcgcaggcatcgacaaaaaaatactggtgggagcactcttacttcagaggaagcaaataatctacgtgttatgttattggggatggttgatgatcctcgtgtggtgctcatcaagctggcagatcgcttgcacaatatgcggacaatttatgctcttcctgtacctaaagctgaagctgttgctcaagagacattggctgtctggtgctcacttgcttctcgattgggagtctgggctttgaaagctgagctggaagatttatgctttgctgtcctccagcctcaaatcttcaagaaaatacaatctgaacttactttaatgtggaatcgtaccggaaaatctaaaaatatgagaagatcatcaattcgaaacgaattacttgcttcaatgaaagatgggaatatggtgtccatcaatgatttgtttagttcatgtaaccaagaaagaccaaatatgaaggacttattgcaggcagttttgccatttgacatctttttggatcggaagaggcgttcatacttccttagcaatctcaatagtaattctggagaatctataccaaatcctaagatagttgacgatgctgctgttgcattagcatctttagcatcttgtgaggaagaacttgagcgagaattactcatatcaacatcgtacatacctgggatggaagtgactttgtcgagtagactcaagagcttgtacagtatctactgcaagatgaaaagaaaagaagtaggaattaggcaagtgtatgatgctcgtgcattgagggtgattgttggagacaaaaatggtgccatgcatggatctgctgtccggagttgttacagcatccttgatatagtacacaggctatggactccaattgatggggagtttgatgactacattatcaatcctaagggtagcggttaccaatcactacacacagcagttcaggcatctgatagctcaccgctggaggtccagattagaacccagcgaatgcatgagtatgcagaacatggacttgctgctcattggctgtataaggagagcaaagttgagtacagaagtagcatgagtaagagaataagacaaagtacatcatattcatctagttcttcagaagatgaaagttctgtacaggatgatatcccatcaaagtacagttcaatgaaagtggggcatccagtgctaagaattgaaggtagtcacttactagcagctgtcgtagtcagataaaggaggaaaggaattgattgttgctgtaagttttagtcttgaagcttctgaagctgtagctgagctaaggtcatcttttcagttgaagcgttgggaagcctatgctaggcttcataaaaaggtttctgagaagtggtggtgtgcacctggacatggtgactggtcaacaaatctggagaggtacacactatgccaggatgggatatttcataagcaagaccaatttgggagacttttacctacatttattcaaataattgatttggcggaagaggaagaggaagagtattggatggttgtatctgccatattcgagggaaaggaaacttgcagtctaccatctgaatcgagttatgctgataaatcatcatctgaacctccaagttctactccattaagcgaccccatcaacaataaggtgcatttgctcagaaccatgcttcaatgggaggagcaagttcgtcgtggcgcatctttggcagagaaaagtctcagtgcaagcatctgcacaaaggcaatcctgcgtgaggtggccataatattctggcctaatggcaagattatgagaatgagcactggtagcacagctgctgacgctgctagaagaatgggcgtcgaagggaagctgctctgggttaatggccaactagtgctgccccaaacagagctaaaggatggggatatagttgaagtgagggtatagatgcaagtaccagattccagtacaccttcctcagggttattgatcatattggttcctcagttcttgccctatcttggcaatgcatcgaacctcaattgtacagtccatttgtcgaaatgaatcgaagaaagaaggattaggtccagtaagtgttgtgtcatacaagagttcactgtgtacataagaaactgcaagtataaaagctgtctgtccagctgtgcttctccttgcccatagttacagtggtaatgtaaatttccgtaagtaaagatgtagtaatgtttagttagtggtccacatttcagcgtgaagttatgaagtgcagtagcgctgcaagtttttttttatatatgtccaaagtagatgtctcatgctgcctaaaaaagatgtccatgtcccgtaatttggcaagccaagattttcaacgttgtttggtttgtggagtcaacctatgcttgatgtatcatgaattcatcccttaaattttggtggaaatcctcatgaatatactactccgtccgtcctaggatata

SEQ ID NO: 5791 - DNA, 3454 bp, Zea Mays
ctcgtgctctcaccctccgttcctcgtcgccactcgcgtgccgtgccgtgtgagtgaccctcgtcgcgactcgcgtcgctaggatgagatagaaacgaaaccggcccccacacccggctcgctcgcatgaagcaatcgccggcgtctactgcagtctccgactctgggatgctgggccgccgcctcgccttgctcccggcggcgaccgtcgggcgcgggggtaggacgacgcgggcgcggatgacgatggggtgcgtgctgctcgaccacgtggcgccgcggctcgcggtggcctcggccacgctcgtgggtgcccgggaggtgatcgcggcggctgccgccgcgggcgcggggggaagcggcgcggtgcacggcgccgtggcgtcgacgctcgcgcaggtagcggtcacggccgtggcgattgcatcgggggcgtgcctttcgaccaaggtcgacttcctctggcctcgcatcgaccagttgccagatactcttatatttgaaggagtggaggtgacaggataccagatatttgaggatcccaaggtgcagaaagcaatagaatttgctagtacagcccaccttgggcaatttaggagaacaggggatccatatattacacactgcatacacactggaaaaattttagctgccttggttccgtcaactggagaaagagctgttaacacaattgtggctggcattcttcacgatgttgtttgtgatacatcagagagcttgaagagcatagaagagcagtttggggctgatgttgctagcttggtatctggtgtatcaaaattaagctacataaaccagctacttcgcaggcatcgacaaaaaaatactggtgggagcactcttacttcagaggaagcaaataatctacgtgttatgttattggggatggttgatgatcctcgtgtggtgctcatcaagctggcagatcgcttgcacaatatgcggacaatttatgctcttcctgtacctaaagctgaagctgttgctcaagagacattggctgtctggtgctcacttgcttctcgattgggagtctgggctttgaaagctgagctggaagatttatgctttgctgtcctccagcctcaaatcttcaagaaaatacaatctgaacttactttaatgtggaatcgtaccggaaaatctaaaaatatgagaagatcatcaattcgaaacgaattacttgcttcaatgaaagatgggaatatggtgtccatcaatgatttgtttagttcatgtaaccaagaaagaccaaatatgaaggacttattgcaggcagttttgccatttgacatctttttggatcggaagaggcgttcatacttccttagcaatctcaatagtaattctggagaatctataccaaatcctaagatagttgacgatgctgctgttgcattagcatctttagcatcttgtgaggaagaacttgagcgagaattactcatatcaacatcgtacatacctgggatggaagtgactttgtcgagtagactcaagagcttgtacagtatctactgcaagatgaaaagaaaagaagtaggaattaggcaagtgtatgatgctcgtgcattgagggtgattgttggagacaaaaatggtgccatgcatggatctgctgtccggagttgttacagcatccttgatatagtacacaggctatggactccaattgatggggagtttgatgactacattatcaatcctaagggtagcggttaccaatcactacacacagcagttcaggcatctgatagctcaccgctggaggtccagattagaacccagcgaatgcatgagtatgcagaacatggacttgctgctcattggctgtataaggagagcaaagttgagtacagaagtagcatgagtaagagaataagacaaagtacatcatattcatctagttcttcagaagatgaaagttctgtacaggatgatatcccatcaaagtacagttcaatgaaagtggggcatccagtgctaagaattgaaggtagtcacttactagcagctgtcgtagtcagtatagataaaggaggaaaggaattgattgttgctgtaagttttagtcttgaagcttctgaagctgtagctgagctaaggtcatcttttcagttgaagcgttgggaagcctatgctaggcttcataaaaaggtttctgagaagtggtggtgtgcacctggacatggtgactggtcaacaaatctggagaggtacacactatgccaggatgggatatttcataagattatatgagaatgcaaaactgatattgcatgcacatttggaatcatcgcaccaactgaaaaatttagagatacaagttactgctggtgccctaaactcctattatgtgattatgtcgtgggtttgattatatcctgtgcgtctaagatgtcttgtttcagcaagaccaatttgggagacttttacctacatttattcaaataattgatttggcggaagaggaagaggaagagtattggatggttgtatctgccatattcgagggaaaggaaacttgcagtctaccatctgaatcgagttatgctgataaatcatcatctgaacctccaagttctactccattaagcgaccccatcaacaataaggtgcatttgctcagaaccatgcttcaatgggaggagcaagttcgtcgtggcgcatctttggcagagaaaagtctcagtgcaagcatctgcacaaaggcaatcctgcgtgaggtggccataatattctggcctaatggcaagattatgagaatgagcactggtagcacagctgctgacgctgctagaagaatgggcgtcgaagggaagctgctctgggttaatggccaactagtgctgccccaaacagagctaaaggatggggatatagttgaagtgagggtatagatgcaagtaccagattccagtacaccttcctcagggttattgatcatattggttcctcagttcttgccctatcttggcaatgcatcgaacctcaattgtacagtccatttgtcgaaatgaatcgaagaaagaaggattaggtccagtaagtgttgtgtcatacaagagttcactgtgtacataagaaactgcaagtataaaagctgtctgtccagctgtgcttctccttgcccatagttacagtggtaatgtaaatttccgtaagtaaagatgtagtaatgtttagttagtggtccacatttcagcgtgaagttatgaagtgcagtagcgctgcaagtttttttttatatatgtccaaagtagatgtctcatgctgcctaaaaaagatgtccatgtcccgtaatttggcaagccaagattttcaacgttgtttggtttgtggagtcaacctatgcttgatgtatcatgaattcatcccttaaattttggtggaaatcctcatgaatatactactccgtccgtcctaggatata

SEQ ID NO: 5792 - DNA, 3588 bp, Zea Mays
tcgacagctcccgtgacccagttcccagccgcagccacacaaacagaccgccccctctcgtgctctcaccctccgttcctcgtcgccactcgcgtgccgtgccgtgtgagtgaccctcgtcgcgactcgcgtcgctaggatgagatagaaacgaaaccggcccccacacccggctcgctcgcatgaagcaatcgccggcgtctactgcagtctccgactctgggatgctgggccgccgcctcgccttgctcccggcggcgaccgtcgggcgcgggggtaggacgacgcgggcgcggatgacgatggggtgcgtgctgctcgaccacgtggcgccgcggctcgcggtggcctcggccacgctcgtgggtgcccgggaggtgatcgcggcggctgccgccgcgggcgcggggggaagcggcgcggtgcacggcgccgtggcgtcgacgctcgcgcaggtagcggtcacggccgtggcgattgcatcgggggcgtgcctttcgaccaaggtcgacttcctctggcctcgcatcgaccagttgccagatactcttatatttgaaggagtggaggtgacaggataccagatatttgaggatcccaaggtgcagaaagcaatagaatttgctagtacagcccaccttgggcaatttaggagaacaggggatccatatattacacactgcatacacactggaaaaattttagctgccttggttccgtcaactggagaaagagctgttaacacaattgtggctggcattcttcacgatgttgtttgtgatacatcagagagcttgaagagcatagaagagcagtttggggctgatgttgctagcttggtatctggtgtatcaaaattaagctacataaaccagctacttcgcaggcatcgacaaaaaaatactggtgggagcactcttacttcagaggaatcaggcaaataatctacgtgttatgttattggggatggttgatgatcctcgtgtggtgctcatcaagctggcagatcgcttgcacaatatgcggacaatttatgctcttcctgtacctaaagctgaagctgttgctcaagagacattggctgtctggtgctcacttgcttctcgattgggagtctgggctttgaaagctgagctggaagatttatgctttgctgtcctccagcctcaaatcttcaagaaaatacaatctgaacttactttaatgtggaatcgtaccggaaaatctaaaaatatgagaagatcatcaattcgaaacgaattacttgcttcaatgaaagatgggaatatggtgtccatcaatgatttgtttagttcatgtaaccaagaaagaccaaatatgaaggacttattgcaggcagttttgccatttgacatctttttggatcggaagaggcgttcatacttccttagcaatctcaatagtaattctggagaatctataccaaatcctaagatagttgacgatgctgctgttgcattagcatctttagcatcttgtgaggaagaacttgagcgagaattactcatatcaacatcgtacatacctgggatggaagtgactttgtcgagtagactcaagagcttgtacagtatctactgcaagatgaaaagaaaagaagtaggaattaggcaagtgtatgatgctcgtgcattgagggtgattgttggagacaaaaatggtgccatgcatggatctgctgtccggagttgttacagcatccttgatatagtacacagtcactacacacagcagttcaggcatctgatagctcaccgctggaggtccagattagaacccagcgaatgcatgagtatgcagaacatggacttgctgctcattggctgtataaggagagcaaagttgagtacagaagtagcatgagtaagagaataagacaaagtacatcatattcatctagttcttcagaagatgaaagttctgtacaggatgatatcccatcaaagtacagttcaatgaaagtggggcatccagtgctaagaattgaaggtagtcacttactagcagctgtcgtagtcaggtatatcttcattcaaaaatagaaactgttgtttgttctggaagaccaatattgcagctgatatatgtttaaatcaatttgcagtatagataaaggaggaaaggaattgattgttgctgtaagttttagtcttgaagcttctgaagctgtagctgagctaaggtcatcttttcagttgaagcgttgggaagcctatgctaggcttcataaaaaggtttctgagaagtggtggtgtgcacctggacatggtgactggtcaacaaatctggagaggtacacactatgccaggatgggatatttcataaggtctgtacagctgaaacattagctctttatcagtttttgtttcttcttctcagccttttgttctgttttagattatatgagaatgcaaaactgatattgcatgcacatttggaatcatcgcaccaactgaaaaatttagagatacaagttactgctggtgccctaaactcctattatgtgattatgtcgtgggtttgattatatcctgtgcgtctaagatgtcttgtttcagcaagaccaatttgggagacttttacctacatttattcaaataattgatttggcggaagaggaagaggaagagtattggatggttgtatctgccatattcgagggaaaggaaacttgcagtctaccatctgaatcgagttatgctgataaatcatcatctgaacctccaagttctactccattaagcgaccccatcaacaataagaaccatgcttcaatgggaggagcaagttcgtcgtggcgcatctttggcagagaaaagtctcagtgcaagcatctgcacaaaggcaatcctgcgtgaggtggccataatattctggcctaatggcaagattatgagaatgagcactggtagcacagctgctgacgctgctagaagaatgggcgtcgaagggaagctgctctgggttaatggccaactagtgctgccccaaacagagctaaaggatggggatatagttgaagtgagggtatagatgcaagtaccagattccagtacaccttcctcagggttattgatcatattggttcctcagttcttgccctatcttggcaatgcatcgaacctcaattgtacagtccatttgtcgaaatgaatcgaagaaagaaggattaggtccagtaagtgttgtgtcatacaagagttcactgtgtacataagaaactgcaagtataaaagctgtctgtccagctgtgcttctccttgcccatagttacagtggtaatgtaaatttccgtaagtaaagatgtagtaatgtttagttagtggtccacatttcagcgtgaagttatgaagtgcagtagcgctgcaagtttttttttatatatgtccaaagtagatgtctcatgctgcctaaaaaagatgtccatgtcccgtaatttggcaagccaagattttcaacgttgtttggtttgtggagtcaacctatgcttgatgtatcatgaattcatcccttaaattttggtggaaatcctcatgaatatactactccgtccgtcctaggatata

SEQ ID NO: 5793 - DNA, 1536 bp, Zea Mays
gcagtccgcagagcagagtccatcactcttgttgctccaatataattatcttcctcttcgtcgctcgcacgtccgatccgtcctcacgtaacacgccgatagatggagtcgtccatgtccatgtccgccgccgcctcggtcgtcgtgaggacatgcgttccggccgctgtcatgttgcccctctccccgtcctttactaggcccgccccccgcaccaccgggcgaggcttccgctgcaggtgcagcagcaccagcagcgccaccaaggactcggcggtcgtgtacagcaggctgctggacgacgcgctgttccggtcggcggaggtgatccagtgggagagcggcaagtccatgaacgccatcgccacggcgcagggcatccagatccggcggcgctgccggcccaggtacccgtccgagggcaccggcgccgagcgcgccgtcccgcgcaacatcctggagcagatcatctgggacaaggaggtggaggtggcccagcgcaaggccaggacgccgctgtgcgaggtgaaggcgtccgccgcgctcgcgccgccgcccagggacttcgtcggcgcgctgcgcgccgcgtgccgccgcaacgccgtccccgcgctcgtcgccgaggtcaagaaggcgtcgcccagcaagggcctcctcagggaccacttcgacccggtggagattgctcgcacctacgagaagaacggcgcggcgtgcctgagcatcctgaccgacgagaagcacttccaggggagctttgagaacctagaggccgtgcgcagctccgtgccctctgctctgcaaggagttcgtcatcgacgcctggcagatctactacgcgcgctcgaaaggcgcggacgcggtcctcctgatcgcggccgtgctgccggacatcgacatcacctacttcctccgcgtctgcaagagccttgggatgacagctctcgtcgaggttcatgatgagagggagttggatcgcgtcctcaagatagacggtgtggagctcatcggcatcaacaaccgcagtcttgggacattcgaagtcgacactgcaaacacaaacatgttgttagagaagcgtggcgacatcattaacgagaagcgaatacaggttgtgagcgagtctgggctgttcactcccgatgacgtggcatatgtgcaaaaagctggtgttttcgcggttttggtaggagagtccctgctgacgcaggaagaccctggccgagcgattgctgggctgttcgggaaggagctgttaccttaatgtatattctcccgttgttccgctcgtattgtttagctaattattatattgctgtacgtatacgtagcaataatcccggccgggctttcagagtgaagaaaggctgcaaagcgcatatatgaacgaacaaagctagcgctgtatttgtaagatcgagcagttgtttgttcacttctttgcatatataataatcatataatgcgcagtgatttgtttaaggcgcgcactgggatatcagttcagattatgtttcagcgtacgacggacctccg

SEQ ID NO: 5794 - DNA, 5845 bp, Zea Mays
aagcaaggtttgtgataacagaggcccttgctggaaaatccatggcataactcagcatttgaaggtgttggatttctcaggctgtttcttccagcgaactcgaggaatcaggatcactttacaactgattggattagaaattgtctggacatatgggattctgtcacaaattgtaacttctgggacatccaatgggcttccatcatagcacgttgtataaaaaattcaagatctgtgaactgggatgcttttcttcccttgttattcacaagatacttgaacatgtttgaggttcctatatcaagtggcaatggttcatacccctttccagtggaggttcctgggaacacaagatttttattttccagtaagaccagaacactttccaaggcaattgcaaagtctgttgtataccttttgaagcctaaaagtttagcatttgagtattttgagaagctcattaattttttggaacagttctatcatccgtcaaatgggggtcgttggacctactcattggaacgcttcctgcgctatcttgttgtttactttgagaaacgccttcagcatgaacaatttgttatggcagttgaggaccatgatcaatcttatctgggaaaggaagaaaggtctgtttttgtcaaagctatcttgaaattattggatcgtggtcagtacagcaaggataattctcttgctgaaacagtttccgttgcaacttcgatcctgtcttatattgaaccaaccctcgtgcttcagtttgttgcaaaaaacttccaacgagccttagagacaactacagctacccatcagttaaagaacgctgtcacatctgttgcattttctggacgtgctcttcttctatgttctttatgttcatctcagaatgatgatagcagtgttgttgattcattcagtgatcttgttgtcgcttccctttcaaatgcgttacttggcatggatgccaatgatccacctaaaactattgctacaatgcagttaattgggtctatcttttcaaatctagctgcagttagtgatgatgtgcctatattgctccaatctactactctatcgaactggctagatgaattcttttcccgactgttttctgtgcttcataatctggaatcaagtagtcccattaatgagggttaccaaagctcattcatgtcagggacttttcttgttgacagtccatattacttttgtatgcttgaaattcttctagggaagttatcaaaacccttatttaatcagtccctgaagagaattgccaagttcgttaatgcaaatatcctccctggtgctacttcagaagttgggcttctttgttgtgcctgtgttcattcttatcctgaggaggcttcagtctaccttgtaaagccaatcttagagaccatcatgtcatcctttgaggggactccaaccactggttatgtaggaagagtagttgcagataaagcatctaccaaggctgcactttctcctgctctggaaacagcaatagattactatctgagggttttggccatatccatcagttatgccggtcctaccttactcaattataaggaggaactaaatcacataataacatctgcgttccagtccccttcttggaaggttaatggagctggggatcatctccttcgctctctgctaggaaatctggtttcttattacccaattgatcagtacaagccattcacttgtcagcctattggaaatattattgaaccatgggggtgttcgaaagctcatcaggatagggaggatgaaatgcttaatttccctccaaagtggcatgatccaagtcatgatgaactctcttttgcaaatgaattactacaacttcatttccagtcagctttagaagatcttttgactatttgtcagacaaaagttcattctgacacaggagatgagaaggagcacctaaaaataaccctgttacgcattcattctgcattgcatggtgtaatgtcttgtttaccagaaattcgcccgtcatataaagatgggaggtccctggaagtggagtcggctttcttcatagcaggatctgctggtagcactgttggaagctcagaaatgcgtgaaaaggctgcagaatttgtgcacatagcttgcaggtacttattaaaggaaagaactgatgacagtattcttctatcccttgttgtgcgtgtcattgatgctttggtaaactatggaagcttggaataccaagaatggtcaagccatgttcaagcttggaaactagaatctgcttccataattgagcctccatgcaacttcattgttccatttcatgctcaaggaaaaaagagacctagatgggcacttgttgacaaagcaaacttgcatagtacatggaggtgttcacaatcatcatatcacagatacagaatgaatgcagatgtttcgccatctgtccccatgattaatttgatgaatgatctcttagatctctcactacacaactatgaaactgttcgatcgtatgctggaagatcgcttacaaaattgttgaaacgttggccttctctaatttctaattgtgttctcacactcacgggaaatttgcgtgacccaaaagctcctgaacatgttgttcttggttcttgcagcattctgatctcacagactgttttaagacacttgaccactgattctgtttccctctcttcctttatcatgggaattctggaaagctctcatcatgaatcgttgaagtgtcagaaagctattactgagctctttgtaacatataatatacgtttctctggaatatcaaggagcttctttaaaactcctgaaaatcaagctgacaagccaggatttctcagtctaatttctcaaattaatgctttgggctttgagactaatggactacattggaggagaactgcgcatcattaaattaagaagaaagaaggtcccagagaccaaaacatcaagagttacaaggacccattaatgaggctgaaaacacagaaaaaattgtctaatatagatcgagctatctatcaacggagatcattgcctatttgagatcggtctatccatcctagccatataggcacgctatacagtgattctaacaatcacaacagagcaacacaccaccagaacagaggaagttgatctggtggcccttctccaagtctagatgcgcacatacctctactgaatcagttgcaggcgcatgaagatggacacccgcagcaaatgcgtccagctgtcttcctatattatagaagaacagtgtgatcctgatctgatatagtcgtagcctgatatacaagcacattctattctaattcttgcagctgtgtaatttcaggtacaatttgatggccaacagagtattactattactaattttggcatccagaagcgaatctggcatatattcacaaatgcttgcaaaaattgctggtcatttcttaagaaatttaaagagtcaactgccccactcaagaatgcttgctatatctgctttgaacacattattgcaaggatcacctcataagacatctgcacaaaattctaagcaaccaatagatcaccctgaagattgcaatatttcatcaacagaagagattttgaatgagataatccgggaggaaggattcatgaatgagacactgaacagtttatctcatgttcatattatttccgacaatgatggttcgtcaaaagcgagttatggggcatcatcttttcaaagcggatctgacaaagcaataacttacttctattttgatttctctgcctcatggccacgtactcctagttggatttctttactgcgtggtcacacattctattccagttttgctaggatattcaaaaggcttatacagcaatgtggaatgccagtaatctcttctcttcagagtacactagaagagtttttaatttcaaaagagagaccaaggcaatgtgtcgctgctgaagcgatggctgggatgctgcactctgatatcattgggaatctggaatgtgagaacaactggttgatggcccagttgcataagattatgttagcaccatctgtggagtcagctcctgaatgggcagcttgtattcgatatgctgttacaggaaaagaaagagctggaactcgtgctcctgttctcaggcaaaaagtattagaatgcttatgtactcctcttcctcattccatggcaactagcgtacttgcgaagagatattcttttctgtccgttgctctaatagaaatttctccacccaaaatgtccccagcagagaagcaataccatgttaaaattcttgatgaactacttgacagcatgaaccattcatctgctcaggtaagagaagcaattggtattgccatgtgtgttacaacctcaaatatgagactttctgggttatttggcactggatgttcaccgcaaggccttcatggggatgtaagcatgattgaacaaacaggaaataaatattggtctgaacgtttgacagatggagctaatgaattagccgtaagtatacaaaatagtactcaatctaagcaactagaatcaacatcagattcggctgaagatagcatggatgatagagagcaggctgatgctaaaaggatggaaacgatatttcattttatgatcgcatctttgaagtctgggcgatcttctgttctactggacactattattaggcttgtgtacccaattctctcactacaggaaacatcaaataaagatttatcattgcttgctaagtcagctttcgagttgctgaaatggaggattctacatcggccttttcttgaaactgctattacgtctattcttcctttagtcagtgatcctaactggcgtaccagatctgcactgttatcgtatctcaggacctttacctacaggcacacattcatactttctggctcagagaaatcacaaatctggcaaacaatagaaaaattacttgtggacaaccaagttgaggttagggagcatgctgctggtgttcttgcaagcttaatgaagggtatagatgaagatctatcaaaggatttccgtgaacggtcatatgcacaagcccagcatatttttgttgcacggagaagaaatttgaagttttctgttggtaccatccatggtgcagtccttgctttgacagcttcggtcctttctgttccatacgacatgcctagctggcttccttctaatgtctcgctacttgctcgcttcatccgggagcctccccctataagatcaacagtcacgaaagctgttgcagaatttaagcgcacccatgctgacacatggagcatccagaaggacgcattcactgaagacgaactggaggttctccgtgatacatcttcctcctcgtcgtacttcgcttagattaaaatttcaaaggccataggatattctctggtactggtgttgtgtatatgaatttataactgttgaagtgtcggtgtttttcataaagtatatccttgtacgtacctagttttatttcatcaacagatgccttcgtacaactgagatgaagttatgcagtctactgtataccgtctggacatagcggaagcattatggcatgtgggatccttgcgtgggctgagaaattgttaacatccaaatcttttgcccagtcaacgacgtgaataagatgctgcctagtttaaccgcataatgcatctctggcaactctaatagcagagtcaacgggctagatataaacttgcccatgttcattagaagcaagaaagaatcagccattgacattaagaagtacatgagcacccccgatgcaaacgtctatagccctaatcatacttgtttcttgcttcctc

SEQ ID NO: 5795 - DNA, 6073 bp, Zea Mays
agcaccggatggtcgtgtggagcaccggccgccctagccccaggtctctctcccttgggtcgtcgtcgtcgtcgtcgtctccacggctacacccacatcttgtcttggaggcgaagaaagaaatcggccaagtatcccgcgccgcccaagtctccccaactaaccccccaaacctaccaccacccatccattttcgccttggcttgacccgcggagctctgactcagagggcatccacggcggcggcagtgcgagggtccgagggaagattggaggatgcacctctacaacgcgtggctaccgccaccggtgtcgaccgcggcgcgtggggaggcagctgcctttgcgggcgctgtgcggaccgccgcggacgcgtggctgcccggggactccgactccgcctacgccacactcaagtggatctccgtgttcgacctttttattaaagcgaagagtgacattgcttctgaggatcttcaggctcttgtaaagcttggactggaggtatttcatgcgtcacataacaagtttgttgtccagattaagtggggaggtctgctcataaggcttttaagaaagcatgggaagaggctttcacttgttgtgcaatggagaccactttatgagacgttgataaggactcatttcaagagaaacatgggccctgagggctggaaagtaaggaagcaacactttgagactgtgacctctttagtgtgtgcatctaggaatttctttactgaaggtgtggctgctgaaatttggtcagagttcaggcccttgctggaaaatccatggcataactcagcatttgaaggtgttggatttctcaggctgtttcttccagcgaactcgaggaatcaggatcactttacaactgattggattagaaattgtctggacatatgggattctgtcacaaattgtaacttctgggacatccaatgggcttccatcatagcacgttgtataaaaaattcaagatctgtgaactgggatgcttttcttcccttgttattcacaagatacttgaacatgtttgaggttcctatatcaagtggcaatggttcatacccctttccagtggaggttcctgggaacacaagatttttattttccagtaagaccagaacactttccaaggcaattgcaaagtctgttgtataccttttgaagcctaaaagtttagcatttgagtattttgagaagctcattaattttttggaacagttctatcatccgtcaaatgggggtcgttggacctactcattggaacgcttcctgcgctatcttgttgtttactttgagaaacgccttcagcatgaacaatttgttatggcagttgaggaccatgatcaatcttatctgggaaaggaagaaaggtctgtttttgtcaaagctatcttgaaattattggatcgtggtcagtacagcaaggataattctcttgctgaaacagtttccgttgcaacttcgatcctgtcttatattgaaccaaccctcgtgcttcagtttgttgcaaaaaacttccaacgagccttagagacaactacagctacccatcagttaaagaacgctgtcacatctgttgcattttctggacgtgctcttcttctatgttctttatgttcatctcagaatgatgatagcagtgttgttgattcattcagtgatcttgttgtcgcttccctttcaaatgcgttacttggcatggatgccaatgatccacctaaaactattgctacaatgcagttaattgggtctatcttttcaaatctagctgcagttagtgatgatgtgcctatattgctccaatctactactctatcgaactggctagatgaattcttttcccgactgttttctgtgcttcataatctggaatcaagtagtcccattaatgagggttaccaaagctcattcatgtcagggacttttcttgttgacagtccatattacttttgtatgcttgaaattcttctagggaagttatcaaaacccttatttaatcagtccctgaagagaattgccaagttcgttaatgcaaatatcctccctggtgctacttcagaagttgggcttctttgttgtgcctgtgttcattcttatcctgaggaggcttcagtctaccttgtaaagccaatcttagagaccatcatgtcatcctttgaggggactccaaccactggttatgtaggaagagtagttgcagataaagcatctaccaaggctgcactttctcctgctctggaaacagcaatagattactatctgagggttttggccatatccatcagttatgccggtcctaccttactcaattataaggaggaactaaatcacataataacatctgcgttccagtccccttcttggaaggttaatggagctggggatcatctccttcgctctctgctaggaaatctggtttcttattacccaattgatcagtacaagccattcacttgtcagcctattggaaatattattgaaccatgggggtgttcgaaagctcatcaggatagggaggatgaaatgcttaatttccctccaaagtggcatgatccaagtcatgatgaactctcttttgcaaatgaattactacaacttcatttccagtcagctttagaagatcttttgactatttgtcagacaaaagttcattctgacacaggagatgagaaggagcacctaaaaataaccctgttacgcattcattctgcattgcatggtgtaatgtcttgtttaccagaaattcgcccgtcatataaagatgggaggtccctggaagtggagtcggctttcttcatagcaggatctgctggtagcactgttggaagctcagaaatgcgtgaaaaggctgcagaatttgtgcacatagcttgcaggtacttattaaaggaaagaactgatgacagtattcttctatcccttgttgtgcgtgtcattgatgctttggtaaactatggaagcttggaataccaagaatggtcaagccatgttcaagcttggaaactagaatctgcttccataattgagcctccatgcaacttcattgttccatttcatgctcaaggaaaaaagagacctagatgggcacttgttgacaaagcaaacttgcatagtacatggaggtgttcacaatcatcatatcacagatacagaatgaatgcagatgtttcgccatctgtccccatgattaatttgatgaatgatctcttagatctctcactacacaactatgaaactgttcgatcgtatgctggaagatcgcttacaaaattgttgaaacgttggccttctctaatttctaattgtgttctcacactcacgggaaatttgcgtgacccaaaagctcctgaacatgttgttcttggttcttgcagcattctgatctcacagactgttttaagacacttgaccactgattctgtttccctctcttcctttatcatgggaattctggaaagctctcatcatgaatcgttgaagtgtcagaaagctattactgagctctttgtaacatataatatacgtttctctggaatatcaaggagcttctttaaaactcctgaaaatcaagctgacaagccaggatttctcagtctaatttctcaaattaatgctttgggctttgagactaatggactacattggaggtacaatttgatggccaacagagtattactattactaattttggcatccagaagcgaatctggcatatattcacaaatgcttgcaaaaattgctggtcatttcttaagaaatttaaagagtcaactgccccactcaagaatgcttgctatatctgctttgaacacattattgcaaggatcacctcataagacatctgcacaaaattctaagcaaccaatagatcaccctgaagattgcaatatttcatcaacagaagagattttgaatgagataatccgggaggaaggattcatgaatgagacactgaacagtttatctcatgttcatattatttccgacaatgatggttcgtcaaaagcgagttatggggcatcatcttttcaaagcggatctgacaaagcaataacttacttctattttgatttctctgcctcatggccacgtactcctagttggatttctttactgcgtggtcacacattctattccagttttgctaggatattcaaaaggcttatacagcaatgtggaatgccagtaatctcttctcttcagagtacactagaagagtttttaatttcaaaagagagaccaaggcaatgtgtcgctgctgaagcgatggctgggatgctgcactctgatatcattgggaatctggaatgtgagaacaactggttgatggcccagttgcataagattatgttagcaccatctgtggagtcagctcctgaatgggcagcttgtattcgatatgctgttacaggaaaagaaagagctggaactcgtgctcctgttctcaggcaaaaagtattagaatgcttatgtactcctcttcctcattccatggcaactagcgtacttgcgaagagatattcttttctgtccgttgctctaatagaaatttctccacccaaaatgtccccagcagagaagcaataccatgttaaaattcttgatgaactacttgacagcatgaaccattcatctgctcaggtaagagaagcaattggtattgccatgtgtgttacaacctcaaatatgagactttctgggttatttggcactggatgttcaccgcaaggccttcatggggatgtaagcatgattgaacaaacaggaaataaatattggtctgaacgtttgacagatggagctaatgaattagccgtaagtatacaaaatagtactcaatctaagcaactagaatcaacatcagattcggctgaagatagcatggatgatagagagcaggctgatgctaaaaggatggaaacgatatttcattttatgatcgcatctttgaagtctgggcgatcttctgttctactggacactattattaggcttgtgtacccaattctctcactacaggaaacatcaaataaagatttatcattgcttgctaagtcagctttcgagttgctgaaatggaggattctacatcggccttttcttgaaactgctattacgtctattcttcctttagtcagtgatcctaactggcgtaccagatctgcactgttatcgtatctcaggacctttacctacaggttagggagcatgctgctggtgttcttgcaagcttaatgaagggtatagatgaagatctatcaaaggatttccgtgaacggtcatatgcacaagcccagcatatttttgttgcacggagaagaaatttgaagttttctgttggtaccatccatggtgcagtccttgctttgacagcttcggtcctttctgttccatacgacatgcctagctggcttccttctaatgtctcgctacttgctcgcttcatccgggagcctccccctataagatcaacagtcacgaaagctgttgcagaatttaagcgcacccatgctgacacatggagcatccagaaggacgcattcactgaagacgaactggaggttctccgtgatacatcttcctcctcgtcgtacttcgcttagattaaaatttcaaaggccataggatattctctggtactggtgttgtgtatatgaatttataactgttgaagtgtcggtgtttttcataaagtatatccttgtacgtacctagttttatttcatcaacagatgccttcgtacaactgagatgaagttatgcagtctactgtataccgtctggacatagcggaagcattatggcatgtgggatccttgcgtgggctgagaaattgttaacatccaaatcttttgcccagtcaacgacgtgaataagatgctgcctagtttaaccgcataatgcatctctggcaactctaatagcagagtcaacgggctagatataaacttgcccatgttcattagaagcaagaaagaatcagccattgacattaagaagtacatgagcacccccgatgcaaacgtctatagccctaatcatacttgtttcttgcttcctc

SEQ ID NO: 5796 - DNA, 2349 bp, Zea Mays
cccagtccctgcactcgtgttcctgtagccgccaccccagcccctggacgctcggctcgatcccccccccccccctcaccacccgttctcctctagtcatcctcctcgccagtcgccaggtgtcggccgccggttgtgctccccgtcaggcgtcagcgtgatcccatcggtcgtcgcagaaacacagtcgctgctcgccgtcaccactcgccaggcgccggttcttctccaatccacgactcatcggctctccagtcctccgtccgttaccggtcatgccctccaataatttctacccgatgtcgctccacattattctgatatggagcatgattaacagctttgtgattaagcattgccatgcttcgagccatcacgttcatcaaatcaacttgcaagttacagattgtgctactacatcattccatgatcctattccatgcctcttcatcactgcttaaagtaccaaagtggctgtccacaacgcgcaaggaatgcctcggtgggagatgcatcaccctgatgttctcgagactcaactgcaacgctaaacggagctttcagtgggatctgttggaataataaccagatgggcatattctgagtaaagatcaaccgacaagattatgaatggtgtggacacattgaggtgaaatcatgctagctggctgccgctcggtttatagcccatgaaagcgaggagcatatacggggtgtgcagcgatcgggaccaggttgtgcagacaccacaagagggcacctatagtagtggtcatgagcctggtcagatgcaataaaaagctagattttgatgggagttagtggctgatagtttaggcaagcctatcctgaagtcatccgaacgaagaaaaggatggagactaggcgcccttttagtatcctgcttttttccttctggtataggtctggccagcgcagaccactgccattgttcacctgatgtctatccattgggaggaaagagagcacaccttattcaggctgtgcaaccgtctctctttggcttgcttggatgatcagactgaaacagtccctgatttgaacatctgagcctgctcagccgtcgccgtcccgtctgcctcctcacccggacaagaatttggactatgagcgtcaccctggagtctggtttctttccgactcctccagcagccaagtcatttttctacacttgtctcatctggagaaagcaatgtgtgcatgcttactctacatatccatggagtcagtaggggtccatcatcgtggcgtagcattgtgtggtttgttttaggttcagatttcgcgatctgggcgtacaaccagggctgcctgcctgcttgcctgtccctctttacccaatgcaatccaaggttttgttaaagttaagcaggcctccagtgctgcaacaattagagagacgctgatggtgggtgggatggaagggccgccgcatagatccagggaaagagagacgcgtttgtggtccatccatatgactggagagcctgaccctgacgccaacggcaagcagcagtggcggcatccagatcctggcgcaccgactgcacccgcccgtccggcaccttctttcggcggcagcggcactccgcgcgacacggggccgtgtccgtgtgggatgggatgggatggaatggaacacttctgggcggcttctggccgccagaagctgaaaccaaacgcccaacttctggcgcggcttctgggcgaagcgattgggtacggatccctcctccctatgccgtccgcaccgtcttctcctcgcattgccgcgtttccttcacccttttcctctgtccgtatggttgccgcagtgacgccgacgcccttgctccgtcctcaaggttccgcgtcgtcccaaccatcgcgtctgcatcttcgtaagattgtcgtatcacttcgagttcaaggtgttcggttccaagatcatctgggattcgaggacttcggttgcaacctccagttaagcaaaggtaccgtgccactcaatttgttgatgaattatttgtcaccatacatgctgtgtatttgttccaataacgtggatccatggcttgttttagttcattctttgtcagtacacctgaacaatgagtcgacggttaggataagacaacacagacattgtttatggggggatgttatttttcaatagagaacagattaccaattattgttcctggttaactacaatccattgatatgttgtatccctcatattaagggttcagggataccctccatgattgccaacctcattatctttatgattgtatattgaacccaaatttggtagagtatctgaatggatgtaagttaattgtcgta

SEQ ID NO: 5797 - DNA, 2802 bp, Zea Mays
atggagggggtgcagctacgattcaagcagagggccgctgaaacacaacatggcggcaggagaggagggtggcggcaatggagaaggggcgatgacactagagaagggggtggggcgctagagaatggtgcacgtgcgactgtgcgctacgtaatgcgtgtaccgtattggtacagagaccggattagaggcccaaaacaggaacaggtatgcgaccatgtaattgtcaggctatttcatggcaggtatgctgtactatcgtttcttttttttggtgaaggtgctgctttatgtcaaaattgatagttgtcaaataaagaaactttctgattgagtgctgacggactgatgccattctctctctgaaagcttgtgggttacattgttgctttgccgaataatggtcaacctaataggggggcactcagtgctgttgttgatctgggatcagattctaaatgcggggaaaagctctagcaatgtaccaaagtggctgtccacaacgcgcaaggaatgcctcggtgggagatgcatcaccctgatgttctcgagactcaactgcaacgctaaacggagctttcagtgggatctgttggaataataaccagatgggcatattctgagtaaagatcaaccgacaagattatgaatggtgtggacacattgaggtgaaatcatgctagctggctgccgctcggtttatagcccatgaaagcgaggagcatatacggggtgtgcagcgatcgggaccaggttgtgcagacaccacaagagggcacctatagtagtggtcatgagcctggtcagatgcaataaaaagctagattttgatgggagttagtggctgatagtttaggcaagcctatcctgaagtcatccgaacgaagaaaaggatggagactaggcgcccttttagtatcctgcttttttccttctggcctccagtgctgcaagtgggttgcttctagcatgagcttccgtgccgtactcctagttgcgagtttgcttctggagctttcttggggtgtttctttctctgtcctgtatgtttgcagcaattagagagacgctgatggtgggtgggatggaagggccgccgcatagatccagggaaagagagacgcgtttgtggtccatccatatgactggagagcctgaccctgacgccaacggcaagcagcagtggcggcatccagatcctggcgcaccgactgcacccgcccgtccggcaccttctttcggcggcagcggcactccgcgcgacacggggccgtgtccgtgtgggatgggatgggatggaatggaacagtaggctttttggcatttgcgaggacgcccaggcctgactcctctgaggccatctccatctccagcaggccgtataaacggctgtcgtttaggcatgcattaaccagagtatgagatttatgggagcaccttgagtggctcatggatcccctggactagcgtgcgcggtccatcacgcggtgtctgtttctgaattgagggtacgagggagcaataatggagcagccatggagatttcacccaacaacaacaacaaagaaaaaagaaataaaaagaggagatgaataagaatggtttacctatcacattccaacttccctttcattatcaacattccaacttccttttcattatcaacattccaactccttgccctgtgacagaggctgaaagcaggagcgatgattccgatccatcgccacccagtggagtggatgtaacatcacattttatctgcacctctcatcctccgctttgcgtggtcctactacataaacatagacacgcatgtccatgttctctgccgccatggccgccatagcagctgggcctgcttctgctgctgctgctgccaccacctaatgtgaaaggttgctagtgtgccttaaagcacaaggctttattagcttcttttttcccaggtggttacttcagagtcacagagcatttggtaataaagccgtaccgtgtatatgcatatgcatggtcatctcatgacatctatagtagtgtgtgggcggcaataatgctagctggttatagtagccaccatcaaggtggatctatctatgcggctgtttggttcagcttctgggcggcttctggccgccagaagctgaaaccaaacgcccaacttctggcgcggcttctgggcgaagcgattgggtacggatccctcctccctatgccgtccgcaccgtcttctcctcgcattgccgcgtttccttcacccttttcctctgtccgtatggttgccgcagtgacgccgacgcccttgctccgtcctcaaggttccgcgtcgtcccaaccatcgcgtctgcatcttcgtaagattgtcgtatcacttcgagttcaaggtgttcggttccaagatcatctgggattcgaggacttcggttgcaacctccagttaagcaaaggtaccgtgccactcaatttgttgatgaattatttgtcaccatacatgctgtgtatttgttccaataacgtggatccatggcttgttttagttcattctttgtcagtacacctgaacaatgagtcgacggttaggataagacaacacagacattgtttatggggggatgttatttttcaatagagaacagattaccaattattgttcctggttaactacaatccattgatatgttgtatccctcatattaagggttcagggataccctccatgattgccaacctcattatctttatgattgtatattgaacccaaatttggtagagtatctgaatggatgtaagttaattgtcgta

SEQ ID NO: 5798 - DNA, 2720 bp, Zea Mays
cccagtccctgcactcgtgttcctgtagccgccaccccagcccctggacgctcggctcgatcccccccccccccctcaccacccgttctcctctagtcatcctcctcgccagtcgccaggtgtcggccgccggttgtgctccccgtcaggcgtcagcgtgatcccatcggtcgtcgcagaaacacagtcgctgctcgccgtcaccactcgccaggcgccggttcttctccaatccacgactcatcggctctccagtcctccgtccgttaccgtgtaggtcatgccctccaataatttctacccgatgtcgctccacattattctgatatggagcatgattaacagctttgtgattaagcattgccatgcttcggccatcacgttcatcaaatcaacttgcaagttacagattgtgctactacatcattccatgatcctattccatgcctcttcatcactgcttaaagaatcaaacaagaaccactacgcatcatagactctacaagccaaaaaggccaccaagaatgatgcatgcgaccacaagaaaaccacattttcagcacttatctgcagtgtcccatcttttgctatcaatcttaaacatatgtacataacccctcaaccaagctagtcaactatacaggcaactgaagcactacaactttgtttattttggataaggccccgcttaaatatggcataaaacaacggatgtcatcattttgtaacttgatataatatcttctacctaaaaagtgaatgatggatgcaatattttgcatgataaacagttcgaaatagttttaggatttatacaagtgttttattaccgtaacaaagaattattaatattgcaccctacaaactcctttgtttaaatttatacaaacgtttagaaataagcgcgcaaggcgcgcgttagccactagtagcatctgactgcatttgtagcccttacttatcataatatgtggtttgcttcttttggcttgaacctttctgataaataatacagtcagatgttcattcattataaaccgtatcatactctccttttatttttgtaagtcgcggtttgactcagcactatcagtaacatcgcgacttgactgttaatttttcatatattataattgttatgggcaattgatggggccagctaggttagacctattggactgagcagatccattaggatagagttagttagagataggagtaggatagagtttagagataaggtagattcggttaggatatttgcttaggggtcaagttgtctctataaaaggagcacccttgtaccagttgaaattaagcagaaaatagatcaaagaagtgcagctcagcctccaagggatggcgagtcacagatccatctgctatcccatctaccaatcaataaactacatcaataatgttcatgactatgaattgaacatatggaagtgttttcaaattttcaaatatgaatccaataataccaaatatgtatgctgtattctacaaggttgtaattaattgttggtcaaaagttaacaaccgtcagctctctctgtcagcaaaccagtttgattggaacaggttatcctgggttattctactgatcccgttggtccaaatccttgctgagcttgcaatgggtaaaacagttgcacactttactcaagctgttctaagaattaaaaggaagagtctagattggtgtcgatagtgcactacagctcaattctgctctccatgccagtcctttgggagggcacaatggttttccagtgacttacagaacattaaaggaaatgtttgcttggccacatatgaagcagtcagtctatgacaaccttacagaaagcacctatagaagctccaaataccagtaggcagtagctgaagttttttcttccttctagcacatccaatggtatcctagctcctgaatctgttgacattgccaacctttctatgttcatgatttctaattgtttcttcgtgcttattgttacttagctacttcagtcatgtccggtggatgatcactcattcctctatttttgcattgctaggataggatatttttaatgaattgcagtaccctgtcttagaaggggttgcaatagacccaactcattggctttcaagaacagagagtgcaacacatccatgactatgtatgaacagcattggtgaaagagcatccccctgtctcaaaccacgctggtgggaaataagctctccgggcattccattcatcaacaccctagtagatgaagaacacaagagctttgagatgatgttacaccagatagggccaaaacctaggtgcccgagaacttcaagtagaaaaggccacgaaacagaattgaaggccttgccaatatcaagtttgaggaggattccggatagcttttgcttgtagatggctttggctatttgctgcaccagtaggaaattgtcatgaatacttctccctttcacaaaggcgttctgatttggcgacactaactcaggaagcctggcagcaagcctattagccaatattttggtaacaagttttgcaaaactatggatcaggctgatcggacaaaaatattttacttcaagagcctctatcttttttgccagaaggatcacataagctgaattgaggagatgtagtttggacatcaccatggaggatcacatttaaagcaaccaagaaatcagcatttataatcggccag

SEQ ID NO: 5799 - DNA, 2292 bp, Zea Mays
taaaagagctgaacctcctcttcaatctcctccaaaaaaaatcaaacaagaaccactacgcatcatagactctacaagccaaaaaggccaccaagaatgatgcatgcgaccacaagaaaaccacattttcagcacttatctgcagtgtcccatcttttgctatcaatcttaaacatatgtacataacccctcaaccaagctagtcaactatacaggcaactgaagcactacaactttgtttattttggataaggccccgcttaaatatggcataaaacaacggatgtcatcattttgtaacttgatataatatcttctacctaaaaagtgaatgatggatgcaatattttgcatgataaacagttcgaaatagttttaggatttatacaagtgttttattaccgtaacaaagaattattaatattgcaccctacaaactcctttgtttaaatttatacaaacgtttagaaataagcgcgcaaggcgcgcgttagccactagtagcatctgactgcatttgtagcccttacttatcataatatgtggtttgcttcttttggcttgaacctttctgataaataatacagtcagatgttcattcattataaaccgtatcatactctccttttatttttgtaagtcgcggtttgactcagcactatcagtaacatcgcgacttgactgttaatttttcatatattataattgttatgggcaattgatggggccagctaggttagacctattggactgagcagatccattaggatagagttagttagagataggagtaggatagagtttagagataaggtagattcggttaggatatttgcttaggggtcaagttgtctctataaaaggagcacccttgtaccagttgaaattaagcagaaaatagatcaaagaagtgcagctcagcctccaagggatggcgagtcacagatccatctgctatcccatctaccaatcaataaactacatcaataatgttcatgactatgaattgaacatatggaagtgttttcaaattttcaaatatgaatccaataataccaaatatgtatgctgtattctacaaggttgtaattaattgttggtcaaaagttaacaaccgtcagctctctctgtcagcaaaccagtttgattggaacaggttatcctgggttattctactgatcccgttggtccaaatccttgctgagcttgcaatgggtaaaacagttgcacactttactcaagctgttctaagaattaaaaggaagagtctagattggtgtcgatagtgcactacagctcaattctgctctccatgccagtcctttgggagggcacaatggttttccagtgacttacagaacattaaaggaaatgtttgcttggccacatatgaagcagtcagtctatgacaaccttacagaaagcacctatagaagctccaaataccagtaggcagtagctgaagttttttcttccttctagcacatccaatggtatcctagctcctgaatctgttgacattgccaacctttctatgttcatgatttctaattgtttcttcgtgcttattgttacttagctacttcagtcatgtccggtggatgatcactcattcctctatttttgcattgctaggataggatatttttaatgaattgcagtaccctgtcttagaaggggttgcaatagacccaactcattggctttcaagaacagagagtgcaacacatccatgactatgtatgaacagcattggtgaaagagcatccccctgtctcaaaccacgctggtgggaaataagctctccgggcattccattcatcaacaccctagtagatgaagaacacaagagctttgagatgatgttacaccagatagggccaaaacctaggtgcccgagaacttcaagtagaaaaggccacgaaacagaattgaaggccttgccaatatcaagtttgaggaggattccggatagcttttgcttgtagatggctttggctatttgctgcaccagtaggaaattgtcatgaatacttctccctttcacaaaggcgttctgatttggcgacactaactcaggaagcctggcagcaagcctattagccaatattttggtaacaagttttgcaaaactatggatcaggctgatcggacaaaaatattttacttcaagagcctctatcttttttgccagaaggatcacataagctgaattgaggagatgtagtttggacatcaccatggaggatcacatttaaagcaaccaagaaatcagcatttataatcggccag

SEQ ID NO: 5800 - DNA, 1764 bp, Zea Mays
atcgcggtggcctacactcgtcgccgcttcactaccgcgctctccccctcttcgtcgttgccgtcgccgcagtccccatccatccgtcgaggcatccatccatccacccattccattttcgctctcctcttccgtcacacctccctcctcctcgtccccccctcctgcggcgcacttatatatataccaccacgtcgatgcgccactcagctggcatcgccatcgacggcgtgccgccatagacggcctgacacccccccgctcccgcccccgccctattcatcccttcatcatcccaatttccacaaacctcgcgcgcggcggagggagaaggaaggatggcgtcggagccggtggcgcgggcggtggcggaggaggtggcgcgctggggcgcgatgcgccagaccggggtcagcctgcgctacatgatggagttcggggcgcgccccacggagcggaccctccttctcgccgcgcagttcctgcacaaggagctccccatccgcatcgcgcgacgggcgctcgacctcgactcgctccccttcggcctctccaccaagcccgccatcctcaagggcagcacgtcgctttgcatgaccctgatccagagcctggtgtgatagggcttataaacacaaaaatgtcacccatgacagttgctcgaattgctagtgaagatgcacgtgctatttgcatgcgggagtatggatcatctcctgatgtcgacatatatggtgatccgggttttacatttccatatgttacaccacatctacatctcatgattttcgagctggtgaagaactcccttcgcgcggtacaggaacggtatatggattctgataagcttgcacctccagttcgaatcatagttgctgatggagcagaggatgtaactattaagattagtgatgaaggtggtggaataccaaggagtgggctctcaagaatttttacgtatctctatagtacagcagaaaaccctcctgatctggacggacataatgaaggagtaactatggctggatatggttatgggatccctattagtcgcctttatgctcgatatttcggtggggacttgcagatcatctctatggaaggatatggaactgatgcttacctccacctttcacggctgggagattcggaggaacccttgccgtaatttattcaaaagaaccattcctgtaattaggatattgcttctgtgctggtatgcaagtatagttctgaaggccagccacctgttcagctgttcgtgtccctacttgttgtctttattgttcattcatcatcttaatggattgtgatcgtaattcctaatcgttttatgactgatttgtactgtcattataattgtcgaacctccaaaaaaaaaagttgccgtcgagcatccgaggtatttattagtttgagtgagtaatgggattcaccataacactgtaagcctgttactccaatgcctctaaagcatgtttttttcagtctcagcttgttcgatataatatgaggaatgatctttcactgaaattattcgatgaatattaatgttaaaatggatcgattcaatgcagaatgtgtaattctttgaaccaaatgcctgccaaaagtgtgtcattggttggagggagggtgagaagtgagattgtttttcccagtgcagctgatttcatcctctcgtcgacgtgtcagcttcagaatgcaacatttctggtgtccagttatcgtgcacatagcgtggatttggtcaagtttattcgg

SEQ ID NO: 5801 - DNA, 1839 bp, Zea Mays
atggcccctttcacaatcctagatgctaaagatggggtcgtttctgatttcctgagcctcaccatgatgtttccgaattttagtgcagacttgaatgggacaactggcgatatggttgattttcaatctacaggggatgcagggaatggcgcaaccatcaccgagatgggtaacccggttcctgagccatcctacgaggaatctgttctttcagcagaagaggctagattatggagtgttgctactatgaattgcttagatttcgatgcctggaccacagttgttgaggagacggacaaaaatgttgaggttatgactaaccataataattgttatgcatactacaagattacttgtgttctgactgccaccatgtagcaacattgaggtgaaagattggtatgtggagtcattccgtgaaatccggtcctttccagaggtgaggaaccagaaagatgagctcgccttcacccagatgatcaaaatgatcagggtacgacacaccaatgtggtgcctgcgattgcattgggtgtgcagcagctgaagaaggacttgggcggtccaaaggcgttcccccccggaatccatgagatccatcagtttcttgaccgcttctacatgtcaaggattgggatccggatgctgatagggcagcacgtcgctttgcatgaccctgatccagagcctggtgtgatagggcttataaacacaaaaatgtcacccatgacagttgctcgaattgctagtgaagatgcacgtgctatttgcatgcgggagtatggatcatctcctgatgtcgacatatatggtgatccgggttttacatttccatatgttacaccacatctacatctcatgattttcgagctggtgaagaactcccttcgcgcggtacaggaacggtatatggattctgataagcttgcacctccagttcgaatcatagttgctgatggagcagaggatgtaactattaagattagtgatgaaggtggtggaataccaaggagtgggctctcaagaatttttacgtatctctatagtacagcagaaaaccctcctgatctggacggacataatgaaggagtaactatggctggatatggttatgggatccctattagtcgcctttatgctcgatatttcggtggggacttgcagatcatctctatggaaggatatggaactgatgcttacctccacctttcacggctgggagattcggaggaacccttgccgtaatttattcaaaagaaccattcctgtaattaggatattgcttctgtgctggtatgcaagtatagttctgaaggccagccacctgttcagctgttcgtgtccctacttgttgtctttattgttcattcatcatcttaatggattgtgatcgtaattcctaatcgttttatgactgatttgtactgtcattataattgtcgaacctccaaaaaaaaaagttgccgtcgagcatccgaggtatttattagtttgagtgagtaatgggattcaccataacactgtaagcctgttactccaatgcctctaaagcatgtttttttcagtctcagcttgttcgatataatatgaggaatgatctttcactgaaattattcgatgaatattaatgttaaaatggatcgattcaatgcagaatgtgtaattctttgaaccaaatgcctgccaaaagtgtgtcattggttggagggagggtgagaagtgagattgtttttcccagtgcagctgatttcatcctctcgtcgacgtgtcagcttcagaatgcaacatttctggtgtccagttatcgtgcacatagcgtggatttggtcaagtttattcgg

SEQ ID NO: 5802 - DNA, 1848 bp, Zea Mays
ctctccttcccctgccttctgctactatatagctccccctcaccttccgttctagagagagagaagggagaggcgagggagctcaccaggagagaggggcctgtgtgagcattgagcaaagcaaacgaagcagtacatacatctctcgctcgcagaggcccggccggccggctccatgcaacaagggacgacgagcggtggcggtgggcgatgatgatgatgatggcgggggagcacgtgctggccgctctggccaccctgcttctggcctcgctcctgaccctggtgctgaaccacttcctgcccttgcttctgaaccccaaggcccccaggggaagcttcgggtggccgctcctcggcgagacgctcaggttcctcacgccgcacgcctccaacacgctgggcggcttcctcgaggatcactgctccaggtatgggcgggtgttcaagtcccacctgttctgcaccccgacggtggtgtcctgcgaccaggacctcaaccacttcatcctgcagaacgaggagcggctgttccagtgcagctacccgaggccgatccatggcatcctgggcaagtcctccatgctcgtcgtcctgggcgaggaccacaagcgcctcaggaacctcgccctcgccctcgtcacctccaccaagctcaagcccagctacctaggcgacatcgagaagatcgcgctgcacgtcgtcggcgcatggcgacggcacggcggcgtcagggtcgtcgcattctgcgaggaggcaagaaagttcgcattcagtgtgatagtgaagcaggtgctggggctgtcgccagaggagccggtcactgcaaggatactcgaggacttcctggccttcatgaagggcctcatctccttccccctctacatcccagggaccccatatgccaaggctgtccgggcgagagagaggatatccagcactgtgaagggcatcatcaaggagcggaggagcgctgggtcatggaacaagcagggcgacttccttgacgtgctgctgtcaagcaacgagctatctgacgaggagaaagtgagctttgtgctggactccctgctgggagggtatgagaccacctcgctcctcatctccatggtcgtttatttccttggccagtctgctcaagatctggacctggttaagagggagcacgacagcataagatccaacaaaggcaaggaggagtgcttgacttcagaagactacaagaagatggaatatacccaacaagtcatcaacgaggcgctgagatgcggcaacatcgtcaagttcgtccaccggaaggcgctgaaagacgtcaaatacaaagggcacaagccaagggacaagcaagaggtttacaccgttcggtggtggcccccggctctgcccaggatcagagctcgctaaagtggagactgctttcttcctccatcaccttgtcctcaattatagatggagaattgatggcgatgacattccaatggcatacccgtatgtggagtttcagagaggtctgccaatagaaatcgagccaacgtcccctgaatcttgactgtcctggagctacagccatcagttatcacaccagagagaaaaggggaaggtgcatggagtatacatgaatggtcagtgacagatctcacaagtgaaggaacactgagggcgcgtgctagtagctagcatatgaggcagctgagactgtaatttaatgtacatggtgtagatatattttgtccatggcaattgcttgaagtggctgattcacttcaccctgtaaaacattctccagtggtttcaactgctatcctataaaaaagaagggcccctgtgtttaatgaaaaaagtaaaaaa

SEQ ID NO: 5803 - DNA, 1994 bp, Zea Mays
gacgcgctgtggtggcggccccggcgcctggaggcgcacttcgcggcgcagggcgtgcgcgggccgccgtaccggttcctgctggggtccgtgaaggagatggtggggctcatggcggaggcctcgtccaagcccatgtcgccgccaacctcccacaacgcgctgccccgcgtgctcgccttctaccactactggcggaagatctacggaccgaacttcttgatctggttcgggccgacgccgcgcctgacggtggcggagccggagctggtgcgcgagatcttcctgacgcgcgcggaggcgttcgaccgctacgaggcgcacccggtggtgcgccagctcgagggcgacggcctcgtcagcctccacggcgacaagtgggcgctccaccgccgcgtcctcgccgacgccttctacccggacaacctcaaacggctggtgccccacgtcggccggtcggtggcggctctggcggagaagtggcgcgccatggcgtccgcctcctcgagcggcgaggtggaggtggacgtcgcggagtggttccaggcggtcacggaggaggccatcacgcgcgccaccttcggccgcagctacgacgacggccgcgtcgtgttcgccatgcagggccgcctgatggcctacgcctccgaggccttccgcaaggtcctggtccccggctaccggttcttgcccaccaagaagaactggcagtcgtggaagctggacagggagatacggcggagcctgacccgtctcatcgcccggcgcagcgacgaggccgaggccgaggaggaggagatgggcagccactccggcgggttccgcgaccttctcggcgccatgatcaatgccggcgagaggaagacgccgccggcgggggcgatcccggtggcggacatgctggaggaatgcaagacgttcttcttcgccgggaagcagacgacgacgaacctcctggcctgggccaccgtgctcctggccatgcacccggagtggcaggaacgcgcacgccgcgaggtcctcgacgtcttgggccccgacgagctcccctccaaggagcaccttccaaggctcaagacggtgggcatgatcataaacgagaccctgcggctgtacccgccggcggtggccaccatccggcgcgccaagacggacgtgcagctctccaacgggtgcctgatcccgcgcgacacggagctgctgatcccgatcatggcgatccaccacgacgccaggctctggggcgccgacgcggcgcagttcaaccccgcgcggttcgccggcggcgcggcgagggcggcgaagcacccgctggcgttcatcccgttcgggcttggcgcccgggcgtgcatcggccagaacctggcgcgcctggaggcccagctcaccgtggcggtcctgcttcagcggttcgagatcagggcgtccccgaactacgtccacgcgcccacggtcctgatgctcctctacccgcagtacggcgcgccggtgatcttccggccacgacgtcccgcgcgcccggcagccgcatcatagcccagattcttcgcctgtccggctgtcccacattctttttgtcgaaattgacgggaatgccgcgggtctgtcacctgcctcctggttctggtggacctgtccagaatgaccgaaacacccctcccgcgaccctttgtccctgtgtatattagcgagtgatactagaagccaaggagcactaactttttgtcctagcctgctgcctgcgctgcgccttggggcctacccaggttgcccggaaatgccctcgttaacaagaccagatcaggcccagccctttttaaagatttgatttgatgacacgcaaggagaggccggaggaccggacccacacctcacctgtgtttgttccctgccccgtggcgtctggtgcagtggtgtatgtgtttgtacataggcttgttgttccatgttctacgttattaatagagacaaaaaatgcaaaggaaaaaaagaga

SEQ ID NO: 5804 - DNA, 1177 bp, Zea Mays
cagagatgcagtgtttaagaaaggtttccaggccagttatacatggtcatataccaccccgcgtgccccgcgccgccagcccgcgcctccaccccgtgcgatctctgtttagatcaatcgagttgagtttgttcattccaagtcattattgcatagagatatcaagcctgataattttctcatgggtctcgggaaaagagaaaaccaggtttatgttatcgattttggacttgcaaagaagtacagagatacatcaacacaccagcacattccatacagaacaaagccggagggatgacatggaataaaaaacaaaagtattcgggaaggttggtttaatacactgtcagccttccatggtagggcctgaaagctgggaacaaaaaacaaaagtatgaaaagatcagcgaaaggaaaattgctacttcaactgaggctctctgccgtggatatcctaccaaatttgcttcttacttccattactgtcgctcacagcgtttcgaagatgcaccggactatcagtacctgaagaatttgttcagagacctttttattcgggaaggacatattgctaagaatctgccacattatgtttgcttgaggtattaatttatccaggtgtttaatgctggagtacagttagaagatccctaatcaattgcttctcatttcagtcgtgtaactttattcatgctacaacaacgactttgagcgaacatgagaccactgagctctagagtgaatgaaggacgtcgtctttggaagtcagacatcacctagagctagggtgtccattcttgacatgtttctcttagtgataggtggatactgtctagttaggaacagagtcttgagggattgatggacgcatgcatcttcaattcctgtgtgttgtattactactggtacaatctccaattcttgtgaacttatgtatttggacttgtgtgaatttgtgatatgaacatatatccatgtgtttgaaatctatattgtatgtgatattttgtgttgcatgtgatattatgtttgtctaaattttcatttctgtattttttattttttctagaaaagggttaagaacgtgggtacccacgttcttaacgttaagaacgtgggtaccgtcgaacttattgtgcattcctcgcagacccacgtaggacacataaggtcgacg

SEQ ID NO: 5805 - DNA, 2107 bp, Zea Mays
cgcgcgcgcccgccgctacctgccagtcgcgcgcctgccgccagcgccccgccgccaccccacgcgcgccccaccgcccccgcgcgccggctcgtgtactccgctgtccgctcccattccactatggcctagctgcgtgctgctctggcatcggtcggtggataagcccagcaggcaagcaggcaggagactaggagagctcagcactgcacgcacgctcccctccccttactggccaaatcgatcgtccccttcaggttccaggctccggagcttgctttacttcagggacaacaatgacctcagggacaacaatgacctccaagacgagcggcagcataaccaccaacctgagcaccacggggaagctctcctccgtgggcagcagcttcatggcgtctgccggcagccgcagcaccagcggcggggtttgacaagggggccaagtactccgacgaccagatcctcgaggcgcccaacctccgcaccttcacattcatagagctcaagacggccaccaagaacttccgtccagacagcgtcctcggcgaaggagggttcgggagagtctacaaagggtgggtggatgagaagaccatggcgccgaccaagaacgacaccggcatggttgttgcggtcaagaagctcaactcggagagcatgcatgggtttgaggaatggcagggttgcaattttcagagatcgtgagtcagagcgcaaggatcctgattatgacagaagctatgacaggtttatgttatcgattttggacttgcaaagaagtacagagatacatcaacacaccagcacattccatacagaacaaagccggagggatgacatggaataaaaaacaaaagtattcgggaaggttggtttaatacactgtcagccttccatggtagggcctgaaagctgggaacaaaaaacaaaagtatgaaaagatcagcgaaaggaaaattgctacttcaactgaggctctctgccgtggatatcctaccaaatttgcttcttacttccattactgtcgctcacagcgtttcgaagatgcaccggactatcagtacctgaagaatttgttcagagacctttttattcgggaaggttttcagtttgattatgtttttgactggaccattctaaagtaccaacaggcatagatgaccactgcaccacctcgtgcaattgtctgtacaaggaataaacttaccctcctaccttaagtagtagtagagattgtattgggtatagaaatgtacttcttttgttatgttatatttcattgccccctctctattttggttcctggccttggtttttgtttcttgtattttttttccatgtcgtctagctactgtagttgcccatcgtcaaagttttgtagagtggttagtgtttttggttgacagacattggtgctagatttgggatcagccttcctaaacagtaccatttactttagctcaatgatatgaataatgcttgtttgcaggacatattgctaagaatctgccacattatgtttgcttgaggtattaatttatccaggtgtttaatgctggagtacagttagaagatccctaatcaattgcttctcatttcagtcgtgtaactttattcatgctacaacaacgactttgagcgaacatgagaccactgagctctagagtgaatgaaggacgtcgtctttggaagtcagacatcacctagagctagggtgtccattcttgacatgtttctcttagtgataggtggatactgtctagttaggaacagagtcttgagggattgatggacgcatgcatcttcaattcctgtgtgttgtattactactggtacaatctccaattcttgtgaacttatgtatttggacttgtgtgaatttgtgatatgaacatatatccatgtgtttgaaatctatattgtatgtgatattttgtgttgcatgtgatattatgtttgtctaaattttcatttctgtattttttattttttctagaaaagggttaagaacgtgggtacccacgttcttaacgttaagaacgtgggtaccgtcgaacttattgtgcattcctcgcagacccacgtaggacacataaggtcgacg

SEQ ID NO: 5806 - DNA, 2261 bp, Zea Mays
cgcgcgcgcccgccgctacctgccagtcgcgcgcctgccgccagcgccccgccgccaccccacgcgcgccccaccgcccccgcgcgccggctcgtgtactccgctgtccgctcccattccactatggcctagctgcgtgctgctctggcatcggtcggtggataagcccagcaggcaagcaggcaggagactaggagagctcagcactgcacgcacgctcccctccccttactggccaaatcgatcgtccccttcaggttccaggctccggagcttgctttacttcagggacaacaatgacctcagggacaacaatgacctccaagacgagcggcagcataaccaccaacctgagcaccacggggaagctctcctccgtgggcagcagcttcatggcgtctgccggcagccgcagcaccagcggcggggtttgacaagggggccaagtactccgacgaccagatcctcgaggcgcccaacctccgcaccttcacattcatagagctcaagacggccaccaagaacttccgtccagacagcgtcctcggcgaaggagggttcgggagagtctacaaagggtgggtggatgagaagaccatggcgccgaccaagaacgacaccggcatggttgttgcggtcaagaagctcaactcggagagcatgcatgggtttgaggaatggcagagatcgtgagtcagagcgcaaggatcctgattatgacagaagctatgacagggtttccaggccagttatacatggtcatataccaccccgcgtgccccgcgccgccagcccgcgcctccaccccatcaatcgagttgagtttgttcattccaagtcattattgcatagagatatcaagcctgataattttctcatgggtctcgggaaaagagaaaaccaggtttatgttatcgattttggacttgcaaagaagtacagagatacatcaacacaccagcacattccatacagaacaaagccggagggatgacatggaataaaaaacaaaagtattcgggaaggttggtttaatacactgtcagccttccatggtagggcctgaaagctgggaacaaaaaacaaaagtatgaaaagatcagcgaaaggaaaattgctacttcaactgaggctctctgccgtggatatcctaccaaatttgcttcttacttccattactgtcgctcacagcgtttcgaagatgcaccggactatcagtacctgaagaatttgttcagagacctttttattcgggaaggttttcagtttgattatgtttttgactggaccattctaaagtaccaacaggcatagatgaccactgcaccacctcgtgcaattgtctgtacaaggaataaacttaccctcctaccttaagtagtagtagagattgtattgggtatagaaatgtacttcttttgttatgttatatttcattgccccctctctattttggttcctggccttggtttttgtttcttgtattttttttccatgtcgtctagctactgtagttgcccatcgtcaaagttttgtagagtggttagtgtttttggttgacagacattggtgctagatttgggatcagccttcctaaacagtaccatttactttagctcaatgatatgaataatgcttgtttgcaggacatattgctaagaatctgccacattatgtttgcttgaggtattaatttatccaggtgtttaatgctggagtacagttagaagatccctaatcaattgcttctcatttcagtcgtgtaactttattcatgctacaacaacgactttgagcgaacatgagaccactgagctctagagtgaatgaaggacgtcgtctttggaagtcagacatcacctagagctagggtgtccattcttgacatgtttctcttagtgataggtggatactgtctagttaggaacagagtcttgagggattgatggacgcatgcatcttcaattcctgtgtgttgtattactactggtacaatctccaattcttgtgaacttatgtatttggacttgtgtgaatttgtgatatgaacatatatccatgtgtttgaaatctatattgtatgtgatattttgtgttgcatgtgatattatgtttgtctaaattttcatttctgtattttttattttttctagaaaagggttaagaacgtgggtacccacgttcttaacgttaagaacgtgggtaccgtcgaacttattgtgcattcctcgcagacccacgtaggacacataaggtcgacg

SEQ ID NO: 5807 - DNA, 2497 bp, Zea Mays
cgcgcgcgcccgccgctacctgccagtcgcgcgcctgccgccagcgccccgccgccaccccacgcgcgccccaccgcccccgcgcgccggctcgtgtactccgctgtccgctcccattccactatggcctagctgcgtgctgctctggcatcggtcggtggataagcccagcaggcaagcaggcaggagactaggagagctcagcactgcacgcacgctcccctccccttactggccaaatcgatcgtccccttcaggttccaggctccggagcttgctttacttcagggacaacaatgacctcagggacaacaatgacctccaagacgagcggcagcataaccaccaacctgagcaccacggggaagctctcctccgtgggcagcagcttcatggcgtctgccggcagccgcagcaccagcggcggggtttgacaagggggccaagtactccgacgaccagatcctcgaggcgcccaacctccgcaccttcacattcatagagctcaagacggccaccaagaacttccgtccagacagcgtcctcggcgaaggagggttcgggagagtctacaaagggtgggtggatgagaagaccatggcgccgaccaagaacgacaccggcatggttgttgcggtcaagaagctcaactcggagagcatgcatgggtttgaggaatggcagggttgcaattttcagagatcgtgagtcagagcgcaaggatcctgattatgacagaagctatgacaggaaacactaaatcttgtgatgtactccctctgttcctaagtctccagcgtattagtcatctgcacagtgaccaaggagcgctgatatgcttttactcgcagtctttttaaccgtgcactttcgaataaatctgcaattttggatcgtatcagagatgcagtgtttaagaaagtgagtttgtttcctgaattttatatttccaccaaatgtcattgattagcattgttacaattagaattttctacgtatatggtaataataacccactgaggctttgtttggataatgtagtattgacaccaatccactgaggctttgtatagtcattcccttgtgctcaactctttgtgatacaactatgatcagttgataaaagtggcacataacttgagcaagttttatattttgagtacctccctattgtaacatatcttgttacacttctaattttgtggctagaacatgaggtaactggtaagagagttcctttttcatttcatgtggtagggtttccaggccagttatacatggtcatataccaccccgcgtgccccgcgccgccagcccgcgcctccaccccgtgcgatctctgtttaggttcaagtttccacgaagcacatttctgctcaaccatctgctttcatttaactgcattatatattaatgtcctgtatttttctagatcaatcgagttgagtttgttcattccaagtcattattgcatagagatatcaagcctgataattttctcatgggtctcgggaaaagagaaaaccaggtttatgttatcgattttggacttgcaaagaagtacagagatacatcaacacaccagcacattccatacagaacaaagccggagggatgacatggaataaaaaacaaaagtattcgggaaggttggtttaatacactgtcagccttccatggtagggcctgaaagctgggaacaaaaaacaaaagtatgaaaagatcagcgaaaggaaaattgctacttcaactgaggctctctgccgtggatatcctaccaaatttgcttcttacttccattactgtcgctcacagcgtttcgaagatgcaccggactatcagtacctgaagaatttgttcagagacctttttattcgggaaggacatattgctaagaatctgccacattatgtttgcttgaggtattaatttatccaggtgtttaatgctggagtacagttagaagatccctaatcaattgcttctcatttcagtcgtgtaactttattcatgctacaacaacgactttgagcgaacatgagaccactgagctctagagtgaatgaaggacgtcgtctttggaagtcagacatcacctagagctagggtgtccattcttgacatgtttctcttagtgataggtggatactgtctagttaggaacagagtcttgagggattgatggacgcatgcatcttcaattcctgtgtgttgtattactactggtacaatctccaattcttgtgaacttatgtatttggacttgtgtgaatttgtgatatgaacatatatccatgtgtttgaaatctatattgtatgtgatattttgtgttgcatgtgatattatgtttgtctaaattttcatttctgtattttttattttttctagaaaagggttaagaacgtgggtacccacgttcttaacgttaagaacgtgggtaccgtcgaacttattgtgcattcctcgcagacccacgtaggacacataaggtcgacg

SEQ ID NO: 5808 - DNA, 3059 bp, Zea Mays
gcccaccgcagcgaacaatcccttccactcccctcccctaaacccctcgccgcccgcggggctcgccggccggcgcccctccaggcccccactccctccgcgtgggcgcgatgccaacggcggtgccgacgcccaaggcggtggtccaccagcggttcggcgccaaggcgcggtacacggtcgaggaggtgcgggaggacgtgggcggctgcccgggcctcgcgccgcagaccaggaacgtctaccgctgcgcgctcgacctcccgggcctctccgttgccacgcccggtaccttcctcaggaagaaggacgctgagcaggccgccgcgcagatcgcgctcgacaagcttggtattcatcctacagcaaatagtcccaccacaccccaagaagcttgggctgaactgattgctcgcatatctggttttttcatagatgaggtcaatacattgtgtaaattgatcgaccatagggcagaatttgatcctctattggtcttgtcattattgtacaatgctgcaaaacaatctcctggagtctctgttagtgacagcaacttctggattcagagtgaaaagccttattctccggaggctgttgactcggcacttgagcgttggtctggtacaacagatcccgtagaagtagaggcagttcttgttccccacatgttggaggatgaactgaagacagtaagaattaatctacgagataatgaacattatatgagttatgttgcagcagagctctcagcaattgattcctctcatgttcttgtatcaagaacaattggaaaaacatcatccgagataagactgtattttgcagccgcaaatatacatgctgtttctgatatgtcaaaacacgcgcttgattctcttggagatggtgacatcaactggcaagtaaataagcgagcttcctacatttgtggccaaacaatttatggagatgcactcttggcaaatattggatacacaaggagagattcggaacttcacactgaagatgtcaatctatgttcctattacaggatacttctgggcaagttacctgatggaaattgtaagatgtctagggattcgattcttgcagcggagcttccatctgcatactctcgttttagttggaaaggcctctctccacgagatcttctttgctcattttgtcgccttcagaggttgccagagccccattttgctgtcagtagggtctcttgtgatacattaatgtcagctgtgagctctgaagaaagaggagcaccagcaggcagcgcagaaaatcagtacaccaatgatgtcaggatcaacaaggaaaaaccagatctttttaaatgtgaagtgaacatacgttcacggaagcaagaagttttactagagtattctgcagctgacacttggagcaaggaatctgatgctattcagaattcttcattaaaggtcttgatttggttcaataattattttaagaaactaacctcaaaaacaggcaagctatatctttctgagtctactgctggtgtcaaggtacattcaaatatttttcttcaagagtttgcaatgtgtctatctgtttatggcaagaatggatgcagtgattcagcaatgtgcagtgcagttggaccattttctatggatacacaaaagaagcaccttgaaagcactgcaaagttaacacacattgaaggtccagactctggtgttttcccgtcccacggatcattgacttgtataagttatactgcttcccttgtgacgaaggataaagcaaaaacatatttgttggagagccacaacgagtttgagtttgagattgggacgggtgctgttagtaatcagcttgaatcatgtgtaactcagctgtcagtgaatcaaactgcacgttttgtagctgaactgcctcctagggatttaatcatggctgcatcttgtgagttctcacatgacctctccaatgtatctagcgagagctgcttcctggagttctctgtaaaggttctgcaggtaactgaaccattagaagatagaatggagaaagccctgttcagtcctccattatctaaacaaagagttgaatttgctgtacggcacatcaacgagctgcatgctaccacacttgttgattttggctgtggatctggtagccttcttgattcgttgttagagcatccaaccacgctggaaaagcttgttggcgttgatatttctcgaaaaggcctcacacgtgcagcaaagagccttcatcagaagctgagcaaaaaatcaacgacgcagacaaatgttccaactgctgtgctgtatgacggatcaataacggactacgattctcgcttatatgggtttgatattggcacttgtcttgaggtgatcgagcacgtcgaggaggaccaggcgactttatttggcaacgtcgtcttgagctcattccgcccgaccgtgctcattgtttccacacccaactacgaatacaaccctatcctccaggggtctgctatgcccaacaaggacgacgaggcagacgaaagcgctggtccctgcaagttccgcaatcacgaccacaagttcgagtggaccaggctacagttccagtgctgggctactggcctcgcggtgaagcatagctacagcgtggaattctccggcgtcggtggctcaggcgaggagccaggctacgcttcccagatcgctgttttcagaagactggtgcagggccaggaagcgatgtgcctggacgaggatggcgatcagccttacgaggttctctgggagtggcctaacgcgtgtgtgaactaggtagattgcacgtctaatctctctagggcttggaactttgaatcgtgcccccggtttggaactgagtaatatatgtgtcaggaaagtgggcatccgacttgtggcaagaacacaaaaaattaacattgctgcatgcaagtgcagaaattcagtctgcttctaggttctggatgtacggtagttactacactgtatatgatacactgtatatacgaataggtctggacgaaatgctcgtgcctcgttggctcgctcggtttatttgaa

SEQ ID NO: 5809 - DNA, 3465 bp, Zea Mays
ccttccgctacgatacaaaagctcgagaacccacgcacgcgcgcaccccccacccaccccacgtctcgcttctccccaccccgcccgctacagcgccggtggggggcccccgcggctgccggcgaccggtcgccgccgccgaggccgtcctcgccgccccgacattctccagctggtgcgttctcgttcctggcttccggccttggctggcctcctccccgcggaactgaggcgaattggcgcgggagggcacgggatcttgccgtcctgtcctggcgtctcctgccgcaccgcgtttgggcaacttttttttgtcggcgaaaaaagaatacatgaaaacgccgccttttgctcggggcgcttcacgggcctccgcagcattagccatggtttagcggaggcgattctccttgcaggcttgcagctgtttccggggtggtggattttcaaggaataaagaatgatcaacctcttcgaattgagcgttggagccagcgccaaggtctcctcaagagatggctctccggtgagaggaactcagtcggagcggaaggagtacgccggatcaaaggcgttgactggcagcacgaggaggagctcgtcggatagatcgggcggtacgcccatgaaaatgctgatagctcaggaaatggccaaggagggggacgcgaatcagaagaccactaacgttgtggcgaggctgatggggcttgacgataatgtggatcttgctaagcctgtcgtgcccccaaacaggaggagtttcccggacggccatttatctgctacactggcaagagtaaacaaccaaattccatttgagaagcacacgagttccgccgaagatgtggagtacaaggatgtctacgaagttgggtaccagccaccaagaggtgatgaatatccaaggaggaggaggccgagtgaagatcatgacaagagaaggatggatcttgtccgccagaagtttgttgaagcaaagcggcttgcgtcacatgataatatcctccagtcgaaggaattccacgatgctcttgaggttctgaattcaaacaaagatctgtttctcaaatttctcgaagaacctaactctctctttgcgaagcagtctgggggactcggttctgcaccaacatcacctcagagaaagcacattactgtgttgaagccctcgaaatcagtggagatgaagggtgacaaagcaattagaaggcagacaaaccatgcagccggaaacagaacagacaggagcaacgtgcacaagtctgatgcagctcatgtgaaggaagataagcttcccaaacacaccaggatagtggtcttgaaacctacctcggtaattgcttccatggagcaatctgagcaaagttatcatgctgatctcgatgattctgaagcgcctgttctgtcaaggcatctgagtgatgagatagattggtcggtacatggaatttctcgacgccacactgaatctttgcagggttgcatacagtcaaatatgttcggcgcagatagaccataccatcagtatgctgaagaagagggcaatagcttgagtgactcagatattggaaccccaacatcacatcactcttgggagtacatctaccggtttagcaatccttactttggctctttgagccatgcttcttgctcccctgagtcacatgtaactagggaggctaagaagcatgcttctgacagatgggcaaccgttccatccagtgagatgacccaggacaaggtaccagtgcgaagaagtttgagcacacttggtgaaatgcttgccatgccggatatgaagaaagaagaggctgctgaacaagcatctcctgatgctacccaccagttgtgtgagccaacagttggcgtatcatctaattgtgctgttggcgaaggtgagggagaaagctccctcaggaaaatctcgaggtcacgatctgttccggtctcttcaacagcttttgatagcctgcggttagatggtggatgtttggatgctcagcataaagaacctacagtgccgaaggaggtcaaacctaagagtgggaaatcatctttgaagggaaaaatcacgagtttcttctcaaaacgtaagaaagcagaaaaggagaagcctagcccatctcccttgggaaccctgaacggtcgaggttcgtcagtcagcactgtagcagttgctaaaccagatgctccacagcatgtttgtgctagttcacaggatgatgtttccttcgaaagtttagaagaccagtttaatcacggaccaatcggagctccggttgatgaacccgaagcaccctctgtgtctaagcctccagcttcgcttgagaagacgctatcatttgagattcgagcttcccacttcgaccagcccagccctacatcggtttttgatgtacaatttgaggatatcagcgagaaatcccccatttcatcagaaagcgcgattactgctaaacaagagcctctatccaggtctataccaatcggatcgatcgcgaggaccttatcatgggacgacgcttcccaagaggctcctccgcagtgttctaccaaaggagacagcaaccacgagcaggagcagcacgagttcgtcgagaagacgctggcatccgctggcttctgcaacgagaagacccaggacatctttgcccggtggcattcgctcgaccggcccttggaccccgccgtggtcgagcagctgctggaacgcaaggtggaggacgccaagtgccgagagaggcggtcgaaccagaggctcctaatcgactctgtcaacgccgccctgctcgacatcggccagagcaaagtctgggggggcgcgtacccttgcaccgcacggcactattccaacgctccgggagttggcacgtgcgatgatgatgtgctagtgaccgacgaggcgtggaggctggtgaggagctggctcttcgatgacgagaacgacatcgccgggttgggggacaacgcgggccttgcggcggactgggttgtcggtagggagatccacggcaaagggtgggccgagacgctgcggatggaggtggacgagatgagcagggagatatgtggcgaggtcctgggcgagttggttggggaggcgttttcggagcttgccggcgctgcggggtggcattgaagctgcctgccttctattttccctgcttgtggtggcgtccacctgctgctgctgcttttacttccaatccggttcttgtgtgtatattaccctcgtaactgctcaaagtgttccctgctgctgcctctctatctgtgttgcatctctttcagcattgatacattcacggtaataacatttacggatgaatacagctgctgcactgcacttgaaatcctctctctttttcctggccacatgttcctttctctgctatggctatgaggttgcacaacgtaattactacctgtgtgctgtgcagcctgttagtggtataatcgcag

SEQ ID NO: 5810 - DNA, 1203 bp, Zea Mays
gaaggctggacgcaggggggcatttccgggaacctcgccgcgggcggggctggaaagccgcggagcttttgatttaaccggccggttggtcagccagccagccagccagccactcagtactgcacactgccatcgctctcctacggtactgctgcctaccgcgcgtctcgtcccttcgctgccgctctatctatctcggccggagccatgggcggcggtggcgcggcgctgctgctgctggtgatgtgggcgggcgtggcgtcggcggccgtgtacgaggtgggcggcacgattgggtggaccgtcatgggcaaccccgactacgccgcctgggccagctccaagcagatcgtcatcggcgacactgttggtatccggattcgtactgcgacattgaatacgtcgtctctaggcagaaattagataaaaaaattccaacatcgacgctgattaaggaggagagacacctgtcatctttcgtgagaagatggcttcggcagtgttcacgtataacaagcagttccacaacgtgctggcggtgagcaaggcggactacaagaactgcatcgccaccaagccgacggccacctggtccacggggaacgattccgtcgtcctcaacaccacgggccaccactacttcctctgcggctacccgggccactgcgctgccggccagaaggtggacatccgcgtcgcctcctctgctgccccttccgccgcaccgtcgccgaccccctccggctccaagccctccggcggcgccacggccgcgccgtcgccgcaccctaacgccgcgccgaaggccctctccgccagctccgtagccgcggctgtcgccacgtccctgctctccctggccgcggccgtgctggcatgatcacttgatcaggatcgtgtagtgctggccaggggacggcgcctttgtgaattgtgagagctcgtactgtgtctgtgtgactgtctctgtggccgtatgagcatttagccctggatctgtgtttgttactctgtcttgctgactttgcttcgggaacatcgattatctcatctgccttctccatgcggtggtgactggcgactgcaagcagcgccatcggtaaagccttgcaggcgcactacgtgaagcctcgctgctgcatagtgatgaaaacagaaacggtaattttcggatgccggaaattgattttcgaagttttactg

SEQ ID NO: 5811 - DNA, 2971 bp, Zea Mays
gatttaacccgagaaaaaacttgagaaatgctgatgagcgagatattcattgtgttgcagccctatggtacagttaatctgctttctgctttgacgtcagaagctgtcaagtcggttctgaataaccagagtgaagaggaaacctggggcatagattcccttgatattttgttagaaacatggaatgttcttttgggggacgtagatgccgataaaaatccaatctcaaccgatggagcacttgcatcttcaagtttgtttaagatgattgtggagtcacacttgaaggctgctgctgattctgcgttcgaggatactgatgatactgaatattttcatgtttctgtttcaaaacgtgatgaacagttagccttgtatgctctaatagcacgggcttctgcaaatactactattccatttcttgcacagttgttttcagaacgatttgcccggctaaatcagagaaatggtgaaagtgatcctactcaaacactggaagagctctattggctgttgttggttactagtcatgtcctaactgactctggcgaaggagaaacactacttatccctgaagcattacaggctggattccctaatgtgattgaagcagcacatcatcctgttgttacactctcctggtctataataaatttttccaggcagtgtttagatccaggaattagggcaaaatacttcagtccacgactaatggaggctgtgatctggttcttggccagatgggttgcaacctatttagtgccacttgacgtgagtagaggaaaagtaagcagagaaattgataatgtgggtacaaatggatcccaacattccagaaaactgctaaacagttttgcttgggaaaataaccaaggagagcttgttcttgattttgttgttctcatttcaatgttagctcttactacctatcagggagaaaatgagttgcagacactgacatgccagaagctacttgctacagtcgttcgccggaaacacacatgcacttatcttgttcaactggattcatggcgtgatcttacaagagcttttgcaagtggacggtctttgctttcattgagtggacgtttacaaaggtctctagcagaaacacttgcctctgcagcttcctgcatcaaagatcctgaagcatctgcacagtacctgagggatctcatgggaccagtggcagggtgcctggtagaaaatgctagcaggagtgatctaaaatctgtggcacagcaagcagatgttatttacatggtctgttgcctattggaacgactaagaggcgctgctagagctactcaaccccgaactcaaaaagttctatttgagatggctcatactgtgatgaacccacttttgactcttctggaggtctacaaaaatcattcgtatacatgatactcaagtttgtggtggactttgttgatggtcaagctgtattcctggatgctaaagagacatcagctttggtgagcttttgcttgcaactactccagatatactcctctcataacattgggaaggtaatgctctctctttcttcaagtctgcgtaatgagtcacaagcagaaaaatataaggatctgcgagctttgcttcgtcttctgacaaatatatgttcgaaggatttggttggctttctgtctgattgtggcggtgaaggttcacctgatatcgcagaggttatctacattggtcttgatattgtgacccccttgatatctttggatcttctgaaataccctaaacttagtcgtgattattttgtgcttatatcgcacttgttggaactgtacccggaaaaggttgctcacttaaatagtgatgcttttacaaggattattggaagtcttgacttcgggctccgtaatcaggatagcgatgttgttgagaggtgcctggcagcagtaaatgctcttgcttcatacaatttcaaagaaagattaggagggagaggaagactgaactcgcagctcatggaatctgaaggatctaatggcaaactgcaggaaagcatatcaagtcacttcttgagacttctgttgcaaatacttctttttgaagatttcagatcggagttagcaggttatgctgccgatgctttgcttcctttattgttctgtgaacaggagctatatcagaggttggtccatgagttgttggataaacagcagaatccgaccgtaaaatcaaggctggcaactgcgttccataaccttacaagttcaaacaatctctcaagctcactcgaccggccaaacaggcagagattcaggaaaaacctccttagcttcatggcggatgtatcgggcttcatgcagatcaagtagatgcgatggcagggaacaggtgatgtttgaccggtcaattaaaccccgaggaagcactgcaccactgtggtaggggtgcatgtgggcaccacatgtctgtggattgatgagagcgaagactgccacgacaagtctagtagatcttgaagagctagtgtcaccagaaaagacagggagatgagctagtcttagggttggcattcatagcgcatttgctggacaagatggaggcgtccctggccacgagatcgtcgtgtaaatgcgtttgttagacgcacagaaacggtggggattttgtggtggcgactcgttttgttcaattcccacaggcagaaggtagagatgttaagttgatgtaaataccgtttgatttaaacatgccttattcgtaggagaaagcgacacggcttgctgtaacttagggtttattactctttctcgtggcataggatccccaaagaagtctttgctggggtatttgcagccaaacgatgaccagtatgattgcgagaggttttcaatcttttgtaccaaatttggcctgcagttatgatgacactgagtgccgatacaggcatgaggcattccaaaattggcgggcaccacatgtgtctgtctgctgtctcagtggg

SEQ ID NO: 5812 - DNA, 4336 bp, Zea Mays
cttttacatttataaattactgcagcagccagccagccagcaaatcacgccggccccacaagacccaagctgcaaaactatccagccaccattcacccctccgcactccgcctccgccgcctccctgccctcaactccacgcccggcagggtggccgctcgccggcagccaaaccctaggcgatcgcggaggccaaccacgcttcgggcgcgatcagccgccgccatgcagggcttccccggcggcgcccccgatccgcagcagctacaggccaccatgctcgccatcgagcaggcctgctccctcatccagctgcacatgaatccatctgaagcggaaaaagtgataacttcgctgcattcgtctctcatgccttatcaaagacatcccaaaaaccaaatgcaagattccaagctgctggtgcaattggtgatgctgcggtaagggagtggggagttcttacagatgacaataaaaggagcctaataatatattgtttaaactatgttatggagcatgcaagttctcctgatggctatgtgcaatcgaaagtttccgctgtggcagctagattactgaaaagaggctgggttgagttttcggaccaagaaaaagcagctatcttctttgaggttgagcaatctatccggggcatccatgggcctaatcgacagtttgctgcaatcaatttcttggaaaccttggtttcagaattctccccttcaactgcttctgctatgagcctgcctaaggaatttcacgaacaatgtgaatactcactcgaagtgcagtttttgaaggatttttactgctgggcacaagctgctgtgttcaatactgctgacaaaatcttgaattcaactgtaacaataccggacgaaagagcatgttcagcagcattgcgcctgatgtttcagatactaagttggaatttcaaacatactgtggagcacgagagttcagatgctaagataaatttcggcttaaggattgatacgataaatctgaagaagtttgaacgttcgttggtgaagccagggtctatgtggagagagattctaatatcaagtggacaccctacctgggttttaaacttctataccaccttgcgccaaaagtactcatatgatacactgtggggtgattctccaattgctgtctcttgcagacagcttatagtgcagttatgctccttggcaggctctgtgtttcctaatgataatggggatgcacagattaaacaccttatgctgatattatctgctgttgttctatggattgaacctcctgatgtaatcacagcatcaatccgaaatgggggaagtgaaagtgagttcatagatggttgccatgccttgctttcaatcgcatctttaactactggctcactttttgacaacctcctaaaatctataaggccctatggtacagttaatctgctttctgctttgacgtcagaagctgtcaagtcggttctgaataaccagagtgaagaggaaacctggggcatagattcccttgatattttgttagaaacatggaatgttcttttgggggacgtagatgccgataaaaatccaatctcaaccgatggagcacttgcatcttcaagtttgtttaagatgattgtggagtcacacttgaaggctgctgctgattctgcgttcgaggatactgatgatactgaatattttcatgtttctgtttcaaaacgtgatgaacagttagccttgtatgctctaatagcacgggcttctgcaaatactactattccatttcttgcacagttgttttcagaacgatttgcccggctaaatcagagaaatggtgaaagtgatcctactcaaacactggaagagctctattggctgttgttggttactagtcatgtcctaactgactctggcgaaggagaaacactacttatccctgaagcattacaggctggattccctaatgtgattgaagcagcacatcatcctgttgttacactctcctggtctataataaatttttccaggcagtgtttagatccaggaattagggcaaaatacttcagtccacgactaatggaggctgtgatctggttcttggccagatgggttgcaacctatttagtgccacttgacgtgagtagaggaaaagtaagcagagaaattgataatgtgggtacaaatggatcccaacattccagaaaactgctaaacagttttgcttgggaaaataaccaaggagagcttgttcttgattttgttgttctcatttcaatgttagctcttactacctatcagggagaaaatgagttgcagacactgacatgccagaagctacttgctacagtcgttcgccggaaacacacatgcacttatcttgttcaactggattcatggcgtgatcttacaagagcttttgcaagtggacggtctttgctttcattgagtggacgtttacaaaggtctctagcagaaacacttgcctctgcagcttcctgcatcaaagatcctgaagcatctgcacagtacctgagggatctcatgggaccagtggcagggtgcctggtagaaaatgctagcaggagtgatctaaaatctgtggcacagcaagcagatgttatttacatggtctgttgcctattggaacgactaagaggcgctgctagagctactcaaccccgaactcaaaaagttctatttgagatggctcatactgtgatgaacccacttttgactcttctggaggtctacaaaaatcattccacagtcgtatacatgatactcaagtttgtggtggactttgttgatggtcaagctgtattcctggatgctaaagagacatcagctttggtgagcttttgcttgcaactactccagatatactcctctcataacattgggaaggtaatgctctctctttcttcaagtctgcgtaatgagtcacaagcagaaaaatataaggatctgcgagctttgcttcgtcttctgacaaatatatgttcgaaggatttggttggctttctgtctgattgtggcggtgaaggttcacctgatatcgcagaggttatctacattggtcttgatattgtgacccccttgatatctttggatcttctgaaataccctaaacttagtcgtgattattttgtgcttatatcgcacttgttggaactgtacccggaaaaggttgctcacttaaatagtgatgcttttacaaggattattggaagtcttgacttcgggctccgtaatcaggatagcgatgttgttgagaggtgcctggcagcagtaaatgctcttgcttcatacaatttcaaagaaagattaggagggagaggaagactgaactcgcagctcatggaatctgaaggatctaatggcaaactgcaggaaagcatatcaagtcacttcttgagacttctgttgcaaatacttctttttgaagatttcagatcggagttagcaggttatgctgccgatgctttgcttcctttattgttctgtgaacaggagctatatcagaggttggtccatgagttgttggataaacagcagaatccgaccgtaaaatcaaggctggcaactgcgttccataaccttacaagttcaaacaatctctcaagctcactcgaccggccaaacaggcagagattcaggaaaaacctccttagcttcatggcggatgtatcgggcttcatgcagatcaagtagatgcgatggcagggaacaggtgatgtttgaccggtcaattaaaccccgaggaagcactgcaccactgtggtaggggtgcatgtgggcaccacatgtctgtggattgatgagagcgaagactgccacgacaagtctagtagatcttgaagagctagtgtcaccagaaaagacagggagatgagctagtcttagggttggcattcatagcgcatttgctggacaagatggaggcgtccctggccacgagatcgtcgtgtaaatgcgtttgttagacgcacagaaacggtggggattttgtggtggcgactcgttttgttcaattcccacaggcagaaggtagagatgttaagttgatgtaaataccgtttgatttaaacatgccttattcgtaggagaaagcgacacggcttgctgtaacttagggtttattactctttctcgtggcataggatccccaaagaagtctttgctggggtatttgcagccaaacgatgaccagtatgattgcgagaggttttcaatcttttgtaccaaatttggcctgcagttatgatgacactgagtgccgatacaggcatgaggcattccaaaattggcgggcaccacatgtgtctgtctgctgtctcagtggg

SEQ ID NO: 5813 - DNA, 1016 bp, Zea Mays
ggaactgctccgaaatccgaattcaagagtccccgagtcgacaggccacaaatcccaattccaaaaccttttctccgtcccatcgccggcgatcttctccttcgccgccaatggatctctccgctgtccaggctgccgccgcgtcccagggattcaccaccgacgaatggccctactctgtccacctgcttgcccacctctacatcaatgacctcgcgcggttcttctggaagtcgttgccgcaggaggtcaaggacacgcggccggagctcgccgctgtctggaggattggtcagtgcctctggaaaagagattatgctggcgtcaacacggctgcacaggggttcgagtggggtcctgacctcgctgacttcatcactgccttcctagagagctacagacagaggatattcaagctgttgacttctgcatattccacaattagagttgctgatgtggctcatttcatggggatgagtgaggaggatgcgacaaactatgctgtgcaaaacggttggagtttggatgcagcggccaagatgcttactgtcaaaaagccaaagtctcagaccaaccagaagcttgatgctagcaaactgcagcgtttgactgagtgtgttttccaccttgagaactgatgttcactgtcaatcgtgttgtgtccctgtttcttctctgctccacattgtaagaagcatgtttaccatgtgacagctatatgcctgagcgacttggcccctttcggccgaaaaggggtgatctctgaatttgcatcttatgtgatttctgacagcgtgctatgggttaatgtgcctattggtgacccctcctgccagtggctcattgaaatgagtcacactttgtcattagggcaagtataataacagcctataagccggctaaatgctgggttgtatgagagagaagagagaaaaaacgggctgtaaacttatagttaccttagacagaagaacaaaaaaaatgtgagacaagtgtatgtattaatagtgaagaga

SEQ ID NO: 5814 - DNA, 2423 bp, Zea Mays
aaaaacttaaaatttcaggctcgcctaatagagaggactccatccatgagtgacctgaatgaagtgatatttgggcaggaacatctgtctcgagatgatctgtcttttatcttctccctcaaggtatcagacaatgcgccactatatggtgtttgtctgcatgttcaggaaatagttcaaaaggcacctggtatactaggtgctgtctcacccttaaaccctacttcctataagcccagtcgtttcttggtttctgcaccacgttgttactgtctacttacaaaggtacctttttttgagctacactatgagatgctaaacagcattattgcacaggagaggcttgacagaataacacagtttgctagtgaaattactctagctgagccagttcctcgtcctattaaagaacaagatggagtagacggtgattttgattcctcaaatgggattccatatattgactggacagaatatgctgtacctgtcaacagtatatcaggtctcatttcttcatccagtattccatcagaaagggacatgtcttcatatttgttcaggagctgggagcctaattcttctcaaagtatatctggtagtgagatttcagattctagttatgtaagagaagttgaggaggcaaggcatagtttccagcattatgaagattgtatagtagagaacttggaaccacgttgtgatagctttgggagagcaagttacatgtatgataatgggcatacttccccagatcttctgtccatgcattctcctgcctctagcagattagagcgtgcacaaagtgtggagtctttagaaagttcagtcaaaggtgcaacatcagatgaagaatatgaagtaaatgtgaagcatgaagtgattgttgatgatgaaaaagttgtaggatgggctaaggcacacaataacgaacctctacagattgtgtgtggttaccatgctcttcatctgccacctcgtggtggtgaacttgtattccgcccccttgaacatctccaacctgtgaaatactcccggcctggattacccttgttgggttttggagaggagattttggacaatgctttgactagggcagaaaaaaataagatcaatttacatttggtggctgcagaagaagctcttgcattgtcgatatggactatggctacagtttgtcgttctctgtctttggaaagtgtgctaggcttattcactggagttttgctggagaagcaaattgtggtaatatgcccaaatctgggtgttctgtcagcaattcttttgtctattataccgatgataaggccgttccagtggcaaagtctgttgcttccgattcttccgaggaaattgattgattttcttgatgcccctgtacctttcattgctggtgtacaacataaaccccctgatatcaagatgaaaggatctagtcttgtcagggtcaatgtccagaaagatcaggtccaaggcatgttcactgcctcgacttccacattacaaggagctcgtttctaatctcggtccacttcatgccagactatcgtgtgagaattctttggctaagagacatcccatctataaatgcaatgaagttcaggctgatgtagcttggaagttcttaaatataatgagaacctacttggaatcactttgctctgacctgcgctttcataccattacaaatgtttctttgcttctgaaagacagtttcattgattcgttcccctcaaatgatagaccatttataaagctctttgtggagacgcagatgttttctgttctatcagattctcgactgtccagtttcgaaaatgaacggacataaaggcattgttccagtggagatcaaacacagtgatactctctgctttggttttggcgtctgcttcctggtgctacctttacatgtcatttccaatgcgcaggggattgggaagataaaaacaaggcacgtcgcgtggagtgcggaggatttcgattttgccgaagccacatcactaattagaagtgttctgaaaagtatctaggctcgtctgcaatgtaagaagaatacgacggactctcaggttataggaaatagatgcaacccgatcttctaaatgggaccgagctacatgtggcgcacaaggaaaacaaatgatgatgaatatagttgggtttctgcttgcgatcttgttttgctatgtaacactagtgtgtagtgacttagctatatttcatatagggaaaagaagaaccctgtatataggtgaagttattcattggagttacgcgtccccggtttgatcatgtaaatcatgacctggtgcgcaagaaaccggcatcagttttgaatagggaacgttttgcaatttagtgcatttaaggccatggagtggaacaacttcgacgtatgttcgattggacctgctatatcatca

SEQ ID NO: 5815 - DNA, 2729 bp, Zea Mays
aaaaacttaaaatttcaggctcgcctaatagagaggactccatccatgagtgacctgaatgaagtgatatttgggcaggaacatctgtctcgagatgatctgtcttttatcttctccctcaaggtatcagacaatgcgccactatatggtgtttgtctgcatgttcaggaaatagttcaaaaggcacctggtatactaggtgctgtctcacccttaaaccctacttcctataagcccagtcgtttcttggtttctgcaccacgttgttactgtctacttacaaaggtacctttttttgagctacactatgagatgctaaacagcattattgcacaggagaggcttgacagaataacacagtttgctagtgaaattactctagctgagccagttcctcgtcctattaaagaacaagatggagtagacggtgattttgattcctcaaatgggattccatatattgactggacagaatatgctgtacctgtcaacagtatatcaggtctcatttcttcatccagtattccatcagaaagggacatgtcttcatatttgttcaggagctgggagcctaattcttctcaaagtatatctggtagtgagatttcagattctagttatgtaagagaagttgaggaggcaaggcatagtttccagcattatgaagattgtatagtagagaacttggaaccacgttgtgatagctttgggagagcaagttacatgtatgataatgggcatacttccccagatcttctgtccatgcattctcctgcctctagcagattagagcgtgcacaaagtgtggagtctttagaaagttcagtcaaaggtgcaacatcagatgaagaatatgaagtaaatgtgaagcatgaagtgattgttgatgatgaaaaagttgtaggatgggctaaggcacacaataacgaacctctacagattgtgtgtggttaccatgctcttcatctgccacctcgtggtggtgaacttgtattccgcccccttgaacatctccaacctgtgaaatactcccggcctggattacccttgttgggttttggagaggagattttggacaatgctttgactagggcagaaaaaaataagatcaatttacatttggtggctgcagaagaagctcttgcattgtcgatatggactatggctacagtttgtcgttctctgtctttggaaagtgtgctaggcttattcactggagttttgctggagaagcaaattgtggtaatatgcccaaatctgggtgttctgtcagcaattcttttgtctattataccgatgataaggccgttccagtggcaaagtctgttgcttccgattcttccgaggaaattgattgattttcttgatgcccctgtacctttcattgctggtgtacaacataaaccccctgatatcaagatgaaaggatctagtcttgtcagggtcaatgtccagaaagatcaggtccaaggcatgttcactgcctcgacttccacattacaaggagctcgtttctaatctcggtccacttcatgccagactatcgtgtgagaattctttggctaagagacatcccatctataaatgcaatgaagttcaggctgatgtagcttggaagttcttaaatataatgagaacctacttggaatcactttgctctgacctgcgctttcataccattacaaatgtacagtcaaataatgacagggtttctttgcttctgaaagacagtttcattgattcgttcccctcaaatgatagaccatttataaaggtacgtatcttattgtttcacacagcagattccgtgtttattttctgtaagaaaaccacatatagttgatggaagtagcagatttcaggcctttctgtctgggcaacgcgtaaagtgtcaatagataagcagatcctcattgatagggtttttcttgatggaactcatatgatgctgtcacgctatgcgtgtttccagtagaatcagttttttttttttttttttgtcgctgctgtattttttccccattttgcctgcattctcattattcttaacatggtgcagctctttgtggagacgcagatgttttctgttctatcagattctcgactgtccagtttcgaaaatgaacggacataaaggcattgttccagtggagatcaaacacagtgatactctctgctttggttttggcgtctgcttcctggtgctacctttacatgtcatttccaatgcgcaggggattgggaagataaaaacaaggcacgtcgcgtggagtgcggaggatttcgattttgccgaagccacatcactaattagaagtgttctgaaaagtatctaggctcgtctgcaatgtaagaagaatacgacggactctcaggttataggaaatagatgcaacccgatcttctaaatgggaccgagctacatgtggcgcacaaggaaaacaaatgatgatgaatatagttgggtttctgcttgcgatcttgttttgctatgtaacactagtgtgtagtgacttagctatatttcatatagggaaaagaagaaccctgtatataggtgaagttattcattggagttacgcgtccccggtttgatcatgtaaatcatgacctggtgcgcaagaaaccggcatcagttttgaatagggaacgttttgcaatttagtgcatttaaggccatggagtggaacaacttcgacgtatgttcgattggacctgctatatcatca

SEQ ID NO: 5816 - DNA, 1233 bp, Zea Mays
aacctacaaacgtatattcttaaataccttccccggcgcgatggccgcggccgcggcagaaacacagatgggcgacggggctccgccgccaggggctctatactccttcggaacgccgtggccggagctcaatcaaggcctcacctacaccgacacgttccgttgcgctgatgcggacgccgctaccaccttgattgagttctactctactaaccacaagagctcggcgccattgccagggtggatcaagaggattcgtaatgggcagataaccgttgatggtgaagttgtcactgatccagatatgactctgggatgggtctaagttggtatatcatcgttttccttggcaggagccatttgcgccgtatttgctggaagtgctctacgaggatgatgacatggttgcccttaataagccttctggcttgcaagttctgcctaaaggactgtttcagcagcgaactgttttagcacagcttcaattgaaagactggaagatggcctcatcttgccggttcaagagaaaagatgtgcagtcacatccagtacctgttcatcgtttagggaggggaacatcaggcctcctgctttgtgccaagacaaaagttgccaaagttcgacttgcatcttattttgctgaaggtgctataaatgctgcaaagaaaagagttcagtgaagagcgaaaaatttcaaaattttatcgagccttagtgactggcatacttgatgatgatgaggttgttgttacgcaacctatagggttagttcattatcctggagttgcagagggactttatgcagcatgttcctcaggaaagccagcaatgagcaaagtatgtgttcttgagagacttgcacaccaaaatcacacactggtccaggttgaaattcattcaggacgacctcaccaaataaggatacaccttgcatacattgggcacccacttgtagatgaccctctctatggtattggtgggcaccccaattttgttgagccagaatctactggcacagatagttcttttgcatctgatgggggttatgagagacctttgcaacctgttcctggagactgtgggtatcacctgcatgcacattggctggttctttgccacccaacaaccaataaggacgaaagacttctgacgcccctgagcttgagtttccgttggagcggatttcaggcttgattttttttttaaaaaaaattcccatattcgagtttcccc

SEQ ID NO: 5817 - DNA, 3477 bp, Zea Mays
tgctgtaagaaaggagaagttcttatcatttttttagaagatattttttcaagtattcacattatggatgcaagtcgaactttggcaatgatttatagggataaatcagagttcagtgaagagcgaaaaatttcaaaattttatcgagccttagtgactggcatacttgatgatgatgaggttgttgttacgcaacctatagggttagttcattatcctggagttgcagagggactttatgcagcatgttcctcaggaaagccagcaatgagcaaagtatgtgttcttgagagacttgcacaccaaaatcacacactggtccaggttgaaattcattcaggacgacctcaccaaataaggatacaccttgcatacattgggcacccacttgtagatgaccctctctatggtattggtgggcaccccaattttgttgagccagaatctactggcacagatagttcttttgcatctgatgggggttatgagagacctttgcaacctgttcctggagactgtgggtatcacctgcatgcacattggctggttctttgccacccaacaaccaataaggtgattaaacatatatataatcttgggcagatggtaaaaattaccgctcctcttccacaaattctacagacacgggaggaacgccgcgctgcagctgagcaaaccggtggttgaacatgtagaatcttgaaaatgtatatttcttgaagttagcaagcagcaggttctcacagacgttagagttagacactcagacctctgctcctctgtcaactgtacaacggcgagctatggttccgcttgatgcagcgccgtctcatgtgacgtttaggccaggctaccgagatggagaaataacattaggtatttaaaaataaatagagtactagctaatgagctcacacaaatcttgttcagtctattcgaagcgcaattcgctgaaaaaatgtttcttcgctcacacaaatatgatttggtttgaaatggagggaggtgataattgtagaagaagatttccaatgaattcatttgcgtgcaatggacttggcgttacgcataactcccaaacattcctccccccaaaacctcccgaacaaagaggattcgaggggaattaaaggagggcgcggcggtggcgagcaccttccgctcagcgaggtagctgcacctgcaccggcgagctagccgcggcctctatgctcgcggggatctgaactagccgccgctgccccatcgcggcgatgactgcggcgccctctcctcatatcccattcccaacacaacactcattttctccattcccacgtaaaagatagaaaggcgagcatcgcagtgcacacgcgcaatggaaggctcgccggtggcgcgcctcccggaggctaattctctccccgacggcttcgtccccgacagcgagagctcagacacggacgcggctcctccctcctccgcgcccatagttgacgatgcaatcgactccgatagtcccgacgccaccaaccccggtggtgaggaaaccctaagtgatccctcccttcccgcgtccaccgccgaagatgcctcctcagccgccgctgctgaagcattggacacactttgtctggacgttgttgcggatccggagcgcgctctaggggagcacggacccaccactgctgcaagaggtgattctctgtagtcctctctcgattttagttttcttcattcaccatgagtttcctgagcctagtcactatttctgaatggcagccattactatagcggttcagtgcaaacataggaaaataaggttttcatcgtggtagagtttgagctccagatgtgccttacgggctgtgtttccttaccatgttttaatgttcttttgtcaggtgaaggatccttgaaggaaaatcgtgcatcagagcaagtgggcgctccaagtgatcaaaaggtggtcaaggggagcggtgagccaaaacgcaaggtcatcaagcatagcaagcttgagaaggacaaagagttatttcaactagcccagcaataccacaaagtggttgcagaaagggatcaagccattgcagtcaaagatagactagaatctctttgtagggaatttcagcgtcaaaacaaaatgctaaaggaagagtgccaaagggtatcgacagagggacagaacatgcgtacggaattgtctgaaaaatttgatcatgccataaagggtgtcagtgccaaacttgaggagcagagagttgagcgcatttctcagctagaagagaacaatacgttgagaagtaaactgaaagaccttgctgatcaatataacattactcagcagaaatatgctcaccaattgaaagagaaaatgctggaacttgaacttgctgatctgagacttcaacaacatcaagagaaggctgctcaggaacatacacaaatgcagttgtatgctgaacaagtttctcagcttatgactactgagaagaacctgcggttgcaactagcttctgacggggaaagatttcagcactttcaggatgccttgtcaaaaagcaatgaagtctttgaaacttacaagcaggagatggaaaagatgatttcagtgataaagaatcttaagaaggagaacgaatttctgaagggaaaatgtgagaactcagatattgctattgtgaagctcattgaagagcgtgagctaacaaagaagcaaatagagaaattgaaaaatcaaagggagaagctcgaatccctgtgtcgaacactacaggcagaaaggaaacaaggcccctccgccagtattccagatgccccttctagccaagaagtgtcagcgacaagtcaagaatcttaacattccagttgccccttctagccaagatgtgtcagcaacaagtcaagaatcttggcagttgtgcttgtcaatataccgttggtgccagctacagcttgcggagatttctgaagcctgacattcagctgtcaacctaccgtccgtctcaggccttttgatattgtggctagagcctagtggtgcattcctactcggtgttgttaccaagcatataagctctcggctgattccatctcttgtttttgtttgagacaaagcctgctgcattggagataattagatttttgccaatcataatattgtcttcttgttataattaccactgtgtctatgaattgtgggtctagctgggtctatgaaatgtgagtctgatgacaattttacaaacttgtttcttgctgatggtaaatatcagaatctctcgctgcattgtgagtgtgttaattattgtttgagacaaagctctcgcggctcccgttttggaatgatggccaatgctttctcttaattattgtttaaaaaactaaacatcttttattttggatatacaataatctaatgagttatcctttgttgtgcgaaattctcgagatgatccatcattcctgtattcttcatgtttccacacaaattgc

SEQ ID NO: 5818 - DNA, 1441 bp, Zea Mays
cttccactggagggccacacttctcttttgaggaccagtccaccgtccactcccagagtccaaaaccctacgatccgcgccaccatgccgcgcctcgccgccgccgccgccgtctcacgccgcgccggcgaggccctgcgccgcggcgcgtttgggggactgcggcctctctcctccctgcaaccgttaaacgccgcctccagcgacgaggtgctcgttgaaggaaagacaagtgcgcgcgctgccgtgctcaaccgccctggctacctcaacgccctcaccaccaccatgggagctaggctcaataaattttatcaatcatgggaggacaacccagacattggctttgtcatgatgaaggcaagctggaggaatgtaaggattttttcaagactttgtacatgttcatttattttctgggcacgtacttgaaaccacatgttgccattcttgatggcattactatgggtggtggtggaggtgtttccatccctggaacattccgtgttgcaactgataggacagtctttgcaactccagaagttcatattggattccatcctgatgctgcagcctccttttatttgtcgcatctaactggccatgttggggaatatgtggccttgaccggtgaaaagcttaatggaacagatatgattgctcttggccttgctacacactatttcatgagtggccatctggatctgatcgatgaacgacttgcaaagttagtaactgatgatccatcagttattgattcgtcccttgcacaatatggagacatggtttatccggacaaaaaaagcattgttcataggctggaggtgattgataaatgcttcagccatgacacagttgaagagattgttgatgccttggtgagtactgattaagctgttttttactgttcttacatacatcattgtttgattgatttgataatgaatgaaacatgaaatattattcattcatatatactattttgtggcttggtttgtgaccttttgctagcgtctcactatttactgtgaaactttcatgaatcttataattaacctttgatggaaacttaccatatcttcttgatatgattctcatcattgcaattttactgccctgtatggtgttggagtgttctggacttctggtcaacttggtacgatttaaaactaagttccggcataatcaggaaagtgaagcagccagctcaaatgaagaatggtgtatcttggcgctgaaacgattgaaagaggcctctccgttagctttgaaggtttcactgcgatcgatacgcgagggtagatatcagacacttgatgagtgccttgtccgtgagtaccgcatgtccatgaatggaatctcaaagcaattttctcatgaattctgcgagaaacttctaaaacttgaagaatgcatactatcaaacttgtgatctggaaac

SEQ ID NO: 5819 - DNA, 1557 bp, Zea Mays
ccctagcccatattcaatcagactgagctcccacgccgtttcttctcatcacggcacttccactggagggccacacttctcttttgaggaccagtccaccgtccactcccagagtccaaaaccctacgatccgcgccaccatgccgcgcctcgccgccgccgccgccgtctcacgccgcgccggcgaggccctgcgccgcggcgcgtttgggggactgcggcctctctcctccctgcaaccgttaaacgccgcctccagcgacgaggtgctcgttgaaggaaagacaagtgcgcgcgctgccgtgctcaaccgccctggctacctcaacgccctcaccaccaccatgggagctaggctcaataaattttatcaatcatgggaggacaacccagacattggctttgtcatgatgaaggcaagctggaggaatgtaaggattttttcaagactttgtacatgttcatttattttctgggcacgtacttgaaaccacatgttgccattcttgatggcattactatgggtggtggtggaggtgtttccatccctggaacattccgtgttgcaactgataggacagtctttgcaactccagaagttcatattggattccatcctgatgctgcagcctccttttatttgtcgcatctaactggccatgttggggaatatgtggccttgaccggtgaaaagcttaatggaacagatatgattgctcttggccttgctacacactatttcatgagtggccatctggatctgatcgatgaacgacttgcaaagttagtaactgatgatccatcagttattgattcgtcccttgcacaatatggagacatggtttatccggacaaaaaaagcattgttcataggctggaggtgattgataaatgcttcagccatgacacagttgaagagattgttgatgccttggtgagtactgattaagctgttttttactgttcttacatacatcattgtttgattgatttgataatgaatgaaacatgaaatattattcattcatatatactattttgtggcttggtttgtgaccttttgctagcgtctcactatttactgtgaaactttcatgaatcttataattaacctttgatggaaacttaccatatcttcttgatatgattctcatcattgcaattttactgccctgtatggtgttggagtgttctggacttctggtcaacttggtacgatttaaaactaagttccggcataatcaggaaagtgaagcagccagctcaaatgaagaatggtgtatcttggcgctgaaacgattgaaagaggcctctccgttagctttgaaggtttcactgcgatcgatacgcgagggtagatatcagacacttgatgagtgccttgtccgtgagtaccgcatgtccatgaatggaatctcaaagcaattttctcatgaattctgcgagggagtcagagcacgactagtcgacaaggacttcactcctaagtgaaggaagcttcactatgatgtgttaatgccaatggaggatatgttgcatgtttggtgcccaaagaaa

SEQ ID NO: 5820 - DNA, 2569 bp, Zea Mays
gtctctctcgtttctcctgcgggacggaagagagaggaggaaggggagaagaagcaagcgaagcgagacgagagcagagcattgccgcgtagccgccccccgctcccggaagacaaatcaatccccaatcccccccgtcccccaaaatcccctggggattcaccgacaggcccccccgcgccgccggcccccgtatctgcactcctcgcacgcggcgacgcgcattgctatttcattccctctcttttcttcttcccctattggcatcacccgtgcgattagcatgtctctgcccaatgccaccgcctcgccgccgccgtcgccggaaccctaggccgcaggactccgagctcccgtcggcgggggagggggaggatgcagctgcggatctcgccgagcatgcgcagcatcaccatctccagcagcaatggcgtcgtcgactccatgaaggtgcgcgtcgcgccgcagccgcccccgccgccgccgccgctgcacggggccgcccggcgcggcgggggaggtggaggggggtggtactggcgcgcagtcgcgttcccgctcgtcgtcgcgctcggctgcctcctgcccttcgccttcatcctcgccgccgttcccgcgctcgaggcaggcggaagcaagtgctcctccgtcgaggctggtgcaagatctgtatagaacttttgatcaagttaacaacgaggaatccccatccgatgaaaagttaccagaatcattcagggattttcttttggagatgaaggataaccattatgatgctagaacatttgctgttagattgaaagctacgatggaaaacatggataaggaggtaaagaggtcaaggttggcagaacagctgtataaacattatgctgcaactgctattcccaaaggaatccattgcttgtctctgcgccttactgatgaatactcctcaaatgctcatgcacggaaacagttaccaccaccagagttgctacctttgctttctgataattccttccaacattacattctagccagtgataacattcttgctgcttcagttgttgtgagctcaactgtacgatcttcctcagtgcctgagaaagtagtcttccatgttattactgataagaaaacatatcctgggatgcattcatggtttgctcttaattccgtatctcctgcaatagttgaagtaaaaggtgttcaccaatttgactggctgacaagagaaaatgttccagtactagaggctatagaaagccatcgtggagtcagaaatcactatcatggagatcatggaacagtttccagtgcaagtgacaatcctaggatgcttgcttcaaagttgcaggctcgaagccccaaatacatatccctgctgaaccatctccgcatttatttgcctgagctctttcccaacctcaacaaggtggttttcctcgatgatgacattgttgttcagcgtgacttgtctcccctttgggctatcaatcttgaagggaaggtaaatggagctgtggaaacatgcagaggggaagacagctgggtgatgtctaagcgtttcaggacatatttcaacttctcgcatcctgtgatagctcggagccttgacccagatgaatgtgcttgggcatatggtatgaatatatttgatctggcagtttggaggaagacaaacatcagggatacataccatttctggttgaaggagaatctaaaatctggtcttacactctggaaatttggtaccttaccaccagcccttatagcatttaggggtcatgtgcatggtatagacccatcatggcacctgcttggcttaggataccaagacaagacagatattgagagtgtcaggagggctgcagtgatacattacaatggccagtgcaagccatggctagacattgcttttaagaacctacaaccattttggacaaatcatgtaaactactccaatgacttcgttagaaactgccatattttggagcctgagcgtgtcaaggagtgatttgcagcaaatgctggacatagcgagggagtatagtttatggttcgcttgttggctggagaggctgattgctgctgtataagtataataggtaatcaagaaagcaaccggcattcaatacaactgaccatcccctgcgaaaactggcattcaaatatctcaggagtcttcatctgtatcataggggaacacaattcttaccatctgtatcatactgttgcatcattcttttctatactgtaactgcggaaaaggagatctgggactgggctgacctttggtcgcagaataattcagaaggctagaagattgagtgattggttgatcaagacgaagaaaggaggcggatattgtgtggtggcaagtttatatgctttccatccatccatccatttaattctttttacactcgagtcattgaaattttgttctggtagttttgtgattgatttggtaggttggagatgattgtagtagagatgccattgtttgtggagtaacctacaggatattgttacaattgttgacatactatagatgtgcagataattcttacaagagtatttgcgc

SEQ ID NO: 5821 - DNA, 2103 bp, Zea Mays
gcggccgggcgagcgagctgccacgtcagcgcgacggtgatcttcccccggtaacgccgcctcctcgcccaacccggcctagggcggacgattaaaattaacctaacaccgggttaaagcctccgcgctccgccccccggaatcggaccaaagccgggcatacgcccccaagtccaaaagccctctccgccccgctctcccactcgtaggtgttctccccgtctccgcccgcactcgctcgtccgcgcgcaggaaggttgacctgtcgagggccggcgaacccggtaagtaagagtgaaaatggatggaagtagtaaagggagtgggcattctgaagcattaaggaactacaacctgggaagaactttaggtatcggtacatttggaaaagtgaagattgcagagcataagcttactggacatagggttgctataaagatcatcaactgccgccaaatgagaaatatggaaatggaagagaaagcaaagagagaattcaagatattgaagttgttcattcacccccatatcattcggctttatgaggtcatatacacacctacagatatatatgttgtgatggaatattgtaagtatggcgagttatttgattacattgttgagaaaggcagattacaggaagatgaagctcgtcgaatcttccagcagatcatatctggcgtcgaatactgccatagaaacatggttgtccaccgtgacctaaagccggaaaacttgttacttgattcaaagtataatgtaaaacttgcggattttggtctgagcaatgtcatgcatgatggccattttctgaagactagctgtgggagtccgaactatgctgctccagaggtaatatctggtaaactatatgctggacctgaggtcgatgtatggagttgtggggtgattctttatgctcttctttgtggaactcttccatttgatgatgagaatattcccaatctgttcaaaaaaattaagggaggtatctacacacttccaagtcatttgtctgctttggccagggatttgatcccacgaatgcttgttgttgagcctatgaagagaatcacaattagggaaattcgggagcatcaatggttccagattcgccttccacgttacttggcagtgcctccaccagatacgacacaacaagccaaaatgattgatgaagatacacttcgagatgttgttaatatgggatttaacaagaaccatgtgtgtgaatcactgtgcagcagacttcaaaatgaggcaactgttgcatattatttactattggacaatcggtttagagcaactagtggctatcttggggcagattatcaagaatcaatggacaggaatttaaatcagctggcgtcatctgaatcatctagttctggtacgaggaattatgttccaggaagcagtgatcctcatagcagtggtttgcggccatattatcctgttgaaagaaaatgggcgcttggacttcagtctcgggcccaccctcgtgaaataatggttgaggtcttaaaagcacttcaagaattaaacgtcagatggaagaagaatgggcactacaacgtgaaatgcagatggtgcccagggtttcctgaagttaatgacacgttagatgccagcaacagctttcttggtgactctaccatcatggataatgatgatgctaatgggaggctacctactgtgatcaagtttgaattccagctttacaagacgaaggacgacaagtacctcttagatatgcagagagttactggacctcagctgctcttccttgacttctgtgcggccttccttaccaagcttagggttctatagtggtctaccatgtgcaaattttcactgtggtgatgaataaccgaaagcatgtaaataggaaccttgttctcgtcttttggacaacgaacatgtttgagtgactggtcttgtgttgagcgcgtaaagttcatttttgaactaaaacgttacgaataaaaaaagagtatattactgtctgcatggacatggctgtttcagtaggccgtggcaccgcagatggcgatgctcactgcaacctattatgaaaaaaaatgcaagattcaacttttgttc

SEQ ID NO: 5822 - DNA, 1248 bp, Zea Mays
ctttccgcccaaaacacttcccagccctccacgcaccccgctgccgcggctcgaacataaaccctagagccgccggcccggtcgcgctagcgacacaaatctcaaatcacccggagagaactcgctcgcgaaggctgaactcatggctcgcgtcttcgttgggaacctggatccgcgtgtcacggcgcgggagattgaggacgagttccgcacgtttggggttctgaagagtgtatgggttgctaggaaaccaccagggtttgccttcattgacttcgatgaccgcagggatgcacaagatgccattcgcgatttggatggtaagaatggttggagggttgagctgtcaaccaaagatggtggtggccgtggccgagaccgtaatggttctgatatgaagtgctatgagtgtggtgaagttggccactttgcacgtgaatgtcgcttacggattggttcgggagggctgggtagtggaaggcgtcgcagccgaagtcctagatatcgcagccggagccgaagtcgcagccggagcccaagacatcgaaggagcccaagctatggcagaaggagctacagcccacgagatcgttctcctaggaggcgaagttacagcaggtcgccgccactgccaccaccgcctcctagaaataacagcatgtcaccacggggagcccgagaaatgagcagatcgtcaccaccacctcccaaaaataacagcagttcaccacgggaagcccgagaaatgagcagatcgccaccaccacctgccaaaaataaccgcagttcaccacgggaagcccgagaaatgagcagatcgccgccgccaccacctcctgatgccagaagaagctatagcagatccccagaacagcagccccagcacgagtccccatatgccaatgacgcctgagaatatttagctgctcaaagatgctggaaaatgctaaggggcccagcatgttttgcccatgcgcgtcggtacaacttataggatccagtctgagattttgctcgtgttttgggtttcccttggacacaccgctgctgataccattgtagagggaggagcataacgtttccgtttcgagtattgactttgggcacttatagctgtcaagacatgacctggttcttgttagatttatatcactagattgcttttgaattcggacgaagtgttaatcgtgggctatgttgagatatttgtctaccttttcaggacgctttcgaagaaacattttccta

SEQ ID NO: 5823 - DNA, 1628 bp, Zea Mays
attctccacagaatgacgcctcggaccaccggctgaattccctgcgaacaacgtcggcatgattggggggggggggagaccgttccaagctggcaacctgaaggctaagcaagcgccacaaactcttgatcctagcacattctacaaagttgtgaagactactcctgctgtttcttattgccaataagcacaagcacacttgagaaccggccatcaccatggagatgagactctttatcgcccttcagtgcgtgcagtgcgccaccatgcaggtgaagcagcagaagaagagcagcaacaagtgggtgtgtgtggtgtgcaaccagcgtcagtctgtgcttcatgtccatgccaggggctatcgtgctgctgatctccgccgcttcgtccaggacaccaaccttgcccgtggccgccgggagttcgcaccgttggccgagcccgacgtggacagggatctggcggcagttgaggagggagatgtgttccctatcgagaagagtcagacggaatggtccgagtatctggacgatccaggggagacaggtaaaggttgtggtggccttggcgcagatgcttcagatggagaatcggatgaaggaattgaggtgataactgaactgcctcagaaaagacctaaagttaggcctcgcaaagcccaatcagatgtagtaggaaagagaaccaagctgtcaacacatcccactttatgtaataagaggcagcagatcaagcaaggatcaaatccccactgtgcaactactactgctgaagcacaaggatcaaaatggaccaagtatttggacacgagccgttttggtgggaggaaatgcttcgatacctctggtctgcactggactgaacatgatgaatctgccactactgaggctactactgacgtagtggtggatgatgagaatcacagggtgcatccacggaatgtcacaagctcagtgtgaggtggctgagcacttgagctgaggaaaattcttgtttctgttctgcatcaactagagtcacctgaccatgtggcacagcacagagaagagccgaagacgtacagcatggatcacaggagcagtacaccttgatgactgactgttgtctgttggtacctataatcctgtgacaggtctgaacaaccgagtgattgattgatgtctccggcttccctgcagccaaaatgacgaatgggttaccctgcttgaatcctttgccactgcgcttgcgtgctactactattccatgcaaaacaacgtgttcggaaccaaaattaaagttccgaacatcgctgtgatgaatgggtgaatcgtcacctttttctttgaaatagcaactgtatgctcgaagaacagctgtgctggtccagctatctgggtaccgtactccctaccccgattgaactgtatttgggtcaaagtaatgggggagatactctttccatgctaggatataaggtgtaactacctttaattctaagatcaagaaatatatttaattctctttatcaataaagtattgttatgagcgtgcttatattatgggacaagaataaaaagtgtttacgacttatataacaagagtagtagatataggtcatgtttgtttcagtttttttagcttccgtc

SEQ ID NO: 5824 - DNA, 1807 bp, Zea Mays
ccccttaacctggagcaactgcgggctgcactcggtctcgccgtcgaactcgaagacgaacctcgggaagaaggccagggctgaggtgacagttgggcatctatgtggccattcattttttttctttgtctagagacttgaacacaagatcaatcaattttggtatcactatttttgtgaactataggaaccagagttgtcttgtgacaagtctaagcatcatagaagttttgaatctttctaattggttgttgatctgtccccaggtaatcatacacatgatttgtttgccactactttttagatgcacaagatcctatgctgtacatgccaatgactactcctgctgtttcttattgccaataagcacaagcacacttgagaaccggccatcaccatggagatgagactctttatcgcccttcagtgcgtgcagtgcgccaccatgcaggtgaagcagcagaagaagagcagcaacaagtgggtgtgtgtggtgtgcaaccagcgtcagtctgtgcttcatgtccatgccaggggctatcgtgctgctgatctccgccgcttcgtccaggacaccaaccttgcccgtggccgccgggagttcgcaccgttggccgagcccgacgtggacagggatctggcggcagttgaggagggagatgtgttccctatcgagaagagtcagacggaatggtccgagtatctggacgatccaggggagacaggtaaaggttgtggtggccttggcgcagatgcttcagatggagaatcggatgaaggaattgaggtgataactgaactgcctcagaaaagacctaaagttaggcctcgcaaagcccaatcagatgtagtaggaaagagaaccaagctgtcaacacatcccactttatgtaataagaggcagcagatcaagcaaggatcaaatccccactgtgcaactactactgctgaagcacaaggatcaaaatggaccaagtatttggacacgagccgttttggtgggaggaaatgcttcgatacctctggtctgcactggactgaacatgatgaatctgccactactgaggctactactgacgtagtggtggatgatgagaatcacagggtgcatccacggaatgtcacaagctcagtgtgaggtggctgagcacttgagctgaggaaaattcttgtttctgttctgcatcaactagagtcacctgaccatgtggcacagcacagagaagagccgaagacgtacagcatggatcacaggagcagtacaccttgatgactgactgttgtctgttggtacctataatcctgtgacaggtctgaacaaccgagtgattgattgatgtctccggcttccctgcagccaaaatgacgaatgggttaccctgcttgaatcctttgccactgcgcttgcgtgctactactattccatgcaaaacaacgtgttcggaaccaaaattaaagttccgaacatcgctgtgatgaatgggtgaatcgtcacctttttctttgaaatagcaactgtatgctcgaagaacagctgtgctggtccagctatctgggtaccgtactccctaccccgattgaactgtatttgggtcaaagtaatgggggagatactctttccatgctaggatataaggtgtaactacctttaattctaagatcaagaaatatatttaattctctttatcaataaagtattgttatgagcgtgcttatattatgggacaagaataaaaagtgtttacgacttatataacaagagtagtagatataggtcatgtttgtttcagtttttttagcttccgtc

SEQ ID NO: 5825 - DNA, 3722 bp, Zea Mays
gcatttccccccaattctctcccgcccaaagccccaaaccaccacccaaaatcctctctgccgcccgccgatggccaccgccgccgccatggccgatgacgacgacttcgcctcgccgccgctcgccccgcgtgcgcgggaggaaggaggaggcagaggcgtgtaccaggtgggcggcgtgccggtggagttcccctacaagccctacgggacgcagctggcgttcatgggacgggtcatcgcgacgctcgaccgtgcccggcggcaggggcgctcccacgcgctcctcgagtcgcccacaggcaccggaaagtcgctctccctcctctgctccgcgctcgcctggcagcggcactacccgctccgttcccctcccgcccccgatccattgctccacggcggaggattcgtcccagatgatacgcagccgcagccgacgccagtcgtcccggagaaggctgtcaagaagaagaacgccccgataatctattacgcgacgaggacgcacgcgcagataagccaggttgtccgggagtaccgcaagacgtcgtaccgagtgcgcatggccatcttggcctcaaggaagcactactgtgtcaataaatttgcttgcgcgagcgacaacattgatgagaaatggaatgcacagaaactaagtcggcatccatcccttcagattggtggctgctatgaagttcacgatattgaggatcttgtcagagttggacagaaagcaaaaggatgtccgtattttgctgcacaacacatggcagaagcagcccaattggttttctgcccatataactacctgattagtccggttgtcaggagagcaatggacatcgatatcagtggttccatcattattcttgacgaggcacacaacatagaagatatagcacgtgatgctggcagtattgacatcgatgaagaatcactttgcttgttgcagggagaacttcaaaacctggccgctaatgaggccgttgcaatgatataccaacccttgcacgatattattcaggctcttattggttggattgctgagagggaggacaatttgcataatcatgagttcggacatccggcttcatattggactggtgaaaaggcaatgaatgaacttcagcgggctggtatttctccaatgtatttcccggtattgcaagaatgtgcaacaaaggcaattaaagctgcttcagatactgaatcagatggttcacacttaagtggtggtagtgctatgacactagagagtctattctcttcgttgagctacttttttgctcagaaaggacgcaattcatgtgattatcaacttgctttgcagcgttttgttaaaaaggaaggcaaggacgtaatttcttcaacatgcacaatgagtttgtggtgtctcaatcctgctgttgtttttcaagaaattgcagatcgaacactttcggtaattctgacttctggaacactttcaccaatgggttcctttacatctgaacttggtgtccagtttgaggcctgcatggaagctcctcatgtaattaatgctgattctcaggtttttgcagctgtgctatcatctggtccaacaaggcagatattgaatgctagctataaaactgcggacaattcatctttccaggatgaacttggagcttcactagaggaaatatgcagaattgtgcctggtggtgctctagtgttttttcctagctacaagttgatggacaaattgcaagtgcgctggtctcagacaggtcaatgggcacggcttaatgctcaaaaacatgtgtttgttgatactaacattgattcaacatggatcagaaacgatgttcaagtaaagctgaaaaggagatataatgattcatacaaatcatcaaaacatctgttaagtgggagtgaatggtactgtcatcaggcatttcgtgctttaaaccaagctgcaggtcgttgcattcgtcataaatctgattacggaggcataattctgattgatgagcgatatcaggatgacagaaatgttctctacatttccaaatggcttaggaatgcaatcaagaagtatgatagcttccaggagacaatggctaagttgcaaaagttctttcagaatgctcaggaaaaaataaaaattaaagattgtggcatcttccccaaggttaagttggataatgaagcacctcaatctttcagtgatgataaaagaaagttgccgtggccagaattgagttcctcaaaccactcagtatcacgatgtaatcagaaggtaaagactgaatgtcttagtcagaggattccagacattgatggtgtggcggtaaaccaaaaagttgtgggtgtagccaatactggagcaaattatggagtcaaaacagaaattataaaattggaggaggatgattttaaacctaggtatgcagagatcactatcttaaatccattagaagacaggtcacggcaacctactcttgttgagggaacttctgcagcgactccagtagctagtccaagcaactatgctgagaaatctttcttccctgtccacactggcagctactcctgaaaggaccacagacaaagactgtcatgattcttttattaacagaagtgtaaattctcactatgagaaaaagagaaggttgagctccccaatgagttgtacttacacgacgcagtctagtcctccaagcaaatcattctgccacactggttctgttatgcctggggatttgaatagaaattctgaattgtgttgtaaaaatataggattgtccaggtgtgaaaatgtcaagtttgaaagaaactacagtccagaagaggtttcagcaaagaagtctatgcaaaagaaacttcttataaattgcattagatgcaaaacagctcttgggttagaagaagatgggtttcttgttacttgtacacaatattattcatcaaaattgtacttggcatatcttttgaaacatgggctatcaacttttggcatcctggaggatgatttttcagcatcgacaccaacagaggtacacgtagtgcagtgtgaagcttcgtcactcaacaaaaatgtatttggcaaattcagcagccagggtcatgtttggtttgcaaaggatggatgtgtatacaacgcaatgacctgttctttgtgctcttctgaaaacacaagtgccatggtcctcggtgtgcaagttcttgcaactgataggtcaaatcaacaattggtggaaaaggtgctcttgttcagtgatcgtttggatgtccagtctgagccatcaaagggacagatttcaagaactcgaagagatgctagtaacatctgccagcaatctgtgatcgaccttgattcttttgcatataaaccattaaagaaagatcctgtggcgctgaactcaagaaggtctaagcttaggttacctgccccgaacaaatccaccactggtacataatttgatggagagtttgagacaatggcgatctttgccgtgaagcattgggaagaactttgttctgtgagatatgacatgcggggagatgcagatgttacgtcgccatggagatttatagtttcaaacatccacatggattagagaagttccctgagctgaagtagggtgtaaaatgcatggcctggcagtagaaaattaggatgctgatgtctatatccatttacatgcgtcccattgtcgattatatctatgaacagtttttgcgttctgaaatttcgc

SEQ ID NO: 5826 - DNA, 1349 bp, Zea Mays
ccgagccgaacgggcgtgcgccatgcgcatgcgaccctgacgagcaacgacaaccacagagcccaaccgggaggaggatcggtaccagctcacggcggcgtcagcaccacacgccgccgccgccgcccacccccttcccgacaggcacgcttcttgcgcctcttgtgggatgctactacggataacgtacgcccaacccacgccttcggcggcggcccagttgaggctccctgggccgcgtttacgccgacgccgcgtcgctgcttccgcggcggacggcgccggcaattcaagctctccggagtacatatccaattacagagaagggaaagcagaggtcttgggtcggtccaagtgggcagtactaccgtgagctgccttgccccagctgtaggggtagaggttacactccatgcaaggagtgtggaatagatagatcaagtttggactgccctatgtgcaatggcaaggggattcaaacttgtctacaatgtagtggagagtgtgtgatatggcaagaatctgttgatgaacagccatgggagaaagttcggtcaagttctcccttgaaagtaaaagaagatgacgaagttgacaagttagagataaatatcaacaaccccaaaagatcaaagcgtacttatgcatctacttcaccggaagttgccaagaagattagccggtctttaagaagtctaaatgctcaaacaggattgtttactaagcacatgaagattatacaccaagacccagaattgcgtgctcaaagagttgctgcaatcaagagaacaaaaggaactgatgttgcaagaaagcgtgcttctgaaattcagaaggcattcttcagtgatcctgagaaccggctcaagagaagcattgccatgaaaggggtgaaattttactgcagcaaatgtgggcaagaaggacatagaagcttttattgccctactttgagggaaggttcaaccagggtgcggttcaggtgccggttgtgtggcagagaagggcataatagtcgaacatgtggaaaaccaaagtccgagaaggagcacaaacaacgacctcaccactgcagccgatgtggtgaaaagggacataaccggcgcaactgccccacatccactgatttgggtagtgatgcttcaggctatgtggttaacaaagttaatggctctaattcagctgtttatcaatgtagtatatgcttagaaaaggggcataacagacgaacatgcccgaaaagaaaggctaccttactaaaatgaaaagtgtgagtaaaattaaaagaaaggctatcttttatgcctgtgttttttctatttctctattttgtattaattcgttcaaac

SEQ ID NO: 5827 - DNA, 2042 bp, Zea Mays
gccaactgccatgtgaccaccggctatatatagcgatgcacagctccccttgctctgatcacgacccgcgtgtaggtgtagcactctccatcctcattgctaactgctcgattctcctccatacccttgtgcacgcacagccgacactgcagtgaggaacttgaacagaggaagaagcccggctgagcgctctctcgtctagctagctgcgctgcggcgatgaagatgcatcgcttcgctctgcgtggcctggggtttctcgtcctgtggatgctgcattgcggaagcgagctcgccgcggcggtgcctccaggggccagccggagccggcgctgtacaacggaggcattctcaagttcggcagcagcggcggagacccggacggataccgcacgacggagaccggcgtcttctccccggcgttcgtggtgtacaacctcaacaagaccaccatgtacaccttctcataatgctgacaagacgcccatgaagatcaccgtggcgagcgggtcgctgcagccgttcaccacggaccagtgggcgatgcaccagcaggataccatccggaagaggaggaagcgcgtggcgaccatccacgtggccgacccgcagggcgcccgcgtggtgggcgcgtccgtgtcggtgcagcagacggccaaggacttcccgatcggttcggcgatcgcgtccaccatccttgggaaccaggcgtaccagcagtggttcgtggaccggttcaacgcggcggtgttcgaggacgagctcaagtggtactcgacggagcccatgtcggggcagctgcgcttcgacgtgccggaccagatgctggcgttcgtgcggtcgcaccgcgtgatggtgcgcggccacaacatcttctgggagaaccaggacgcgacgccccggtgggtgaagaacctgacggcggacgacctccgcgccgccgtcaacacgcgcatccagagcctcatgacccgctaccgcggcgagttcgcgcactgggacgtgaacaacgagatgctgcactacaacttctacgagcagcggctggggcccaacgcgtccgcggagttcttcagcgtggcgcaggacgccgacccgctggccacgctcttcatgaacgagtacaacgtcatcgagacctgcgacgaccccttctccaccgtcgacacgtacgtgtccaagctcaaggacctccgctccgccggcgccatcctggaagggatcggcctggagggacacttctccaagcccaacatcccgctcatgagggccatactcgacaagctcgccaccctggggctgcccatctggttcaccgagatcgacatcagcaacaagttcgacgcgcagacgcaggccgcctacctggagcaggtgctgcgggaggcatactcgcacccggccgtcagcggagtcatgctgtggacggcgctgcaccccagcgggtgctaccagatgtgcctcacggactggaacctcagcaacctgcccacgggggacgtggtcgaccgcctgctcaacgagtggcggacgctgcaggcggccggccagaccgacgcgcacggcgcctacagcttcaccggctacctgggggagtacgtcctcactgtcagctacaacaacaggacgacgcaatccaccttctcgctgtcgccgggagacgagaccaggcacatcaacgttcagatgtgatgcgccaacattatatttagggctcctcggatcggactacttattactagctgatgtagtgattgttgtggaagaagattgcacagtcaatctatgtttcttacttgtcctgtgtcaaatttagtgtaagaactggcgtccttgacagctggtatgtaaaatagtatgaccaccactattactatatataacaagagacttcactccacattaatcttcacaagacgcataaatgagaaggggcagggccgcagcccgcaggggatcaaaagcaaagtctagtatttcttgttatctattctttatgaaaatgcccagcaaacgacctccataagtctggtaccaaatgc

SEQ ID NO: 5828 - DNA, 2329 bp, Zea Mays
gccaactgccatgtgaccaccggctatatatagcgatgcacagctccccttgctctgatcacgacccgcgtgtaggtgtagcactctccatcctcattgctaactgctcgattctcctccatacccttgtgcacgcacagccgacactgcagtgaggaacttgaacagaggaagaagcccggctgagcgctctctcgtctagctagctgcgctgcggcgatgaagatgcatcgcttcgctctgcgtggcctggggtttctcgtcctgtggatgctgcattgcggaagcgagctcgccgcggcggtgcctccagatggctggtacgattactccgcctacaccgactgcaggggccagccggagccggcgctgtacaacggaggcattctcaagttcggcagcagcggcggagacccggacggataccgcacgacggagaccggcgtcttctccccggcgttcgtggtgtacaacctcaacaagaccaccatgctgggtgaagctggaaggcgcgtactcggctctgatcaccgcgaggctggcgccggacaacaccggcgccaggtgcatcgccacggtcgttgccaggagcgactgctgggccttcgtcaagggcggattcgtcctggactggccgacgcagacctcggtcatcttctttcaggtacgcgcgcaagcacgcatcggatgcatgcgctggctgaattggcaaattgaggttttcattatatattgttcatgcgcgcgccctgcagaatgctgacaagacgcccatgaagatcaccgtggcgagcgggtcgctgcagccgttcaccacggaccagtgggcgatgcaccagcaggataccatccggaagaggaggaagcgcgtggcgaccatccacgtggccgacccgcagggcgcccgcgtggtgggcgcgtccgtgtcggtgcagcagacggccaaggacttcccgatcggttcggcgatcgcgtccaccatccttgggaaccaggcgtaccagcagtggttcgtggaccggttcaacgcggcggtgttcgaggacgagctcaagtggtactcgacggagcccatgtcggggcagctgcgcttcgacgtgccggaccagatgctggcgttcgtgcggtcgcaccgcgtgatggtgcgcggccacaacatcttctgggagaaccaggacgcgacgccccggtgggtgaagaacctgacggcggacgacctccgcgccgccgtcaacacgcgcatccagagcctcatgacccgctaccgcggcgagttcgcgcactgggacgtgaacaacgagatgctgcactacaacttctacgagcagcggctggggcccaacgcgtccgcggagttcttcagcgtggcgcaggacgccgacccgctggccacgctcttcatgaacgagtacaacgtcatcgagacctgcgacgaccccttctccaccgtcgacacgtacgtgtccaagctcaaggacctccgctccgccggcgccatcctggaagggatcggcctggagggacacttctccaagcccaacatcccgctcatgagggccatactcgacaagctcgccaccctggggctgcccatctggttcaccgagatcgacatcagcaacaagttcgacgcgcagacgcaggccgcctacctggagcaggtgctgcgggaggcatactcgcacccggccgtcagcggagtcatgctgtggacggcgctgcaccccagcgggtgctaccagatgtgcctcacggactggaacctcagcaacctgcccacgggggacgtggtcgaccgcctgctcaacgagtggcggacgctgcaggcggccggccagaccgacgcgcacggcgcctacagcttcaccggctacctgggggagtacgtcctcactgtcagctacaacaacaggacgacgcaatccaccttctcgctgtcgccgggagacgagaccaggcacatcaacgttcagatgtgatgcgccaacattatatttagggctcctcggatcggactacttattactagctgatgtagtgattgttgtggaagaagattgcacagtcaatctatgtttcttacttgtcctgtgtcaaatttagtgtaagaactggcgtccttgacagctggtatgtaaaatagtatgaccaccactattactatatataacaagagacttcactccacattaatcttcacaagacgcataaatgagaaggggcagggccgcagcccgcaggggatcaaaagcaaagtctagtatttcttgttatctattctttatgaaaatgcccagcaaacgacctccataagtctggtaccaaatgc

SEQ ID NO: 5829 - DNA, 4378 bp, Zea Mays
atacttttgtcatactttagctttagcatcttcaccatacagttgagtgtctctcggatccacctgtttttgctctgtacaaactttgcttaaattacgaaagaaaaaggaaaaggaaaagtctctcgagaattcgaaataattggaattagatcgtcgtggggattccacatcgtaaccactgaagacgaggcggcggacgagacggagagcagaaccgcgcagcgaagcagcagcggcgacaagccctcgcgtcggtagaggcgccgtccgccgtccgccccctcaactccggtagccgctggccgctgcaggtcgagtcccgtcgagccgactcgctccgcagcgcttcccgatctgggtggccgcggcgccggcatggcgcggttcgaggtgaacggcaagtcggtgcaaggcgtggacttgctgcggcggcgccactggccgtcgcgcctcgacttctggcccttccttgcactctatgcgctctggctgctgcttgctgtcccggcgctcgacttcactgacgctctcatcatccttgccgcgctctccgctgctcacattctcaccttcctcttcaccgcctggttcgtcgatttccgtgccttcgtcgggtactctaaggtcaaggatatccatgccgctaacacgtgtaaggtgactcctgctaagttctcggggtcaaaggagattgtacctctgcacaaacagaaaaatgtggcctcaacttcagctgcaggtgagacagaggagatttactttgattttcggaagcagaggttcatctactcggctgagaaagataactttttaaaactccggtacccaacgaaggaattgatcggtcattatggcaagggcactggttatggaactgaggccaagattagcaccgcagtggacaagtggggcagaaatgtgttttttgtgttgctctatggtgcctggatgcgtattggtactacagtttgtttacacttttcatgcttttcctgtttgagtctactatggcaaagaataggctgaagacattgactgagctaagacgtgtgaaagttgatagccagattgtgttgacctatagatgtgggaagtatgaattctccatttcatttaatttttttctgtttcagcatatatcccatcctaattgcatgttctttgttcagatgggttaaagtccctggaactgaactactaccaggagatattgtgtcaataggccgctcaactagtggtgaagatagatctgtaccagcagatatgctattgttagctgggtctgcaatagtaaatgaagctattcttacaggagaatctactccacagtggaaggtttcaattgctggacgtggtcctgatgatatgctatctataaggcgagataagaaccatatcctatttggtggcactaaagtattgcaacacactgcagataagtctgtaaatcttcgatcacctgatggtggctgtctagcttttgtattgaggactggatttgagactagccaagggaaattgatgaggactatcttattttcaactgagagggttactgcaaataacaaagaaagtggcctgtttatactctttttgcttttctttgcaatcattgcgtccggttatgtgcttgtgaagggattagaggacccaacaaggagcagatataaacttttattgagctgttcgttgattattacttctgtgataccaccggaattgccaatggagctctccatagcagtcaatacatctttaattgcattggctcggcatggtattttctgcacagagccattcagaataccatttgctgggaaggttgacatatgctgctttgataagacagggactctgacatcagatgatatggaatttcaaggtattgttacatcggaaggtgatgacttaatatctgatgcaaataagctgcctctccgaactcaagaagtgctttccagttgccatgcactggtatttgttgacaacaagctggcctggtggtcaacctgttcaaattgtgcacagataccattttgcttctcacttgaagagaatgtctgttatcgtccgtattcagcagaaattttacgctttcattaagggtgcaccagagaccatccaagagaaattagttgatttacctgctgcatatgtggagacatataagaaatacacacggcaaggttctcgggtcttggctcttgcatataaattgcttcctgagatgcctgttagtgaagttagaagtttggaaagggatcaagtagagagcgatctaacatttgctggttttgcggtcttcaattgtcctataaggagcgactctggtgctgtcctacaagaactgggacaatcttcccatgacttggtcatgatcaccggagaccaagctttgactgcctgccatgttgctagccaagtacatatatcttccaaacctgttttgattttgacacggataaagactggtggttttgagtgggtttcgccagatgaaactgatagagctccatacagtgctgtggaggttgcagtgttatcagaatctcatgacctttgtattaatggggactgttttgaaatgctacaaagtactgaggctgttctccaggttatcccttatgtgaaggttttttcacgtgttgctccagaacaaaaagaacttgtactaactacattcaaaagtgttgggagggtgacactgatgtgtggagatggaaccaatgatgttggtgcactgaagcaggcacatgtcggcgttgctcttttgaatgctgaaccagttcagaaagtggattcaaaatctaaagctgaaaataaatctgggaaattgaaaaacaagaagcctgctaatgaagcatcatcacaagtgactccggtagctaatagttctggtaaagcatccagcagcctttccttgactgctgctgagaggcagcgagaaaagctgcagaagatgttggatgaaatgaatgatgaaagtgatggtcgttcagcaccaattgttaagcttggtgatgcttctatggcttcacctttcacagcaaagcatgcatctgttacccctactcttgatatcatccgtcagggaagaagcaccctagtcactacacttcaaatgttcaagattcttgggctcaattgccttgcgacagcttacgttctcagtgtcatgtacttggatggtgtcaaactgggcgatgttcaggctacaattagtggtgtcttcactgcagccttcttcctcttcatctccaatgctcggccactccaaacgctgtctgcagagcggcctcagcctaacatattctgtgcatacgttctgctctcgattcttggccagttcgccatgcacatattcttccttatcacggctgtcaatgaagcatcaaagcatatgccagaggaatgcattgagcctgactcagacttccatccaaaccttgtgaatacggtttcgtacatggtgaacatgatgatccaggtggcaacctttgctgtaaactacatgggccacccatttaatcagagcatatccgagaacaagcccttcaagtatgcattgtatggagcggttgctttcttcacagtgatcacatcagatatgttcaggggtttgaatgactacatgaaacttgaacctttgccagagggaatgcgtggcaaattgatgttgtgggctattctaatgttttgtggttgctacggatgggagcggctcctgcgatgggtgttcccggggaagattccggcgtgggagaagcgccagaaacaggcagttgcaagcttggagaaaaaacaccactagaattcttttagttgtctgcacttctttaccctttgatgcccatttcgatacttggtagtacatactgatcatgtcttgtcatggtttcaatctaatctgtagcctaggggaattttggcagtgaaagccctaaatgatagcatagagggtcacttatcaggattgttaaattttcggttacaatatgaaagttaatattagatggcaatgcatatcgggtgatgtacaaggcaaaatacagaaactatgccaggatttccttcattcttctactcttacaatgcgcattgatcttaatgtgtacaccctatgagaaaaggaatccctgtattctgctgctttatttatttatttatttaataatagcgtaaacatccatgttggtacagcgaaatgttggttacagcgaaagtatcaagacggaggaagggcaaaaggatcaagatgaagagtaaaattttcttttctattttttgtgtaaattaaattctaaaccaaagcttaatagtgtgatgaagcgttttgtaccttaattttcatgacaaatactagcatgacaatttg

SEQ ID NO: 5830 - DNA, 1821 bp, Zea Mays
ggcttgttcgccaaattggcagctcgccacgttcttcttctctcaaccttcccctctttctctacttctcgtcccaactcccaagttgcaacccagccacctcgtctcctcccctccaactccaagcctactcccacccgatcccccctgccccgccccgggcgccgccggttctcgcattcgcggcagtccatctcgttgccccttcccggcggcctctgatccgtgctgctcgtcgcccacgcgaaacctgccgcctcccttgttgccgcgaccgcgagccctctcccctcccctcgcggccctgatctcagttccactgtgccccgaccgtgatccgtccgcacccgcttcatgcccagcagcgttcaacccgtcccctaaatgccgctgcctccaaatagttctccgtgtgctggttcttgcggattgcgctgtcaggtctacataatattgggggcggtgcagagtgtcctccgttttttcctctctcgcacctaaagttttcgggagcagttagttagagtatattcgattccccctgatatagtttgtttatttcacactacgaagtctatgcactcgagagaaaaatcactggtagcgacggcatcaattcttgtgacgtttagtagctagaacaccctcactagcgctcattcatgtttactcgaccttgtccttttcccttccatcttccgtgtgctggtatcaatttgttgtaatttggggagaccaggagttttctcgccttcttgcccttgttctgcccgtagtaagtgcttgccgtttggttgattggaactcccaagtgttcgtcggtcacatttatatagctttacctcactaggataatcataagcaaggtttccccaaaattcttagaccagttgggatcaggacccgaaggtagattgtgttggctatttgccggtagggcattgtgactccgtgatgtcttgcacctctccagatccaccagactactgctcagccgaatcgcctgagctcaagctataccaggccttcatcttctcggtgcctgtcttcttcacgttcgtcttgcttctcttcttctacctcttctacttgaggcggcgcagggccaattggcagtccttgcggatgaggacaaataatttgatacgaggagataatgccagagtgctcggtctgcctagcagaatacgaaccggacgagaggcttcagaagatacctccctgtgggcataccttccacatcaactgtatcgaccactggctctccacaaacaccacctgccccctctgccgagtatcgctccttcccgcccccaaggcaaccagcaccggactggatctggaagcacagactgcggtagaagaggagtctccgaacgcacatcatcgccaggaggagggactcgttgatgccaacacaccacaggaaggtgaggcggccggaggtgacggatcaagtagcgtccaggttgaagaactgcacggcgatgcggccgagccattggcggtgacggtggtcgctgtcgctgcgcctcaggctgacgctgaaggttcaccgagtacagcatgccaaactgttaaagggaagaaataaggatagcctagcccatcgatgtatttctattaccattgtgtgtttagctgggaaaggaaaaaaacgcataaagatggggccattgatgttatgattgccatttttctggggaggaagaagaagagcaagagttcagttgtggggaaatcttattgatacagcacttaacataaccgagattagtagtacttgtgagctgtttttcatctggtaaaccatactgtcag

SEQ ID NO: 5831 - DNA, 2313 bp, Zea Mays
ataccagcgccgttaaatttccaacgcccctgcccgtccggccgtccccacactagactagaccgaccgccaccattgcccccgtgtcttaacacggggcgaaaattcctttcgagatctcgcttctctaagcttccgcggcggcacggtgatgactatgacccccgctccggtggcgaacggcgcagcggccggcgctggcgggggcatgaagcggcggggcggtaggttgtggtacgcggccgccggtgccctcctcgtggccctcctcgccgtggccgtgagctaccgcagcttcccgggcgtcccttcctccccctcgtcacctggaagctgcggctgccctgctgcgaggaagtacacggggatggtggaggactgctgctgcgactatgagacggtggacgccatcaacgaggaggtcctgcatccaatcctacaggaactcgttaagttgcccttcttcaggtacttcaagatagtatgatgtgccaagaaggaaaaccccaggctgccgttgataaaactcttgacagcaaggttttcaaaggatgggttgaaactgacaatccgtggacatctgatgacgagactgataataatgagatgacttacgtgaatcttcaactgaatcctgaacgatacactggctatactggtgattcagcaagaagaatatgggacgctatttacaaagagaactgtccaaaatatccctctgaagaactgtgccatgagaagaaggcattgtacaagcttatttcaggattgcactcctcaatttcagtgcatattgcttatgattaccttcttgatgaatctactaactcatggggacaaaatcttcctttgttgtatgaccgcgtcctgaagtacccagaacgtgtccagaatctgtacttcacctacctgtttgttcttcgggccgtgacaaaggcagcaaattatcttgagcaggctgagtacaataccggcaatcctgaagacgacttgaaaacagaatctcttgtgaagcagttgctttacaattccaagttaagatctgcatgtccattgccttttgatgaagccaaactttggcaaggcgaaaatggtcctgagctaaagcaagagattcagaagcaatttagaaacattagtgcaattatggactgtgttggatgcgagaagtgccgactgtggggaaagctccaagttcatggtcttggaactgcactgaaaattcttttctctgttgatggggacagccatatgaatcagccattgcagctgcagcgaaatgaggtcattgcattgttcaatcttctgaacaggctctcagagtctgtcaaatttgtacatgaaaaaggatcatcaattgaagaagtcattgaggaacagatcccttcaacggttcaaaagagtgtttccatgccgaatcttaaactggacttcctctgagatgtatgagagtaatttgtagttatacaagattgcaatgacatgctggaagattaacatagacatgtacggatataacgaaagattaacatgtgctggaagcagtttcatacatacttgtgttgcagctgtatttaagagaatgagagatacagatacttttgagctaaatgcgatgacacagttaacatagcccccccgcacctcaaacttttccgtgtatagggttcctccgctgtaaatcaaaggatgtcacccctctgcactcgccatgatcaagagaatattctcgctcaacttgatcacctgaccacgaaacaggtagcgagcaaattttttttgtccatctcactattcgtccgtaggaaaaggaataacgcatttcttgactggcttttctgtaaagtatggcgaagtgctgggtgtacagttgttacaatcggtacagcccagagcagagaaaaggttaaataatacgccggggattcagtagctggataagatgctcggttaaattttgtgtgcagaaccgcgaatcatgtaccagacacgagcgtaatggtgtttgaggtacagaagctgatgcctcggccccagcaccggcaacacagtagattccttctgagttcaagcacggcaatggggatgggacatgtcggctatgtcccagaaggagctagtgggtggttacacagtagtcggagtcatggcgcagaaggcatccttgtacatggctacttttgcacagatatggctcccactcttgcagagatagatagatagatatacgtatgtcacgcgatggagcagagaaaaggctgttctcaaaaatccgtttggacacattaaaaaaaatgtctgcactggtacggc

SEQ ID NO: 5832 - DNA, 2535 bp, Zea Mays
cccctttactccgcccacacccacctattccgctattcgatctctcgttcgacctcgtctctcttccccttctgctttgccttttccccttcctctctcccctgtcccccctccgtcccagccgagcgagaaagcgaaggggccaaaaaagccgcaccggcttccttcccccacccgaagagatggaactgttctacgaactgctcctcacggcggcggtcaccctcctcgctgccctcctgctcgccacgctcttcgcagccaatgattcccatcgccggaccgatcgcgccgcagccgcgatcgccgaggaggtggcggaggaggagaggatcatcgaggtcgacgaggtgatgcgtagcgaagggatggcggcggtggcgccgtcggaggcggatgggtgggttgaggcggagaaggcgccggcggtggtcgtcgcggaggtgaaggagccggagagcttgcccgaggaggagggggttcccgtgaaggctgttcgggaggtgcgccttgctgcggaagtggaggagggggaggacggtggtggcggcgtgaagcggcctgatttgacctccgcaactgttgtggcggcggtgggtgctgaagcgagccagctggtgtcgggcgctgaggttgtgcctaaggaggtttctggtgcggcagggttggaggaacgaaccgtgcaggatgttgtggtgaaccagtatgatctgggtgctgaggttgctcttgttcccgttgaagttctcgaagcaggaccggacaagcagggagtagaagttgttggagttgcgcaagtgcctcccttggaaacagaagctgctgaagtgaaacagcaccatctcgttgccgaagcggctcctgctgaagatgttcttgacgtgggattagtggacaagagtgtacgagctatcgaagtgaggcccaacgaattggattccgagactgttcttgaagagattcttgatgcggtattggaggaggaggagcaagtagagcatgaattgcctgctggggctgctccacaaccagttctcgatgtgccattggcagggaagggagagcttaaacatcatcagcccgttgaagaagctgccgaggtacacgaggatgtgcagtgcaagcaggaagctgagtgtgaggcccaaacagttgatcaacaacaagaactggttcctgaagaggagtcggtcgcaggaaaaaatgatgatgtgaatgttatccatgaatgtagcttcagtgatgaagtggttaccgaattgcctgtgggggaagtgacatcgcaagggctgccgaaggatgaccctgaggcagacatggagtttgaggagtgggaagggatcgagaggagtgaagtggagaagaggtttggtgcggctgcagcatttgctgctagtggggctggggcggctgccctgtcaaagctcgatagtgatgtgcagctgcagcttcaaggtctcctcaaggttgccattgacggtccctgttatgactcagcgcagccacttacactgagaccctcatctcgtgcaaaatggagatctggtacagtttaagtaacagggcatcaaattcttcaatactgttagtattttttttttctagctcagagatcacctgtaggcttgcttgttaatgactctgcttggaaggccaaaagacacctttgcactagctgcagcatcgtctcggctatttgcgtagagtggtagaccaatgtgaactgcacatcaggctctgactttctgcttataagccaccagatgctaagctgacgagacaagttcaaatcattgaggcttactgaagtaaatgtcaattgatctgtttcccttgctgataaatcatgtttactgaagtctgcttggcagaagttagggaatatgaaccctgagattgctatggagaaatacatgaatcttttatcagaaacaattccagggtggatgatgaatgaaaccttggacacagagaacactggcagtttacctgcggagactatcttaacaacgatggcttctacaagtgatcaacggagcaatcaagggaatgaagataattctagcataggtgaaggtcatccaataacttcccctaacccagagaaaggccagagctctgatatcccaactgaatgaaggcaacactgataaaacatttcttgcatcagtggttccagcccattgctgggagcattatcgatgcgttcgtcataaaattagatttgtacagttgtggcggttgtgctgtgatgatgttggttcgtgtatgtatatgactgtatatatatgtttgtgctaatactactgctgcggcctgtatatttggccagttgacgacttgtcaccggttgtggtcagtagtaaatgatgagtggtaactgtgtttgttaccacgtagtttggaacgaagaacttgagcggttcaggtaaaagacttgtcgcattacaaattgttgaacttatccgatgtagggttgcattgcatagttggactgctatgctttcgagagaaaaaaaaaaacttgtcacgctc

SEQ ID NO: 5833 - DNA, 1531 bp, Zea Mays
ggtggcaacaagtatgtctagggaattccagttcttggcagcagggtgggagtgctggaatggagagggtttgtgagaacaacttcgtcccgttcatccggtcaggggagtggtctgatattggaggtcgcgattacatggaagatgcccatgtgtgcatctctgatctggcgaagaattttggttctaactcagtggatgatgaagtcatctccttctacggggtgttcgatggccataacggcaaagacgcagcccattatgtccgtgataacttgccacgggtcattgtagaagatgctgattttcctcttgagcttgaaaaggtagtgaagaggtcatttgtgcagactgatagtaagtttgcagagaaattctctcatcacaagggactctgttctggaacgacggcacttacagcaatgatttttggaaggtcccttctggtggccaatgccggtgactgcagagcggtgctatcgcggcgtggcaccgccattgaaatgtccaaggaccacaggccctgctgcatgaacgagagaaagcgcgtggagtcactgggtggctacgtggacgacggctacctaaacggccagctggccgtcaccagagcgctgggcgactggcacctggaggtcatgaaagggacgggccgggcaggagggggaggggcagggggagggcccctgagcgcggagccggagctgaagatggtcacgctgagcaaggacgacgagttcctgatcatcggcagcgacggcgtgtgggactccttctcgagccagaacgccgtgtgacttggcgcggcggcgcctccaggaccacaacgacccgcggctgtgctgcagggaggtcgtggacgaggcgctgcggcggggcgccagggacaacctgacggcggtgctggtcgcgttccaccgggacgcgcctcccagggcccaggggggccgagcgagcaggagtacgggcagcagggtcgcgccgagcatatcggccgaggggcttcacagcctccgagtgctcctggacgaaggccagtgaggcagtgagtgactgcgcggcgccattgccacgttgctgagtgagtgctgactgtaaagtagcggatttggacacagtgaggcccgtggggctgcgcggcgccagtgaggcccgtggaaaccaccagcagccaggtcagcagcatccagtgctcaaaagaatttggacacagtgaacctggatggacccatccatgcaagccaagcgaacggacaagatctggtcggttgatttcacgtcgtaccatccgatctgccataaggacatgtacagtggtgtttaatgtagagtctcttaaggtgtttaagagggttatttgcaaaaaaaaaattttagaaccgtctctccgtgaagagacgcttctggctcgtaaaccaagtagcaacagacgcctcacttcccactgtacgaatttgtcgtctgttctatcgatctgatgctatacaaatacatttaattctgtatttattaatagactatgtttatagac

SEQ ID NO: 5834 - DNA, 4176 bp, Zea Mays
cgccggccgccggccgccgcattgcccatccacagcggcagtgcaatcgattgtcttccttctactggtatccggcactttcgtttgtgttcatgtgcctcaagtaatattgctgtcaacatggtcaagggatccacaggccaccacagcaaccccatcgctccagtcctccagcatgatattgatgggtcctatctgcgcgttcgttctagaaaggcaacttgctcggattgctcacatgttctcaagccaggcgccgatgtttgtgtatggcaagcagtttacagaggagaaacaaaagattctgtactgttgtgctgccgtgatgcaaggctcatcaaaatcaagagaaaccatcaatcggaccggtgcctatgcttgtttgccgttattttctacaaagaccagtgcccaggcagcaaagaaaaagtgatatccggtacaatagctgacgtagtgacgatagacgacatctgcatcttgcagaatctccaacctgaggagctccaggatgggagcgtgcgatggaattctgcagtggactgcttccatcataacagaagcaagctgctaagtgcaagattctccctggaagtcgcatacctcatagttttgtctagcctgaggagaatggaattcaacatcaagatggtcgacggcaacatcatttaccagatcatcaaaggagaccaagcacgggatagtattgattccatgagcatacctccaggttttgggaagaacatggacataatatcattcaaaccacgtggtgaggctttacgcccaattaccagaacagttccagtcactcaggttgaagaaggcaatctcacagaagatgggtgtatcgccgtgaagggagaatctgatagtgcacaagatgtcgagatcttgtatgcgcatgtggacataagacgctcaaagcgtatgaaaactcaaccagatcgctttactagttatgatgcgcgtaatttcaaccggacctacaacaagaaagaagcagatggaccatctactaagtatgaagattcggagagcggcttgagttgtgattcatcagagcagagagaatcaagtgatgaagaggccttagaaaatccaaggtctatggcagccgagcacaagtacccagtgaaaagaaatcagtgctctttgcctgtaaaagagaaacagatctcaatggaaataaagaagaacacaacagaccaagggtgttcagattcttacattccacatacgccagcaaagaatacagagcgtccgaggtttcgactaaagccatttgcttcgtctcgaagcctagatggcaatagtgaaccagcattctgccaaaagaggggtaggaaaagaaagaaacacatgtgccaaatagagtacaagcgaatgatagaccaatgcatcggaaatatccagtgtgaagtggagagagattctgactttaagtttggtgaccagatattggatggctgtgtacgtgcttaccaagaagtggattttacgtggccatcttccgctgatagtcaagaggagaaggatgagcttgacgaattgtggaaagaaatggactatgcactggccacagtagcaattcttgaacaaaagcagatgacagattcagaagtcgttcatgagagcaatactgatttaggaaaaggaggagagcactgtcatcatgactgcatgctggacgaacagcttggtctgacctgcagactgtgcaatgttgtatgcattgaggcaaaggatatctttccaccaatgttcactggtaaggaccacgagaggcctgaaaggaaccattttggccaggatggtcatgtacttgacctttccttttttgagatttgtgctccagaattctccaaaatcaaggaatctgggaatgtgtgggcttcaatcactgatcttgaaccaaagttacttgctcatcagagaaaagccttcgaatttatatggaaaaacttggcaggatcattacagcttgaagaaatggatggttcaacaagtagaggtggttgtgtggttgcacatactccaggagcgggtaaaactcttctgctgatttcgtttcttgtcagttacttgaaagttcacccaagaagccggccattggtccttactccaaaagctgcaatccatacctggaggacagagtttcagaaatggggcatcctgcttccgttacatgtgcttcaccactctaacagaacaagcaaactgatggggggtcttagttcgaaactgcaggcggttttgaagagtttccaccagccatcgtggaaaacaatgcgcatcatgcattgtctggacaaactatgcaagtggcatgaggaaccaagcattcttctcatgacgtattcttccttcttatcgcttacgaaagaagactcaaaactgcgtcatcaggcgttcataacgaaagttttgatgaacaaccccgggctattgattcttgatgaagggcacaacccaaggagcaacaaatcaaagttgagaaagttgctgatgaaggtgaagactgaattcaggatactcttgtctggcacggtctttcagaacaactttgaagagtacttcaacaccttgtctttggccagacctcgttttgtcaacgacgttatgaccacgctggttacagaatcagaaaagagaacacggagccgaaccggcaaacatcaagaagcactggcaaggcatgtttttgtggaaagagtggggcacaagatagagtctagcagcaaacatgacaggatggatggcatctccttgttaaatgagcttactcaaggattcatcgattcgttcgaaggtacaaaactgaacattcttccgggtatacgtgtttatacccttttcatgaaacccaccgacgtccaggaagaggtactggcgaaactgctgatgcccttgtcaggcaatgcgcgttaccctctcgagtatgagctgctcatcacaattgcttctatccatccttggcttataaacacaaccaagtgtgctagcacttacttcaccccagcagaagtagctagcgttgacaagtacaagcggaactttgctgctggttgcaaggcaaagtttgtgattgatctgttgcacaagtcctcgttcagaggggagagggttctggtattttgccacaacgtggccccgatagccttcctggtcacgctcatagagatcgtctttggatggcgccttgggcaggaagtcctggtgctgcagggagaccaagaactgcatgtgcggtcagatgtcatggataaattcaacagcgacagaagagggaagaggaaggtgctgattgcttcaactacagcctgtgccgagggtatcagtctcaccggcgcgtccagactggtgatgcttgattcggagtggaaccattccaagacaaggcaggcaatcgcgagggcgttccggcctggccaggagaggatggtgtttgtctaccttcttgtggcgtctgggacatgggaggaagataaatacaacagtaacaggaggaaagcttggatcgcaaaaatggtcttctttggccgtcatttcgatgacccattgcaaaaccgtgtgaccgaaatcgatgacgaggttctcaaggagcttgctgatgaagatgagaccaatactttccatatgatagtgaaacaggactgaaaaaaaaagatatggtccctttgttctacatggttaagtgctgctatgcttttgtaattgtaatctggtggttttagctgaggaaaaagaaacctatggatatctttcgttaagactttgtgctgtaacaaggatgtgcttgccttgctaactagtcttgcatgaaatgcatattccactcggcatgatcagaacccgatgtggcgccttatcaacagcttccgcctcttcttctggtttgaatttgtcaggctttgccgatggtctcggtggttcttcggtcaactgctctatggccactgggattaccgcgtttggatcatcatccccttccgccattgcaaaagtttgttgtagtggtcccaccggacgtgccaatgagcatgagcccacaacctctatcacttacatgcacattctgaaggtttagaaacacattccactcactttttttctcgagaacacggcataattacgtatcagtatcattatattaagaagaaaaaaacgagtctt

SEQ ID NO: 5835 - DNA, 4352 bp, Zea Mays
atgatgattaaaaaaaaaagcgggcgatgccatttgttggctggacacctggagcttgaggacttgactgtggactccactccacttcctttccttcctcaaggccccaacggccaacccatcttcttcactgttcaacggcctggcactttcgtttgtgttcatgtgcctcaagtaatattgctgtcaacatggtcaagggatccacaggccaccacagcaaccccatcgctccagtcccgtttgaggcgtttcataacggatcatggcatggagccaattctataatgatacgggatggtggtttgcttgtaaaatttgtctcctctggatacgcagtcgcagtccagcatgatattgatgggtcctatctgcgcgttcgttctagaaaggcaacttgctcggattgctcacatgttctcaagccaggcgccgatgtttgtgtatggcaagcagtttacagaggagaaacaaaagattctgtactgttgtgctgccgtgatgcaaggctcatcaaaatcaagagaaaccatcaatcggaccggtgcctatgcttgtttgccgttattttctacaaagaccagtgcccaggcagcaaagaaaaagtgatatccggtacaatagctgacgtagtgacgatagacgacatctgcatcttgcagaatctccaacctgaggagctccaggatgggagcgtgcgatggaattctgcagtggactgcttccatcataacagaagcaagctgctaagtgcaagattctccctggaagtcgcatacctcatagttttgtctagcctgaggagaatggaattcaacatcaagatggtcgacggcaacatcatttaccagatcatcaaaggagaccaagcacgggatagtattgattccatgagcatacctccaggttttgggaagaacatggacataatatcattcaaaccacgtggtgaggctttacgcccaattaccagaacagttccagtcactcaggttgaagaaggcaatctcacagaagatgggtgtatcgccgtgaagggagaatctgatagtgcacaagatgtcgagatcttgtatgcgcatgtggacataagacgctcaaagcgtatgaaaactcaaccagatcgctttactagttatgatgcgcgtaatttcaaccggacctacaacaagaaagaagcagatggaccatctactaagtatgaagattcggagagcggcttgagttgtgattcatcagagcagagagaatcaagtgatgaagaggccttagaaaatccaaggtctatggcagccgagcacaagtacccagtgaaaagaaatcagtgctctttgcctgtaaaagagaaacagatctcaatggaaataaagaagaacacaacagaccaagggtgttcagattcttacattccacatacgccagcaaagaatacagagcgtccgaggtttcgactaaagccatttgcttcgtctcgaagcctagatggcaatagtgaaccagcattctgccaaaagaggggtaggaaaagaaagaaacacatgtgccaaatagagtacaagcgaatgatagaccaatgcatcggaaatatccagtgtgaagtggagagagattctgactttaagtttggtgaccagatattggatggctgtgtacgtgcttaccaagaagtggattttacgtggccatcttccgctgatagtcaagaggagaaggatgagcttgacgaattgtggaaagaaatggactatgcactggccacagtagcaattcttgaacaaaagcagatgacagattcagaagtcgttcatgagagcaatactgatttaggaaaaggaggagagcactgtcatcatgactgcatgctggacgaacagcttggtctgacctgcagactgtgcaatgttgtatgcattgaggcaaaggatatctttccaccaatgttcactggtaaggaccacgagaggcctgaaaggaaccattttggccaggatggtcatgtacttgacctttccttttttgagatttgtgctccagaattctccaaaatcaaggaatctgggaatgtgtgggcttcaatcactgatcttgaaccaaagttacttgctcatcagagaaaagccttcgaatttatatggaaaaacttggcaggatcattacagcttgaagaaatggatggttcaacaagtagaggtggttgtgtggttgcacatactccaggagcgggtaaaactcttctgctgatttcgtttcttgtcagttacttgaaagttcacccaagaagccggccattggtccttactccaaaagctgcaatccatacctggaggacagagtttcagaaatggggcatcctgcttccgttacatgtgcttcaccactctaacagaacaagcaaactgatggggggtcttagttcgaaactgcaggcggttttgaagagtttccaccagccatcgtggaaaacaatgcgcatcatgcattgtctggacaaactatgcaagtggcatgaggaaccaagcattcttctcatgacgtattcttccttcttatcgcttacgaaagaagactcaaaactgcgtcatcaggcgttcataacgaaagttttgatgaacaaccccgggctattgattcttgatgaagggcacaacccaaggagcaacaaatcaaagttgagaaagttgctgatgaaggtgaagactgaattcaggatactcttgtctggcacggtctttcagaacaactttgaagagtacttcaacaccttgtctttggccagacctcgttttgtcaacgacgttatgaccacgctggttacagaatcagaaaagagaacacggagccgaaccggcaaacatcaagaagcactggcaaggcatgtttttgtggaaagagtggggcacaagatagagtctagcagcaaacatgacaggatggatggcatctccttgttaaatgagcttactcaaggattcatcgattcgttcgaaggtacaaaactgaacattcttccgggtatacgtgtttatacccttttcatgaaacccaccgacgtccaggaagaggtactggcgaaactgctgatgcccttgtcaggcaatgcgcgttaccctctcgagtatgagctgctcatcacaattgcttctatccatccttggcttataaacacaaccaagtgtgctagcacttacttcaccccagcagaagtagctagcgttgacaagtacaagcggaactttgctgctggttgcaaggcaaagtttgtgattgatctgttgcacaagtcctcgttcagaggggagagggttctggtattttgccacaacgtggccccgatagccttcctggtcacgctcatagagatcgtctttggatggcgccttgggcaggaagtcctggtgctgcagggagaccaagaactgcatgtgcggtcagatgtcatggataaattcaacagcgacagaagagggaagaggaaggtgctgattgcttcaactacagcctgtgccgagggtatcagtctcaccggcgcgtccagactggtgatgcttgattcggagtggaaccattccaagacaaggcaggcaatcgcgagggcgttccggcctggccaggagaggatggtgtttgtctaccttcttgtggcgtctgggacatgggaggaagataaatacaacagtaacaggaggaaagcttggatcgcaaaaatggtcttctttggccgtcatttcgatgacccattgcaaaaccgtgtgaccgaaatcgatgacgaggttctcaaggagcttgctgatgaagatgagaccaatactttccatatgatagtgaaacaggactgaaaaaaaaagatatggtccctttgttctacatggttaagtgctgctatgcttttgtaattgtaatctggtggttttagctgaggaaaaagaaacctatggatatctttcgttaagactttgtgctgtaacaaggatgtgcttgccttgctaactagtcttgcatgaaatgcatattccactcggcatgatcagaacccgatgtggcgccttatcaacagcttccgcctcttcttctggtttgaatttgtcaggctttgccgatggtctcggtggttcttcggtcaactgctctatggccactgggattaccgcgtttggatcatcatccccttccgccattgcaaaagtttgttgtagtggtcccaccggacgtgccaatgagcatgagcccacaacctctatcacttacatgcacattctgaaggtttagaaacacattccactcactttttttctcgagaacacggcataattacgtatcagtatcattatattaagaagaaaaaaacgagtctt

SEQ ID NO: 5836 - DNA, 1165 bp, Zea Mays
cacgcctcctggcaccaagtagttttccttgctcctttttttttttctctctctctataaaaacaaccgaggcgccactcagccggagaccatgtcccactcccctctccctcctccagtcttccaaaatatctccctgcgcttttccgagtccttttccctccaaggaacagaaacaaccggagcttttaccccacccgctttcccctccccgccaggaacaacagggctcctcgcaataattcgtccatccatggcgaagctcgtcaacaagctggtcgattcgttcgaccaccacgaggcgccggcgccggacgtcggctgcgtgcgcgccgtgctggccgagctcgtcctcaccttcctcttcgtcttcaccggcgtctccgcctccatggccgccggtgaccccggtgcacgccctgggcgctggcatcagcccgatgcagggcctggtgatggaggtgatcctcaccttctcgctgctcttcgtcacctacgccatgatcctggacccgcggagccaggtccggaccatcggcccgctgctgacggggctcatagtcggcgccaacagcctcgccggcggcaacttcaccggcgcgtccatgaacccggcgcggtccttcggtcccgccatggccaccggggtctggaccaaccactgggtctactggatcggcccgctgctcggcgggtccctggccggcttcgtgtacgagtcgctgttcatggtgtacaagacgcacgagccgctgctcaatggagacatctgacgaccgtcgggcccccagggcagtgagcacggttcatgcttgttttctgtaaaatagttcgttacctacaagcatgatgcatatattgaccaaggtaattaataggagagggttgctgttaccctggtgggattgtgggatgtagaaattgttgctgggctttgcttttttttttacttttcctcccaaggaattttttaagagggctgggttctgtaaaggatttgtttaggctattagttagctatgtagtagaaaactagagaatgctatacgttggacgtgattttttttcacgtatattgttgtacgatatggtattttttatcttccggatgaaattggatgtacatagcataattttttttgaagcagtatttatgctatcatcg

SEQ ID NO: 5837 - DNA, 1768 bp, Zea Mays
aaaatttggaaggggaatggtcggagagagaaagcttcctccctcttccctggtctggtcgcttctcctgtagctgtaatttttgagagtccctctcaaactttgcttgcttgcgctctccatatatcctgtggatcggagaggatgctctgatctacctgtctgttcttcgatcgagtctgagagatttgggaggaggagggaaacaaagcgaaagagcccatcttttttgtctttttggttcggtttcgtggttgcttcttttggaccccgcggaggagcccaccgtttctacaaaaacccaatctttgctgccttctcagcggtcgagatcgataggtttccagatctgaggctccgtgttctggctgtgagatcggaggcgcagcaatccgagcacgcagctagtagggaaagtatccgagaaaagttgcagattttgctgggggcaacggagcgagaacaagttactgcagaaggaaagggcaaaggtgggggaggcgccggagatgagggatgctatcagctctgatggattatttgaaatcttgctggggtccggcatcaccggctgggcgtccccgcaaaggatcggatgccaccggccgccaggacgggctcctgtggtacaaggacggcgggcaggtcgtcgatggtgagttctccatggccgtggtccaggccaataacctattggaggaccatagccaggttgaatccgggccgcttagcacatcggagcctggactgcaaggcaccttcgtcggggtctacgatgggcacggtggcccggagacagcgcgttacatcaatgaccatctcttcaaccacttgaggagattcgcatctgagcacaagtgcatgtcagcggatgtgattcggaaggcattccgagcgactgaggagggtttcatttctgtgataacaaggtcaattggagatgtgtatctgaagaaaccagaatttaatagagaacctttgcacagcaagtttcgtcttcaggaaacttttaggagaccacttcttagttctgatccagcaattactgtccaccaaatacagccaactgataagttcatcatttttgcatctgatggactctgggaacatcttagtaatcaggaagtggttgacatggtccaaagtagcccgcgtaatggaatcgcacgaaagttagtaaagtctgcagtgcaggaagcagcgaagaagagggagatgcggtattcagacctcaagaaagttgatcggggggtgaggcggcacttccacgacgatataactgtcattgtggtatttttcgattcaaacgccatgacaactgctgcctggagcagaccctcggtctctctccgagggggtgggtttccaatccattcaaacacccttgctccattctcggttcctacagagctaaacaactcctactgaaaccacgcggtatgtgaaggagccaggcaagaggataaaaaaaaagtaaaggaaaacggagaaggaaaaacagctgttgtgatcagttgtagtgtatttcaccgttcatgttcatttaaaacattttttagattctcaagtctcaacctggtgaccagtgcactgatagcaaggtataagattagattattcttagcttttttatcctcttttttttttctcgtccttaccctttagattcactcatgggatatccgatatcaggtgcttgtacattctttggttcaacttgtgataatagttcatcgcccccctcttttcgccatacagcgttgttccg

SEQ ID NO: 5838 - DNA, 1791 bp, Zea Mays
gctttgctaattgctctaggagagcatcccacgacaacgatagatctcttgtctccaaattgcccgctgccccctggcgttcccctcccccgcgtcgtcgtctcttctctccccaaaaggatcccccaaaccctaccgccgatccgggcccagatcgccatggccgcccccaacagcaacgacgcggccagcgccagtggcaccggcccggctggtgaggaggacatctccatcgaggcgttggcgcggcgcgtgcaggagcacatgaccctcagttccaaccccgccgctcgccgccacaagttctgggaaacgcagcccgtcggccagttccgcgacgtcgccgacacatcgctaccggacggccccatcgagccgcccacgccactctccgaggtgcgcgccgacccctacccgctacccgccgccttcgagtggctcacctgcgacctcgatgacgacgcgctcctcgccgacctctactcgctgcttgcccacaactacgtcgaggacgacgagaacatgttccgcttcaactactctccggccttcctccgctgggcgctcaagccgccgtccttcttccgggcctggcacatcggcgttcgcgccaaggagtccaagaagctcgtcgccttcatctcgggcgtcccggcccgcatccgcgctcgggacgacgtcgtccgcatggccgagatcaacttcctctgcgtccacaagaagctccgatccaagcgcctggcgcccgtgctcatccgggaggtcacccgccgcgtccaccaggagaacatttggcaggctgcatacaccgcgggggtcgtcctcccaacccccatcaccacctgccgctactggcaccgatccctcaaccccaagaagcttatcgatgttgggttctctcgccttggtccacgcatgacaatgagccgcacggtccggctatacaagctgcctgacgcgccgctcacccctgggttccgcagaatggaactgcgggatgttgctgcggtcacacggctgctgagggcttaccttgcgaggttcgtggtggcaccggattttgatgaggtggatgtggagcactggctgctgccgcaagaggatgtcgtggacagctaccttgtggagagccctgagacgcatgagaagaattacgatgtgttcaatgctctcgatgtcatggagaatgagtcgttcctcaaggagctcaagtttggtcctggagatgggcagctccactattacctctacaactaccgtattcgcaatggcatcaagccctctgagcttggtcttgtgctactatagggcagtctaatcaggacagtcctgagtttacaccttcccttccgcagcaggtctcattgtgcaatcccagtggtttctcattttgcctactgtggtagtgattctccttgatatgattgccatggtcactgataggagtcccaagatgatttgcaaacaagggagactggaattagagatatcctttcctcaatttaaggttactgttcccattagtgacatttcgcgtgcatcgtccacaatgtgtatgctggcaccgattttaccgagaaattttgatgtgtattcgaagttgtttgtgtgctgttgtgctatgtctgcacatgtatggatgtcttgatgctagaactgctgccacagctccttcagccctacccaaattttgatggtttctttttattatgaacaagttctattagtttgccatttgatttgctttgtccagattccaaaataaccagaaatgtacttatcgtgtccttc

SEQ ID NO: 5839 - DNA, 1946 bp, Zea Mays
tatctcagaaaatgggaaaataaaaaaactattaaaaagtgcgtgtcagatttacgaatttaatctttagaaattagaatgtcaattgtgcaaagccagttatttagggtgtcaaaaatacaaatttctcctcccgaacaccctactcgttctcccccatcggcgccgctacgaccagcgtttgagccactcgccgccgcgcacgatcctccacgccttgctccagtcctcgtcggcacgcctccttcccaaccctaaccctagcactagcagtcagtcgagcggcggcaagtcaagggtctgtcgagcgggccggcggcgaagaagtgtctagcgaggcgagtcaggtgcagggggacccacccgcagcggtggcgtgaagcgcgtttgactggatcgaccaggttggcggctaaacagaggaggttgcttgtttgttttctccgtccggctgcggttttcctttgactggatcgatcagatttgccggcggcggcagcggtcccccggcaaaggcgtggggatccctgccgggatggaggtgccgtggctgctgctggtgcacgggtcagtgacggcgctggtggtggtgtcgttcctctgcgggcaatggcccatcttcgagggcaccttcatccagagcatcaaccacttcctcacctttggggcctaccactacctcctgcggtttgtgcagtctgtgtgcggcactggggctagggatctcgtcctcggtgtcgagggatactgctgcgaccgacccaacccgatattgcaggtattttatgttgccataattggagtgacatattttataatagtgcagacatctttccagtatattcctgggtattatgtgagtggattgcacagatatctgagtgttgtggctgtttctgttggtgctatactcttcgtgcttactagcttttctgatcctgggactgttactgctgaaaatgtttctcaatacgtatcttcctacccatatgacaacattatttttgtggagaaagaatgttcaacttgcaagattactaggccagccagggcaaagcactgtagaatatgtgacaagtgtgttgctcgattcgatcaccattgtggatggatggtacttgtacttactaattgatggcatttccttatatgtctgtacggggctttaatccttggcttcattcttgctggtgaaataaaagagcggaaaattatatacattctgacagtttattatggcatcgataattcattctcgggcttgtttccacatgttgcacagtggttgcttgctgtgcataacactcagatactcttgagtgtatttttggctatattagcactgctccttggtggcttttgtgcttaccatgcacatctttgtttgacaaatacaacaaccaacgagacattcaaatggcaagactacatcatgtggatgaaaaaggaaaatgaagcaaaggcggacgctgccacgctcagatccagcataggctcggccaatagtgatgcacagaaagctcctccaagcaaatggaggacgttcttcatgagatcccgcacaccaagcatggaaccagttgtgagaaacaacatatatgacagaggcatgattacaaacctgtgcgaggtggtcgtccctttatcagaacggaaggcattttcccgcatgaaatcagattgatgtcttttgttgcagttgctttgtcaccaaactgttgttgtatatcagtgtagaatttgcgacacattttttttggtcataccatagaggcataggggaaaatattcaggataatcgtgttcagtacctacgacctatttattataggtgaaaggttttgaagttgcatttgcctttgcaatacgccgatgtcactattctgtttttagaacatgattctgaaatggcactaaatatgaaactcatactatatgtcttcgag

SEQ ID NO: 5840 - DNA, 2153 bp, Zea Mays
ctggcagtcgcgtcgacctccccgccgcgcccacggcactcgccactccacccaccaggccaagcacgcggcggcgacgccaaagcatcagggcaccaatggttgtgctccccgcggccccgcggcccctactcctacagtcctaaataatagccttccattccaatctgttcccacagttcagtcgcacactcgggcgggtcaaattcgactcgggaggaaccaaccacccggaaattcccccctcctccagtctccacttgatcggcgaggcgctgcggccgcgggcgaatggcgtcggaggcggagtcgcccgtggtgatccacgcgtggtcggcgccgcgctccctcagcaccagcctcatgtactccttcgcccagagggacgacatggaggtgcttgacgagcctctctacgcaaatttcctgcgtgccacaggcgtcgacaggccctaccggcaggagctcctgtccaaaatggaccctgatggaaataaggttgtcaaggaggtgatttttggcccaggggacaaaaagtatcgttactgcaagcacatctcaaagcaacatctcccaaatctgtcaagcgacctcatgaagaagggaaaacatttcatattgatacggaaccctctagatatactgccatcttttgataaagtcgttccaccatccttcatggagcttggcataggcgaacttgtctcaatatacagtgaattatgtggacttgggagcccaccccctgtgatagatgcagatgatctgcaacaggatcctgagatgggaagctggccccaaggaatttgatggtatatgggcaccctggtggtatgggagtgtgcacaagtcttcaggtttctctaagcctcgccaatatcctctgactttcccattcgtgttttatgacctgcttgagcaaagcttgcctttctacaacatgctgaagcgccaaataaggaagataagaggaccgcagcaaccaccattatcggaccctcctctgcctgtccctgcaaataaaaacattcttgtttgggttggagatgaacttttgccccgtaacagtgcaaaggtttcagtgtttgattcagttgtacaaggaggagatgctgtttgggaaggtttacgtatatatgatggaaaagtattcaaattagatgaacatttggacagattgtttgattctgcaaaagctatggccttcagcaatgtgcctactcgtgattggattaaggatgccatctttaagactctgattgcaaatggaatgttcaacaatgctcatataaggctcacgctcacccgtgggaaaaaggtgacatctggaatgagtccagctttcaatctttatgggtgtgccttgattgtgcttgcagagtggaaaccaccagtttatgataactctcatgggataaaattggttactgccaccacacgtcgaaattctccaaatagtatagattccaagattcatcacaacaatcttatcaacaatattctggcaaagatagaaggtaatcttgcccaggctgaggatgccattatgctagataaggatggctttgtatcagaaacaaacgcaacaaatatttttatggtcaaaaagggaattgtattgacacctcatgctgactattgccttccaggcattacgcgagcaactgtcatggatcttgtggtgaaagaaaactttgtgttacatgaacgacgcattagtctgtcagaattccatgctgcagatgaggcgcggacgcgcatggccaaggtgtgtgttgctgctgccgcggcacagatgccactgcagcacatgtcgctgctgccgcagaagctgccctggacgctaccgctgcaggcacagtcggcttgggcatgggttctttccccacactcctgtcgcaaccccttcctcctggtctcctccggtacgatggcgccttgtcagtgccgctgcgggccgctatcccccaacgactcttttaccgcctacttcacccttgttactaccattgccacccaagtatgttgtcgttgctcgggggtgttgtgatcaccgacactttacttgagtccgatgatatcaaggtttcctaggcatatgaggcagttgccatcgctaacctacatgctcagtggactagtgtacacaacat

SEQ ID NO: 5841 - DNA, 1796 bp, Zea Mays
gggtcatgcacgtttatctcttcagggaattggcatgagtagggtaacttgaatttgatcacacaagcattggaagcagttgggcgtaagatggaagttctacctgacccttctacagttcatttccatctacctggtgatctctctgtccttgtgcatcgaaagtatgaagacttcatcaatgaactgatcagcaaattccctcacgagaaagaagggataattaagttctatggcacatgctggaagcttattatttgccacagaatgctggggatattgctcgcaagttcataaaagatcaggagctactctccttcatagatgctgagtgttttattgtgagcacagtcaatgccttgcaaacacccatgataaatgcaagcatggtcttgtgcgataggcactttgggggaattaattatccagttggtggcgttggtggtatcgcattatccctggcagatggccttgttgaaaagggcagcgaaatccgttacaaggcgaatgtaaccaatgttgttcttgaaaatggaaaggctgttggggtgaggttgtcaaatgggaaggagttctttgctaaaacggtgatatcaaatgccactagatgggacacatttggaaaactcttgaaagaaaaagaacttccagaagaggagaaaaactttcaaaagaattatgtcaaggcaccatcattcctttcaattcatatgggtgtcaaagcatcagttcttcctgctggtactgactgccaccattttgtacttgaggataattggaataatttggaaaaaccctatggaagcatatttttaagtattcctacagttcttgatccatcattagctcccgaaggacaccatatacttcatatatttactactgcaggcatagaagcctgggagggtatttctaggaaggaatatgaagagaaaaaagagatggtggccaacgagattataagaaggcttgaaaagaagttgtttcctggtcttcaagattcaatagtcctcaaagaggtaggctcaccaaagactcaccggagatttcttgctcgaaatgatggtacatatggaccaatgccgcggggtaaacccaagggcttacttgctatgcctttcaatactacttcaatagatggcctttactgtgttggtgacagctgttttcccggacaaggtgtaatagctgtagcattctcagggatcatgtgcgctcaccgagtcgctgcagatattggactagagcaaaaatctccggctctagatgctggtcttcttgggctactcagatggttgagaacacttgcatagaacgatatcagacagttgaaaatggacttcatttttccccccggaaggctgatgtttcaccagagttaggattctgcacgatctgttatgatgatcttgttatctgtaccatctcagcatcgatttcttgaaactcctaacggaaaaaaaaaggaatacgaatgggtgtacaggtttcagattttgaattatatgattacggtgtcagggccatggcatattggtatgcatataaagactacatcatagagtaaccagatggtgtacatcatctgattaccgcaataagcagagcactacatttgggagcaatgtaaatcatgttacctaggattttgaaagttctgttttgagatacccttcaactttctgaatatgcataagcttcattgttcgtaaggcatgatgaaacctagaatgacacatcgtctaagaaaatttaaaactatgatgaaatagtttcacatattgcctagttttatc

SEQ ID NO: 5842 - DNA, 1970 bp, Zea Mays
cgaagagaatcgaggattattatcgaataacagaacaccacttacctggtattcatgcgtcgaccatcaccggcgacggcgtatctccgtgctcacgtcccggcgtcccgagccggcggccacgggccataacagacccggaggacatcaccagcgcgagcgccgccagccccaagcaccgaggccgagccgcccgagcgcggagcggcggtaccacgccacccgcccgccgccgcccgttgcggaggctgtgcagcacagccgttggggtgccgaggcaccgatcaggctgcgcaaccgccgaagtcggcctccgggtggcgccaagctgcagagcagcgcgccagcgcccctgtatcggactacctttttcggcgagaccaccctagtagaggatgatatacaccgcgattgacacgttctacctgacggaggagcagctgcgcaactcaccatcacggaaggatgggatcgacgaggccactgagactgtgctccgcgtctatggctgcgacctcatccaggagagcgaccacaagcagtgatggccacggcacaagtattgttccatcgcttttactgcaaaaaatcatttgttcgatttagtgcaaagagagttgctgctagttgtgtttggctggcagggaagttggaggagagtcccaggaaatcaaagcatattatatttgtcttccatagaatggaatgtaggagagagaacttgccaattgaattcttagatgtcttttcaaagaaatattcagaactgaggcgtgacctgatacggacagaacgacatctgttgaaggagatggggtttatttgccatgtcgagcacccccataagttcatatcaaactaccttgcaacacttgaagcccctcccgagcttactcaagaggcatggaaccttgccaatgatagcttaaggacaactctgtgtgtgcgatttaagagtgaagtagtagcatgtggagttgtgtatgctgcagctaggagacaccgggttccccttcctgaagatcctccgtggtggactgtctttgatgctgatgaagcaggaattcaggaagtttgcagtgttcttgctcacctctacagcctgcccaaggctcaatacattccagtgtataaagaatatgattcctttactgttaagagaatctctgatccacaggctttaaaggaaagtccagcaagggctgttgctagcgataagggtacccctataccctcaagttctaaccaggagaaggattcagtggctaagactataccgaatagggtgaaggaaaaaagtgatgacgaaggtagacacttgcctgctgaatttgatggaaaagaaaacctggtggtgaactcaaaaattgagaagtctgattctggtgttgactggagtcgagaaagagaaagagaaagagagagatcaagagggcgggaacgtgatgctaggggtagggattctgatcatgatagcaggggtcgtgactctgatcgcgagagggatcggagacgtcgctctagggatagaagttcaggacactcagacaaggagaaatcaaggcgccatccatcacacgaccgagttgactactacagttcgcattcatctcgtgaaaaagatcggcatagacaccattgatcaaggtgaggaggatcccgggtttgcagggctttgctgcatggagaccaccacatggcagtgccgacagaatcatgaaaacttgtagattgtcatctcattggcggttgcatttgcttcattgtgttttgcaccttggattgtaacttgcagagcaacatgaatttgtagaaccttcatctccactagttcccaaaattctcgagaattaatttagggtgttactaataaaaaatcatcctctaaccgttttttaaataggtttcaaatatacgaacttcgtaaatattcctatttactctctagacttggggggcctcttgtgaac

SEQ ID NO: 5843 - DNA, 1813 bp, Zea Mays
cgtgttgaagtcatagtggccagtgggggtggaccggacgcctggaccgcagatggcgtatcaaaaataaaaattcgatgccgccaaaaagctaatatatgggagggatatgtatttccttctccgatatgttaggacggcagttcccacaacatcttccccaacctcgtacgagccggctgcgagatccaacgacctccgcacggcagttccattagagatgcctctagggaagagatccacacgactatcctagaaatccgaagaaatcataccaaggtcaaatagaatgggcaggcaacttgaatcgttaagcagaggactgggaatcaagattccaacccaaatcactgaagggaacaaaagccagagccacctattcaagctactaagtttgcattagagggatggtcgccaaggccagggatttactgtcgaggtgtacaagtccatggcagtggctgtttgtgcagattagaagctgatgagggagtctcgtagcagaacttcaatgttgagatgtactgacttaactatgttcatgtagtatatcatgttactttttttattaaactagcaaaaggttgtgttaataattcatggtgtactaaatgtgataccatcttcattttgtctaattggatgattaatgccatgcacattaaagatggaaaagctacctatgtatcaagatatgtgaagactgcccgcctcaaacaagaggaatattttggtggagcgaagtttatgaagggcatggaggtactgctggtaacaagttctgaatgtcattaggtctaccattgatagctactgtgaattgtgctggtaacactggagccaagaacctctacatcatttctgtgaagggaatcaagggcgccttaacaggcgtccttctgcctgtgttggtgaccatggagaatggaaagcctaaccttaggaagaaggtgatgccagctgtcattgtgaggtagcgcaagccatggtgctgaaaggatgacgtctacatgtactttgaagaagcaagacaaatataaggatgctgaacctagtgcaatagatctttttaaggagatgcattgcagcaaaaagaaaggttttagcaaaaatgttcagaaagctattgttgatatggaagaaatggtggtaacatcagttcaagatggacaacaaccaaaatatcctacagaagttgtttatagtgtgcaactgggctccagtgtgttcttatgcaatcttggtctttagtccgtctccaagaaaatctcaacatcaatagtttctataaaggttcaacaacttcaggatcgactggaggccaagaagcaagaaaaagatagactttgggaagaagtgtaaaccttaaatgctcaggcagtcatctcaggagaccattgatagtatgaagaggtcgaccgaagaaaataacaatctccttagtcaactattaagcttcaatagaggccaagtgcctccatctcaagtctacttaaccattataggatctgcagccttatggttgctatagtagctagttacaatagctctggatttgaagagtagctctggatttgaagttataggattattttcaattaagcttaatgtttaattccttgagttgaagttataggattttctttggatcttatgtaaaaggatttgtagatatatgttttgaagttatatgattctttgttggatgaaatatttgtgttaaacaaattcataagatattttggttgtgatgtgtaatattctatgacgatatgaatttatatgacatgttccttctgatgacgattgtatc

SEQ ID NO: 5844 - DNA, 1871 bp, Zea Mays
cgtgttgaagtcatagtggccagtgggggtggaccggacgcctggaccgcagatggcgtatcaaaaataaaaattcgatgccgccaaaaagctaatatatgggagggatatgtatttccttctccgatatgttaggacggcagttcccacaacatcttccccaacctcgtacgagccggctgcgagatccaacgacctccgcacggcagttccattagagatgcctctagggaagagatccacacgactatcctagaaatccgaaggtaattttgtttaactgttcatctttgttcgtcactcactggatctaggcttgaaaggcagcacgcaatcttgctgggccaatcctcaatccttgacacccccgccacacctccagaggccgcaagccatagccgacgaccgcccactgcaccgccggttcggtagccatcgcgccttgtccgcttctccatgcctcacctcctcctcttctctgttgcctgcctcgtcctcaccatcacggcgccgcgcgtatgactcgcgagcgcctggcgcttgcttctctcaatcgcttccgatcctggagctggcggctggccacccacccggtgcgcccgtgcgagcttttactgctccctccccttacggcctcataggaaccctcgttatggttgtgtcctgatgctgctcaggcttgccgactcgagaccggggtacggttgattttattactgcctctggcccccttgctgctatagctatatactagtcaatagtcatttactcctgctagtatgagctagtagcattcaacactactggaattcacaattattgtgttcattagggacataattagatacaactagcgtagctttgaaagccgcctaaggggccagtactattggttaatccattcagtaacatttctagctgtggtatgatcagttaatatgttgcttgtgtggctagtgttccctacattttctgctaataaggttacttgtatgatattttctatgattagtaacatttctagctgctagcctgctaccatggtatgatcagtaacattttctgttgccttccactgtggccgcgcgaatgactcgctccgagccttcagcggcctcctcgctcggcaaattctccgccgacgacagggagaaggtgctcactgccgttggagtacacacggcgatatctattgcacaacctacttcccagatacaggaggagggtgataaccacactgggaatcaagaaatcataccaaggtcaaatagaatgggcaggcaacttgaatcgttaagcagaggactgggaatcaagattccaacccaaatcactgaagggaacaaaagccagagccacctattcaagctactaagtttgcattagagggatggtcgccaaggccagggatttactgtcgaggtgtacaagtccatggcagtggctgtttgtgcagattagaagctgatgagggagtctcgtagcagaacttcaatgttgagatgtactgacttaactatgttcatgtagtatatcatgttactttttttattaaactagcaaaaggttgtgttaataattcatggtgtactaaatgtgataccatcttcattttgtctaattggatgattaatgccatgcacattaaagatggaaaagctacctatgtatcaagatatgtgaagactgcccgcctcaaacaagaggaatattttggtggagcgaagtttatgaagaatcatattgttacgttgaattgctagactctgttcctgcttgtacacttcaatgctttgcttggtgagtgatatgcaaacctgtggacttgtagagtaatagcattatgaaaacataagcctactttgaattag

SEQ ID NO: 5845 - DNA, 1357 bp, Zea Mays
agagggcgtcgcgatcgcaaccgcccgagcccggccggtcccatcatcgacgccagtgtgcattattacgccccgccatcagccggccggcaactcgacagggaaaaggaagacgcaccgctagagctgagatgtccttcttcttccgcatggcgtcgcggctgcggccgtcgacgccggaggaggtggtgcgctccatcaaggactccttcctcgcgctccacacgcgcacccacgccaaggctctggaagaggtcgagaaaaatatgtcatccttgagattgttgatctttggtgatggagaagtcgaaccaaatgaagagcaggtcctgcaaataacccttgagatttgcaaggaggacgtcatttccctgatcgtccaggatctgccttccttgggctggggagtaagaaaagatctggctatctgctggtgcatcttgcttaggcagaaggtcgatgaaacttattgctgtgtgcagtatcttgaaaatcatctggagcttttagatttccttgttggttgctacaagaacttggatattgcattgaactgtggaaatatgttaagagaatgcataaagtaccctacacttgcaaaatacatattggaatctggtagctttgagctgttctttgagtatgttgagcttccaaactttgatattgcttcagatgctctgaacaccttcaaggatctgcttaccaagcacgaagttgtagtcgcagagttcttgagttcccactacgagcaggctcttgtcatcaactaattatgtaacaagaaggcaggcaatcaagttcctttcagagttcctgctagagactcataactctcaaataatgaagagatacattgtggaagttcgttttttaaatattatgatcaatctactaaaggattcaagcaaaaatatcagaatatgtgccttccatgtttttaaggtatttgttgccaatccgaacaagcctcgatgtatcgttgtagctttgctagacaatcgtagagaagttctgaagctactccacaatcttccttcaagtaaaggcgacgatgaactcgatgaggagaaagacctaatcattcaggaaatccagaagttggcataacacaaaagcatcaagttatcgtttagcaatgcaagactctccttatagaggacatattgccaaggccagaaccatgtatatcacattgcacatgtagccttcaagagttgtatttttggaggttttttcttttcttttggtctcagaaaaccatagcaaagtattctctttttgaaggaattatatacatgattttggtgaccaaggaccaaaaaaaatcaaactgaaataaagaaaatatgaaaaa

SEQ ID NO: 5846 - DNA, 1631 bp, Zea Mays
agagggcgtcgcgatcgcaaccgcccgagcccggccggtcccatcatcgacgccagtgtgcattattacgccccgccatcagccggccggcaactcgacagggaaaaggaagacgcaccgctagagctgagatgtccttcttcttccgcatggcgtcgcggctgcggccgtcgacgccggaggaggtggtgcgctccatcaaggactccttcctcgcgctccacacgcgcacccacgccaaggctctggaagaggtcgagaaaaatatgtcatccttgagattgttgatctttggtgatggagaagtcgaaccaaatgaagagcaggtcctgcaaataacccttgagatttgcaaggaggacgtcatttccctgatcgtccaggatctgccttccttgggctggggagtaagaaaagatctggctatctgctggtgcatcttgcttaggcagaaggtcgatgaaacttattgctgtgtgcagtatcttgaaaatcatctggagcttttagatttccttgttggttgctacaagaacttggatattgcattgaactgtggaaatatgttaagagaatgcataaagtaccctacacttgcaaaatacatattggaatctggtagctttgagctgttctttgagtatgttgagcttccaaactttgatattgcttcagatgctctgaacaccttcaaggatctgcttaccaagcacgaagttgtagtcgcagagttcttgagttcccactacgagcaggtcactacttgttctgaaatacacctttggttatgtcaacaaaagaaaggcatcagaaaacttttttagataaagtttcattaaagcatatactccttgaatctatattattcatggcatactcacgtatgcattatatgttgttgcttcgctaatgtcttattcaaaaaatgtattgcaattgtgtcaatacctgcatgccagatatattctgtttgtttctgtttatcactctgattatgtaaactttatagttttttgaactctactcaaggctcttgtcatcaactaattatgtaacaagaaggcaggcaatcaagttcctttcagagttcctgctagagactcataactctcaaataatgaagagatacattgtggaagttcgttttttaaatattatgatcaatctactaaaggattcaagcaaaaatatcagaatatgtgccttccatgtttttaaggtatttgttgccaatccgaacaagcctcgatgtatcgttgtagctttgctagacaatcgtagagaagttctgaagctactccacaatcttccttcaagtaaaggcgacgatgaactcgatgaggagaaagacctaatcattcaggaaatccagaagttggcataacacaaaagcatcaagttatcgtttagcaatgcaagactctccttatagaggacatattgccaaggccagaaccatgtatatcacattgcacatgtagccttcaagagttgtatttttggaggttttttcttttcttttggtctcagaaaaccatagcaaagtattctctttttgaaggaattatatacatgattttggtgaccaaggaccaaaaaaaatcaaactgaaataaagaaaatatgaaaaa

SEQ ID NO: 5847 - DNA, 2028 bp, Zea Mays
agagggcgtcgcgatcgcaaccgcccgagcccggccggtcccatcatcgacgccagtgtgcattattacgccccgccatcagccggccggcaactcgacagggaaaaggaagacgcaccgctagagctgagatgtccttcttcttccgcatggcgtcgcggctgcggccgtcgacgccggaggaggtggtgcgctccatcaaggactccttcctcgcgctccacacgcgcacccacgccaaggctctggaagaggtcgagaaaaatatgtcatccttgagattgttgatctttggtgatggagaagtcgaaccaaatgaagagcaggtcctgcaaataacccttgagatttgcaaggaggacgtcatttccctgatcgtccaggatctgccttccttgggctggggagtaagaaaagatctggctatctgctggtgcatcttgcttaggcagaaggtcgatgaaacttattgctgtgtgcagtatcttgaaaatcatctggagcttttagatttccttgttggttgctacaagaacttggatattgcattgaactgtggaaatatgttaagagaatgcataaagtaccctacacttgcaaaatacatattggaatctggtagctttgagctgttctttgagtatgttgagcttccaaactttgatattgcttcagatgctctgaacaccttcaaggatctgcttaccaagcacgaagttgtagtcgcagagttcttgagttcccactacgagcagttttttgaactctactcaaggctcttgtcatcaactaattatgtaacaagaaggcaggcaatcaagttcctttcagagttcctgctagagactcataactctcaaataatgaagagatacattgtggaagttcgttttttaaatattatgatcaatctactaaaggttattgtgcatgcatcatcacaggtgaaaatcttttgggtaggtttacttcttgaactatatttgtatctacacaacatttaaattttgagttcttaaccaatttaagtactcccttcggttgttttagttttgttctaggttaaacttatccaactttacaaaataatgcgccaacatttacaacatcaaactagtttcgttaaatctattatgaaatgttcttaatagcgaattcatatatattaatataatatatttctaaatttgatcaatgtcagagaagttggtccttagagaaaactaaaagacttgcattatgtaatggagggaatatctgttataatagatcccttccttgataagatgggtgataattacataccttatggtatggttgagagcgaaaaaaacatgggtaataatagttgttataggtcagcaatgtaattcctaatcttccataaaacagcacatcctatctaaagtgtttcagcagttctttttgtgtcatgaagtgtgttcagctagtttattattttttataaatacattgtaacatatggtatcaatatgcatagatagtcaacttttcatgcacttaaaaactatcttgtagctcctgtttcttctaacctgcatcttctgtaggattcaagcaaaaatatcagaatatgtgccttccatgtttttaaggtatttgttgccaatccgaacaagcctcgatgtatcgttgtagctttgctagacaatcgtagagaagttctgaagctactccacaatcttccttcaagtaaaggcgacgatgaactcgatgaggagaaagacctaatcattcaggaaatccagaagttggcataacacaaaagcatcaagttatcgtttagcaatgcaagactctccttatagaggacatattgccaaggccagaaccatgtatatcacattgcacatgtagccttcaagagttgtatttttggaggttttttcttttcttttggtctcagaaaaccatagcaaagtattctctttttgaaggaattatatacatgattttggtgaccaaggaccaaaaaaaatcaaactgaaataaagaaaatatgaaaaa

SEQ ID NO: 5848 - DNA, 417 bp, Zea Mays
ctcctgtttcatttccatataacaaaacgcgtgggagctattgagatcgtgcgtgctgtacgtgcatcctccatatgtcgcttagaactactgcttggctatcggccaggccagggcaccaccagccggtgcagtgtttgtcgtcgccggagaaaccacgccgccggtcggcgaactaccagcccacgtcttgggactacgacgctcttctgtcacttgattctggcagacctggtgatcagggggtaattcaggtgtccctaattatcgcccccgacagttctcaaatacacttatcgatacggaccaacgttcgatccaatgcggtctacgccgatcggaccgactaattgaaaaacctacctaccgacgggccaaaccaattggtcttgaaagcggcacaatcgttaccaatta

SEQ ID NO: 5849 - DNA, 1613 bp, Zea Mays
ctcctgtttcatttccatataacaaaacgcgtgggagctattgagatcgtgcgtgctgtacgtgcatcctccatatgtcgcttagaactactgcttggctatcggccaggccagggcaccaccagccggtgcagtgtttgtcgtcgccggagaaaccacgccgccggtcggcgaactaccagcccacgtcttgggactacgacgctcttctgtcacttgattctggcagacctggtgatcaggtccatccttctagttattataagatgaagagaaggataagagatatgttgctcaagaaagtagaaccatcttctaaacttcagactattgatgcaatgcaacgacttggaatctcttaccactttgaggatgagattagtaacatcctatactccatctccaatgagagtaccaaagctcagtacacatatgacaacattgctttcacagccttaaaattccggttacttagagaaaatggtttcccaacaatcctaggaccattaggctaccataattatgaaaaattcatcacaaagacaccaagtctggaggacgcaaacacacttctattactatacgaggcctcatatctggcatttggagatgaggaaaaattggatgtagcaaggacattttcagctaaagcacttaagcaacttatgccattcatgctaccacacttaagggagggtgtggcacattctttagaacttccactgcattggagagcttcaagactagaaacaagatggttcattgattactatgctagagacagaaacatgtgccccttgctactccaatttgctgaacttgacttcaaccaggttcaatatgaacatcaaaaagatcttgcagtagtgacacggtggtggaagaaaattgggcttggtgaaaagttgccatttgcaagggatcgtctgatggagtgtttccattatgctaatggaattgtttgggatccaaagcttggaacatgtcgtcaaatgcttgctaaagtttccaatctaattgtttacttggatgatctttatgatgtatatggaaccatagaagaacttgtactcttcacaaatgcaattgcaaggtgggatgcgataccaaatgagacacttccagagtacatgaaagcactttattctattatatatgacacatcaaatgaagttgctgaacacgctttgaagaaacatggttgtagtatgcattatcttctacaaaaatcgtggtatgacatatgcctggcatttttggtggaggcgaaatggcaccatggaaactatagaccaagcattcaaaagtatctagagaatggatgggtatcatcttcagcaccattgttgttgttacatgccttcgcaatgcttgattcagttgtcaacatgagtacgatatcccctttgcaaaccaaactgagattagttcaacatgtttccttaattttgcgtctctgcaatgactctgcaacacacttagatgagttgggaagaggagatgctccatctttcatagctttacacatgatcgagaatggtggtaatgagaatgattctcgtaaggccatgcaagagcatatcttgaagtcatggaaaaaggctaaagtccaa

SEQ ID NO: 5850 - DNA, 2456 bp, Zea Mays
catgccatccggtcccttgtggccttctcctcgcccgctcgttcccaccactctgctctgctctcctcactagtctgctctccccaaaccccacagaaccctaccgtccccgccgcgccgccatggccgccgccggccggccgtggcgcgtgataccgcgtcctctactggagaccgtacttcacaactatgcgctccacccgcgcgtgccacagccgctccttttccacgggccacgcggcgtcggcaagtccacgctactcctccaccgtctcctcccgcggtggtccgaccagccccacgccgtcgcattcatcaacttcctccacccctcgccgagttctcccgccgcagccccgtggtcccttctccccgccgacccagcgtctccccactcgctgcacgacctccgccttcgcctcgagtccgcgcttgagggcctcgcccgcgccgccgtcctctgcggtgctgtgggctctaaggacgtgctcgccgcgctctcccgcaaccacggcgtcagtaccgcgctctcccgcctcttgatccccccggccacacgctcctcggccacctctgtgccagcccgccgctcttcgtcgacctccgttccggcgctctggtcgagggccgtgctcgccgcggtgcacagggacgacaccgcgttctgcattggcgagggggaggcgactagctgctccatggaggagaaggcatacatgcaggaggcaatggcagccttgcgagtggctaaggaggtgcttgggatgcaggaggggtggaggaaggaggcaattagggagatgaacagaactgggcgattctcgcgctcattggccaattcggctactgactggccgtgcctgttgctggatgttctgtcacgtgcggcagaggaggaattcttccagccaaagctgatcctgaacaatgtggatgtgttgaggaaggcaatttgtgaggatgagacgatggtgcctgcagcgatgtaccatgatagcttcatttggagggtgattgcacttggcgccaatgaaaagtgcttgccagttattatgtcgacttcagatgggtactattcttctcaagcattcgttgattttggttttccgaacatatttatttctcgtgagacatttggttggacgccacaagaagctaagctgcatatggtttctgaattcttcagtgaacaggagttgtagtggaaagttgtcgatgaggttcttgggccaaacccacggcagttatctgagatatatatgctgaagcaaaaggcgaatagcccagaagttcttcatgacagaaatattgaggaaattattgatacatacctggcacacttgcaagtctctgtcgttaatccagccatggagaaggcattaaaaatgctgcaggagtttgcctcagatgtccgtgagggtaaagtaccaaagatcagatcgtcctttggtgcaccctggagacatccacctcgtgatgacaatcctgacttgtcctataaatgggcgaagattcagctaatggattttatccaatcttttgtaaacactgagtttgggatgacagcttggaaatattggatgatcctgctgctgttgccatgatggaggttggtttactgtatcaacaaagagaaccatcctttatgcgaccaatcactcgagggattcagcgttgtcttgccagatggcttgctgaacagagattacaattgaacattcaagaaacactagcattcttttggcaacgtttgatacggggtcgaagctaccgccacttgatgaaagaagttggctacaaataaagaggtgatttccatggactaacattttgacatgatatctgcataagaatgtttcaagggtacaataattttctggccactcattttctcatctgtttaatacagccagcgtggtctggaagtttggaatcaaatcaatctcagatagaggtggatgaccagttttacatgttctgttgctgacgaaaagaatcaatcattttcttaattaataagcgaggaatgcaaatgtttattgtttggactagagtgaagttgcatcagaagttgatgctgaagcctgaaggcactcgaaaaatgttgcagatgcatttctacctgtatggcaatatttagggagtcgaatatctgctgtatgtcaatgagaaaatgggttttcacgtattgcaactgcatgagttaatcttctgggtttccatgtctctggtaaccaacccgtacattggatagtggcccggcaccgcgtctcatacttgctcttccgatcaactgtacatttgtactggaccttgctctgtgattcaacagcacgggtcatgcacggtcgattcgagctgaattatttaaggatccaaacggggccttactttttttttggagagtaataattcaattgaatcagccaatcaaaagcgcttattcagattccagt

SEQ ID NO: 5851 - DNA, 2647 bp, Zea Mays
ctgcacaggggtttcgattttttcgattaaactgaaaactgaaccgaagcatacggttaactgaatcttcggttttccttttttctaaacaaaatttcggttaaccaaacttaaaaaaaaaactaaaaaaccaaaccgaaaaatttcggttactcaattgcccagccctgtgggcctcgtgccgctcactagactttaaagcccgtttggccctctacacggaccagacctgccttttcttcttcagcgtgcacattccttccccacttctctctctctctcgtgacgacggcgacggcaacgactggggcgacagtcgctgccgccctacttgccggttgctcggatcttcttcggcccgttagccgtcgacgagcaccaccagggcaaccagatacttcagtggcttcgcaaggatgtcctggtgcactattgagtctgatcctggtgtgttcactgagctgattcagcaaatgcaagtgaaaggtgtacaggttagcttccagggctctgttgcgttccttgcctgaactgcttgttttgtagcaactgtttttttcctcatccattgaactattattgtatctgcaatggcattatgcgctcgacctgttcattcactagtgtacactagttcttctgaagttttgtttcttgctcatgttctgaaactcacatcaacctggaactctcatttttggaagtgccttactgccatattatatgactgtaggataagcataataatatgtagctgattgtaatcttgtttgtcaacaggatcttgaagacatgcactttagtttaaggtagaataactgataatttgttgtcaatagttgctctttttttacctttatgcaacggtcaactcaatttgaaatggggagggtccttgtattatcaaaaagtaagggaggccttgagtgaggcttattctacatttgtttattcacttgcattcgtttagtatgggacctctagtcacatgacaacatgccagctaccaattatatttgtttgaggtcatgcttttatttcttgagtttgataatgttggtacttaagttacaataataatatatatagaacaggtgcctctagaaatatgtgacgatcatttttttgtcaagttatccatagaaaaaaaatttgaacccagaaatttatatgtttgggatgttctttaaacaggtggaagagctttactctctcgatgtgggctctcttagtcaactgcggccagtatatgggctaatttttctcttcaagtggatacccggggagaaggatgaacggcctgttgtcagagatcctaacccaaaccttttctttgcgcaccaagtcatcactaatgcatgtgctactcaagctattctctcagttctcatgaatcgccctgaaattgacattggcccagaattatctcaattgaaggaattcacaggagcttttacaccagatctgaagggcttggctattagcaacagcgaatctatccggacagctcataacagctttgcaaggccagagccatttatttctgatgagcagagggccgcaactaaggatgatgatgtttaccatttcataagctatttaccttttgaaggtgtcctgtatgagctggatggactgaaggaagggcctgtgaatcttgggcagtgcgatggtgctgatgatcttgattggctacggatggtgcagccagttattcaagaaaggattgagcgctactcacaaagcgagatcaggttcaatctcatggccatcataaagaacaggaaagaggtgtacagtgctgagcttgaggaactggagaagagaagggagcagattttgcaggagatgaataatgcttcctccacagaatccttgagcagttcgcttacggaggtgatatcggcaatcgaaactgtcacggagaaggtcatcatggaagaagagaagttcaagaagtggaagaaggagaacattcggaggaaacataactacatccctttcttgttcaacttgctgaagatgcttgcagagaagcagcagctaaaacctctggtcgagaaggccaaacagcaaaagtcagcaagcccgagcacgagttgatggtgaaatgtcaatagactggtagcttttgccgatgtcttctgagcgtcgtgttatcttatcagatacattgccaagtcggcagctcagataaattatgaccgatgttatttataccatgttgcacgccgtgatgtatcagcagctatgccattttttttttgcagagcacgtgcgttgttgaagtggttaattttagtcgtttagagagattgtttgagagtaagggtaatggaatggactgaggaggttgaatcactcaatattcaattttaaataatgatgggttccagccctctcaatcccctccattccacctactcctaaacaaactcttaggtctagttttgcaactcttttttgtcaaggaattttcattttatcaagagaaattagttcatttatacttagaaaaatggagttgacaatctagcctttagccgtttattttgtgttaggttaattgtccctgtggatttgttgatggttgtggatcattttgggtaataattttgagataccacttgctagttgagtacaagat

SEQ ID NO: 5852 - DNA, 3908 bp, Zea Mays
cgcaagtcgcaaccaaaccctcgcatacagccgcagcgccaaatctcgccgcctccggggctacaagcgcgccgccgccgcctccgctgacggggaccacggaaggacgcgccgacaccggatctccgaacgcacgccactgaactgacgcgggacttggtttgggtgctcgattgcgcctcccggaagagggagagcccccgccggatttaaccagacacaccgaacgcgcagctcctccgcgccgggggccgcagagaattcatgctgccgaggtcccgcattcggggccgtgacccgccgccgtcgggaggacgctaccgccgccgatctccggccccgccgtcaccgcgccaccagcgccgcccgcgtgacccgccctatccccagccgaagaggcgcagctccgagctgccgccgccgcggcgatacgacgagaatcccctccccagcggcttcgccgccgctgccgagaggcgttcgcgcggcgacatcctgctcgaggccggccgcctggccgctcactacttggtcgccgaaggcctcctccccgagcacgttctcctgtcaagggaggacccaaatcacaatcacagttaccgccccgagcctcccgttcccgttcctgccccggttcccgctcccgctccctccagctatgggaggaagagagacgaggacgacggccccaggtggcggcggagtggaagtggagccggggacctggaccgtggctcaaagtgggacgacaacagggaagccaagaggtcggggtgggacaggaggagccacagctttgacgagaggcgtaaatacaacgatggcggtgacgttgaccggggtggccgccggacacgcgactacaatgagctgaagagaccaccaatgtcaaggtcctattcgcataacgatcgccgggctttggctgatggcacagttgatcggaggaggagaagtagaagcaggagcaggacgaggggctactacactggcagcaggagagatccagatctgcgagcaggcactcgagatttggatcgcaccaaggtgacagactctggcgctgttcctgctgctggtggtgatggaggcatgcacaatgtggatgccaacgaaataccaaggcagccgaaggtgcctggttcagtggtggtttcggagacggatgacagcgctgttgaagctgtggctatcgaagataagcaaatggagtcagataccgctggactggaccatgctcaagacatgtctgaaggcgaggacagtgagtttgccgaagacatttctgaagacgaggatggtgagtttgcaggctctgacttgaatgatgaagatggtgatgaaatggataacacccagagccaactgtccgatgtgcatgttcatacatctgaatctgttgaggaacttgatcttagacagtctcagctcagcaatgctgaggagggaatggaaacatgcattgcacacgtctatgcatgcatggtagagccattggcagagaacaatgtttgctctgaaacaaggtatgaaatggaggaaccacaaaatggatctgaaactgctgttggtgatctttatagtgatgaacaagagcaaccattgacagagtataatggttgctctgaagtaaagtgtgagatggaggctgcacggagtgaatttgaaactggtgttgataatcttgatagagatgaacaagagcgactattggcagagaacaatagttgctctgaagtaaggtatggcatggaggctccacaatgtgaggttgaaactggtgttggtggtcttaatagagatgacaaagagcaaccattggtggtgaccaatgattactctgaattaaggtatgaaacaacagcttcacaaactgaagttgaaaccgtcgtcggtgatctcagtagggatgaacaagagctgccagcttggtacaaaatttttgatctcaacgtcattgaaactccagtgggttgtgagttctccgagatttctcgcagtcctccagcagatgatctttgtgattctgtgcctgatttaattggtctggtgaatcaacaagaaaacaatgacacttcagaaattcatggtcaagatgatcgtgcaggggccaatcaaatgttggaggatgagtctaatttggataactatgatctgaacaatgaggctgatgaacatgcacgggatgatacttcagtaaatcaagttcaagacgagaatgcagaggataatcacctaccagaggatgggcatggtttgatgaagtatgatatgaacattgaggctggtgagcctgcacatgataatcaccaaatgaacaatgcggaaatacatctaaatcatagtatggttgcacatatttcagataattgccatatgaacaatgagaaaatgcttctaaagcaaaatgtggacgagcaacagatggagaatgagcagatgcttatagatcaggtcactactgttcatgttttggatagtcaccatgtgaatcatgaacaattgctgctaggtcatagtgtggatgatcatgaccaaatggagccaaatcccatggctttgggtgttcataatttggataactactatctgagcagcaagcaagtactcctgaataatgatgcagaccaacatgcaggagatatacaccatttgaaggatgggcaaattattttagatgaggctgcagatggacaagctagagttaatgggcaaacaattcatgtaattgatctggaagaagattatgcacagcagtctgagagcaggaatacaggagaatatctagaatccacaagtggcacctcgcataaatacacggataatgttcttcaagagcatatgtgttctcaagactagcaaacctcaacttttcgtgacaatcttcagactaacacacaagcagcttcttcaactgccacaccagatttttgaaactggtgtagtgaaaaggtagctgtgaatgcagatgcacaggtgattcccatttctcagtgatgacgatgtcctgtactcctgtattatatttggattcaacaatatgccattagttatggatgtctatgacctgccgtcctctgagcttgggagatcctttgctgaactcgtcaggcagaggctgttgcttgcacgggagtaccagtatccatgtccacttcaatcgactctagtctaactgaagcgtgccgtacacatctgcagtaactcctaaggtattcgtggttatcagcttctttaaagcttttggacacgagctttaggatcttccaaacgacaaaaaaaaaaaacttccatgggccaaaagaaaaaaaccaaaaactttgtccccaaataaaggtcgttattatcagcttctttaaaccttttgaacatcagctttgggagttgggaccctccagaagactaaaaactttgtcccaaaataggtggattttgcctatggaatctgtcgttgcagttgacatcacagggaagccgtttgcatgaaagactgagctctggtagctttttccggcgtgatgaggccgaattttttgtattttagcccctaaaccgaagtaaatttacgtttagacctaaaaaaattttaaatgcagttttggaccctttgctcggcgccataggccgtggcaccgagctaacacagctcgacgccacagtctatggcgccgagcttcgtgacgtggcagcccgcgtggcacacctagctcgacgccacagatcttggcgccgagctaggaaacttaaccgaaacgcctttcctcttcgtttcttctctgtttcgctcgcgtcttcattttcctacgcccgccgtcgctcataccgccgccgagctcgccgccagcccgccgccgccgagctcgctgcccgcccgcagcccgccgagcgcgcccggcgagcgcgccgcc

SEQ ID NO: 5853 - DNA, 2884 bp, Zea Mays
aggaggtaaaaaacaaacatggcctaaataaataaatactcttgttacccggtctgcagccaagtgcaaatgtgccatgcatgcgagttggggccctggaagacgacgacgaccacacccacaccacacacacactgcaaagcctctgtttctcatgtcagtaaaaattcctccctgtcctctgccggcatgtagttatcgacaagaaagccatggctggcagaggcaaggacagctcggtcgccaaagcgcaaggtgcaaatcgtgaaaagggagcaaaggcaaaggcaaacaactcgatcccactgcgcggccatattattcactttctccatttcttccctagctggctagctctctccgatcctcctgcgcccattctctttcgtctggttgggtggagataagctggagagactggagaggtgcgccgagctgtgggatcggagaccgagcgagcaataaatagaaagtaaggtcggggccggcctccatggcggcggttgcaggcgccctcgaatccctcccctgaagtccactgactccgcgcgtctctctctctctctctccttcttcttccttcctcgtcctcctgctgcgcctctttatatagcctccaattccggaaagcagcttgcttgcgttctctcccacccctccttccctcctccagatactacttattgtagacggcgcgggtgagggagaaagcgagaattagcctgcttagaccccaagacgcgaagagaggaaaaggattacgcaagaagagaggtggattagaggcgagctgcttcctattttcagcgaaggcaaggtgagtaacactgatgagtctgagagtcgactagtgtggttgagcactgcagctgcagcctgtaggcttatctttctcctctctcgctctctcgcatcgcacatgcatgccatatgcatactgatacggccactcatcagcggcaaggctatacccatcctcatctcatcccatctcctacgcggctacgcctagcttgcttgcgcaaatctctctctctctctctctctatgtctaggagctcctcgctgcagatctaccgccgatccgcctgctgctgagctatgccgatcaattatctatacatgcagctcatgcatctaacctacatgtcgtcacacaacgcagccccaccccaccccatgcctgctgcttctgtgcctgtgccgccgtcgtctctcgccttctgcttctgcacctgcttttttcttactcccaagatctgtaattgtttgttctgctgtataggagctagctgctagcaaggagccgaggcagagagaaagagggatcggaggaggagctgataaggctagcctcgctcttttggtggtggtggtggcggtggactggtggcgcacactctccctctcgctcgtcttgatggtggtgggtggcggcagcggctgcctcgcatggctgggttctctctgaggagcggcggagccggaggaggcggaggcgggaggggcggggaccggggcggcgatcactcgatcggcgccgacagcctgttcctgtacgcgcgaggggcggccgccgcggccgccgacacggcggccagcggcggcgggatagggttccagctctggcacccgcaccaggtccagcaggcggcggccgcgccgcacacgtcgcagttcttctcctccggcgccgtggccacgggcgtcgtgctcggcttctcgtctcatgacgggggcgccgccgggatcgccggcgccgggggcggcagggccggcaccagctgccaggactgcggcaacaacgccaagaaggactgcccccacatgcgctgccgcacctgctgccggagccgcggcttcagctgccccacgcacgtcaagagcacctgggtccccgccgccaagcgccgggagcgccagcagcagctcgccgcgctcttccgcggcgccgccaacagcaacagcgccgccgccgccgcgagcaagcgcccgcgcgagctcgtccggtcccttggccgtttgccgtccgccaactccgccatggtcaccacgaccacctcctcaggcgacggcggcggcggtaggttcccgccggagctgagcgtggaggcggtgttccgctgcgtgcggatcgggccggtggacgagccagacgcggagctggcgtaccagacggcggtgaacatcggcgggcacactttcaaggggatcctgcgtgaccacgggccggcggacgacgcgggccatctgccgccgccctcggcggagtaccaccaccaccagctgacggcggggcaagcgagggaagcgccgtcgccggcggggagcagcgaggcggcggccacggcagcgacgtcggcggcggtgctgatggatccgtacccgacgccgatcggcgccttcgccgcaggcacccagttcttccctcataaccctagaacctagctcactactactagtatctacatattagctagctttgctgcttccattattatggctttcgatcgatcctagtagtagcttaattccttgatggttccatttacttcctccaagttccaaattaaagatgatgatgatgatgagcatgaactaagttgtcgtcatcgtcgtcctcgggattagcaaacaaattcgagacaaacgggaagatatttttattgttactatttcttcttccactactactgcatacgcgcatgcgtttttcgagccgttgatcgatgaacactactaatgcatgatcaatggaacacatataatgtccttattattaattgagctagtgcactaccgctacctgtttgagcaatcttatttcgagttcattaataactaattggccaattcttaatgcaatgcaaagacaagagtttca

SEQ ID NO: 5854 - DNA, 2343 bp, Zea Mays
ggagttggtgcgctgtatgtaatggctcttacgtgatgctgtgttttgtgattgcagcagcagtgaatttgggagcttgaagcattcatctgagacatggaaaaagtgatctgctgggcatatctccttcaacgcaagcagttctcgaaagaaactcttgattgctgtgtcttagctcgtgggaacactcctctctcctctctcgtgaactacacatagtgattatatgttcctctatgctcaacaacaagcaggctgatgcgatattttgctgaagttattatatttcagtctatgccagacatctacatgtagatggtgctcatataagtgggggttgatatatttgctgtgttcagcttacatctgttgcggccctagttagctatttgtcttttgtgtactatctgaggcaagagattgatcagctaggacttggcgaacacttgcctgtgttggctgttcatctgaagggggaaatttgcacgagacacctcggatattacaacaatggatagattcaagttgattaaggaagttggcgatgggactttcgggagtgtatggcgtgctataaataaacagaatggtgaagttgttgctgttaagaaaatgaagaaaaagtattattcttttgaggaatgtatgggtttgcgtgaagtaaagtctttgcggcgcatgaatcatcctaacattgtgaagctcaaagaggttatccgagaaaatgatatattatacttcataatggaatacatggagtgtaatctctaccaacttatgaaggataaggtcaagcctttctcggagtctgaagtccgcaactggtgctttcagatatttcaggctcttgcttacatgcatcagaggggctactttcatcgtgacctcaaacctgagaatctgttggttagcaaagatgtcataaagctagcagactttggtcttgcaagggaagtttcatctttgccgccatatacagaatatgtctcaactcgctggtatcgggcaccagaagtattgctccagtcatctgcttatgattctgcagttgatatgtgggcaatgggtgccataatggctgagttgttgacactccatcctctctttcctggaactagtgaagctgatgagattcacaagatatgcaatgtcatcggtagtccagatgagcaatcttggcctcaaggattgtcacttgcagaagcaatgaagtatcagttcccacagatcaaaggcagtcaactggccgaggtgatgacaacagccagtagcgatgcaattgacctcatctcatcactatgctcatgggatcctagcaagagaccaaaggccgcagaagtcctccagcataccttttttcagggttgtacatgtgttccactccctgtccgtccaaaagcttcatcacttcctagaacacctccatgtgttggatcaaaaggaaattcagagaacagtgtggctagaagattctcaactggaactctatctacaatgaaatctcatagcaatgcatccgcaaaattaaatggtttatctaagactggtgtacaaagaaaacttaatttggatcgtcagccatcccaaaagggtatgaagccaaccgagactagcaataaactaactacgaatcgggtaccagctcggaatagcccagggaatcctgtacttaggcattcacggagcttgcctgaaactggccgaggagcaatacagaaggtctcatcaattacagagaaactatcccaaatgtctgtgacctctagaacacggagcgctgtgaagcctgctgcccccatgatgaaggccggacatggcaagtcggactttcttgggaagtctgacgatatccctccagcaaagaggctgacaagaaaattggtcagctaaatgagggtatgtggagtgaaaattcgatcagctgcaggaggggtgttgtgtatagtgtgcagaaaccagtgtgcccgaagaggatagtcagcctgagcgtttgcccatcgatggttgtgcggatttgccatcaccacagtttcgctgcgtcgagacatattagaatgggtttgcaaattcctttgtgaagtgctagagcctgcatcaagccttccccacttccgggcggttgatctgcttttttcctgcgaaaagcttgcccccatgttttaataaacatgattgtgctattaatttggtttggtttgccttgcaatgttatcttgcaccaatatcgctgtcacaaactgtatgcacatttaacagcttgtaaatccttgagcccaacaagggatggacatttcacatttggtttgaatgcacatttaacgcagtgaggtgccaatttggcgc

SEQ ID NO: 5855 - DNA, 2737 bp, Zea Mays
ctgatgccaagttgccagtagcaggcggctccgtatagtagaaagagaagacgacgtgtgttttggcctccggaggagcaagccccccaaaaaaaacgagcagggagcggttaaaaagcaggcaaaaaaggggagacgccacgagcggaagacagacaggcaggcaagcgagaccaaggcgggggcggagcgcgagaggcgacgcgagaggcgagaagtggaggcggtgctgcggtggcatgccatggttataaaaagtaacggagcgcgacgagggtagaaagaggaaggcccgccgcttccccttcttcattcccgtcccacacacgccgccgccgccggtgcggctcgcttccgtcccccccggtccgcgcgggctgcctgcgggagcagggtggcagggcactccggcaaccacgtgggtggggaggcgacgacaccaccctatgctctgtcctcgcccgcaggattgcagcagcagtgaatttgggagcttgaagcattcatctgagacatggaaaaagtgatctgctgggcatatctccttcaacgcaagcagttctcgaaagaaactcttgattgctgtgtcttagctcgtgggaacactcctctctcctctctcgtgaactacacatagtgattatatgttcctctatgctcaacaacaagcaggctgatgcgatattttgctgaagttattatatttcagtctatgccagacatctacatggttgatatatttgctgtgttcagcttacatctgttgcggccctagttagctatttgtcttttgtgtactatctgaggcaagagattgatcagctaggacttggcgaacacttgcctgtgttggctgttcatctgaagggggaaatttgcacgagacacctcggatattacaacaatggatagattcaagttgattaaggaagttggcgatgggactttcgggagtgtatggcgtgctataaataaacagaatggtgaagttgttgctgttaagaaaatgaagaaaaagtattattcttttgaggaatgtatgggtttgcgtgaagtaaagtctttgcggcgcatgaatcatcctaacattgtgaagctcaaagaggttatccgagaaaatgatatattatacttcataatggaatacatggagtgtaatctctaccaacttatgaaggataaggtcaagcctttctcggagtctgaagtccgcaactggtgctttcagatatttcaggctcttgcttacatgcatcagaggggctactttcatcgtgacctcaaacctgagaatctgttggttagcaaagatgtcataaagctagcagactttggtcttgcaagggaagtttcatctttgccgccatatacagaatatgtctcaactcgctggtatcgggcaccagaagtattgctccagtcatctgcttatgattctgcagttgatatgtgggcaatgggtgccataatggctgagttgttgacactccatcctctctttcctggaactagtgaagctgatgagattcacaagatatgcaatgtcatcggtagtccagatgagcaatcttggcctcaaggattgtcacttgcagaagcaatgaagtatcagttcccacagatcaaaggcagtcaactggccgaggtgatgacaacagccagtagcgatgcaattgacctcatctcatcactatgctcatgggatcctagcaagagaccaaaggccgcagaagtcctccagcataccttttttcagggttgtacatgtgttccactccctgtccgtccaaaagcttcatcacttcctagaacacctccatgtgttggatcaaaaggaaattcagagaacagtgtggctagaagattctcaactggaactctatctacaatgaaatctcatagcaatgcatccgcaaaattaaatggtttatctaagactggtgtacaaagaaaacttaatttggatcgtcagccatcccaaaagggtatgaagccaaccgagactagcaataaactaactacgaatcgggtaccagctcggaatagcccagggaatcctgtacttaggcattcacggagcttgcctgaaactggccgaggagcaatacagaaggtctcatcaattacagagaaactatcccaaatgtctgtgacctctagaacacggagcgctgtgaagcctgctgcccccatgatgaaggccggacatggcaagtcggactttcttgggaagtctgacgatatccctccagcaaagaggctgacaagaaaattggtcagctaaatgagggtatgtggagtgaaaattcgatcagctgcaggaggggtgttgtgtatagtgtgcagaaaccagtgtgcccgaagaggatagtcagcctgagcgtttgcccatcgatggttgtgcggatttgccatcaccacagtttcgctgcgtcgagacatattagaatgggtttgcaaattcctttgtgaagtgctagagcctgcatcaagccttccccacttccgggcggttgatctgcttttttcctgcgaaaagcttgcccccatgttttaataaacatgattgtgctattaatttggtttggtttgccttgcaatgttatcttgcaccaatatcgctgtcacaaactgtatgcacatttaacagcttgtaaatccttgagcccaacaagggatggacatttcacatttggtttgaatgcacatttaacgcagtgaggtgccaatttggcgc

SEQ ID NO: 5856 - DNA, 1663 bp, Zea Mays
gagagaagagagagaggaagggaaaaaaaaatatctgctgcctccttgcggcgctttgccattaatttagtcagcatcacatcgcaatcacaagactcctatacccaaacccacgccccccaccccctattattctatatatataatacacacactagtgtagtagtgtggagtacttcaattggcgttggccgaagaagaggagaagcgaagcaagcaggcttcgagaacaagggggagggggaggaccaagcgaaagggggaactagagcaagatgggcggcgaactgctgcttgcgctcctcctcgtctctgctgctgccgcccctcaggtacttggagttggcaatggagacaatcacatgagaatcatccaggaggacatcattgagacagtcaacaaccatcccagtgctgggtggacagcctcacgtaatccttacttttcaaactataccattgcgcaatttaagcacatacttggagtgaaaccagcaccacagaatgcactaagcaatgttcctgtcaaaacttattcaagatcactggaacttccaaaagagtttgacgctagatctgcatggtcccgttgcagcacaattgggaacatacttgaacagggtcactgtggctcttgttgggcttttggtgctgtggagtgcctccaggaccgtttttgcattcacctcaacatgagcattttactttcagtcaatgacctactggcatgctgcggttttatgtgcggcgatgggtgtgatggaggctatcctatagaggcatggcgctactttgttcaaaatggtgttgttacggatgagtgtgatccatacttcgacccggtcggttgcaagcatcctggatgcgaacctgcttatcctacaccaaagtgtgaaaagaaatgcaaggagcagaaccaagtttggcaggaaaagaagcatttcagcattgatgcgtacagaataaattcagatccacatgacataatggcagaggtctacaaaaatggtcctgtagaagttgctttcacagtttacgaggttagtaaggacatgacaaaagcggaacaagagaaacacaagccaaaaaacaaatctggatttcgcacactacaaatctggagtgtacaagcacatcaccggtggcattatgggtggccatgccgtcaagttgattggatggggaaccagtgatgctggagaggattactggcttctggcaaatcagtggaatagaggctggggcgatgatggatacttcaagatcataaggggcaaaaatgaatgtggcatcgaggagggcgttgttgctggaatgccatcgacaaagaatatggttccaaacttcggcggtgccgttggaagagctatagtttaattggttacgtttgcatggcctcaaatgctgttggaattaactaaagtaattttaaaatgcaattgttaaatggccacgatggtgtatgtattttgtacactagctcattccaaaggtcgttatgttgctgatgccacatcactttggtcaagtggaataatattaataagaactagaatttcgattcgaatgttacggtttcaagtccgaccagatttgtgctctgatgatctccggccaccaagcctggttaaaatatctgttgtaaaatgaaatcaagttgagg

SEQ ID NO: 5857 - DNA, 1668 bp, Zea Mays
ccaataaaaacgccaccccgccctccactcgccggagcccgaccgccgggatgcctcgagatttgcgaccagccgggatgcgcctgttcggcgtcaccatcgcgccggtgcctgaggcgaatcctccgggacgaaatccgagccccaacccacccgtggctgccagggaggacgtgatgcgcaagtgcaagagcatgggcaacctcgcggcccttggcgctggcctggacggtggaggaggatgcgcggacggcggagttgctggcgacgggtacctctccgatggcgggctgatgcagtcgtgcggaaagcggcggagggcgcaggagaggaagaaagctgttccttggactgaagaggagcatagaacatttcttgctggtcttgaaaagctagggaagggagattggaggggtatagcaaaaaaatttgttaccaccagaacaccaactcaagttgcaagtcatgctcagaaatattttcttagacaaactaatccaaataagaagcgcagatctagtctttttgacatgatgcccagagagctgtcaccaacaccaaactgccccgtattaccaccatccatggcaaaagtacatgacgtggtagctatgacgaaacaactccagaatagcaacttggaaggagcctcatcttccaatgcagctaatgtagtatctcaagtaggaagagatctccccccagttccgtcttttaaggcaacaaatatagattcaagtttcagcaaatttagccacatggtacaaaaacatcaatcatcatacaaagttgaagttttgaaatagacaagaaggaaaggagcgctactggagaactccctacccgtccagaccaattcctagagcccctgaagggacgtcttcatcaactcctgttgctgccagtacagctgttccagcctccgaagctaacctgactgcatatactagcacattcttgagccagcgagctgataccccatcattgcctccgaagggtgatcctcctccatcagaggatgatgatctggaactgactgtcgctccaccatcccaacagaatatgaccaatatgtcctcccagaatgcggtaggcgtgattcaagtcatctaagctaattttttttctctctctagaagttactgtgggtatttacagttcaccgaataagtactaacattctatcagcaaatacatcagtataataagatcatgagtgacaagacacagtagatgttaagcgcgttaatgtggggggtctgttgtgcatctgcatccccttttcacttgtgttggtacttatctagggattggtgcaagcttagccgattgttttcactgcacttgtgttgctaattatcttgtgtacatgcatggttctctctacattaggcccagacagaaggcatctcacattatgatattgaatattatcaatggggggaaacagaatgttggctggcactgccaccattattattggctttccacccggcagttggtactgtcgtagcacaagagtagcttggtgtatttctggtgtgcctgaatgtagttgttatgtggagaagcaatacttggtgcagattgcgagaaatttgtaattttgccactctcagttttggcttcctgttattatgccatcatgtgtctatgactggtgggacc

SEQ ID NO: 5858 - DNA, 3964 bp, Zea Mays
gccccttccccgggctacacgactgtgcctgcgccagaagacccgtatcgccttggggtaaatggtggtgctgtgcatgtgcccgtgttcatgtgcgtccttcctgcgtcggagctctggacgcgcgcgcccggtgctatctgctccggaaatgttcggtcgcggcagttcctgcgagctgtggccctccgcctcccgctgcgtcgttgaagcttctgctggattctgttctgacctgtctgaaggtcttttaggtatgctggcgctcgctcgcacgactgatgagtttgctctggtgcaggggggcggccggcgggtggaggcgaccaggcgaggactgctctgcggcggcaaagggtttcaaaatgctggcgtgcatcgcctgctcggccaaggacggcggggatcaggacggctcccgcgccgccacgccccacggaagggacgccggcaagtccctcacctcccagctcaaggacatggtgctcaagttctccggctccggcaggcagtacaaggccgcggcggcgagcccgtcgttccggggcaaccgcttccaccgcaacagccgcctggccgcgtacacgggcgtcattgacgactcgggcttcacgtcggacggggccaccgagggctacggctacatgaggacgacgacgcacgcgaccggcgccaccgcgggaaccaaggtcggccgtggcttcccgcagcacgtcaggagcccgagcgcgagctggataccgagcatcggggaggaggacgatgaggaggatgaagaggttgtcgtcgttgaagaggaccgcgtgccgcgggagtggacggcccaggtggagcccggcgtccagatcaccttcgtctccaccgccggcggcgctggcaacgacataaagcgaatccgcttcagccgcgacatgttcaacaagtgggaggcgcagcggtggtggggagagaactacgaccgcgtggtggagctctacaacgtgcagacgttcagccggcagcagggcgtctcgacgccgacgtcctccatcgacgatgccacgcagagagactcgtcgttctactcccgcgccggctcgacgagggacagcccggtgatcctgccgccgacagccgtgggcagggagcagccgatcgcccgcgccacctcgtgcagggccacggccgcggcggcttccacggcccgagccgcgtgcaacccatcgtccagtgcggtgccggacccgtcggaccacgtgtgggcgcaccacttcaacctgctcaactccgcgccggcgccggcaccggccgctccgcacctcgacccgtcgcgcgctaccacgtcgtccctggacgaggcgtccgtgtccgtgagcaacgcgagcgacctggaggccacggagtgggtggagcaggacgagcccggcgtgtccatcaccatccgcgagttcggcgatggcacccgcgagctccgccgcgtccgcttcagccgggagaggttcggcgaggagagggccaaggtgtggtgggaccagaacaggaaccgaatacacgcgcagtacctgtgacgtcggactcggagctagctgttgggtgtgcagtacacgcgttggatggaagccaagccaccaatccatggacaatagtagcgtagggctgagtcagtgatactattgcgactactgtctactagtgctagtttttacagggtgaacagaggtgaaagaggtccacggaatggagcctgtgtaaaacatgtttgctactactactgatctgggtttgtgtgttgatgaccaatgtattttttttcttgatgaactaatactgttttgtgttgatcgcctcagatgaacagtgctcacattttctaatcgcgggcacaaacaaatcacccacaagacaccaagcaagctaactttgaccatattggataacattcactttccaattacaaaagaaagcaagacaaaattcttcagtgttgcgttttttactagtgatgaggaaacgtttgccatcgttacaagacgtgcgccaaattggcacctcactgcgttaaatgtgcattcaaaccaaatgtgaaatgtccatcccttgttgggctcaaggatttacaagctgttaaatgtgcatacagtttgtgacagcgatattggtgcaagataacattgcaaggcaaaccaaaccaaattaatagcacaatcatgtttattaaaacatgggggcaagcttttcgcaggaaaaaagcagatcaaccgcccggaagtggggaaggcttgatgcaggctctagcacttcacaaaggaatttgcaaacccattctaatatgtctcgacgcagcgaaactgtggtgatggcaaatccgcacaaccatcgatgggcaaacgctcaggctgactatcctcttcgggcacactggtttctgcacactatacacaacacccctcctgcagctgatcgaattttcactccacataccctcatttagctgaccaattttcttgtcagcctctttgctggagggatatcgtcagacttcccaagaaagtccgacttgccatgtccggccttcatcatgggggcagcaggcttcacagcgctccgtgttctagaggtcacagacatttgggatagtttctctgtaattgatgagaccttctgtattgctcctcggccagtttcaggcaagctccgtgaatgcctaagtacaggattccctacaattccaaaggaaaaaaagttctaaaaaatcaaaacccatttcgtgcaaggagttgggcaatgcaaccctatataggaaacttgcctgggctattccgagctggtacccgattcgtagttagtttattgctagtctcggttggcttcatacccttttgggatggctgacgatccaaattaagttttctttgtacacctgtaatgttggtagcaaaatagacaatcaaactaaaccctataaatcttgcttgctccagcccaattaaaacagataagacacgcaccagtcttagataaaccatttaattttgcggatgcattgctatgagatttcattgtagatagagttccagttgagaatcttctagccacactgttctctgaatttccttttgatccaactaaaacaaatgaaccaagcacatgtaaaacaacaatatcctaaatgaattaggtacaaagcagaatactagtctgttaactaaccacatggaggtgttctaggaagtgatgaagcttttggacggacagggagtggaacacatgtacaaccctaaaagttggcaaccagaaaactgattatagttccaaggagacaataactgaaccttgccaataaaaatagagtagaaagaatatactattacctgaaaaaaggtatgctggaggacttctgcggcctttggtctcttgctaggatcccatgagcataaacttactgagatgaggtcaattgcatcgctactggctgttgtcatcacctcggccagttgactgcctttgatctgcatggatagaagaacacaccctcaacattagatcaaatattaaccagtcattcaacatgtatccacattcacaatgaggtggcaaaaggtacaacaattcatccttttcaggggagtacaactattggtaatcaagaaagagaatgacataaacagcataacactgatggggggtttggcaacaagtataagggtaataggatttgaatgcgctgtagcaaaatggataaggactagagaaaaacttagtactccctccatagaaataaggactagcaaaaatggataaggactagcaaaatggataaggagtatgaaataacagattctaacaatttaggatgatgtgtgtagtgtactgtttcatttgttgcagcaaacaagttcctaaaagaaagtatcaagaaaatcatgacaatactccctccatcgaagaaaactgagtgtcttaaacataatcttaatcacttaat

SEQ ID NO: 5859 - DNA, 3024 bp, Zea Mays
catacatacaccaaccgtgcgtgaaggaaggcctttgctcgccgccacatcacattggcaggcgaggcgagggagcgagcagcagggcaaggcatccacacccacacccaccggacactccctgagaagcgagaagcgagaagcgaagagcggccggccaccatgttctggcacggggtcgcggaccggctgacggggaagaacaaggaggcgtggaacgagggaaagatccgcggcacggtgaggctggtcaagaaggaggtgctggacgtcggcgacttcaacgcctcgctcctcgacggcgtacacaggatcctcggctgggacgacggcgtcgccttccagctcgtcagcgccaccgcggccgaccccagcaacgggagccgcggcaaggtcgggaaggcggcgcacctggaggaggcggtggtgtcgctcaagtcgacgacggacggggagaccgtgtaccgggtgagcttcgagtgggacgggtcgcagggcgtcccgggcgccgtcctggtcaggaacctgcagcacgccgagttcttcctcaagtcgctcaccctcgagggcgtccccggcaggggcaccgtcgtcttcgtcgccaactcgtggatctacccgcacaatctctactcccaggaacgcgtcttcttcgccaacgacgacgagctcaagattctccgcggcgacgataatcctggaccatacaaggagcacgaccgcgtctaccgttacgactactacaacgacctcggtgagccagacaagggtgaagaccatgcccggcctgtcctcgggggcagccaagaacacccgtatccccgtcgctgcaggaccggccggcgtccaacagagacagaccccaactcggagagcaggctgtttctgctgaacctgaacatctacgtcccgcgcgacgagcggtttgggcatctcaagatgtcggacttcctcgggtactcactgaaggcgatcatcgaggctgtccttccgacgctggggacgttcgtcgacgatacgcccaaggagttcgattcgttcgaagacatccttgggctctacgagccgggtccagaggcgcccaacaacccactggtagcagaggtcaggaagagaatccccagcgagttcctcagaagcattctgcccaatggtagccatgaccaccccctgaagatgccccttccaaatatcatcagatcagatgtgttgaaaaaggctccagagtttaagtttggctggaggaccgacgaagagtttgcgagggagacgcttgcaggcgtgaacccagtgctcatcaaacgtctgacggagttcccagctaaaagtaccctggacccaagtcaatacggagaccatacgagcaagatcaccgaagctcacatccagcataacatggaaggcctgtcagtgcagaatgcactgaagaagaacaggctcttcatcctagaccaccatgaccatttcatgccgtacctcaacaagatcaacgagttggaggggaacttcatctacgccagcaggaccctactgttcctgaaggacgatggcacgctgaagcccctggccgtcgagctgagcctgccccaccctgatggccagcagcacggcgcggtcagcaaggtgtacaccccagctcactccggcgctgagggccacgtctggcaacttgccaaggcttatgcctgcgtgaacgactccgcctggcatcagctgatcagccactggctgaacacgcacgcggtgatcgagccgttcgtcatcgcaacgaaccggcagctgagcgtggtgcatccagtgcacaagctgctgagcccacactaccgtgacacgctgaacatcaacgccctggcacgccagacgctcatcaacgccgacggcatcttcgagcgcaccgtgttccctgcaaagtacgcgctggggatgtcctccgacgtgtacaagagctggaatttcaacgagcaggctctcccagcagacctcgtcaagagaggtgtggctgtgccggaccagtcgagcccctacggtgtccggttgctgatcaaggactacccttacgccgtggacgggctggtcatctggtgggcgatcgagcggtgggtcaaggagtacctggacgtctactaccccaacgacggcgagctccagcgcgacgtggagctgcaggcgtggtggaaggaggtgcgcgaggaggcgcacggcgacctcaaggaccgagactggtggcccaggatggacgccgtccagcggctggccagggcgtgcacgaccgtcatctgggtagcgtccgcgctgcacgcggccgtcaacttcgggcagtacccgtacgccgggtacctgccgaaccggccgaccgtgagccggcggccgatgccggagccgggcagcgacgactacaagaagctggaggcggggcagaaggaggcggacgcggtgttcatccgcaccatcaccagccagttccagaccatcctgggcatctcgctcatcgagatcctctccaagcactcctccgacgaggtgtacctcggccagcgcgacgagcctgagcgctggacgtcggacgccagggcgctggacgcgttcagaaggttcggaagccggctggtggagatcgagaagcggatcaggacgatgaacgacagcccgacgttgaagaaccggaaggggccggtggagatgccgtacatgctgctgtaccccaacacgtcggatgtcaccggcgagaagggcgaggggctcactgccatgggcattcccaacagcatctccatatgagcctcctcactgcctgagcggatggtttgtagatgttctgttacgctgtgtgtaatgtgtcgtttattcgttggttttgtcagtctcagggtagggaatggagatgttgattggatccatgatctgtagggttgagagaggagtcacgtctggagaatgttgtcaatgtgtgtttctttcttgttaagaataaaagttcgtcagctcatttatctctactacttattaaagaataaacaaaagaaa

SEQ ID NO: 5860 - DNA, 1570 bp, Zea Mays
caagccgcaaacggacaaaaccaaagcaatccgtgcacaccgaactcctctcctccactcgcctcttccacgccacgcggatggcgtgcgcgcacgcaaggtccaaagaagcaggccatccgggacggcgcgagcgcgtcctgcgttccattccaccctcctccgtctccgatcctcgccttcaactccactccctcgctctctcgggccttcttccctagcggcgacgacggggtgatcactgattcactgccgcccgcgccaggtcggccagaactagtgggcgccaaacatcatagcgatcatggaggtggtctcttgcagccactcctgctcggcattacatcaaacaccagcaagcacatggaggcttcggggcagtgctcttggccttggtcttgggcatgccaggccttcccggaccagaagatacacagttgcgtgtgtaggaaccacgagtggagcttcgaatccgggtggttccggcaaggtccatgcagcccagggattccatgtaagcgacgtggatgcagccctgcagggcattccttccatgaaagccggggaggccgagagggtgatgattcaaggccttccggaaggccctgacagctccccgatcagtactgggttctgggagtggaagccgaagctgactgtgtactacgagaggtccggcatgaagaacagcaaggcacctgcggtgctcttcctgccggggttcggagtcgggacgttccatttcgagaagcagctgagggatcttggtcgcgatcatcgggtgtggacgatggattttctcgggcaggggatgtcgctgcctggtgaagatcctgctcctagtagcatagcgagcgaagatgcgttttggggctttggacaagattcgcagccttgggcagaggagctggtgtattctgtggatttatggcaaaaccaagttcagcatttcattgaggaggttatccgtgaaccagtttatattgtggggaactctcttggaggttttgttgctctgtattttgctgcatccagtccacaccttgtaaaaggtgtcacactgcttaatgcaacaccgttttggggattctttcccaaccctgctacatctccccgattgtcaaagattttcccatgggctgggacatttccgcttccatcatttgtgaggaaaattactgaagcagtttggcaaaagataagtgacccaaaaagtattcaggacatactcaaacaagtatacgctgaccattcaacaaatgtggacaaagtattctctcgtattgtggagataacacaacacccagcagctgctgcatcgtttgcctccattatgtttgctccaaggggtcagatatccttccaagaggccatctctaggtgccaagaccaaggcattcctatatctctcatgtatggaagagaagatccttggattagacctatttggggccttaaagttaaacagcaagtgcccgaagcaccttattatgaaattagccccgctggtcattgtcctcatgatgaggtccctgaggttaaccggacacgtgccactctacatccggcc

SEQ ID NO: 5861 - DNA, 1419 bp, Zea Mays
acacacactcactcactcgtacgccgtcgcttcctgcggtacgcactctctgtccgctgcgttcctccagctagcaactggccatcggggctgctatagcagagtaagtggcgatggctccagctcatgataggctccgccgcctggtgctgctcctcgtcgttgccaccgcggcggcggctttgcttctggcgccgacgacggcggatgctgcgctgccgcgggtgcagcacacgcccaccaaggccgacgggtcgctcgccatcctcgtcgtcggcgactggggccgccgtggacagttcaaccagaccttggttgcccagcagatgggcgtggtggggcagaagctggacatcgacttcgtcatctccaccggcgacaacatctacgacgacggcatcgccaacaccagcgaccccctcttcaaggaatcgttctccaatatctacactgccaacagccttcagaagccttggtacctggtccttggtaaccatgactacacgggaaacgcgctcgcgcagctcgaccctgccattcgcaaagtggatagccggtacaccgccattgccaagtccttcattgtcaactcagggattgcggattttttcctcgtcgacacaacgccgttcattgtccactactggaacaacaccaagttcgattggagaggcgtcgctcctcgagacacctacatcgcgaatctcctcaaggacttgaagtgtgcactgacagcgtccaaggctccctggaagatcgtcgtgggtcaccaccccatcagcagcgcctgcgggcatgggaacaacactgagctggaggagttgcttctcccggtcctcagggcacggcccaaactttcaggactacacacggggttgacatgtacttgaatggccatgaccactgcctgcagcgcgtcagcagcagagacagtcgtcttcagctattaaccagcggcggcgggtccaaggcatgggctggcaagttcaagcccaccctcgacaaggtggagttcctctacgacggccaggggttcatgtcgatgcgcctgagcaggacggaggcccgcctcgcgttcttcgacgtcgctggcagcgtcctgcactgctggaccatgcatgcccaaaaattaacgacgacgacgactgctgctgcagctaggcactaaagctttgctgggtacgatgagttgatgatgcaattaattatttggttttgtcgtcttttcgtgcgtgagagggaagcaataataattaattgctgctgcttctgttgttgtgtgcacatgcatgtgagggtgtcaagtatgttcagcctcttgcaagataaaatctctcgtcttctgtggaataaactgggaaaaaagtttttttttgtaaagtatgcaggagtttcgcgtgtgctgatatttcatagtga

SEQ ID NO: 5862 - DNA, 831 bp, Zea Mays
ctcacatacgctcctttatcttctagtgacgccgactccctgggatatttgctgcgcactcatctccctcagctagctcgaccgcctctctctggtctctagcgctgtggagctccttcctacgtgcgctagccgccaggtcgtcttcaacctccatccgtggagctcgcctctgccatggccgccctctgccctcctccctcaagccctagctgagtttttccatggtgccctggatgccagcccctttactcgatgcccctgctaggttcctggcatgttcgcccagaccgatgcctagctcccatggccgccctggatctccatggttgagttttctccctgcaggatccccccaaatagcgcctggtctttttcccttggtcgaaaacacctctgcacttaacccccctctgttgatggtcgacgtctcttcatccatggtacctaggtctccatccccatgcccctgcagcttgttctcaagccgccaaccatggagaaacttccggtgttggagggcgaagagctcgaagttctaaaggtaacgcccgccgggtgcttggtggaacgtctcaaccggaggttgttgtcgatctctcggattcgaggcgatttagttgtggtacgttaattgatcacgtgatgtggaagacaatagttggattaatctcaaagtgatgctgatgaataaaccagagaagtggatgatttgatcatgtaccaggatgggagatgctcaccaagtgatcgtcatctaacaacactgacttagtgttatcccaggcaagccccggtgcatttgccaccttccttgtgtttacaaaattt

SEQ ID NO: 5863 - DNA, 1136 bp, Zea Mays
aaaaggcccatggggctttcaatttagcgggtgctcccatctttcgttaggataagaggaaccctagtccctagcaacgcctacagcgtcacggaacaccggcgaaccaaacctcggagaaaccctagcaaggccgcttgcccctctcaggcgcgacacagcatcggcgactagcgatgacaggatatcgcagccgcagtccgagccgaagctacagcccacggaggcggtacagccggagccctcctaggcgcaagcgctacgacgatccacgcgaccgctaccgctgggccggggccggcggaggcggggaccgacgtggttacggtcggccgttggcgcagtccggtctcctcatccgtaatatctccctcacagccaggccagaagatattcgagctacatttgagcaattcggccctatcaaggatgtttacctgccaaggaatttccacacgagggaacttcgtggttttggatttgtcaaattccgctaccctgaggatgctgcagttgccaagcgtgagatgcatcatcaagtcattggtgggcgagaaatttcaatagtttatgctgaggagaatcgaaaaacgccacaagaaatgcgcatgagaacaagaactagtggtaggtacatggatgaaagatacacaagactgtcaagatctccaaggtctcgttcccactcttattcaccaccgccttctccagttaggcgtgacttcaggggcagggagcgcccggatagttattcccctcagtactcgcactctccacgccctcgggacagcaggcaccacaggtcagatggtcgctctccaactccaagcctagatgaccacaaacctaaggcgacaccagtcaatggtggacatggtccagcagttgcatccagatagtatgatgccattatggatgccttgaattgtgttcggaggctggagactgcagactatcttttcaccaatcttctctaagagatgagtagggttgtagtaaacagatacttggtagttgtattacagtccaatggccaaaatatcgtccgaggaaaaaatggtgaaatcagggtttatatgatctcgaggatggggacaaacgcatcccggcgcgcctcgatggtaacacccagtttg

SEQ ID NO: 5864 - DNA, 2010 bp, Zea Mays
ctcagagtcagaggctcagagcccagcccaggccggagaccactgtccactgcgtctgtctctgtcccgagctcccgatccatccatctgcatcgtgggaacaagaagaacaatgggtataatgcgagtcgcggacgatgtggaggccaggttggtggtcggggcaggtggcggcggcgggaccgccaccaccacgacggagccgcttctccgccactgccacggcggccgcaaggaggaggacgaccaggggtctaagatccgggacagcccggaggcggagggggcgtccgactgcgggaggacggacggaggctcgctgcggatggtccttgtctccaccgccgtcgccgtctgcggctccttcgagttcggcacctgcgtcggctactctgcgccgacgcagtcagggattgtagaggaagtcgggctatctatctccgagtcggagcaatggttggtgccgttactagtgggcgcttggctgattttctcggacgaaaaatgaccatgcggatatcagctactatttgtatattcggttggctctccatacatctggccaagagcgctatcatgctctactttgggagaaccttgctgggtttcagcactggagttctttcttatgtggtgcctgtgttcatagctgaaatagcgccaaagaatctccgcgggggtctcgcaacgtcaaaccagctcttgatctgttccggaagctcagctacctacatcataggagccctggttgcatggcgcaatttggtacttgttggtttagtgccttgtgtcctcttgctagctgggcttttcttcattccagagtcgccaagatggctggccaatgtcggaagggaaaaggaattccacgcctcattgcaaaagctgcgtggagaggatgctgacgagtatattgaatcactctatagccttccaaaggccaggcttcgagacttatttctgagcaaaaatatatatgcagtcattgtgggcgttggcttgatggtttttcagcaactcggagggataaatggtgttggcttctatgcaagttatatcttcagttctgctggattttctggaaaacttggaaccatcttgattggcattattcagattccaatcacattgtttggggccatactcatggataggagtggaagaagggttctcctgatggtctctgcatctggaacatttttgggctgcttcctcacaggagtatcattctatctgaaggcacaaggactgttctcagaatgggttcccacactggctctttccggcatactggtttacatcggggcatactcaattggaatgggtcctgtcccttgggttgtcatgtctgagatattctcaatcaacatgaaagcaactggtgggagcttggtgacccttgttagctggctgggctccttcgcgatttcttactcgttcagcttccttatggactggagctctgcaggtaccttcttcatgttctcttcagccagcttgatcactgtactcttcgtggcgaagctggtccctgaaaccaaaggaaggacactagaggagatccaggactcactaaacaccagaagatagtaatgaatttacttcacactacagaataattaattctaagatggaaaaatgggaatttacaggacacagcagaataattccaagatggaaaacgaatgtaccgtcagacctctgctcatcgatagatatgtatacaagaaacaatatatataattctcacgtcctcccgcttcccctccctttctctcccgcaccacctccgtgtaatacgtagtgtactgtgtaccctatgtaggttaaggaatgctgcagattcagattacgcattatgtaccgtgcccctccagattgtttgagcatgagcagcgacagaaccgacattatgtttatgtaccatgtccctctagatcaaccagcagtacattttttatattcaggatcaacatttatgtatcatgtttttttagggaaaaggctcag

SEQ ID NO: 5865 - DNA, 2700 bp, Zea Mays
cggatacagtcacaccttgtctcctcggctcctggctcctgttggacgccactcgccaccccactttccaaaccagaccacagccgaaaacccccgatcatgccgccgccggtcgaaccctacatcccttcgttcaccgccggcttgtccgcgcacgaggccgccgatgccgacaaagactacctctacttcctccgccacgtccgcctcgacggagacgcctacacggtcgtgattccgtccaaggacggcgcctcctgtcctccccagatcatcaggtacgaacaaccgcactccgatcacaatgccggggcccccgtcgcgggctctgaatgcgggagacaaagggcccatcccccgtcggaggagaactcttgggctacgggtgaggccgccccacacggcgtgaagcgcaaggttccaggcgcgagccccgccggcgaggtccgaagcggtgctgtccgtatggaagaggacaccccgacattggtggcgaagtccgcgtggtatgacttgcaacccgacatcgacgatgactaccgcttcttcctccagaatgctcgcgtggtgaatgacaaattggtgttcaagacggggaactgttcaataactatcggggaccatagtgatgctgaggagcacgacgacaccgaggaggaagagaaagaggaggaaggggaaggggaagaggatgatgaagaagaagcagacgaccttcctgcgtcagggcagtcgggggaggacggtatcggtatggaggaggccggtcctgtgtcagagacagaggacggtgttgactcggatttgccaattccaaaggtctttgagctagtttagcaaaaaatcgtgctatttccgtttcttgtgaagttcgttctaaactcctgataccaaccctttctttgccttgtgacttttgtaaaggaaatttagatctataccattaaaagattacaactttagatgtatatcattgatatctcacttacacgtgggatccacataagtcaatgacatgtggatatctaaagttgtaatcttttaatggtatagatccaattattcctttttgtaacacgtcttgcttataaagggagaaaattggatttctgccattatgaagcttaggattcgctcaaatgccactatgtgaacacgcttcgctaaaaaaccattatgaatcatatgcttacagacaaaatgccatttagggggttatctgaaacataaacttcttttactaaactgactggatgcttgtgcccctggcgacataatcgctgtcgctcatggatcggtccggttccagctgccaggttttcttcaggctctgctctatgcggttgggttagggaaaggagcgatacccactgctgctgcggtgaattgggtgctgaaagatggcctcgggtaccttagcaagatcatgttgtccaaattcggacgccattttgatgttaaccccaaagggtggcgactgtttgctgattttctggagattctgactccagtgttccctcacctgtttgttccagttggggtggctgctggtgctggccgctcagcagcttctttgatacaggctaagacttactttagtattgattatcaatattctatagtctgcatttatggaaatctatgctcattatagcgcaacataggtgttctgccttgtgtatctcggtatcctcataattggtagccatatgaacatgagacttatgatatggccactagaagatgtatgactatctgaagattttcatagcatgtttatactttatactcacctgagcgacggcgattatggccaggggcacaagcgtccagtcagtttagtaaaagaagtttatgtttcaaataaccctctaaatggtattttgtctgtaagcatatgattgataatggtctcttagcgaagcgtgttcacataatgacatttgagcgaatcctaagtttcataatggcagaaatccaattttcttttgtaaaggtgaaggatgaagtggtgagcaaaaatgaagaggatgatgtggggcctggatcagatttgcatattactaacgatcaggtgtattgtgagacggagaaggtgaaagaaggaggagggaatacgttgaatgatctagccaggagaacaacagatttggatcctttggacaagaaggaagcaagctcaagcaagggacatctggccatgcctctcaatccttcggaattacaaggcgttatatggcccccacatatcaatgagaggccaaattcagtttttaaagagaagttgattgagtttctcatcaaaccatttacacaggaagaatatgataggtattttgctctggctagtgatcgcattccaatggtcaaagaacgaaggacccgtaatacggtggcatactatcactggacgcatgagatgagcaagtcatactttgataggtacccagatcttgctcagcaattcagtctccaacgcaataactatacaaatggcttggctcttttgcgtgggcttttcttctggttgcagaacattgagctagaagaccaattcagaccatggagcgatgaatttaaaaagtaccgagttgtcatggaatgtttgtagagggtttacccatactagccattactccatccagttcagaaagtcgtttggtaagttagcgcggtcgtctctgtgcaactctctgacct

SEQ ID NO: 5866 - DNA, 1401 bp, Zea Mays
cgaaatcagacaccctctctgttccgccaggtatggctggattggctgcaacgctcccttcaccagccgcaggagcatcgccgctgctgctccactgcaacgccgccccttccgtctccttccgccaccgcaggcgttggcagcggccggctgctacacggcacgatggccgcgtcgcgcagctgttgctgccggtcgcgcgccgctggctgccggcagcagcgcctcccggagtcaatggcgcgcgcggaggcattgcggcgtcggggtcaggggcaggggcagtggctggggaggcgccgtacagaggcaacgaggggcaggggtcgctgtggatggtcttcctcgccacggcggtggtcgtgtgcggctccttcgagttcggcacctgtgtcgggtattctgcgccggctcaagctggaattgtgagcgacattgggttgtccaactccgagtatggtgtctttggatctgttttgacaattggagcaatgattggtgctgtgactagcggcagcctggcagacattcttggacgcaaaatgaccatgcgatttgcagcagttgtaggcatttttggctggcttactgtatattttgccaaggatgctatgatgctctatgctggaagagttttgctggggtattgtactggagttctttcctatgtggtgcctgtgtatatatctgaaatagcaccaaagggtatccgaggaggccttgcaacctcaaaccagttattcatctgttcagggtgttcggctgcttacattattggagcacttgtttcatggcgctgtttggttgtagtaggattgataccttgtgctgtcctacttgttgggcttttcttcattccagagtctccaaggtggctggccaacatagggaaagaaagagaatttcatgcttcattacaggagtttaggggggaagattctgacatttctgaagaggctactgagatcaaagattatataaaatcagttcgtcgattgcctaaggccaagattcaagatttatttcagagaaaaaatatgtatgcagtcacggtatccaagctagataaattttgtcctcttaaaaaacgaggtatctacagctctttctaaaaacttcaggattttctggaaaacttgggaccaccttgattggcgttattcagattccaatcacattctttggggcccttctgatggataggagtggaagaagagcccttcttttggtatgaacactctaaatctgagttgatctacagaaaagaaaagcattgttctatgtgtctttggttttcaggtctcttcatctggaacatttcttggctgctttctgactggactatcattctattttaagcagaaacgtcagttttcccttttactaatggtcatacaagga

SEQ ID NO: 5867 - DNA, 1863 bp, Zea Mays
gctggattggctgcaacgctcccttcaccagccgcaggagcatcgccgctgctgctccactgcaacgccgccccttccgtctccttccgccaccgcaggcgttggcagcggccggctgctacacggcacgatggccgcgtcgcgcagctgttgctgccggtcgcgcgccgctggctgccggcagcagcgcctcccggagtcaatggcgcgcgcggaggcattgcggcgtcggggtcaggggcaggggcagtggctggggaggcgccgtacagaggcaacgaggggcaggggtcgctgtggatggtcttcctcgccacggcggtggtcgtgtgcggctccttcgagttcggcacctgtgtcgggtattctgcgccggctcaagctggaattgtgagcgacattgggttgtccaactccgagtatggtgtctttggatctgttttgacaattggagcaatgattggtgctgtgactagcggcagcctggcagacattcttggacgcaaaatgaccatgcgatttgcagcagttgtaggcatttttggctggcttactgtatattttgccaaggatgctatgatgctctatgctggaagagttttgctggggtattgtactggagttctttcctatgtggtgcctgtgtatatatctgaaatagcaccaaagggtatccgaggaggccttgcaacctcaaaccagttattcatctgttcagggtgttcggctgcttacattattggagcacttgtttcatggcgctgtttggttgtagtaggattgataccttgtgctgtcctacttgttgggcttttcttcattccagagtctccaaggtggctggccaacatagggaaagaaagagaatttcatgcttcattacaggagtttaggggggaagattctgacatttctgaagaggctactgagatcaaagattatataaaatcagttcgtcgattgcctaaggccaagattcaagatttatttcagagaaaaaatatgtatgcagtcacggtgggtgttggcctgatgatttttcagcaactgggaggaattaatgccttaggtttctatacaagctatattttttcctctgcaggattttctggaaaacttgggaccaccttgattggcgttattcagattccaatcacattctttggggcccttctgatggataggagtggaagaagagcccttcttttggtctcttcatctggaacatttcttggctgctttctgactggactatcattctattttaaggcacaaggactgtgcacacagctggttcctactttggctctttgtggcatactggtatactatgcggcgtactcagttggaatgggcccagttccttgggttatcatgtcagagatattctcaatcgacatgaaagcaatcgccggagggtttgtaaccctggccagttggattggttcctttgcgatttcatactcattcaacttcctcatggattggaaccccgcaggcacattctttctgttctctgcagcgagcctggtcactgtgctgttcgtggcaaagctcgtgcctgaaactaaaggaagaacactagaagagatccaaacattgctcaaagccacatgagtggcttccattcgctcagtaggtaaagatccagttaaaaaaatgctgtaaatattcgcctcttgtaaattattgtgcatggcaggtgaatgatttcgcctcttgtcgattctcctatattttagtctctttgatatatgttatttaggacaaagatacggtctacaacatatgcttatcttcaactatttcattttctgagttttctctctgctactatacatcatcagtttcgacggttgtctt

SEQ ID NO: 5868 - DNA, 2472 bp, Zea Mays
agcaccagaaccctaacttttggttactgggtcacgcatgtcgtctgctgctgcggtggacgagatggagctggacggcattgagcggcaccgggataaggagaggagggagaggcataggagggaggagaaggatcacaatggcagtggaagaagggacagggagaaagagaaggacgaccggagaagggacaaggatgatggcaagcatagggatagggatagagatagggagagagacagggataaggatagcaagtacagagaccgggataaggagccagagcgtgaacgtaaccgtgaccgtgaccggggcaaagatcgggagcgggaaccagatcggcagcgtgacaaggaccgtagcaaagaccgggataaagaagcagagcgtgataaggaaagggagcggagggacagggataaggagagaagccgcaatagagacaaggacaaggataggacgcagagggaggatagggatcacgagaagtcaagggtgaagggtcgtggagaagacgaagcagatttatccaagggcgacaagggggttcagaagcagagagttgatgcctcaggggatgctgagcagcccgcagcagatgagctcagagagcgcattgcaagggcaaaggaggaaagattgaaggagaaaaaggaaggagggatactggatggtaatgacggggcttctgagatactgtcttgggtgggaaagagtcgtaaacttgatgaaaaaagacaagctgaaaaggagaaagcattacgtcttgcacgagcactggaagaacaggataatatcttggcagaaaatggcgatgacgatgatgacgataaagaggaagatacacaagtgggagatcacttatctggtgtcaaggtgcttcatggccttgataaggttttggaaggtggtgcagttgtcatgactctcaaagatcagagtattcttgccaatggggatatcaatgaagacgctgacatgcttgagaacattgagattggtgagcagaaacaaagagatgaagcttataaggcttcaaagaagaaaggaacttatgatgacaagttcaacaatgattcatcgtcaaaaaagtcgatactgtcacattatgatgaccaaatggaagatgaggtaaacattctgtttagcttcatttgcttgcatttcgagatattttgtaattgtattctctttaacttatcagggcgtgacccttgatgaaggtggacgtttcactggtgaagcagaaaagaagctggaagagcttcggaaaaggattgaaggtggttatgttcagaaaaagacagaagaccttacttccaccacaaagatatcaacagactattttacccctgatgaaatgcttaaatttaaaaaaccaaagaaaaagaaatccctgaggaagaaggagaagctggatctggatgcacttgaggcagaagcaattgcttctggattgggggccgctgatcgtgggtcgaggaatgatggaaagagacagtctgctagggaggaagaacaagcggctgatgctgaaaagagaagcagtggttatcaaactgccattgcaaaggctgaagaggcatcaagagcattgcgcggggagaaaactgcacctgctaaaccagctgaagaacttgttttcggtgatgattatgaagatctgcagaaatctctagagcaagcaagaaagttggccctaaggaagcaggaagaggcttcagcttctggtcctcgttccatagtcgaactggctactgcaaccaagagccaagaggaaacagaagccacagaaggagattcagaacagaataaggttgttatcacagagatggaggaatttgtgtggggactgcaattgaatcaaggaacacgcaagccagaagacgatgtgtttatggatgaagatgatgatgccatgccttcagataatgttgcaaaagatgacactaatgggttggcagagatggaagaggatgctctgacagaaataccagccaaggtcgaagaggatgaagtcaaaccagatgaggttatacatgaagttgcagtaggaaagggtttagctggtgctttaaagattcttaaggagcgaggaagcctcaacgagggaacagattggggaggcagaacaacagacaagaaaaagagcaagcttataggtgtcgaggatggacctaaagacattcgcattgaaagaatagatgaatttggcagagtgatgacacctaaggaggcattccgtcatctttcgcacaagtttcatggcaaggggcctggtaaaatgaaacaagaaaaacgccagaagaaatatcatgatgagctgaaaaccaagcatatgaaatcttctgacacaccattattggccgcggaaaagatgagagaggctcaatctcgtaatcaaacaccatacctcattttaagtggcaatgcaaaaacagggtgacagacgccggagcactggagtactg

SEQ ID NO: 5869 - DNA, 1863 bp, Zea Mays
gaggagaacactggggaactagtggagtaacaaagtaacccattggtcgagatcacttcgccgccgccgctttcgagatctccgggtggagcaagcgagcaaaggcagcagccatgtcgctccgcgtgctgaaccctaacgccgaggtgctcaacaagtcggcagcgctgcacatgaacatcaacgccgccaagggcctccaggacgtgctcaagaccaacctcggccccaagggcaccatcaagatgcttgtgggtggagctggtgacctgaagctgacgaaggatgggaacaccctcttgaaggaaatgcaaattcagaacccaactgcaatcatgattgcgaggacggctgtggcacaggatgacacaagtggtgatggcacaacctccactgtgctatttatcggggagctaatgaagcagtctgagcggtgcatcgatgaaggttctgtgcattcgcaaaccagatgaaccaattgatctatttatggtggaaataatgcacatgcgccacaaatttgatgttgacacccgtctggttgagggtctggtcctggaccacggttctcgtcaccctgacatgaagcgcagggcagagaattgttacatcttgacctgcaatgtctcattagaatatgagaaaagtgaaatcaatgcaggatttttttactcaaacgcagaacaaagagagaaaatggttgctgcagagagacgccaagttgatgaacgtgtcaaacagattattgaattgaaaaataaggtttgtgctggaggcgataaaaactttgtggtgatcaatcagaagggcattgaccctccatctctggacctccttgctagagcggggattattgctcttcgaagagcaaagaggagaaatatggagaggcttgtgctagcatgtggtggtgaagctgtcaattcagttgatgagttgactgaagattgtctaggctgggctggtcttgtctatgagcatgttcttggagaagaaaagtacacatttgtggagaatgtgaaaaatcctcgctcttgtactatactgattaaaggacctaatgaccataccattgcacaaatcaaggatgctgtccgtgatggtctaagatctgttaagaacacagttgaggatgaagcagttgtgctgggtgctggtgcttttgaggttgctgcaaagaagcatcttatcgacaatgtgaagaaaaccgtcaaaggacgagcacaacttggggtggaggcgtttgcggaagctcttcttgttatacccaagactttggctgagaactctggtttagatactcaagatgtgattgtttctctccagaatgagcatgaccgtggattagttgtggggttgaaccatcactctggggatccgattgatccccagatggaaggcatcttcgacaactactctgtgaagcgccagatcatcaattctggacccatcattgcatcccagttgctgcttgtggatgaagtgatcagggcaggccgcaacatgaggaaaccgacttagatttttgtcgccacctagccgagacttatttgttctaccttttgttttggttttgtgcctagtagtgatctggatgatacgtttgacttgagttggtcccatttcacgaagcaggtcgcattcgctttttttttttgggattactgcgtgcttccattttaacatgggattttagttttatcgatggttttaacatcctcctatgaggaaacaaagcctctagagagacgaggttgccttcccgaagttagtgccaccaaacttgctgcatggaacatgaagaagcaatgtttataacaatgttattatcaagtaatccgatgtgatggataaaatattggt

SEQ ID NO: 5870 - DNA, 4388 bp, Zea Mays
agaggacgattcacccgatgtaatacgcgattgttccaaccaagattcgaaggagaggcgacgcacggcctgactgtgcatcacatcgatgccttgcaccacatcgatgccttgcacctgtctctcatcacccccgtcctcggtggctggtgcggcgatcccttctccatccacagcgccgagagaggtctcaatggtgaggtctgccatcacgcacacaaacagtgggaagacctagaggcggcgggctgccatggtgaggtctgccgtctgccatcagcccatcacgcaggacgaataggaagaccatcagttgtgcgatcagcgtagggcgcctggttcggtccggtccggtccactgggccatcgggggcaaatcacaatgaaccagagagtgcaggagatacggcgggagggggtttatgtaaaattgctgctggacgttggatgaggaagggatggtccagattaaaagtgctcacatgtgcacgggagcgccatgagcacgggacacgatccctttttttttctcctcaaatctgaatcctgccaaaatacccgcagcccagctccgattccaacgaccaccgctccttcctcgccccagcctagcagcgcaggcgcggcgcagcgcaggccctgcgccgccctccgcgcacgtccaggtatccttcgaccgcaaccgcgcgcgcctctctccctcctcctgccgcaacacgtcctcctcgacgtcgtcgcctccgcccccaagaagtcgtacgtgatcgctccggacctccgtcgtttccttggatggatcggacgccattgttcatccggccggtctgcctccgttttgctcgctgaccgcccgcgctgagcccgcccgcccgctccctggcacgaggacgatgtagaggagcgcaagaacgggaggcggcgttggggacgacggggacgagatggaggggcgcaatcccgtgcagagattcgttgatagcccaaagccatacaacagaaggaaagcgcgcggtatgcaaacaaggatggattcgagtgaccacggcgaccgccaaggtccgagagcctgtgaagaattgccaggcaagatggataacgaccgtgccgatcgtcaacgcttgaaagcctgcgaattcccagccaagatggacaacaaccatgccgatcgtcaagtttcgaaagcctgcgaatcgaaaggcaatgcctgtgaattgccaggcaagatggataatgaccaccccgtccgtcaaggtttgaaagcccgtggactactgcaacctaagtcggatgctagtgaagatggcgtatgcgaaggtttgaaagcttgtggattgacagccaacaagatggatgctactgaccaatgcgaccacaaaggctccaaagtatgtagggtggtgacaaccaagacggatactagtgaccaaggcgattgtcaaaccttcaaagtatgtgggatagcagccaagatggatgttaacgaccatgccgatcaccaaggctccaaagccagtggaatgccaaccaagacagatgctaatgatcaatgcagcaaccaaggtccctttaagacagctgagaggttagatcatcttctgaaccaaccagcaaacagatactgtgctgattgtggtgctccagatccaaaatgggtgtcaatgacttttggtgttttcatttgcatcaagtgttcaggagctcatagaagtcttggagtacacatatccaaggtggtttcggtgaagctagacgagtgggcagatgaacaggttgatattttagctgattcaggtgggaatgctgcagtaaacatgatatatgaagcatttgtgcccgaaaactacgcgaagccaaggcaagattgttcagcggaggagcgcaatgattttattaggagaaaatacgaggctcaacaatttttgactaacccccagctttcatgtcctccacgacgcaacgagaaacataatcaccaacagcatagtactagttcaagtcgacatggtttaggccattcattcaggaacagctggaggagaaaagagcacgaggccaaatcaacaaagaaaacaatcgaggtgggcatggtagagtttgtcggattgattaagatcgacatcataagaggcacaaatctagctatccgtgatgtcatgtcgagtgatccttacgttatcattaacctaggacaccagacaatgaaaacgaaagtggtaaagagcagtctaaatcctgtatggaatgaaaggctcatgctttcgatacccgacccagtgccgctgcttaaactgcaagtctacgacaaggacacgttcaccactgacgaccggatgggggaggccgagatcaacatccagccactggttgctgcagccaaagcccacgagacctctgctatcgcagataccgcgcagctcaacaaatggctggcgaaagatggcatctggatcccgagggacagcgccatctccatcgtcaacggcaaggtgaagcaggtggtgaatgccaggctccagaacgtcgagcgcggccagcttgagatggagctcgaccatctgaaccgatgcaaatacttattgggaatgacgattctgtgctgtatacttgccatggacgccgcggcgctggagtcgctcatcctggacctccacgccatcgaggtcgtgaagctgggctccttcacgctcaagtccggcatcaaatcgcccatctacctcgacctccgcgcgctcgtctcccacccgcgcctgctctccgccgtcgcctcgctccttcacgcgctcccggccacgcgcccctacggcctcgtctgcggtgtcccctacaccgcgctccccatcgccgccgtcctctccgtcgaccgctcaatccccatgctcatgcgccgcaaggaggtcaaggcccacggcaccgccaagtccatcgagggctccttcagccccggggacaccgtcctcatcatcgaggacctcgtcaccagtggcgcctccgtgctcgagaccgccgccccgctccgcgccgaggggctcgtcgtcgccgacgccgtagtcgtcgtcgaccgcgagcagggtggcagggagaacctcgccgctaatgggatcacgctgcactcgctcatgaccctcacggaggtgctggccgtgctgctcaagcacgggaaggtgaccgaggagaaggcgcaggaggtgaggcagttcctcgacgccaacaggaaggtggcggtgcctggggcagcacctgttacacccagggtgctcagaaagacattttcggagagggcgaatcttgccaccaaccctatggggaagaagctcttcgagctgatggagaccaagcagaccaacctgtgtgttgccgctgatgtcgggacaacaaaggaactccttgagctggctgacaaggtcggccctcaaatttgtatgttgaaaacccatgtggatatattatctgattttaccccagattttggctctaagctccgctcgattgctgagaagcacaactttttgatcttcgaagaccgcaagtttgctgacattggaaatacagtaaccatgcaatatgaaggaggaatattccgcatattggattgggccgatattgttaatgcgcatatagtacctggacctggaatcgtagatggcttgaagctgaagggtttgcctaaaggaagagggctacttctgctcgctgagatgagctctgccggcaaccttgcccatggagattacactgctgctgccgtaaagattgctgagcaacattctgattttgtgatgggatttatatcagtaaatcctgagtcttggtcagtaaaaccatcaagccctgcatttatccatgccacgcctggagttcagatggtcgcaggaggagatgatcttgggcaacaatacaacactcccgaatctgtgataaactacaggggcagtgacataatcatagttggccgtgggattataaaggcgagcgatcctatgaagaaggcgtgggagtaccgcttgcaagggtggcaggcatacaagaacagcttgctatgaaggaaggggggcgccatgagcatccccaagtataagggcgaatccagtcagtttggcgaaataagcgcatgcggaaaggttttcctgcagttgagtcaggacctaattgacatcagattcactgcagaggagactcatgccccatcatcgtttctgttacaataatttcctctcggtttaccctgttcttgctggttgagttaggcacgttgtgatgcctgtgcgcggttaaatcgtcttactgccatgccacttgaggtttggactcttgagcaagcaattttatcgatgccgagaattgtatgactctacgtgcttagtgctacttccgtcactgtgtgttggcgc

SEQ ID NO: 5871 - DNA, 4828 bp, Zea Mays
agaggacgattcacccgatgtaatacgcgattgttccaaccaagattcgaaggagaggcgacgcacggcctgactgtgcatcacatcgatgccttgcaccacatcgatgccttgcacctgtctctcatcacccccgtcctcggtggctggtgcggcgatcccttctccatccacagcgccgagagaggtctcaatggtgaggtctgccatcacgcacacaaacagtgggaagacctagaggcggcgggctgccatggtgaggtctgccgtctgccatcagcccatcacgcaggacgaataggaagaccatcagttgtgcgatcagcgtagggcgcctggttcggtccggtccggtccactgggccatcgggggcaaatcacaatgaaccagagagtgcaggagatacggcgggagggggtttatgtaaaattgctgctggacgttggatgaggaagggatggtccagattaaaagtgctcacatgtgcacgggagcgccatgagcacgggacacgatccctttttttttctcctcaaatctgaatcctgccaaaatacccgcagcccagctccgattccaacgaccaccgctccttcctcgccccagcctagcagcgcaggcgcggcgcagcgcaggccctgcgccgccctccgcgcacgtccaggtatccttcgaccgcaaccgcgcgcgcctctctccctcctcctgccgcaacacgtcctcctcgacgtcgtcgcctccgcccccaagaagtcgtacgtgatcgctccggacctccgtcgtttccttggatggatcggacgccattgttcatccggccggtctgcctccgttttgctcgctgaccgcccgcgctgagcccgcccgcccgctccctggcacgaggacgatgtagaggagcgcaagaacgggaggcggcgttggggacgacggggacgagatggaggggcgcaatcccgtgcagagattcgttgatagcccaaagccatacaacagaaggaaagcgcgcggtatgcaaacaaggatggattcgagtgaccacggcgaccgccaaggtccgagagcctgtgaagaattgccaggcaagatggataacgaccgtgccgatcgtcaacgcttgaaagcctgcgaattcccagccaagatggacaacaaccatgccgatcgtcaagtttcgaaagcctgcgaatcgaaaggcaatgcctgtgaattgccaggcaagatggataatgaccaccccgtccgtcaaggtttgaaagcccgtggactactgcaacctaagtcggatgctagtgaagatggcgtatgcgaaggtttgaaagcttgtggattgacagccaacaagatggatgctactgaccaatgcgaccacaaaggctccaaagtatgtagggtggtgacaaccaagacggatactagtgaccaaggcgattgtcaaaccttcaaagtatgtgggatagcagccaagatggatgttaacgaccatgccgatcaccaaggctccaaagccagtggaatgccaaccaagacagatgctaatgatcaatgcagcaaccaaggttttgttacatgtactgctcatattcctattttgctgccccttgtaaattgtccctttaagacagctgagaggttagatcatcttctgaaccaaccagcaaacagatactgtgctgattgtggtgctccagatccaaaatgggtgtcaatgacttttggtgttttcatttgcatcaagtgttcaggagctcatagaagtcttggagtacacatatccaaggcaagacatgtggtttcggtgaagctagacgagtgggcagatgaacaggttgatattttagctgattcaggtgggaatgctgcagtaaacatgatatatgaagcatttgtgcccgaaaactacgcgaagccaaggcaagattgttcagcggaggagcgcaatgattttattaggagaaaatacgaggctcaacaatttttgactaacccccagctttcatgtcctccacgacgcaacgagaaacataatcaccaacagcatagtactagttcaagtcgacatggtttaggccattcattcaggaacagctggaggagaaaagagcacgaggccaaatcaacaaagaaaacaatcgaggtgggcatggtagagtttgtcggattgattaagatcgacatcataagaggcacaaatctagctatccgtgatgtcatgtcgagtgatccttacgttatcattaacctaggacaccagacaatgaaaacgaaagtggtaaagagcagtctaaatcctgtatggaatgaaaggctcatgctttcgatacccgacccagtgccgctgcttaaactgcaagtctacgacaaggacacgttcaccactgacgaccggatgggggaggccgagatcaacatccagccactggttgctgcagccaaagcccacgagacctctgctatcgcagataccgcgcagctcaacaaatggctggcgaaagatggcatctggatcccgagggacagcgccatctccatcgtcaacggcaaggtgaagcaggtggtgaatgccaggctccagaacgtcgagcgcggccagcttgagatggagctcgaccatctgaaccgatgcaaatacttattgggaatgacgattctgtgctgtatacttgccatggacgccgcggcgctggagtcgctcatcctggacctccacgccatcgaggtcgtgaagctgggctccttcacgctcaagtccggcatcaaatcgcccatctacctcgacctccgcgcgctcgtctcccacccgcgcctgctctccgccgtcgcctcgctccttcacgcgctcccggccacgcgcccctacggcctcgtctgcggtgtcccctacaccgcgctccccatcgccgccgtcctctccgtcgaccgctcaatccccatgctcatgcgccgcaaggaggtcaaggcccacggcaccgccaagtccatcgagggctccttcagccccggggacaccgtcctcatcatcgaggacctcgtcaccagtggcgcctccgtgctcgagaccgccgccccgctccgcgccgaggggctcgtcgtcgccgacgccgtagtcgtcgtcgaccgcgagcagggtggcagggagaacctcgccgctaatgggatcacgctgcactcgctcatgaccctcacggaggtgctggccgtgctgctcaagcacgggaaggtgaccgaggagaaggcgcaggaggtgaggcagttcctcgacgccaacaggaaggtggcggtgcctggggcagcacctgttacacccagggtgctcagaaagacattttcggagagggcgaatcttgccaccaaccctatggggaagaagctcttcgagctgatggagaccaagcagaccaacctgtgtgttgccgctgatgtcgggacaacaaaggaactccttgagctggctgacaaggtcggccctcaaatttgtatgttgaaaacccatgtggatatattatctgattttaccccagattttggctctaagctccgctcgattgctgagaagcacaactttttgatcttcgaagaccgcaagtttgctgacattggaaatacagtaaccatgcaatatgaaggaggaatattccgcatattggattgggccgatattgttaatgcgcatatagtacctggacctggaatcgtagatggcttgaagctgaagggtttgcctaaaggaagagggctacttctgctcgctgagatgagctctgccggcaaccttgcccatggagattacactgctgctgccgtaaagattgctgagcaacattctgattttgtgatgggatttatatcagtaaatcctgagtcttggtcagtaaaaccatcaagccctgcatttatccatgccacgcctggagttcagatggtcgcaggaggagatgatcttgggcaacaatacaacactcccgaatctgtaagtacagtctgtttgtgtggccattggaatattggtgtttattcacgaatcttaatgcttttagtttgttatacctgtgtgcatacttgcagttttttgggtttggtcacgccactccactctacaatttttaaagcatcagtttgttggtagattggtttcctcttgaccatttggaaatatatttagatcataatggccacaaccattaaaaatctgccattttgtttggtaaacaaaattctactttacacatttgatatatattgtggcattggcagatatcgctgcagcgagaatattctcctttttgaaaagttcaaatcttgagatatatgcttcagtctggaggtgtttcttgcctttttgcaatttaggtgataaactacaggggcagtgacataatcatagttggccgtgggattataaaggcgagcgatcctatgaagaaggcgtgggagtaccgcttgcaagggtggcaggcatacaagaacagcttgctatgaaggaaggggggcgccatgagcatccccaagtataagggcgaatccagtcagtttggcgaaataagcgcatgcggaaaggttttcctgcagttgagtcaggacctaattgacatcagattcactgcagaggagactcatgccccatcatcgtttctgttacaataatttcctctcggtttaccctgttcttgctggttgagttaggcacgttgtgatgcctgtgcgcggttaaatcgtcttactgccatgccacttgaggtttggactcttgagcaagcaattttatcgatgccgagaattgtatgactctacgtgcttagtgctacttccgtcactgtgtgttggcgc

SEQ ID NO: 5872 - DNA, 4497 bp, Zea Mays
tccgaggagaggacgcctgtgattgcactacacaacgtgcctctcgctcgctccccacgtcgctgtgagtgagatcgatcagacggaaccaccagggcaggagcaagctgctcatctccactccatccactgttttattggcgggcgcactgcttctgcgaccagagaacggcctcgctcgtcgtcgtgccactgtgccagtgaggctcttacgctcgtggcctggcttccttcgctgcgctgtgctgcggcgcccagttgcggctgcgcctttcgcttgtgctgttgcgtcccccgattggcatgccaagaagtccgtgaatcactgagctgcctggtgctgcttgtccgggcatggagcaggcgccgcagacccacggcggcggcggcttgctggcctgcggcgtcatggaggacgtcgcggtcggcgacctggatctcatggaggagctgtttatggcggcgccgggcttcgatttctccgacttctcccagcccggggccggcggcgagtccccgggggtctgcttctcgccgctgttcgacatctgcagcacaaccaccacggcaactcccccgccgccgccgccgtcaggcgacgacaacagggaccagcccaccccgccgcgccgcggctgggtgttccagccccggctggaggtcgatgccacggtgaaggagcggctgcggcgcgcgctagagcgcatcgcgtcgctgtcgcagacgcagcccggggagctgctggcgcaggtctgggtccccaccgtcatcggcgaccgccaggtgctcaccacgtgcggccagcccttctggctcgactgccggaacgagcgcctcgccaactaccggacggtgtccatgaagtaccagttctccgccgacgagaccgcgcgcaccgacctggggatgcccggccgcgtcttcgtcggccgcgtccccgagtggacccccgacgtccgctacttctccaccgaggagtaccctcgcgtacaccacgcgcagtacttcgacatccgcggcagcgtcgcgctccccatcttcgagccccgcagccgggtatgcctcggcgtcgtcgagctcgtcatgaccacggagaaagtcaactataatgccgagatccagaacatctgcagcgctctcaaggaggttgatctcaggagctctgatgtttcgagtgattcccgtgcaaaggtgactgatacttcataccgagcaatcataccagagatcgttgacgttctcagaactgtttgtgagacgcacaaactgccactggcccagacgtggataccctgcatctgccaggcaaagaggggaagccgccacaccgatgaaaaactcaagtattgtgtgtctaccctggacgaagcgtgttacgtccgcgacctgaatgtaaatggctttcacgaagcttgctctgagcatcatttgttcagaggtgagggtgttgttggcagggcctttgcaacgaacgagccatgtttctctgaagacattaccgcctccagcaagatccaataccctctctctcatcatgccaaacttttcagcttaagggctgcagtggccatccggttacggagtatcagcactggaagccttgactatgtcttggaattcttcctgccagtggactgcatagagattgaagagcaacgagccatgctgaattctttgtccattacaatacagcaaacatgctacacacttcgagttgtcagcttgaaagagctggtggatgaaggatcaattgaaacaagtgctctaactccaccagaatatgacaaatctatgcatgaaaacatagatgaggtttgtagtggcattggtgttcctgcaaggacagcatcactggaaacttccgaggaggtgtcctcatggatagcaagccttgtgtgcgctcaaaataagggagtgaaagaaatggatggtgacctgccatttggattcagcaagcaagaggatgaagggtttagtgttacagctggctggcatacctctccagtaatagagcctgaaggtagcatcttttcaggcttcaagcagcatgaagaatacaaggtcaaggaggtaacttgtctcagagatccaagctcatccaacttggaaaaaactgtagaaaagagacggactaagatggagaaaactgttagcctggaagaacttcggaagcattttgctggcagcctgaaagaagctgcaaagaatttaggagtgtgccccactacactgaagagaatatgcaggcagcatggaattaatcgttggccatcacggaagattaagaaagttgggcactccctgaagaaattgcaaatggtgatcgattcagtacatggtagcgaaggaacggttcagctcagctcgctctatgaaaactttaccaagaccacatggtcagaaagagagttacaaggggatgccacttatccattgtcagaggaaaaaggtcccttggaaccttctgttcctgatcggtattgcgagggcagattcacctcgcatacttctggttctaattccctctcaccctcttgtagccaaagctcaaattccagccatggttgttccagtggttcgaaatcacaacaacatgtcagtgctcctcaacttgcagtaaagaaagaagttttcatggaggagaatcagagctccacactactcaaagctgcaagccatgctgaactgcagatgcttcctgaagaaagacttgtcaccctgcctaggtctcatagccaagtgcttttaagtgaacaaaagccagtggaaaatataacaggtatgcaaatgtctaagcctgattctctcaagataaaagccatgtacggcgaagaaagatgtatattccgactgcagcctagttggggatttgaaaagctaaaagaagaaattctaaagcggtttggcattgctcgggaggtgtatgtggacctcaagtatttggatgatgaatctgagtgggttcttctaacatgcaacgcagacctgcttgagtgtattgatgtgtacaagtcatcaagtactcaaacagtaaggatcttggtacattctagtgaccagtaagtgcctgttcctttggtcaaactggtttgtcctgacaatggcgcaaagctcatcaggatgctgaagaaagcatacaatctctctttgaagtaaagtgcttgttgacatcgcgctcagtttcaagtcataatcatatatgcaaaagcagcatctgtaaatacctacactcgtgttgtcatcccgtggtcaagtgcctagtaagttctgtatgttgctgtttggtggctgtgtggcagaattggagagaaagtgattgttggtgttccctgtcagctcttgggattggtttgtatgcagtaagctgcatacagtctttgatataacagaagatgggacttctgtacctctagttcagtttgttaacagtacaggtagttcgttgaatgtaacaaactagtgtacaatattgtaggccggagggtggaatcagtaggaatttgtcgatatgaagctttggattaggttaagtaatcacgaccaagttgcatcgcgcttgtaagttcttttggattaggttttgaaattcaaaaactcgccaaaaaaccacaagctgtggaaagtggaatcaacagaagcatgcccatgccgtcatgtgtcgttttagtgggcacaatgaaatgtcttctcaccagtggcaaaaggtgtcgagcagagagcaactggctggagcaacactacgagctcatcacctggtcaaaatgagatttggttggttcaaggtcaatgttactttttcatgttcttgcttcaaccatgcagaaggggtggtggttttaggtatcctgaataattccacagttagaaagcaggagatgtcttagtctcctagacgacaatgcagcatagatattttcttttgtttcgctcttattaatttttgtccagcagtgtatttctcttgtgttttttgaggtagccttgtgtgtaatctgtcctcggattcgcagcatgtgtgtctgtttcataactcatagtctgcatgtatgttgctacgactgtggccatcctgtccgattccaagaacattgctgaacctatatactgctgtaataatgagggatcaatcgagtaaaaatgtgtactctgtggcgattagttgaatgaagctgaagaatcaatgccagtactgttctgagtcagcagctatagccttgctcaagccaagcaacgaccatgccgcatcagcaaggcctggaaaaatcatggtgcggcgacgaccggcgcgccccgggccgcggcggcaggtcccgctgccccaccgcccccctgctgcagggcctcgatgtcctcgagcgcggcgacgacgtcgtccatggaagggcggctcttgcggtcgctgttgaggcacttgccggcgagcctggcgaccccgagagcgcggccttggtgtggtactggccgtccatccgctcgtccatgaggctcttgagcttg

SEQ ID NO: 5873 - DNA, 3189 bp, Zea Mays
ggcttctttactctctaaattttcttttttttaaaaaaaaatattgttctttggcgtacgctggtgcgcctctcctccccgcctcggcatcgacgcgatttgcgtgcccgacatgtcggactcgccggtggagctgccgagccggctcgccgtactgcccttccgcaacaaggtgctgctccccggtgccatcgtgcggattcgctgcaccaaccccagtagtgtgaagctggtggagcaagaactctggcagaaggaagagaaaggcctgatcggggtacttcctgtgcgggactcggaggcaacagctgttggctctttgctgtctcctggtgtgggcagtgattcaggtgaaggaggcagtaaggttggcggttctgcagtagagtcatcaaagcaggacacaaaaaatgggaaggagcccattcactggcacagcaagggagttgctgccagagctttacacctttccagaggggtggagaagccaagtggaagggttacatacattgttgttcttgaaggtctttgtaggttcagcgttcaggaactaagtgcaagaggaccataccatgtcgcccgtgtttcacgccttgacatgacaaagactgaattggagcaggcagagcaagacccagatcttatcgctctttctaggcagtttaaagctactgccatggaactaatttctgttctagaacagaagcagaagacggttggtagaacaaaggtgcttcttgatacagttcctgtttacaggctagctgatatttttgttgctagctttgagataagttttgaggagcagctttcgatgctggattcagttcacttgaaagttagactctcaaaggcaactgaacttgtagacagacacctgcagtccattcttgtagctgagaaaataacacaaaaggttgaggggcagctatcaaagtcgcaaaaagaatttctactgcgccagcagatgagggccataaaagaagaacttggtgataacgatgatgacgaagatgatgttgctgctctggaaagaaagatgcagaatgcaggaatgcctgctaatatttggaagcatgctcaaagggaaatgaggcgcctacgaaagatgcaacctcagcaacctggttatagtagctctcgagcctacttggaacttcttgctgaccttccttggcaaaaggtcagtgaagaaagggagcttgaccttagagttgcgaaagagagccttgaccaggatcattatggactaacaaaagttaagcaaaggattattgagtatttggctgttcgtaagcttaaacctgatgccaggggtccagtgctgtgttttgttggaccacctggtgttgggaagacatctttggcctcctccatagcaaaggccctgaacagaaaattcataagaatctctcttggtggtgtaaaggatgaagctgatattaggggccaccgaaggacatacattggaagcatgccagggagacttattgatggactaaagagggtatctgtgagcaatccagtgatgcttctagatgaaattgacaagactggttctgatgtacgtggtgatcctgcatcagcactactagaagttcttgaccctgagcagaacaaagcattcaacgatcaacaggatggaaatcattgagctgccaggctacacacccgaagagaagttaaaaatagccatgaaacatctcataccaagggtattggagcagcatggcttgagtacgacaaatcttcagattcctgaggctatggtcaaactggtcatcgagaggtacacgagagaagctggtgtgcgcaatcttgagcggaacctagctgcattggctcgtgcagctgctgttaaggtcgcagagcaagttaaaactcttagacttggcaaggaaatacaaccaattactacaacccttcttgattcaaggcttgctgatggcggtgaagttgaaatggaagttattcctatggagcatgatatatcaaacacttatgaaaatccatctcctatgattgttgatgaggctatgctagaaaaagtacttgggcctcctagatttgatgacagagaagctgcagatcgtgtagcaagcccaggagtctcagttggccttgtctggacttcggttggtggggaagttcagtttgtggaggctacagccatggtgggtaagggtgacttgcatttgactgggcagcttggtgatgttattaaggagtcagcgcagctagctttgacatgggtgagagcaagagctgctgacctcaatttgtcacctacttctgatatcaacttattggagagccgtgatatccacatacattttcctgctggtgctgtgccaaaggatggcccttctgcaggtgtgacattggtaacggcactggtgtcgctttttagtaacagaaaagtcagagcagatactgctatgactggcgagatgactctaaggggccttgtattgccagttggtggtgttaaggacaaggtacttgcggcacatcgttatggaatcaagagagtaattttacctgaaaggaacttgaaggacttatcagaggttccattaccaattctctccgacatggagattctgcttgtgaagcgcatcgaggaagtactcgaccatgctttcgaaggccgatgcccacttagatcacgctccaagttgtagcacccaagtcgcgtttggtatggatgtttgcttgagaggatcatcgtcacagtaccacgaatggtcaacagtgtgagagtaagagcctagctctcttgccagcacaggtcttggcacgcccttttcggtttggcttcgcgtctggaatgtgtatacaggattactggtcagaattctgagaataacgagaagattctctgctgggatagtgggattccctgcatatttatgtgaaaccagctgtcggtatttatgcacagatgcaacagcaacacaaatctggtaggaacactggtgggtttctgtcgataatttgagtgtatatgtaatattatgtaatctattccagggaaacatagttaaaccgaggttgtgaaagccaaagagattgagaaatatcatacgtactttagggttgggtgacttgttacaaaatgtgcatattcacatttcttcaataaacaaccgaaaatgcaaacatttgctcgttaattatatccgcaaa

SEQ ID NO: 5874 - DNA, 1035 bp, Zea Mays
tagtagttcctggttcacacatgtaaactgacttaatagtactccacttcatcacatgggcggacggttggtaactttttgaagaaagtgaagatgccctacgatcaggttctagatattattggtctgggcacatggcctctgcaggataagcacttcttacaagggacaaattaaatggttggatcgattactagcactcactgaaagcaattggaaaatagttgttggatataatccattacttgtttgcaatgggaaagaaacaacaaagctcgatgtgccatttcaacatatttttgcaaaatatgaagtgaatgcatacataagcatgggcgggtcttgtggctacttccatcgagacaactcgatactgtacattggacaccccaggagccctggtggtgcccaaacaagtgtagatggttttttcttgcacagagttagacccctcgagatggagtcaatgttgataaatgtagaaggcaagctagttcagagatctgatgttcagcagcatggaacgggagccatgtgaacctcacaactttcagtttctgttccattatgtcgtagcgccgaacaaaggcgtgacataatgttgtgttgtattgtattcattcagtttaaaaaaagctgcattagatttttgtcattttgcctgtttcaacatgtttgagtttgtaggtagtctttatcattatttacaaacatacaagagttcactatcacatgcagagtgctgcccaagcagggacgagaagttagttaatacattacttttctttatctgctggttctgtgccagttgatctctcaaccgatacagtccgattttgtttcagaaattttagatgatggttgcaaggctgtaactatcgttttgatgattcctacggcccactacatttcattttatcttttacaaaaactaaattcagaactcagaaagatacggttggtggtatagcagtttctttggagacttgctgactgacaaagagtctgtgaaattgtgaattcgcagctccaaag

SEQ ID NO: 5875 - DNA, 769 bp, Zea Mays
ttcgtttgagcttccattgctacgtcagttaaaaagcaatgaggtgtctgcctttcttgcatggagacgccaaagagaaggaaccagtcactaagtcggcctctgtacggtccatgaacatacatcaacggagcgtgatgtccgctccggttcagacttcacctccttgaatgtttccgacatgagcgccgagtcgataaggaggacacagtaccccagcttcattgaccgcccgtctaacctgagggtgttctcctttgctgaattgaagagtgccacccgcaacttccgccggtctctcatggttggctagggtggctttggctgtgtgtacaggggtgtcatcaagacctccgacgatctgaacgaacgaatcgagatcgctgttaagcagttgaatcgtaaaggacttcaggaagtagctcttccactacatgagcaattgctggtggagtggagccttgctatttgctgttcctgctatcagttttgcctattggcggcacaggaaaccacaagagcattttttcaatgtatatggcttcaaagttagtctttgattattatctttcttgcaacataagggcaaacaacgtttatatgtagcaaacaaatacaatttgcaaacgttttaggaacatgtttttacaataaagatatacttatagtttcaccaatggatagccaaaaaatacaaccttttacatttgtcaaccttttagttcaggaaatacagcaagtagattttgttatgattgttttagttcag

SEQ ID NO: 5876 - DNA, 2661 bp, Zea Mays
ttacatgccactgagtggtatatatataacttttttgtgtgtattatatgtagggccagtggcacacaagtaatgagtacattttttgatggcatacatggaattgctcctaaacccaacacaaagttgtccacaggatgtgcatacctcaaaatatgcagtcgccgcgagatggattcatgtcggtgtcgtccaggaagattccggcggataatcaccacttctagacgacattgacgaggctggacgtttggtggagagattcgacatcttgccagcgaatgttttgtgccttgaaatcgagggagtggagaggaacgacggagacatgatcgtgaaatcaaggggggtgaagaggacctgcggaggcatgaaggaaatgtctggcatggggacggagaaaaccagtggattgggagctcacatcgcctgtgaatgttttgtgccgtggatgggtctttcttcgcgcttggaactgaacagaaaatctactcaaagtttcacagattggtatgagctgatcacccctggttgtgtagttccttctgcaatgatttactgcactcactgtgctgattactgcccctccataaaggaccctgacaaaggatacatatgttgtggtacatgtgggaaggttcttgatcaggaggtatacactgatgagcctacttttgttaaggataacacaggacagagtcgcttagctggaagtattcttgcaagcattgagtctggatattcgatttctcatcaaagaaccttagacaaaggtagggatgagattaggcagattgtcaataacttacatgtcagcggtggagaaactgtcgttagcaaggcttatcgcttctatgagctagctgtcgaccgtaattttaccaggggccgtagaacaagccatgttgcagctgcttgcctttacattgcctgcaggcaaagtaagaaggcttatcttcttattgatttctctgattatctccaaataagtgtttacgtgctaggtgctgtttttctccagctctgccaagttttgctactcgcggatcatccagttgttcagaaacttgtagatcccagccttttcatccatcgctttaccaaatgtttgctgggaagaagagataatgctgtctcagacacagctttttctcgagaagtctcagacacagctttacgcattgtagctagcatgaagagagattggatgcagactgggaggaaaccaagtggattatgtggtgcagcattatacattgctgcactctctcatgggtgtaattacaccaaggcagatattgtctctgttgtgcatgtgtgtgaggccactctaacgaagcgattgatagagtttgaaaatacggattctggcagcttaacgattgaagaatttctagcaacagctgatgaatataatgaagcgtctgtttcaaaatattcgcctaagtctggggaaatcctttgcaaacacaagggtaaagattttgagcattttgcccatggactttgtgaaaaatgcttcaataagttcactaaactgtcgggtggactagaaggtggtgctaaccctccagcattccaacgagctgaaaacaaaagacttgaagctgctaaaagggctgaagaagctgctgcagttaaggaggcagcgctggaagaatctctttgcgacacacagaattctgagattgagagtaccacaactcctaaaaaggctttaagcggggataaatcttcaacaattggatctgggggactcataaatgactctgtgccaccgaaggatcctgaagagggaggtgaaaattgtgaaggcaatgctgatccagaaagcctttctgacatcgacgatgtagaggttgattggtaccttcacaatgaggaagaaacacaatataaaaagattatctgggaggaaatgaacaaagagtaccttgaggaacaagcagccaaggaagctttggcagctgaattggcagctagagggattgttgtggaagagggaaagaaaaaacggaaacgtaacgaagacaccaagagctcgacgcctgctgacacaccggcagaagccacatacaacatgctgaaacggaagggacttggttccaagatcaatgagggagctgttggcgaattatacaagactaaagatgaagttgagagcgcgagtaggaaagaagagatggagttcgacgcactgtttgggccggacaacgctgatggcgagacggtcgatgatggtggttacggctatgggggctgcggcgatggtggcgcggaagcctacaatggcattgatgacgattttgatttctaggaggatgtgttatgtgtagcagcatttgcagctgaccagcacgggctagattcttcatctgtgcgttatagtttatagttagtttcatttttcttttgttaggggagtttgaccaaatcattatggagctattggatagtgcacttagttttggttgtataataatgttgggaactaggttctgcatgggcgtcgtaactgtcgcaagccctatgtggtcaagcgcctataccatgggcatttgttgtacatcccacctccaaaagattgcaagtggtgatgtaacattttgtattagcaataaaggacacaagaatgcattcatttgaaactttgaaaatctc

SEQ ID NO: 5877 - DNA, 1588 bp, Zea Mays
ctactccccacagcagctgaaaaccaaagaaaccgttggcggacgcccaccaaccaaaaaaaaaaaaaacccacgcctttcctccccgccggggctctccactctcgctccaacgccgacggagaagccgcagctctgctccctcgctctctcttccgggagcgcgtggctctattccattcgcgcccgctcggctgacaacggaggataaaattttgatcctttcatttgttggacattggatcaactggtgctgttatacatagaaaggagttcattgtaatttctcatctatatttagtggtgccataatcatttttccactggtgttcggcaataatgtcggagagcgagttagcagtaataaaaccagaggcgttaaagacttatatctggcttcagtgctttgatggttccattcagcaagtggaggaggaggttgcaatgttctgccccatgatatgtcgtgaaattgtgaaaaatggcacagggtcgtccaaaaatcatgctattgcgctccctgaaagagttaatccagccagtttgagtttgattcttgactactgccggtttcatcaggttactgggcgctcaaacaaggagcggaagtcctttgatgaaaaatttgttaggatagaaacagaaagactctgcgaattgacttctgcagctgacagtctacagctaaagccacttgttgatcttactagtcgagctcttgctcgaattattgaaggaaagacacctgaggaaatccgtgacattttccacttaccagatgacttaacagaggattcgcctattgaaccggttgtacgcgaagaagcggaaagagctccaggagcgccagaagctgaaggatgtacaagtacaaaaggaggaaaaagatgagagatctttggatgagttactttgttttattaatggggatggaggtataactacagtgagttatattgactatatgacttatgttattctgttcactgtttgtttctgaaactctttagatgacttaaatctgatgttttactgaggccagatattggtcaattttactccctaagattctgttcttttgaagtattgactatctgttaccttggttcttggttgattttcatcattgtttcatgttcaaccaaagtctaaaggctgaaacatttgcttaattagtgttttgtttaaataaaaacattcttaggctccatataaaccatttgacaggttcaggaggtggggaaagtagtaccaagagtaagaaaaagaataaaagaaggaaggatcatgctaagaaccccgcaaaagctgactctgagtctgtaaatgtggttaggtttcctgactgtttcccctgctgtgtattccatataggatatgtatttcttacatgatctatctggggagtttaggagggagctgcttgtgtggttccgtgcaaagtggatagcagtaatgtttctagacttccatgccaaagtccagatatgcaagatgatgtcgagtacccctttgaagatgctgacctcgatgatggacttgatcctgcaatgaaagaagagcttgatagtctgtttttaacatgcag

SEQ ID NO: 5878 - DNA, 870 bp, Zea Mays
cttacatcctattctgtgctggatcgctccatatccttgaagagtgtggcctatgatagatcaagtgctccaaaggatttccaggtccgtggatggtaccaaggaccacatgatgattcagaaaaggattcaaatgtgatgtctactttaggagagttctcttatgaccttgacaagagcaatgctcagaccttccaactagagagaaccgctcaatcacgtgttgtcaacatggttcagcttgatatctcctcaaaccatgggaacttggaacttacatgcatctatcgcttcagggtgcatggcagaaagcccgtctcccccagcactggaggatgaagccctgagctgtgacatgcgtgccaaagcgcgacaacattcttgcagcatttctgcctataggagctttggttcagcggttagcggttagtcggagcatttcagccagcgccgctgcaccagtgttgataatgttgattctattctcgcacattgttgtgaacagctcggaaataccttgcgaggtttccttaagctgttcctagtttggcatcaagttcgcctgttttctctgctcctcctcccctcctgttaagactgcagcttagtattccgtttgaaattggtcgtctcatttcaccaggactcgctcttaaaaagaagactttgccattatatggcctactcagctagggaggaaaagaaggggaatgctggggccaactgccaagctagttatgcacttatatctaatctattgatttgaatatgagagcatgccaagctagttatgcacttatatctaatctattgatttgaatatgagagcacgcaagttcttcatctgttgtttgagccttttcagcttct

SEQ ID NO: 5879 - DNA, 955 bp, Zea Mays
acttgtattagagacaacacactcatcaggcgttatcagtgaagttctgcaactcgattgggttccggatggcttgcacaatcacccttaagacagcaacgaacagcaccagatcatggcaggtgcgtggtactgcatacaagtggcatcgctacatcatcggagtgggctggaagagcttctgccaggataacagactcaaggcaggcgacctgtgcaccttcaacatcatcgagaccacgctgtggcatgttactatcacgcgctcagcattagcagcagatacttttaataagcaaaaaaagccaccttgttcatccagtagggacaagaagggcagttcaagcagagaaggagcaaagaggccgaaaccttccatggcacatttcagcaaggttcaggttccgccatcgtacgcaagacgatgtgcctacgacgttggaccgccgccctggatacggaagcagatgaatgccagcacaataagaaatcgtctttgtctggcaccggccttctgcaatcagattgagttgcggcgacgctgcgagatcgtgctcaagacctcgatcaacagcaatcattcttggcgggttggtggtctctcgcagaagaagggtagttacattattgggcccggttggaaaaaattctgcacggagaacagagttaaggttggtgatgtctgcaccttcaatgtcatcgaaacccagctgtggcatgtcgtcatcacacgccgttgctaagctatggctgttgcaaccagcatagcttgggtttgttgtaactagtatgttcgtttgactttaatccgtaccagcttttactggttctacggtgtttttacctcttcttagggaattggctgcacttgcatgtttcgaaacactagtttgacactatgcgtgaaattaaactagctcacgttaacaaatctcctttttttattgtgttcata

SEQ ID NO: 5880 - DNA, 735 bp, Zea Mays
gtggcgaccggcacatcaacatcagagagagggtggaacagacagagaaagagggactgtggtgtgcacatggaggagctctccaacaaggctctggcaccaagcttgctttcgctgtgcctggatgcggtagctgatcgtctcatcagcgacaacgccgccgcaggcggcggcgtgggccgaacgggttcgtcaggagggtgcagcggcggcggcggtctcgccggattctcggaagatgatggaggggaggcagacgaggaccgcctgcatccacaggagttggcggaggggcttccctgggagcttctccatcggctggcgtcccggctcccgcctgtcgtacttgagtcactccatcacgctgcacatgcccgatactgttctgctgaaactacttctggacttggagtgcaagatggagaaagacgtggggtgaaacgttcaaggtgtgaagatttcaacagcacttggcagttgttgttcaaacttcgctggcccctgggtggtaatactggacataataatttggtcactgtggattggcagcaaaagtattgggaaaagcatttacaagagtgtttaaatgaagctgcagaacatgcttttcttccttttttttgtgggagtattggtgagctgagtatatcagagggtccgtttgattggccaagtgtgcctggatgagagaccaccaagctaaatgcaataatgcatgattaaaaagaacagcag

SEQ ID NO: 5881 - DNA, 2173 bp, Zea Mays
gggctgccacaacccacaaggaggccagggaccaatcacagacagtcatcttctcccgttcacgtaacgtgcactagggtttatggtttagggcgaccgccgccgtcctacgtccagcggccaggttttcttctggccctctgcgctgactacaacccaccacctccggttttggatttggagacatggcggaagtggtggacaagctcaaggactacgatatcaagaaggagggagaagcagagatcctcctgcacaagaagaactccgtcttctttaatcccgtgcaggttcacaacagagacatgtccattgctgttttaaggacctttgttgccaagcgtaaggaagaacatgaagcgctggtggacaagaggaatacatcacataaaaaaaataaacaaagtgaaacatccagtcaaaatggagaggatgcgtcaactggccagcaagatgaaatggatgttgtttgtgaaaaggagctgaataaagctgaagatcaaattgatgatctgtcgaaagaagcaacagaaccttcttggaaagtaaccagagagcttaagccaccacttgttcttgaggctttggctgctactgggttgcggtctctccggtatgcccgtgaagttgagggcttaggaaaggtagttgctctggacaatgataaagcttctattgaagattgcaaacgaaacataaagttcaatggtgcttccgctactagtaaggtggaagcttacttggttgatgctcgaattcacatgctgacgcatccaaaagaatttgatgtgctgtacaggctgttgctgatggtggtctattgatgtgcactgccactgatttggcagttctttgtggtaccaatggagaagtttgttacgcgaagtatggttcattcccaaccaagggcaagtattgccatgaaatggctttgagaattctccttgccagtattgagagccatgctaatcggtacaagcgatatattgtgcctgttctctctgttttcatggatttttatatccgtgtttttgttcgagtattcacttctgcaagtgaaataaagaatacacctcttaaactttcttacatatatcagtgtgttggctgtgattctttccatcttcaatgtcttgcaaggactgttcagaagaagaataatggtgtgaagcatgcacctgctattggacctgttgttcctcaggagtgcagtgactgtggaaagaaatttaatgtaggtggaccaatatggtcagctcctattcatgaccaagactgggtactttctactttgacaggtgttaagtcaatgaaggatagataccctgcatatgataaaataacttcagttctaaatactatgtcagaggagttacatgacgttccattgtttttcagtctccataacatagcaggcactgttaagtgcacatctccatctttggttatgtttcggtctgcagttctaaatgcagggtatcggatctcaagcacccatgttaacccacttgggattaaatctgatgccccttgggatgttatttgggacatcatgcggtgctgggtgaagaatcatcctattaaggaacagccacgtgactcacctggcacggtgatcctttcaaaatcgccaaagctagaagcaaatttttcaagagcagttgctgccctcagcaaggctcagacaaataagattaaacgattccttccaaaccccgaacggcactggggtccgaaggtcagagcagggcggaagatcacgagcaaacatgtctctctgttgggccctgacgctatcaagggtgctgtgaacggtggtgactgccagaaagaaggaaacggtgctgagccagatagtacagcctcagaacccgaggggatcaaagacgttgaggatgagccctcaaacaaacgccaaaaaaccagcgacggcgaaccagcaagcgaaccttgatttgtttgtcaatctttcgcgtctccattgtgttgtgcctgtgcttttcttgtttgtaggtggtcgatggttatttataccacctgttggattttgaacgaacaaattgtggcaggtttttattaaacttttgttgcatgtgtgatgctcctcctagtcacagagggaaaagacctattaaagcataatatatagtatagctttctgcaatgtcgagac

SEQ ID NO: 5882 - DNA, 2214 bp, Zea Mays
gggctgccacaacccacaaggaggccagggaccaatcacagacagtcatcttctcccgttcacgtaacgtgcactagggtttatggtttagggcgaccgccgccgtcctacgtccagcggccaggttttcttctggccctctgcgctgactacaacccaccacctccgggttaggttttggatttggagacatggcggaagtggtggacaagctcaaggactacgatatcaagaaggagggagaagcagagatcctcctgcacaagaagaactccgtcttctttaatcccgtgcagagacatgtccattgctgttttaaggacctttgttgccaagcgtaaggaagaacatgaagcgctggtggacaagaggaatacatcacataaaaaaaataaacaaagtgaaacatccagtcaaaatggagaggatgcgtcaactggccagcaagatgaaatggatgttgtttgtgaaaaggagctgaataaagctgaagatcaaattgatgatctgtcgaaagaagcaacagaaccttcttggaaagtaaccagagagcttaagccaccacttgttcttgaggctttggctgctactgggttgcggtctctccggtatgcccgtgaagttgagggcttaggaaaggtagttgctctggacaatgataaagcttctattgaagattgcaaacgaaacataaagttcaatggtgcttccgctactagtaaggtggaagcttacttggttgatgctcgaattcacatgctgacgcatccaaaagaatttgatgtggttgatcttgacccttatggatcaccatctatatttctcgactcagctgtacaggctgttgctgatggtggtctattgatgtgcactgccactgatttggcagttctttgtggtaccaatggagaagtttgttacgcgaagtatggttcattcccaaccaagggcaagtattgccatgaaatggctttgagaattctccttgccagtattgagagccatgctaatcggtacaagcgatatattgtgcctgttctctctgttttcatggatttttatatccgtgtttttgttcgagtattcacttctgcaagtgaaataaagaatacacctcttaaactttcttacatatatcagtgtgttggctgtgattctttccatcttcaatgtcttgcaaggactgttcagaagaagaataatggtgtgaagcatgcacctgctattggacctgttgttcctcaggagtgcagtgactgtggaaagaaatttaatgtaggtggaccaatatggtcagctcctattcatgaccaagactgggtactttctactttgacaggtgttaagtcaatgaaggatagataccctgcatatgataaaataacttcagttctaaatactatgtcagaggagttacatgacgttccattgtttttcagtctccataacatagcaggcactgttaagtgcacatctccatctttggttatgtttcggtctgcagttctaaatgcagggtatcggatctcaagcacccatgttaacccacttgggattaaatctgatgccccttgggatgttatttgggacatcatgcggtgctgggtgaagaatcatcctattaaggaacagccacgtgactcacctggcacggtgatcctttcaaaatcgccaaagctagaagcaaatttttcaagagcagttgctgccctcagcaaggctcagacaaataagattaaacgattccttccaaaccccgaacggcactggggtccgaaggtcagagcagggcggaagatcacgagcaaacatgtctctctgttgggccctgacgctatcaagggtgctgtgaacggtggtgactgccagaaagaaggaaacggtgctgagccagatagtacagcctcagaacccgaggggatcaaagacgttgaggatgagccctcaaacaaacgccaaaaaaccagcgacggcgaaccagcaagcgaaccttgatttgtttgtcaatctttcgcgtctccattgtgttgtgcctgtgcttttcttgtttgtaggtggtcgatggttatttataccacctgttggattttgaacgaacaaattgtggcaggtttttattaaacttttgttgcatgtgtgatgctcctcctagtcacagagggaaaagacctattaaagcataatatatagtatagctttctgcaatgtcgagac

SEQ ID NO: 5883 - DNA, 2813 bp, Zea Mays
gctacgcccgtcgccaggctcccgtctccatgggtctcctctcaaacagttcaaccctcagattcgttccttctctggttgtggatgctaaagttattcatctggactataataatatccgcatatttttgtcacttaaagatgtaaaggtgatggtggagacaacacttggcaaagaagagttgaaagaggcagttttgatgtgcactaataggaaagctgccataaagaaaatagatacaaaggcatctcaagaattccttaatgaacataagcggctgtgcgttgagcagaggtccctcgccacactccgcgtcctgacccaattccgcgagggcgcgagggcgcccaatccccccgggcccatggcgtcgtcagagatcgaggtggtcgaggacgccacccccgccgcaaccagtggtggagctggacgggccgtcgcagaggtggcgaggcaggagggggagggggaggcgctcaaggacgatgtgtacacgggcgcggcgtatggggacctcgagaagctgcaccgcctggtcgagcgggagggccgctccgttacggtgcaagacgcgctcgggtaccacgcgctgcagtgggccgctctcaacaaccgcgtcgccactgcccagtacattctcgagcatggtgccaatgtaaatgctatagaccacacaggccaaacagcacttcactggagtgctgtgcgtggccatgttcaagttgcagaattacttttgaaggaaggagctaaagtggatgccactgatttatatggatatcagaccacacatgttgctgcacagtatggccagacaacatttctttgtcacattgttgccaaatggaatgctgatcatgatgttcctgataacgatggaagaagccctctccactgggctgcatacaagggatttgcagataccatgcgtcttctcttgtttttaggtgcttatagcacgcggcaagataaagaaggctgtacccctttacattgggctgctattcgggggaatttggagtcatgcactgtgctagttcaggctggcaaaaaggaggatcttatggttcaagacaatactggcttgactccagcccaacttgctgctgataagaatcatcgacaagttgcattttttctagggaatgctagaagtatacatgaaaggggatgcgtcgggaacagttattttgtgaaactatcaaaaatcgggcttgctcctcttctttggtgtatcattatagccttaatggttgtatatatacattcaattatcttagaagactataacacaaagatgaccgtaatttttgggttatttgcatggttgggagttttccttgcaagtgtcggactggttatgttttatagatgcagcaggaaagatcctggttacatcaacaagaatataagagattcacaaaatcaaagagacgatgaacctttgttgaagatgggtttggacagtcctgaacttcttgatggtaattggtctcgcctatgtataacatgcaaaattgtcaggcctgtacgctcaaaacattgctctacatgcgaccgctgtgttgagcaattcgatcatcactgcccttgggtatcaaattgcattggaaagcggaacaaatgggacttctttatgttccttatcctagaagtttctgcaatgattattactggtgtaatggccatcataagaagtgtaggagacccagcttccccagcatcatttggtggatggcttggctatacagctataaaccattcttgggtggtgtcttttgtcataatggacctcctccttttccttggtgttataactctaacagtaattcaagcatcacagatatccaggaacattacaacaaatgagatggcaaataccattaggtacagttacctcaggggaccaagtggcagattcagaaatccatatgaccatgggctgcgtgagaactgttctgacttcttgctgaaggggtacaatgaggatattgagagcactgtacagacattgcaatctgacgaggaaatgggaccaattcagatgagcagcccagtctcacagaatggcgagagcattccaccacatgtgaatggcactgaccatggttccaccatttcacatgccaactcaaaatcccatcgccaaagtccatccaattgtttgggcctagggctgggcactgggcataacaacccctctagccgttatgcgcgatctcttcttcccttatgatttgtcttgaggatatccagatgtgctcctttatatttgtgcatacttgttggacaaccagtcaaccacagctttgtttgggctatttcttcatgggtgctcggtgatttctctctggttgcacaaacgtgaaggcttcagaaacatcttcagcttactgcacctatgacacacgatagaaatagtgtcaatgtcaaggttttgttcttgttttcttggcaaaaggcaccaaggctctatgcctactatccaatatgtatgtacatggatggggctagtagttcatgcactaacccgttttgacttttgaggcatagttgtacgcttagggctgataacggcctataatttttgcactataagatttaagtatcaaatcgggttaggatcggactctatttctagtcatttttgaattataatttatttagggcattgatattttttgaagaaccatttggatcacgatccattaccacccatatgtacgctacgagagttgtaaaatgtacagtaacagaactacatggcatgtttgttcctgcatacgtatttatagaaaaaaatgatttgtct

SEQ ID NO: 5884 - DNA, 1367 bp, Zea Mays
gggtgaggattgaggaaaggatggggacgacacacgcacaccagaactcagggtctcaaccgccgaggccgatcgagcgaggcagaccgacaccatgtggctgccgcacgcgtccgacctccgcgccttcctcgcggctgctgccgtcgcgcatctctcctcctccagggcctcccgcgcctccccgtgcgcgaccccgccacctccgcggttccgcgcgttcgcctcctcccgcgcgtcgccgccgccctcgccctcgcaaacgggatcaatcgcctctgccgccgcagcagcatgcgagcatgtggcggagaagcccgctacatgcacggccgacgagctgcactacgcgcccgtaccgggcaccgagtggcggctcgcgctatggcggtaccttccgccgcctgaggcgccaaagaggaatcacccgctgatgctgctgtctggagtggccacgaacgccattgggttcgacctgtcgcctggggcatcatttgctcgtcatatgtccatgcaaggatttgatacatggattgttgaagtgcgtggtgctggcctaagcacgcgtgaatcagaactagctgcaactaacaccaagtctgacatcactcctgatcctaattttgatgaaagttctacaacaaaagcaagtattgctgttcctgctgagaatatgtccagttctcaacctcaaatttctgaagttccagtaataacagataagaacatggtaggaacaagtatatcagaagaaccacagctggtgacaaagttgtcaaatgctttggcacaattgggtgaaacattctcaggttatgtaaaagatagccggctgaaaaacatagctgacagtttttttgatcgagtgtcagaacttgctcctgctgcctccgtagctagccttgaggaggtttcacaaaggattttaggtttgttggaattgccacagacatcagtgatatctgatcaaattagcaatttaagccagcgccttgtgaagattctgggggaaaaccaacgaagtgtttcccctaagctgtttggctggcaagaacggctctcggcaaccatagaagacctacagaaacagttggagcttattataagctatgattgggactttgaccattatctggaggaggatgtacctgctgcggtttatggattacataagaaaacagagtgtaccaaaggatgggaaattgcttgctattggtcattccatgggaggaatcttattgtatgcaatggtttcaaagtgtggatccaaaggggctgagccagagctggcagcaattgttacattggcttcatcagttgactacacaacatccaattcctcactcaagttgctattgccgtttgta

SEQ ID NO: 5885 - DNA, 4323 bp, Zea Mays
ctgcactctccccactcaacaatcaaccacggcgtcacaaccgcacccctccgaaccctagctagcaccgcgcgccggagccccggagtaggtgcctgcttgccctcctgcggtggccgtcgcgctgccgccgcctgatccgattcgtctagccgtgtcaagcgccaccaccggtgatcgatgcgaggcgccgcgggaggcggctcgggctcgggcaggctgtgaggagaggctgtccgctcgctgcgtcgtgcgcctgtctgcgcgcgcgtctgctccgccgtccgcgccaagccgtccctcgccgaggggggctgcctctcacggccgctcggcctcgccgcgcgtctgcttcccaccacccacgcagggatcctcgcgggctggaggtcgaagcgcgagcggagagctaagagcaacaaggcgacgagatttgtgtggctacgattttgcgttgccgacggaacatgggaacaatggttgcagcggtggcgttgcgagggggaagcagcgatagcggaggatttgataaggttcccgggatggactcgggaaaatacgtgcgctacaccccggagcaagttgaggtgctcgagcggctctacatagattgccccaagccaagctcctcacggcggcagcaactgctgcgcgagtgtcctatactctccaacattgagccaaagcagatcaaggtctggttccagaaccggaggtgccgcgataagcagcggaaggagtcttcgcggcttcaggctgtgaacagaaagttgacggcaatgaacaagcttctaatggaagagaatgagcggcttcagaagcaagtctctcagttggttcatgaaaacgcgcacatgcggcagcagctgcagaatacttcattggccaatgacacaagctgtgaatcaaatgtcactacccctccaaaccctataagggacgcaagtaacccttctggactccttgcgattgcagaggagaccttcacagagttcctctcaaaggctactgggacagctattgattgggtccagatgcctgggatgaagcctggtccggattcagttggtatcgtggccatttcgcatggttgccgtggcgttgctgcccgcgcctgtggtttggtgaatctagaaccaacaaaaggcatagagatcttgaaagatcgtccctcttggttccgtgattgccgaagtcttgaagtgtttacaaggtttccagctggaaatgggggaacaattgaacttatttacatgcagatgtatgccccaacaactttagtccctgcacgtgatttttggacactacgatacacgacaacaatggaagatggcagccttgtggtctgtgagagatccttgagtggttctggtggtggtccaaatgcagcctctacacaacaatttgttagggctgagatgcttccaagtgggtatttagttcgcccatgcgaaggtggaggatcaattgtgcatatagtggaccatctagatctcgaagcatggagtgttcctgaagtgcttcgaccactgtatgagtcttctagagttgttgctcagaaaatgactactgtggcactgcgccaccttagacaaattgctcaagaaacaagtggagaagtagtgtacgccttgggaaggcaacctgcagtcctacggacctttagtcaaagactaagcagggggtttaatgatgccattagcggtttcaatgatgatggctggtctgtaatggggggagatggcattgaagacgttgttattgcttgcaactcaaccaagaaaattaggaataccagcaatgctgggattacatttggagccccaggaggcattatttgtgcgaaggcatccatgttactgcaggtaagggtgattattgtttgtgtgaaggcattatctgtacagtcttttcatattttatacttagaaataaagggggaaaagcaggtaccgttgcatattgcattgtgcagaagtaaacaaatgaactgcagaattttgttaagttacattgtacctcttaatcaaaaacataatatcgtccttgtttgatttgcactttagtgaatacatttctggctgtgcatgttatttctgataccatctatgcattgagagtatagtaacttctgattttttatctggttgtgccacaattaatgttaagcagaaaaaggcacaatagatgactttttaattgtacatggacattgtacactagaaatttaggagttccgcttaaatgcagtggtgggtgcacatttgacactagaaatttgagttttcacccctgtaaaatggaagagctccatcccagttttaaaataataaatatgctactgatatacacgattttaacatgattttctgaacctagattccctatatgctatgcttttttaaacatgtttctttattggtattctagagcgtcccaccggcagtactggtacgatttctgagggagcatagatctgaatgggctgattacaatattgatgcgtatttggcttcatcattgaagaccagtgcgtgctcacttcctgggttgcgacccatgagattttctgaggggcagatgatcatgccacttgctcacacagttgagaacgaggagattcttgaagttgtccgccttgaaggtcagcctcttactcatgatgaagctcttctttcaagggacatccaccttctccagctttgcactggaatagatgagaaatctgtgggttcctccttccagcttgtgtttgcaccaattgatgagcatttcccagatgatgctccattgatttcttctggctttcgtgtcataccacttgatgtgaaaacagatggtgtatcctctggtaggacgctagatttggcatctagtcttgatgtgggctctgctgcaccccaagcctcaggggaatctccagatgactgcagtttgagatctgtgctgacaatcgcctttcaattcccgtatgagatgcaccttcaggacagcgttgcagcaatggcccgtcaatatgttcgtagtgtcatttctgctgtgcaaagagtgtcgatggctatatctccctcccaatctggtctaaatgctgggcataggatgctttctggcttccctgaagctgccacacttgctagatgggtttgccagagttatcagtaatttccttcccgtgctgtttctgatacctcacctaaatggtttggttcttttttattgtaatctcatagctattcttttgggccccaatacagctaccatctaggtatggaattacttaatcaatcagatggagctggtgaagcattgttgaaaatgctctggcatcatccagatgctgttctgtgctgctcctttaaggagaaacctatgtttacgtttgcaaacaaggcagggctggacatgttagaaacatctcttgttgccctgcaagacctgacgctagacaagatcttcgacgagtcaggaaggaaagcactattctcagacatctcgaaactaatggaacagggctacgcgtacctgccgtcaggcgtgtgcatgtcaggaatgggccgccatgtttctttcgaccaagctgtagcgtggaaggtgctcggcgaggatagcaacatccactgcctggcgttctgcttcgtcaactggtccttcgtgtgactgacgcccaacccgtcgggtggttatggcgagctgaccctttttttgtatggaaaatcatcagctgtgacaaaaggcatatgttgcatgcactagttgaagaaactggtccaaatgctttttttgtttgtcattccattcagatgttgctaggtgtggagtggaaatggggcaatagtgtcacggttacacatgacccagcattaaccaaacaaccgcgtcgccagtttctttctattcgatcagggagatgcattttctggcaaaaatctcctatttttttgttgcaaatttggtctatgtatatggaactgctgctggacgccgagaaagcaagacatatgcggaaactcactatggctcgaggaaaatatatgcctacactgtcttcagaaaacataatgcagtaatgcttttcgaacccaaagcacacttgacacaaagctggagcacatgtaaagaggcacgccagatgagcaggtagggtctctcgcaaggctgatgccaacaattaaaccgacgacccttcacaacaaaatcacgattctttgttctcatcctgctccagttgaggctccttctctgcagcctcctcaaatgtctctccttggacaagctcagggacgtcgtcatcatcctgtgcagctgcttcagcaccaggtacct

SEQ ID NO: 5886 - DNA, 1832 bp, Zea Mays
aacgacaacctccacctcgccttcaactcctccacgctcccgtcctctccacctctcgctcccacctcccccgccgtcaccaccaccaccacagcctctcccccgcaacgcgttccttcccggtgcatgaaaccctaaacctataccccactcccctccccgagccatcctctccccccgcggcgatggccaaggcgctgctctactcctccctcctccccgggctgccccgcgctgtcgggagcagccggagcgctgccgcgaggctgctgctgctcccgcctctccggctgcggcgctctacacgctcgccgacgcagcggtagccgcggcggacgccgccgcgggcgcgggggacgacgccggccaagctgcggcggcggtccagaagaacggcggctggttcggcttcatctccgaggccctcgaggtcgttctcaaggtgctcaaggatggtctctcagcagttcatgtgccgtactcctacggatttgccatcattcttcttactatcattgttaaggctgcgacattgcctttaaccaaaaagcaggtggaatcaactatggcaatgcagaatttacagccgcagcttaaagcaatccagcagagatatgcgggcaaccaggaaaggatacagctagagactgctcggttatacaggcaagctggtgtcaaccctttagcaggatgttttccaacattggcaacaatacctgtatggattggtctttaccaggcactttcaaatgtagcaaatgaggggctattgacagaaggatttttctggattccatcactgggtggtcctacaacaattgcagctcggcaaagtggtgctgggatttcgtggctcttcccatttgtggatggccatcctccgctaggctggtatgacacgatatgctaccttgtattgcctgtgctacttgttgcttctcaatatgtctctatggagatcatgaagccacctcaggttcacaaacaatgtcctcagcacagcacagcaggtttggttgcggaaaatgggaggagccaagcctgtagtgagtgagggggataggaggataattacagcaggacgagcaaaacgctctaatgctcaaccagctggagaaaggtttaggcagctaaaagaagaggagagcatgagaaaagtcaacaaagcactcgctgcaggagactcaaatgcatcgtcatcaacgtatgacatggaggatgaagagtcggatgacgagaccacagaagagggagggcccgtggaggaagcatccagtactggcagtgacaagaagcctccaagttactcagggaagaagggcaaaagatccaagaggaagcgcatggtgcagtgatcgtcacagctcaatcggatgcgattttcgccacaactggttgattcagttgaccagttaggtgccgcagtggatcacggagacagttttggcggtctgctggagccctatatttggggtgcagacaaaatgaacagcttccggggtcacaggtatttgctgctaagcttatgcaaatggaggtagctgagtatatatgctaggcctgagggtgagtgatggaccggagaacaggagtcgggtacgcgtgcaagcagagagacagggtctgtagaagtagataaggtgtaatctctcgtcaagctgggttccagaatctggattgtcctcaccattcgtatgcattgcattgtatttgctttcctcttgtaacctaatgaaccactgttttggagggtatgatcgcgcaagctgacaaccatccagtcgtatacaaatgagttcgaattcgtcttgtcagaactcgttaagagaatg

SEQ ID NO: 5887 - DNA, 1923 bp, Zea Mays
aacgacaacctccacctcgccttcaactcctccacgctcccgtcctctccacctctcgctcccacctcccccgccgtcaccaccaccaccacagcctctcccccgcaacgcgttccttcccggtgcatgaaaccctaaacctataccccactcccctccccgagccatcctctccccccgcggcgatggccaaggcgctgctctactcctccctcctccccgggctgccccgcgctgtcgggagcagccggagcgctgccgcgaggctgctgctgctcccgcctctccggctgcggcgctctacacgctcgccgacgcagcggtagccgcggcggacgccgccgcgggcgcgggggacgacgccggccaagctgcggcggcggtccagaagaacggcggctggttcggcttcatctccgaggccctcgaggtcgttctcaaggtgctcaaggatggtctctcagcagttcatgtgccgtactcctacggatttgccatcattcttcttactatcattgttaaggctgcgacattgcctttaaccaaaaagcaggtggaatcaactatggcaatgcagaatttacagccgcagcttaaagcaatccagcagagatatgcgggcaaccaggaaaggatacagctagagactgctcggttatacaggcaagctggtgtcaaccctttagcaggatgttttccaacattggcaacaatacctgtatggattggtctttaccaggcactttcaaatgtagcaaatgagaaggatttttctggattccatcactgggtggtcctacaacaattgcagctcggcaaagtggtgctgggatttcgtggctcttcccatttgtggatggccatcctccgctaggctggtatgacacgatatgctaccttgtattgcctgtgctacttgttgcttctcaatatgtctctatggagatcatgaagccacctcagagtgatgacccgtcacagaagaacacactcctcgttttgaaatttcttccatttatgattggctatttctctttgtcagtgccatcaggattgtctatttattggttcacaaacaatgtcctcagcacagcacagcaggtttggttgcggaaaatgggaggagccaagcctgtagtgagtgagggggataggaggataattacagcaggacgagcaaaacgctctaatgctcaaccagctggagaaaggtttaggcagctaaaagaagaggagagcatgagaaaagtcaacaaagcactcgctgcaggagactcaaatgcatcgtcatcaacgtatgacatggaggatgaagagtcggatgacgagaccacagaagagggagggcccgtggaggaagcatccagtactggcagtgacaagaagcctccaagttactcagggaagaagggcaaaagatccaagaggaagcgcatggtgcagtgatcgtcacagctcaatcggatgcgattttcgccacaactggttgattcagttgaccagttaggtgccgcagtggatcacggagacagttttggcggtctgctggagccctatatttggggtgcagacaaaatgaacagcttccggggtcacaggtatttgctgctaagcttatgcaaatggaggtagctgagtatatatgctaggcctgagggtgagtgatggaccggagaacaggagtcgggtacgcgtgcaagcagagagacagggtctgtagaagtagataaggtgtaatctctcgtcaagctgggttccagaatctggattgtcctcaccattcgtatgcattgcattgtatttgctttcctcttgtaacctaatgaaccactgttttggagggtatgatcgcgcaagctgacaaccatccagtcgtatacaaatgagttcgaattcgtcttgtcagaactcgttaagagaatg

SEQ ID NO: 5888 - DNA, 1957 bp, Zea Mays
agacccgtcccactccaactccaggccatctccctacgcctcagacctcggtgcaaacctgccgcgaaaatagcagccgcccgttcgctctcccactcctcccgcgatgagcgacccgcggggccacgccgccggtcccgaccgtgacggggacgacccgctcgccgaggacgccaacagcgaggaagcgtggcagacgcccgagaaagagccggttgctgtgtcgaaagaggcggctgcgcggggtggggacacgaccccggacgccgaaccggagagcgatgacggagagggaggagtgggctccccggatcagatggagcccaatgcggacggggagcgcgcaccgcccgtggccgcggctgaggacccggaggggattgttggcagcgcaaaggtggagacgaacggcgaggacgccatcagccttgacgccgacggggaggaggaggacgacgatgatgacggagacgaggaggaggaggaggaggacgacgacgacgacgactccacccctgatgcgtctccgagggccgaggtgaaggtggagggcgaaagctccacggggatgacccagagtggcgccggccaccgcgtggaggtggaaccggaccccttcctcgacggtgatgactctgggacggaggaggagcaaggtgcgttcatggcggagctggagcgcttccatagggagcacagtctcgagttcaagccgcccaagttctacggcaagggcctcaactgcctcaagttatggaggcaggtcgcccacctgggaggccacgagcaggtaacggtttgtaaactatggcgtcaagttggagagactttcaggccaccaaagacctgcacgactgtttcttggtcatttcgaattttctatgagaaggcacttcttgaatacgaaaaacacaaggtccggactggtcagcttcagataccaccgcctggtttaccacagcctagtggtgctgaccgtgaggtggttgtaaatcaatcatcttctgccagagttagaagggatgctgcagcgcgtgctatgcagggttggcatgctcaccgccttctcacaaatggcacttatggggataacattttgaaggacaaagatacaatgccacttccaaatcgtgataaaaacctaagctttggggtgctcaagagaaagaaagcatctagtccagagtatgctctcaagtcgtcccgctcaaaaacaaataagtcacaggaagattctatggtcgttgacgttggagaaccagccgactgggtgaagatcaatgtgcggcagactaaagattgctttgaagtttatgcactagttccgggacttctaagagaggaggtgcatgttcaatcagatcctgctggacgtctggttatcacaggggatccagagcagcctgataatccttgggggatcactccgttcaagaaggtggtcaacttgccatcaagaatcgatcctcaccaaacatccgctgttgtcacgcttcatgggtttatgtcaattctgttgaggaaataggattttgtttgagcagatacatgatgtcaagctgacttagctgaaccgttctgtggttggatgctgattgctgctgttgccatctgttatcaccttgtttattactccctccgttcttttttatttgttgtggtttagtttaaaaatgaactagaggacgataaatatttgagaacggaggtagtattatagtagtggccataaagttagctgattcatgcatgtattccagtttcatggtgagattttatagagaaaggagatgttgttcgtagtagggctaatttgacattatgattacttattgttctttattatttttcttctgtattataaatgcctctctgggtcactccaggcgccttaatgttgcatttttgtgcataacgccggttcctatggtttatgaagctaattgctgtctctatg

SEQ ID NO: 5889 - DNA, 2025 bp, Zea Mays
agacccgtcccactccaactccaggccatctccctacgcctcagacctcggtgcaaacctgccgcgaaaatagcagccgcccgttcgctctcccactcctcccgcgatgagcgacccgcggggccacgccgccggtcccgaccgtgacggggacgacccgctcgccgaggacgccaacagcgaggaagcgtggcagacgcccgagaaagagccggttgctgtgtcgaaagaggcggctgcgcggggtggggacacgaccccggacgccgaaccggagagcgatgacggagagggaggagtgggctccccggatcagatggagcccaatgcggacggggagcgcgcaccgcccgtggccgcggctgaggacccggaggggattgttggcagcgcaaaggtggagacgaacggcgaggacgccatcagccttgacgccgacggggaggaggaggacgacgatgatgacggagacgaggaggaggaggaggaggacgacgacgacgacgactccacccctgatgcgtctccgagggccgaggtgaaggtggagggcgaaagctccacggggatgacccagagtggcgccggccaccgcgtggaggtggaaccggaccccttcctcgacggtgatgactctgggacggaggaggagcaaggtgcgttcatggcggagctggagcgcttccatagggagcacagtctcgagttcaagccgcccaagttctacggcaagggcctcaactgcctcaagttatggaggcaggtcgcccacctgggaggccacgagcaggtaacggtttgtaaactatggcgtcaagttggagagactttcaggccaccaaagacctgcacgactgtttcttggtcatttcgaattttctatgagaaggcacttcttgaatacgaaaaacacaaggtccggactggtcagcttcagataccaccgcctggtttaccacagcctagtggtgctgaccgtgaggtggttgtaaatcaatcatcttctgccagagttagaagggatgctgcagcgcgtgctatgcagggttggcatgctcaccgccttctcacaaatggcacttatggggataacattttgaaggacaaagatacaatgccacttccaaatcgtgataaaaacctaagctttggggtgctcaagagaaagaaagcatctagtccagagtatgctctcaagtcgtcccgctcaaaaacaaataagtcacaggaagattctatggtcgttgacgttggagaaccagccgactgggtgaagatcaatgtgcggcagactgtgcatgttcaatcagatcctgctggacgtctggttatcacaggggatccagagcagcctgataatccttgggggatcactccgttcaagaaggtggtcaacttgccatcaagaatcgatcctcaccaaacatccgctgttgtcacgcttcatggtcagctattcgtgcgtgcaccatttggtcatcctgatatgtagatatgaaatcctgtttacttcagttttgttgactggcgatgcctcgtcatcagtgatattccttgatattactagggtttatgtcaattctgttgaggaaataggattttgtttgagcagatacatgatgtcaagctgacttagctgaaccgttctgtggttggatgctgattgctgctgttgccatctgttatcaccttgtttattactccctccgttcttttttatttgttgtggtttagtttaaaaatgaactagaggacgataaatatttgagaacggaggtagtattatagtagtggccataaagttagctgattcatgcatgtattccagtttcatggtgagattttatagagaaaggagatgttgttcgtagtagggctaatttgacattatgattacttattgttctttattatttttcttctgtattataaatgcctctctgggtcactccaggcgccttaatgttgcatttttgtgcataacgccggttcctatggtttatgaagctaattgctgtctctatg

SEQ ID NO: 5890 - DNA, 599 bp, Zea Mays
aaaaagcgggagtgggctggaaaggccgagagaggctcgatggcgatcaggatgccggcgctcatcttccgccgccgggcggccgccgcagctccaaagccgatacaacagtacctcgctggtctatccaccgcagtggagcacgttattccagaagataacggtcacattgccggtggggaggagaacaagaagcggtgggtggagcttcctcccttcgcaccactcgacgccaacgccaccgctcgagctatctctcggggagatggtggggaaggagcatgctccaatgccacggctatcaggtgaagaagaatctggtgactgctgatacctcttcaacagacagtattactctgcaactccggttgagaaggcaaaagatgaacttgtgcctggtgatattctctttctacctgttaacattcaagaatcttctgttaccgagaagaccaagaaatttggtaacaagaatgagattgattttctacgtgaccttgaaatctacaaggatagagccatcattgtgctcaacaaaccacctggaatgccagtacaaggtggtgttggcataaagaatagcattgatatactggccc

SEQ ID NO: 5891 - DNA, 1625 bp, Zea Mays
ccggctcgttttcgtgatccaacggctacaaaaagcgggagtgggctggaaaggccgagagaggctcgatggcgatcaggatgccggcgctcatcttccgccgccgggcggccgccgcagctccaaagccgatacaacagtacctcgctggtctatccaccgcagtggagcacgttattccagaagataacggtcacattgccggtggggaggagaacaagaagcggtgggtggagcttcctcccttcgcaccactcgacgccaacgccaccgctcgagctatctctcggggagatggtggggaaggagcatgctccaatgccacggctatcaggtgaagaagaatctggtgactgctgatacctcttcaacagacagtattactctgcaactccggttgagaagggtttcagcaaaagatgaacttgtgcctggtgatattctctttctacctgttaacattcaagaatcttctgttaccgagaagaccaagaaatttggtaacaagaatgagattgattttctacgtgaccttgaaatctacaaggatagagccatcattgtgctcaacaaaccacctggaatgccagtacaagtccacaggcttgatagggattgcagtggcgtccttgttctgggaagaactcaatttagcgcttcccttatgcatgctatatttcgtgagaaaactgctgatgctttaggtgatggtactcaacaagtactgcaaagaaaatatgttgcacttgttattggaagacctaggcatcccaagggtttattgtcagcaccacttgcgaaggttgtattacaagatggcaggtcagagcgtctgactgtttgcgctggttcaaatactgcttctgttcaagatgctttgacagagtaccgtgtgattgagtcttttcctcaagggtacacttggttagaactattccctcgaactggaaggaagcatcagctccgagtccattgtgcggaggttctgggaacacccatcgttggggattacaagtatggacgccaagcacaccagaactggatgcctctccccatgccacaaacaatcgacaaggaaatgctgaagaagaggaagcttccctttggtcttactttgggcggtggaagcgtagctgagcagcagcctcagctgcatctacactgcaagcagatgatccttcctgacatctcagcagctatgcaacagctgcggtcttcagatgctgaccacgatttctctgatctggagaagctgagctttgtcgcgccattgccattgcacatgcagttaagctggaagattttgttgtccgtaggcaagtagtgttgtcatttcttctttaggcatgcttgcttgctgtgctgtaataactttataactgcgaggtttgcgttaagacgtcgtagaaagcttaatttgggctgttggagcagcggacctctaatgaggtgaaagatgacatcacactcagaaacgatgttgataaatattttattgttttttcttttcgttctggtctcccaacatgacttttcatatgatggcggcggcggcacgccgccgttcaggcgctggggtgtgagtccacgacggcgcgaccgcaagcagtcgctgttgatgtagg

SEQ ID NO: 5892 - DNA, 1014 bp, Zea Mays
aaattaatttttccgattagtccacaagtcaatggctaatttgtcttcttccattcttcttctcctttccttcactctctggcttcccgatctcttctctctctctctcgtctctcacatctccagcccttcgccctcttctcggcccgacctcgacggtgttccaccatctcctaccctcttcttttcccgcccgcgccatccctttctccgctgtagccactgcaagccccgcgcgacgcacacggcagtggtccacgtcgaccaaatcgtccacagcatcgcgttctcctcggcgagggtctgtagcctgccggcgaggagctcgcagcgaagatccgtgcaagccaccctccagatcgtcacagccagacaacaaccatgagtctcgcttgtcttgtatgccatggcatgagcagcccctcgcactctcttagaagctactcggtgtcaagctcagaggaggaaagccggtgtggagctgttgttgcctgcttagctcgaagagtaacaccagctggaacctctactagcgttgggacatcgaaagtgaccccctttccacccgtggtgagtgatcaagttggtacagagggcgctcctcgacttcaacgcagccgtgctgtgtccagggaccttgttagagactggaacttcgacgaagtaatcgtcgcaaattagagtagccctcaacagtcgtcagctggactctgtgctctacttatcaggcaggagattccttcattcgatgtaaaattttcatagtagacgtctggaagtccatgccaatacttgatgaggaaatgctcgagagggatggtacctttcaggagcaatatttggactgttgcagttatatgtggtcacgtacctgtgtaggtaggataaatgttttgagtgtgttttcctaattttcagacgtgtataagttgtcatgtacctttatgtatattatgaatgaatccaacttcagatctcgatctaatattcaaacggaagtaatattttggtgta

SEQ ID NO: 5893 - DNA, 575 bp, Zea Mays
ataatgatagaaggtcgtagcacaaccttaaatgaggtgccgccgtcgccgccgatgatgctgaacggacgtgccgcgtccccatccagaaccatccctgctcaacaccttctccgttgctcaccatggcgtcgtagttgttgccggacccattgccaccagatagtcacggcctcttcgtaacttcactccgttcatgttcgtcgccgctcgtgccaccctcccgcggctccctcatcacccatcgttgctggttctgcccgctgttgctggagatcgtgaccatggaactcacgtcgtcgtcctagcgctcctcgcgatgttgctgctccagggcgtcatcctcatgtcaacggtggagggccttgtgtggatcatgcaagaagctccacaagttcctcatcaagaagatcaggcaaactggttggagggatcttatcagaaatgtagcggcggactactcatctctttggagagcggaaacagccttactttccaacttgataagtttctttggcgctttgaaccattgcccatcccttttcatgggctgcatcttctaccagagcgggtat

SEQ ID NO: 5894 - DNA, 678 bp, Zea Mays
ataatgatagaaggtcgtagcacaaccttaaatgaggtgccgccgtcgccgccgatgatgctgaacggacgtgccgcgtccccatccagaaccatccctgctcaacaccttctccgttgctcaccatggcgtcgtagttgttgccggacccattgccaccagatagtcacggcctcttcgtaacttcactccgttcatgttcgtcgccgctcgtgccaccctcccgcggctccctcatcacccatcgttgctggttctgcccgctgttgctggagatcgtgaccatggaactcacgtcgtcgtcctagcgctcctcgcgatgttgctgctccagggcgtcatcctcatgtcaacggtggagggccttgtgtggatcatgcaagaagctccacaagttcctcatcaagaagatcaggcaaactggttggagggatcttatcagaaatgtagcggcggactactcatctctttggagagcggaaacagccttactttccaacttgataagcgaggttacaagtcacctgaagattatcctggtacctggaatctcatgtctcaggcaagttgtgcccttgaccacttatgttacccaataatgttctttataatcatttattcatgcataggcttaattttgatgggacccaataggtcaccctagactgattatctttt

SEQ ID NO: 5895 - DNA, 3755 bp, Zea Mays
atgccattaactcctaggcagaccaagcatttgctgaattatctttctcttgcaccttattttgctatcctgaatatgcttgattctcttttatgcagaaatcaatacgattcccaggttagacattcagaggggaaaaacttgcctgtggaaaatcaagttctctcaaatgagtgcttaggtgcattgttctcaagacctatttacggcgaacacagcagaacaatcctttccccagaaggaggtgcagatatgtctccctctcaggagccccaaaagcactcactgaggtcttccactgatgaatctacaagagcaaccaaagaagttattctggagcatccaaagaagttattctcagagtctcatactaattgcattcatgctacagccttaaatgagaactttggtgtgcaaactccttcccaggttgcctcaaagaaaatcttcccagggcttgctcatggtgctgatacacctttaactggatatggttcagaacaaactcttttgcagcattcatcaaagaagttctcattggtttctgctaatggtaaatacactagagcagcggtgacaccgtttgagcaaaattcaaataatacccgtgcagaggaactttcaaagatgcgctcagggtcttcagacatgttgtatcttaaaccaacaaatttgtctgcagaactcgagacaaatggaaccccattgaagaatcactcaaagaattcctccttgcttatggacggtaaatataacataacatctgctgcactatttccagaacttgactctagtcctctgaaaccagaaacaccagcaatgcaggcagctattcctcgcctgaagcgagttcaggaagaccaaggtgtggatgccaacaaccaatgccctcctttgtgggccatgaacaagaagatgaaatcagctcattgttctattgaaaagaaggatcatgatgaaatggctggtagcgcgcgtagcaaatttgagtggctgaattcatttgccatcagagatgcaaataaaaggcggccaaatgatccactttatgacaagagtacccttttcattccacctgatgcattgagaaaaatgtcaacatctcaaaagcaatactggaatattaagtgcaaatatatggatgttgtcctctttttcaaagtggggaaattttatgagctctatgagctagatgctgagattggccaaaaagaacttgactggaaaatgactgttagtggggtgggcaagtgcagacaggttggtatttcagaaagtggtatagatgatgctgttgataagcttatagctcgggggtataaagttggaagaatagaacaaatggaatctgcaaaccaggccaaagctagaggagtacattctgtgaccctagcttctagcggtttccaggtctttggatttgctttcctagactatgctgcccttaaaatttgggtgggttcagtccaagatgatgactcgtctgcagctttgggtgctttgttgatgcaggtttctcctagagaattaatctatgaaacctcaggcatctcaaaagaaactcaaaggacaataagaaaatatgcctcagcaggatctgtgaagatgcagctgacccccctctccgggatagatttctctgatgctgcacagattcgaaatttaatacattctaaagggttctttaatgcatcaacagagtcatggttatctgctttggattgcacaatgaatcaagatgtagttatttgtgcacttggtggacttattggccatttgactaggctcatgttacatgatgccctgaaaaatggggaagtcttaccataccatgtgtacaaaacatgtttaaggatggatggccagactcttgtgaacctcgagattttcagcaacaatttcaatggtggttcatctggtactttatataagcaccttaatcactgtgtcacagcatctggtaagcggatgctaagaaggtggatttgtcatccacttaaagacattgatgctatcaataaaaggcttgatgttgttgaggggtttatccaaaactgtggactaggccctacaacacttgggtatctccagaaaattcctgatcttgagagattattaggacaagttagatccactgttgggttatcatctttgcttcaactgccctttattggagaaaaaataataaagaaacggattaaaacatttataatgcttatcaatggcctccgcaatggtattgacttgctaaatgatttacaaagagcggaccatggtatcttggcgctttataagattgtggatattccatcattgagctatcttcctgagttaatccataagtttgaagagagaatgcaaaatgagtttccatgtggccaggtttctgatgtcaatgccaatggtgccaacgatttggctgctctgatggacgtttttatcggaaaggcttctgaatggtctttggtgatcaatgccgtcagcactattgatgtgcttaggtcctttgctgcaatgacattgtcatcatttggtgccatgtgcagaccacaagttctgctgaaagatgatgtgcctgtacttcgtatgaagggtctgtggcatccctacgcttttgcgggaaatgcaaatagtctggtaccaaatgatttaacccttggtcaggatttatctggtctcaatcgttttgcattgctgttaactggtccaaatatgggtgggaaatccacaatcatgcgtgccacctgcctggctgttgtacttgctcagcttggctgttatgtcccctgcacgtcatgtgagttgacccttgcggattccatctttacgcgcctcggtgcaacagatcggattatgactggggaaagtacttttctcgttgaatgtactgagactgcctctgttcttcagaaagcaactgtggactcgcttgtcttgcttgatgagcttggcagaggaactagcacatttgatggatatgcaatcgcatatgctgtgtttcgccacctagtggagcgagtgcgatgccgtcagctctttgctacccactaccattctcttacaaaggagttcgcctcgcaccctcacgtgagcctccagcacatggcctgcatgttcaagccaaggagcgacggcaacggccagaaggagctgaccttcctataccggctgacctcgggggcctgtccagaaagctacggcctgcaggtcgccgcaatggcagggatcccgaagtcgatagtggagaaggcgtctgtcgcgggccaggtgatgagggctaagatcgccgggaacttcaagtcgagcgaacagcgagctgagttctcgaccctccacgaggaatggctgagggcggccctggcggtgagcgcgatggacggacaaccggacgacgacgacgtcatggacacgctgttctgcatccagcaagagctgaagtctcacttcaggaaggcgagatgagcattcgccgccgccgctgatcgcgtacgtgggagtactaattatcaatgcctagattcttcagtgatgtcgtatctttacaaccatggtagatataatgtaatccgcgttttttttccatggcacgaatcctgtactttaaacaaagtatcttgtgtatatatgttctgtgctatgtcttgtttgcattgggcagcaaggaccactatccttaatcacttccaccgtttatgtgcatcatatacatttgtgtttggtttgaggaataaaatagtttattatcttttcacttt

SEQ ID NO: 5896 - DNA, 3786 bp, Zea Mays
atgccattaactcctaggcagaccaagcatttgctgaattatctttctcttgcaccttattttgctatcctgaatatgcttgattctcttttatgcagaaatcaatacgattcccaggttagacattcagaggggaaaaacttgcctgtggaaaatcaagttctctcaaatgagtgcttaggtgcattgttctcaagacctatttacggcgaacacagcagaacaatcctttccccagaaggaggtgcagatatgtctccctctcaggagccccaaaagcactcactgaggtcttccactgatgaatctacaagagcaaccaaagaagttattctggagcatccaaagaagttattctcagagtctcatactaattgcattcatgctacagccttaaatgagaactttggtgtgcaaactccttcccaggttgcctcaaagaaaatcttcccagggcttgctcatggtgctgatacacctttaactggatatggttcagaacaaactcttttgcagcattcatcaaagaagttctcattggtttctgctaatggtaaatacactagagcagcggtgacaccgtttgagcaaaattcaaataatacccgtgcagaggaactttcaaagatgcgctcagggtcttcagacatgttgtatcttaaaccaacaaatttgtctgcagaactcgagacaaatggaaccccattgaagaatcactcaaagaattcctccttgcttatggacggtaaatataacataacatctgctgcactatttccagaacttgactctagtcctctgaaaccagaaacaccagcaatgcaggcagctattcctcgcctgaagcgagttcaggaagaccaaggtgtggatgccaacaaccaatgccctcctttgtgggccatgaacaagaagatgaaatcagctcattgttctattgaaaagaaggatcatgatgaaatggctggtagcgcgcgtagcaaatttgagtggctgaattcatttgccatcagagatgcaaataaaaggcggccaaatgatccactttatgacaagagtacccttttcattccacctgatgcattgagaaaaatgtcaacatctcaaaagcaatactggaatattaagtgcaaatatatggatgttgtcctctttttcaaagtggggaaattttatgagctctatgagctagatgctgagattggccaaaaagaacttgactggaaaatgactgttagtggggtgggcaagtgcagacaggttggtatttcagaaagtggtatagatgatgctgttgataagcttatagctcgggggtataaagttggaagaatagaacaaatggaatctgcaaaccaggccaaagctagaggagtacattctgttattgaaagaaagttggttcatgtgtccacaccatcaaccgcggttgataacattggtactgatgctgttcaccttctggcactgaaagaggtgaccctagcttctagcggtttccaggtctttggatttgctttcctagactatgctgcccttaaaatttgggtgggttcagtccaagatgatgactcgtctgcagctttgggtgctttgttgatgcaggtttctcctagagaattaatctatgaaacctcaggcatctcaaaagaaactcaaaggacaataagaaaatatgcctcagcaggatctgtgaagatgcagctgacccccctctccgggatagatttctctgatgctgcacagattcgaaatttaatacattctaaagggttctttaatgcatcaacagagtcatggttatctgctttggattgcacaatgaatcaagatgtagttatttgtgcacttggtggacttattggccatttgactaggctcatggatggatggccagactcttgtgaacctcgagattttcagcaacaatttcaatggtggttcatctggtactttatataagcaccttaatcactgtgtcacagcatctggtaagcggatgctaagaaggtggatttgtcatccacttaaagacattgatgctatcaataaaaggcttgatgttgttgaggggtttatccaaaactgtggactaggccctacaacacttgggtatctccagaaaattcctgatcttgagagattattaggacaagttagatccactgttgggttatcatctttgcttcaactgccctttattggagaaaaaataataaagaaacggattaaaacatttataatgcttatcaatggcctccgcaatggtattgacttgctaaatgatttacaaagagcggaccatggtatcttggcgctttataagattgtggatattccatcattgagctatcttcctgagttaatccataagtttgaagagagaatgcaaaatgagtttccatgtggccaggtttctgatgtcaatgccaatggtgccaacgatttggctgctctgatggacgtttttatcggaaaggcttctgaatggtctttggtgatcaatgccgtcagcactattgatgtgcttaggtcctttgctgcaatgacattgtcatcatttggtgccatgtgcagaccacaagttctgctgaaagatgatgtgcctgtacttcgtatgaagggtctgtggcatccctacgcttttgcgggaaatgcaaatagtctggtaccaaatgatttaacccttggtcaggatttatctggtctcaatcgttttgcattgctgttaactggtccaaatatgggtgggaaatccacaatcatgcgtgccacctgcctggctgttgtacttgctcagcttggctgttatgtcccctgcacgtcatgtgagttgacccttgcggattccatctttacgcgcctcggtgcaacagatcggattatgactggggaaagtacttttctcgttgaatgtactgagactgcctctgttcttcagaaagcaactgtggactcgcttgtcttgcttgatgagcttggcagaggaactagcacatttgatggatatgcaatcgcatatgctgtgtttcgccacctagtggagcgagtgcgatgccgtcagctctttgctacccactaccattctcttacaaaggagttcgcctcgcaccctcacgtgagcctccagcacatggcctgcatgttcaagccaaggagcgacggcaacggccagaaggagctgaccttcctataccggctgacctcgggggcctgtccagaaagctacggcctgcaggtcgccgcaatggcagggatcccgaagtcgatagtggagaaggcgtctgtcgcgggccaggtgatgagggctaagatcgccgggaacttcaagtcgagcgaacagcgagctgagttctcgaccctccacgaggaatggctgagggcggccctggcggtgagcgcgatggacggacaaccggacgacgacgacgtcatggacacgctgttctgcatccagcaagagctgaagtctcacttcaggaaggcgagatgagcattcgccgccgccgctgatcgcgtacgtgggagtactaattatcaatgcctagattcttcagtgatgtcgtatctttacaaccatggtagatataatgtaatccgcgttttttttccatggcacgaatcctgtactttaaacaaagtatcttgtgtatatatgttctgtgctatgtcttgtttgcattgggcagcaaggaccactatccttaatcacttccaccgtttatgtgcatcatatacatttgtgtttggtttgaggaataaaatagtttattatcttttcacttt

SEQ ID NO: 5897 - DNA, 1608 bp, Zea Mays
ctcgaatactggatgggggaggcgtggggacgctgtccaaaacggcgatccgctggggcggaaggagcttggccggtgcgtggtggagtcgctcaggcagggcagggcagggcatgcggtctcgtccatggcatctaggctcgccgccgccgaaatggaaggtgacctcgtttccatggcgttgcctctacattagtgagggtcggtggaaggcaggcttgggttcgtgaatcgtgatccaggcgcagccttacctcttggccgcccccatgcatgccccaggatctggacttgtggaggcgctctgtctcaaggtctcacacactaccctaccctgttcaaccacttccagcgtgagctccgactggtgagcgggatgtggtgctggactgctggagtttacacaagaggaattgaatgccactgcaatgacgattccgagcatcccaagcctgtcgagtaccccgtgagcaatgggtaggctcagcacgagcaatgcgacaccatttgatcttggatgtgatcagcagctccacagttgccacttttttagggttgggaggcctgcatttggttctctattcagggttgaaggtggggcataagctgctccaacctccaactactctgtctcctggagacgtggtttgggctacttggataacacggtgcccgctgctcttacttggatgccaatgagccctaagcattggtagcaaggagcacttagatcctgctggggcatgctcattttacaacgaaggagaagcacagcaagttcgtaatcttgtgcactggagtatctccaaccgcgattgctgttcagtcaccctacattgctcaagtgcaattattagactatctccagcagatttcctatctcacttctattttaaactccactctgcaaatagtgtcgtctcagtataaaatagtgttttgcacgcccatatagatggtcttaagagagaagcaccttccttggatggggtttctgggctcggcttcagttaacattgattcaaacacctgaacgcttggttaacacaaggaattggaagctgggaaatcatatgttgcgttttattatcattttttttaactctgatacacacaggacggcatgaggatgaatattcaggaagaggaaaacttcaatttcctgggcatcactgacctatttcttgcctagcacgggcacggtgctcctattcctgtaaatccagtactgtcgacaaggataggatacccagtgcagatgacagacagttcacaattgagttctaggcttcacatttgtgcttgtgcttgcttggagcaacatattgcagcatcaaacatttccaagatatctctgaacaacccgatcttccaactcccgtctctcccctgtcatgagcgtggagttttgtgttgttaatatcatgctcatgtaatctatcttggattcttgggagatcacggaggaatccagttcccccacataactgaactttacttatactgtccttgcttatgctactgcaacttcccaatattgctgctctattatatgattgattcacacgattggagctcgaccaacagaattgaagtgatcaaacatga

SEQ ID NO: 5898 - DNA, 1403 bp, Zea Mays
agaggaacccagcgtccacaccacagcccacggctgagactcaggtgaggtccgccgcgtccccccgctgccacaacccacaaccactacctgagtacctgaccaccaccggataggatgaagccgccggtgagcagggccgccttcgcgtccgtgctgatagggccgcgcacgctcggggcctctctggtggccgcccgctgcgcctcctcctctgccgccgctgccgtcactgcctatgatcatgcatcgtttgtcaaggaaatcgccgcaaccgatcctccagagcatctcaactctctcctcaatgtgcttcaagcacgaggtgaaaagattgtttctcctggagcaaaaagagggttgattccatgtgttgttcccttatcagaaagtccagcagtcaaaatgcaggtgatttgacatctctccttagatggccaaccgctccaactgggatggaaatgcctgttgtggaagttcgtaaacatgggctgtggcttttggctaaaaatgtgaaacagtatatccacagaatacttgttgaggctgacttcagtgctggaactggtgatgatttatgggctgctgtgggcgaagctggtaaaaacctttacgctaaaggcgaattcaaagagtcgcaggtggcagaccttgatgtctatttgttgaagaaggttggacttttccctgatgttatagagaggaaaacattgcgccatctcgaaaaaggagataatgtctcagctctcattactggagaattctatactagagatcaatttccaggatttggaagaccctttgtgttcaatgcagagatttttaaaagagttggacgtacatctgaagccaaagattcagctcgagtggctctgaaatcaccatggtggacacttggctgcagttacgaagaggctgctgaactagctgggtgggaggatgagcagctagagtttataagagagaaggtaactgaggagggtaagcgcgaggacctgaagagaggaaaggctccagaacaggtgattcttgacgaggcggcattcttaatggatttagcgtccgtggatggtaactgggacgaggttgtggatcggattgctgaatgttacagagaggctgggcttcatgacattgcgaatttcattgcctacagggaatagatgttagattccctatggtctagaatgttattcaagaaattttgattcatttgtgctctgctaatatatattcttatatacgggaagaacgcacaaccgttatatcgcagcagtccttttttgttttgttttgacatcagctagtgaccatagtttctttcctgtatagctctgaatgtacttgttttttccatttaaatttccatgcttattcatggttagtaagtgtcagattgagtg

SEQ ID NO: 5899 - DNA, 3331 bp, Zea Mays
agaggaacccagcgtccacaccacagcccacggctgagactcaggtgaggtccgccgcgtccccccgctgccacaacccacaaccactacctgagtacctgaccaccaccggataggatgaagccgccggtgagcagggccgccttcgcgtccgtgctgatagggccgcgcacgctcggggcctctctggtggccgcccgctgcgcctcctcctctgccgccgctgccgtcactgcctatgatcatgcatcgtttgtcaaggaaatcgccgcaaccgatcctccagagcatctcaactctctcctcaatgtgcttcaagcacgaggtgaaaagattgtttctcctggagcaaaaagagggttgattccatgtgttgttcccttatcagaaagtccagcaggtgatttgacatctctccttagatggccaaccgctccaactgggtacactaaatatactgctatttttatatccatgtatatccacagaatacttgttgaggctgacttcagtgctggaactggtgatgatttatgggctgctgtgggcgaagctggtaaaaacctttacgctaaaggcgaattcaaagagtcgcaggtggcagaccttgatgtctatttgttgaagaaggttggacttttccctgatgttatagagaggaaaacattgcgccatctcgaaaaaggagataatgtctcagctctcattactggagaattctatactagagatcaatttccaggatttggaagaccctttgtgttcaatgcagagatttttaaaagagttggacgtacatctgaagccaaagattcagctcgagtggctctgaaatcaccatggtggacacttggctgcagttacgaagaggctgctgaactagctgggtgggaggatgagcagctagagtttataagagagaaggtaactgaggagggtaagcgcgaggacctgaagagaggaaaggctccagaacaggtgattcttgacgaggcggcattcttaatggatttagcgtccgtggatggtaactgggacgaggttgtggatcggattgctgaatgttacagagaggctgggcttcatgacattgcgaatttcattgcctacagggaatagatgttagattccctatggtctagaatgttattcaagaaattttgattcatttgtgctctgctaatatatattcttatatacgggaagaacgcacaaccgttatatcgcagcagtccttttttgttttgttttgacatcagctagtgaccatagtttctttcctgtatagctctgaatgtacttgttttttccatttaaatttccatgcttattcatggttagtaagtgtcagattgagtgcattttattctcttgatcgatggctgatttgctgattgttctcgcgatacatagagaggacccgagcaatagatacatcaaagttggttgtgtggataatgtcatgacactggcagtcatggcaagcttggactggaaagagattattgtttggttgtgtgcatgcaaaatggttgaagaggcggctggtttgtaatgctggtgataacaaaatgaagaggttcaggaaagcaaataaagatatagagtgctaaattatcagcatgagcgtggagagaattcaggagagtgtggttgggagagaagctgccatgtcaaccgtcgagtcatcaggatcagctttatcccggcaaaggccagaaaccgttacgagtggtccacgagggtggctgctgtgcggcctatcttctccctgtccaatctctgcttctccctcctctcccacccagaatcagaagcatcgcgagtcgtcgccgggacaccgacgactgggcgagtgctgccgccggcctttctccaggtctttgccggacgccctcctgaccttcatgagctgttccgcggtcgcctccgatggcattgcgctgcacttccctaccccgtcgagggcaggaccctccgcggaggaggaggtgtctgcgcgtgcggggtgctcgctctcggttcccacaggagtactaggagagcgaggcgcaggcagtcaggcaccgagacacgcgccagggcagaaccaagtatgctatgcagattgtattacatgcattacctaataaagacaggcgtgtccagaaggtgtcacttgcagctgagctactcgattcgaaaaaggttgcgatgctgaagttcacaggatttaagttgctaaacaacatttcagacagtgggaaggccttcctaatgattctagtatcagacatccttctagggttactgttccaggatgtccagagcttcatgtattttagaactgaaacgtgtcgacatcagaagagggaggcataatgagttgcagggttcagtatgcagtaaaaggaatcgccatgcccacatctacctgggccttttagccgggccgaatcccggcaaaggcccactgtagacccagaagaaaccgctagagttgtccatgaggtgtgaggcccatgagggttgctggtgtggcgcgtccgtggatttctctctagcaggctatgcctgcctggatcatcccgactcttcgtctccagctggcagctgctgcttctccgggtgcatctgcccctgcgttccaagtaccgctggggccagctatcttgctacttgctaggcagcatatggtccgcgtttcatgaccttcatgagctgttccgcggccgtctccaacaggaccctctgcgggggccacggcgctgtctgcgcgcgcggggtgctcgctctcggttcccacagtagtaggaggagggcgaggcgcagacacgcggtggtcttcgctaagaggaggcggcggcgtctcagcaaatggcagcggccgtggtggaagaccttcttttctgactggaacgaagacgacgagagcctggccgggtggagggaggaggacgagctcttggaggagattggcgccaaccaggagctgtcggacaatgaaaagttcaaggtgtggatgagtaaggccgaggcaatcgttgaaatgcgcgaggcccagcaggatgcgatgaacgccgaggagcgatcgtgggaggattggatcagtggtggcggcacgtcagggactggaggaggtggggactggaatcgggaggacagcttgttggaccagataactgatgatcctgcagagattgtgagggacaagagcattattcagattttcagagattccatcaatgaggattacgaggacatgctgttcgaagatcgagtgtttatgtatgcctcgacaaactcgggcctaagaagaaccacggaggggctgctgcagcaacaactatgg

SEQ ID NO: 5900 - DNA, 5267 bp, Zea Mays
agaggaacccagcgtccacaccacagcccacggctgagactcaggtgaggtccgccgcgtccccccgctgccacaacccacaaccactacctgagtacctgaccaccaccggataggatgaagccgccggtgagcagggccgccttcgcgtccgtgctgatagggccgcgcacgctcggggcctctctggtggccgcccgctgcgcctcctcctctgccgccgctgccgtcactgcctatgatcatgcatcgtttgtcaaggaaatcgccgcaaccgatcctccagagcatctcaactctctcctcaatgtgcttcaagcacgaggtgaaaagattgtttctcctggagcaaaaagagggttgattccatgtgttgttcccttatcagaaagtccagcaggtgatttgacatctctccttagatggccaaccgctccaactgggatggaaatgcctgttgtggaagttcgtaaacatgggctgtggcttttggctaaaaatgtgaaacagtatatccacagaatacttgttgaggctgacttcagtgctggaactggtgatgatttatgggctgctgtgggcgaagctggtaaaaacctttacgctaaaggcgaattcaaagagtcgcaggtggcagaccttgatgtctatttgttgaagaaggttggacttttccctgatgttatagagaggaaaacattgcgccatctcgaaaaaggagataatgtctcagctctcattactggagaattctatactagagatcaatttccaggatttggaagaccctttgtgttcaatgcagagatttttaaaagagttggacgtacatctgaagccaaagattcagctcgagtggctctgaaatcaccatggtggacacttggctgcagttacgaagaggctgctgaactagctgggtgggaggatgagcagctagagtttataagagagaaggtaactgaggagggtaagcgcgaggacctgaagagaggaaaggctccagaacaggtgattcttgacgaggcggcattcttaatggatttagcgtccgtggatggtaactgggacgaggttgtggatcggattgctgaatgttacagagaggctgggcttcatgacattgcgaatttcattgcctacagggaatagatgttagattccctatggtctagaatgttattcaagaaattttgattcatttgtgctctgctaatatatattcttatatacgggaagaacgcacaaccgttatatcgcagcagtccttttttgttttgttttgacatcagctagtgaccatagtttctttcctgtatagctctgaatgtacttgttttttccatttaaatttccatgcttattcatggttagtaagtgtcagattgagtgcattttattctcttgatcgatggctgatttgctgattgttctcgcgatacatagagaggacccgagcaatagatacatcaaagttggttgtgtggataatgtcatgacactggcagtcatggcaagcttggactggaaagagattattgtttggttgtgtgcatgcaaaatggttgaagaggcggctggtttgtaatgctggtgataacaaaatgaagaggttcaggaaagcaaataaagatatagagtgctaaattatcagcatgagcgtggagagaattcaggagagtgtggttgggagagaagctgccatgtcaaccgtcgagtcatcaggatcagctttatcccggcaaaggccagaaaccgttacgagtggtccacgagggtggctgctgtgcggcctatcttctccctgtccaatctctgcttctccctcctctcccacccagaatcagaagcatcgcgagtcgtcgccgggacaccgacgactgggcgagtgctgccgccggcctttctccaggtctttgccggacgccctcctgaccttcatgagctgttccgcggtcgcctccgatggcattgcgctgcacttccctaccccgtcgagggcaggaccctccgcggaggaggaggtgtctgcgcgtgcggggtgctcgctctcggttcccacaggagtactaggagagcgaggcgcaggcagtcaggcaccgagacacgcgccagggcagaaccaagtatgctatgcagattgtattacatgcattacctaataaagacaggcgtgtccagaaggtgtcacttgcagctgagctactcgattcgaaaaaggcaagatactgtcttgaagtagagattggcaaatctcctccgctttctgatgacgacgtctggtatgagctgcgggaaaaaaaatgctgaatacaatagctttcttgtcaagtcattactttttgtaaaatcaccatccatcagaatcattacttttatagcacctactttggaccaaagatgtgtcatccagttagcgtaactagcagacagctttctgtaataatgtataggcaatgtaaatttgtctgattgattatcatggccttttgtttctccaaatgaatgtatagggttatgttgttatcatacatcttacttttactccctcctcacattcaggttgcgatgctgaagttcacaggatttaagttgctaaacaacatttcagacagtgggaaggccttcctaatgattctagtatcagacatccttctagggttactgttccaggatgtccagagcttcatgtattttagaactgaaacgtgtcgacatcagaagagggaggcataatgagttgcagggttcagtatgcagtaaaaggaatcgccatgcccacatctacctgggccttttagccgggccgaatcccggcaaaggcccactgtagacccagaagaaaccgctagagttgtccatgaggtgtgaggcccatgagggttgctggtgtggcgcgtccgtggatttctctctagcaggctatgcctgcctggatcatcccgactcttcgtctccagctggcagctgctgcttctccgggtgcatctgcccctgcgttccaagtaccgctggggccagctatcttgctacttgctaggcagcatatggtccgcgtttcatgaccttcatgagctgttccgcggccgtctccaacaggaccctctgcgggggccacggcgctgtctgcgcgcgcggggtgctcgctctcggttcccacagtagtaggaggagggcgaggcgcagacacgcggtggtcttcgctaagaggaggcggcggcgtctcagcaaatggcagcggccgtggtggaagaccttcttttctgactggaacgaagacgacgagagcctggccgggtggagggaggaggacgagctcttggaggagattggcgccaaccaggagctgtcggacaatgaaaagttcaaggtgtggatgagtaaggccgaggcaatcgttgaaatgcgcgaggcccagcaggatgcgatgaacgccgaggagcgatcgtgggaggattggatcagtggtggcggcacgtcagggactggaggaggtggggactggaatcgggaggacagcttgttggaccagataactgatgatcctgcagagattgtgagggacaagagcattattcagattttcagagattccatcaatgaggattacgaggacatgctgttcgaagatcgagtgtttatgtatgcctcgacaaactcggccaaatttctagcattgttgattgtggttccatgggtgatagattttctagtgcatgactatgttatgatgccctttttagagaggtatgtccagaaggtgccacttgcagctgagctactcgatgtaaggcgcagccaaaagctgcagatggttaaagacctaaatattgaaaaggcaagatatcgtcttgaagtagagattggcaaatctcctccactttctgatgaggaggtctggcatgagttgcgggaaaaagcgatagagttgagggatgattggaggctagaaaatcgaaatgctttcgcaaatatatggtccgatactgtttatggaattgtgctatttcttcttatgtgcttcaaccagagcaaagttgcaatgctgaagttcacgggatataaggtgctaaataacatttcagacagtgggaaagcctttcttattattttagtatcggacatccttctaggctaccattcagagtcaggttggcatacattggtagaagttattctcgagcattatgggcttgaagctgatgaagcggcggtcacattttttgtttgtctggttccagtggctttcgatgtgtacataaaatattgggtatacaaataccttccaagattatcacccagtgtgggaaacgttttggatgaaataaagcgccattagagaactttttttagtttccttattgggaaattgcttgagaatttgtcgccttccaggtagtcaatggcttggcatataaagttttaaaatctgaacgatgtcttcgtctgaaaggccttgcctagaatgtctgtctggtgatcaatcagagtctcaggctgttcgagaagactgggaatttggagaagtaacctaggtagtccttattctaaaagaaaggttccatgactcggaatcaacgtcaggcaaaaatctcttctctcttatttacatggtgttatctacttgtaaaataagaaatcgaatgattttgcgcgaaatgagacagccgtgctgacggacgtctgttctgaccaacaagcaattgtttttcctttgcttttgagatctgaactgacggttagcttcacgtttcaaatttgcttcgctaaaaaaagatagacccagtgttagcggcttccacataaatgaggtctagtgaaggaataatcgagtcttgctcctgtatttttgcagagactcagaacaaggaggatgcactgttgctttatggacaaattgcacttctctattttttcctttgactttgccattattggacttgtgacttttttatggggtttcatgcatgctatggttaattccctcgcaagcttattcaccatattttcatgattatgcggaggaagttgagtattccactttctcttccattgaataagtcccttcctagcctatcaccctcttctttgacctctttactttgttttataatggtatcatcgcaaggtcctacaagtgttagcacatgatgtaataaattgagcttatgtacatgtgcacttgtgaggtactgaggttggaatgattttaatgttgttaccataacctcacaagaaatttctagcatgaaatgactccataaggg

SEQ ID NO: 5901 - DNA, 1404 bp, Zea Mays
cgactcaggcctcgaccaccaccaccaccagtccacaagaccaccaaacacccttttttgcttgtcgtgccctcctccttcctcccagcttctccggtcatcccagagtacggccattctctatcccgtcaaccacatcagggcaacctgccaaacaccgcacttgcgcaatccatccaaacccccccggcaactccccaattccctctcccggagtcatcgacatgctttcctcctccaacagctcagctcccgccgcgctgtctcgcgggatacctctacaagaaccatgccctgcctattgtttcttctagctccaccgcctcgcccctgtctagctgactcggtgagtcggtcaccgctccccaacaaatatcggttcttcctgccccagacccgtaggcggccaagtccgcggcttggcgacggcgtgcgaatggcggagatgaccagggtttggagcggcggggaaccgctcgaggttggggtttccatggagagtgacccgattgtcggaggggaggcgccttctcgctcgaggtgggaagcgagccggtgggcgcccgtggaggctgcgctgaatcggatgagtaaatggctggtggctggttgttttgcttttgcagctatttggaagcgtgatgctgaaatcatgtgggttttgctgggtgcggttggcaactctctgctttcgttggttctcaagaagatgctaaaccatgaaagacctgcaccagctttgcggtctgatcctgggatgccatcgtcccatgcacaatccatattctatgctgcgaccgtcctagctctttcattcttggctacgtgtgtctcggggccttcatacactaaaccaggtcatggtgggagctgttgtaggatctgccgtcggtgctctttggtttgtgctctggcattggcttgtgcaggaggcctttgcttcttctgtgcttgtcagagttgctgtcatccttggatcatcagcattttgtgttagctttgtcgtctacatgattcgtcactggctcaaggatgagtaatgtacttcggagctgcaatgggagatggacagataggcatggtgattttggaaaagtgaatccgttccgattcttatcagaatcgcttgaaaaaatggtgacaaatgggttttggcggagcgattcacgagtggaacaattctcttttccttcagaaactctcggattggggaaaatgaagtttcacaccgattcctaatagtcacatacgcctcgtgtcacactagtaattgtattttttcccagttaatcatttttaagtacaaggaactaaatatgttgtatctagagcaagctcaggagatttatgtcaggaatacaatttttgatgaaaaaatatccttcaacaactcgtttagataga

SEQ ID NO: 5902 - DNA, 2360 bp, Zea Mays
ccaaaaccggcccgacatgatccagaaccttacctctccacgcatcaacaaatgctccccctctcaaagcccgcctccggtttccgtcccccatcctcctccgccccccagccgccgcatccaatggagtcctcgctcctcctctctaccccgcgcccgctcaagcccttccatccgcatcacttccccaccgctcgtcgtcgcgacgcgtccttccgcgggaagccccctccgccgccgcccctgccaccgctcggacgcggcagccgccggttgggtcgggcggtgccgcgcgcctcgagcgaggcgttcggcgacggattccgcagccaggacaggcctcccggggttagcagcgggggtgttcgccggaggacctaccgcgaggcgcagggcgagagcagtcgcgccctacgtcgccccggtcggggcagtactcatgctgagctttgtcatatggaaggtggttcagaatatgattccagggaagaaaaaggatcatggttctggaaaacatgcgccttctggtatcatgtggtccttcgctgctggctccaatttggcaacatctaccctcagtgctgaaaaggagtcgcggaaaaatctgaacaagttctacaaagaacttcgaactttgaaaactgttaacatggctggtcgtcagtttggagatgagggcctgttttttctagcagaaagcttagcctatgacaagagtgcagaagaggtggacttttctggcaatgggataacagctgtggggatagaagcctttgatggagttcttcagataaacacaactttgaaaactctcaatttatctggaaatgacatcggggatgaaggagctaagtgtctttcagatatattggttgaaaatgtgggtatccagaaactcctcctgaacagtatcaatattggggacgagggtgccaaggcactttcgaacatgctgaaaaagaataaatcaatacgtattctacagttcagcaataatgcaattgaatacagtggttttgcaagtattgcagaagcccttttagagaataatacgatacggagcttgtatctcaatggcaactatggtggtccccttggtgcatgcagcctagctcaaggaattctagggaataagtctttaagggaaattcacttgcatggtaatgggattgggaatgagggaatacgtgagttgatgtctgcattatctgctcacaaagggaagatcacagttgtggatattggcaacaacaacattagcccggaaggtttacatcctgtagccgagttcctcaaaaggacaaagtccttacagtggttcagtctctacatgaacgatattagtgatgagggagctgaaaaggttgctgaggctctgaaagataacaaaacaatttctaccatagacttgggtggcaataacattcactccaaagctgttagtgcagtagcggaaactttgaaggataatgcagtgctgacaacactggatttgagctacaatccaattggatcagacggagtaaaggctttgtgcgatgtcctcaagttccatgggaagatccaaacccttaagctcggctggtgccagataggcatggaaggtgcagagtgtattgccgactgtctcaagtacaacacaacgttatcgacattggatctgcgggcaaacgggcttggaaacgatggtgctatatgcttggcgcgaagtttcaagataatcaacgaatcgttgacgtcccttgacctgggtttcaatgagattcgagacgacggagcattcgcattggcacaggcgctcaaggctaacgaggatctggcggtcacgtcattaaatctcgcaaacaacttcttcacgaaattcggacaggtcgctctttctgaggcgcgggaccatgtgtacgagatgaccgaacgggagatagacatttatttttaggggggtaccggttcccctgtgcacacagttagcacaggacatgaccgatgcttgtttgtcgagtaggttgaagaataaggtcgcgcggtagagcgatggtttatcctttgtataggaaaattttggtgggttagttaaatatttttagttactatgtaggttagccattcgatcaggtgtctatatgcaagttttgctggaaacgtcggtgtcgttttgaaccattcgtattattggttgaaaatggaatggatatgacgggcatcacatgcaaactgattcttttttgtggaggacttcactgatgtggtggtgtgtgttcctcggaagttgaaatgtattctcatgccatccatgtgggatggtgttggtaacctcagacctgtcgtaggctgttgtgaatgtcacacaaagatttcgc

SEQ ID NO: 5903 - DNA, 2262 bp, Zea Mays
cgccaggtgtctaggtcgctgccgccctacgcctacggcaggtgccaggtgcccagctcttgttcggcccgtacgccggcgaggagcaccaccagttccaatggaacatagctctgcagaagattcagacattagcgattcagatattgctgagcacaaggaggagatttgtgcccaactccgagcagggaaattgaacgtgaagcgtggtgaggccttccgctgccctttctgccctggcaagaagaggcaggactacaacctaaaggatctactgcagcatgccacaggaataggggctgcttctaagcgcagcgccaaggtgaaggcatcacacctggggcttgctatgttcttggagaaggatatagccagcacgttggagcaaccattgcaaattgttccctacaagccaaaaactccaaaggatgaagagatctttgtgtggccatggatgggcattgtggttaatttgcagtgtgagttcaaaggcaaagaatgttccagggaaagtgaagaaaggctaacagcacagttctcgcggttcagacccctccaagccacaacccttagggatggaaagaaccaacagttttgcgctatcgtcaagtttgctaaggattggagtggatttaaggatgcaatggcttttgaaaatcattttgtactcgagcagtacagtaagcctgattggaaaaaaagaaattgcagaaaggacgacctttatggatggcttgcaaaaacagatgattacaactcacctgagccaattggggagtatctaaggaaaaatggaaatcttagaagtgttggtgacctggaacgagagggtctgaaagaaactggcgagcgtgtagctcattatgctcgccaaattgacgcaacaaataaacatatgagtgaactggagctgaagaacaatcagaatgcaatgaaacttgataggatgttggaggagaatgatcgattggttgaagagcacaatgaaaattgcataaagaactggaaaccaagaaaaaaagaaattggcaggagacacgaggaacttgagaagttggttatgaacagtactaacagagaaaagcttgaagcggcaaaagaagagattgcaaaggagaacaggcttctcgatttagcaaccctaaagaagaaggaagaagatgagaagttcttaaaacttgtaaaggaacaagagcaagagaaagaaaatgtcaggaagatgctatatgatttagaaatgcagttggcttccaaacaaaaacttgaactggaaagagaacagttgagggggaatcttgaggtatggaagcatatgggaaaggaagatgcaaaatcgaaggaaatgctcgataagttgcatgaagcactgaaagagaaagatgaagaaatggatcatattgattctataaaccagacccttattattaagcaacgaagaaccaatgatgagctggaagaagccaagaaagaactgactactgacctacttaatatgtcatcagctcgatccattgttggtgtcaaaaaaatgggtgagcttgacaagaaagctttcattgtctcttgcaaagagaaaacagcagacgagttgtcattgtcaattctgtgctcgaaatgggaagatgagatcaggcaaccagaatggcatcctttcaaagttatagatgttggtggacaggcaaaggaaataattcgggaggatgatgagaagctgcaagctttgaaggctgaactgggtgtgcaggcgcacgatgtggtcgtcaaggcccttcttgagatgaacgagtacaatccaagcggcaggtaccccataccggagctgtggaacttcaaggaggaccggagagcaccgatgggcgaggcagtagcctacatagtgaagcagtggaaggcgaacaagaggaagcattaggcgggcctgatgcctgatggcccttgtgccattggttcctgggtcgatgtccctgacagtgagagctgagaccctgatcccctgactttttctgctgatggaagacctagtaccagtagcactactaaaaaaattgtccgatctcttggacggttagattggctatggcacctagtgcaatgatctatatgtataaaaaatatctgtagtgtttaatgattttaccagaactagataaagattatagaatatttattattatacctgttgtgttggaaagtgaacgtggagagagagcgttacggcttccggagagatcagcgtagtttctgtgcgcgtctcgaattccg

SEQ ID NO: 5904 - DNA, 2291 bp, Zea Mays
tacgactacgccaggtgtctaggtcgctgccgccctacgcctacggcaggtgccaggtgcccagctcttgttcggcccgtacgccggcgaggagcaccaccaggattttgtcccatttctccagttccaatggaacatagctctgcagaagattcagacattagcgattcagatattgctgagcacaaggaggagatttgtgcccaactccgagcagggaaattgaacgtgaagcgtggtgaggccttccgctgccctttctgccctggcaagaagaggcaggactacaacctaaaggatctactgcagcatgccacaggaataggggctgcttctaagcgcagcgccaaggtgaaggcatcacacctggggcttgctatgttcttggagaaggatatagccagcacgttggagcaaccattgcaaattgttccctacaagccaaaaactccaaaggatgaagagatctttgtgtggccatggatgggcattgtggttaatttgcagtgtgagttcaaaggcaaagaatgttccagggaaagtgaagaaaggctaacagcacagttctcgcggttcagacccctccaagccacaacccttagggatggaaagaaccaacagttttgcgctatcgtcaagtttgctaaggattggagtggatttaaggatgcaatggcttttgaaaatcattttgtactcgagcagtacagtaagcctgattggaaaaaaagaaattgcagaaaggacgacctttatggatggcttgcaaaaacagatgattacaactcacctgagccaattggggagtatctaaggaaaaatggaaatcttagaagtgttggtgacctggaacgagagggtctgaaagaaactggcgagcgtgtagctcattatgctcgccaaattgacgcaacaaataaacatatgagtgaactggagctgaagaacaatcagaatgcaatgaaacttgataggatgttggaggagaatgatcgattggttgaagagcacaatgaaaattgcataaagaactggaaaccaagaaaaaaagaaattggcaggagacacgaggaacttgagaagttggttatgaacagtactaacagagaaaagcttgaagcggcaaaagaagagattgcaaaggagaacaggcttctcgatttagcaaccctaaagaagaaggaagaagatgagaagttcttaaaacttgtaaaggaacaagagcaagagaaagaaaatgtcaggaagatgctatatgatttagaaatgcagttggcttccaaacaaaaacttgaactggaaagagaacagttgagggggaatcttgaggtatggaagcatatgggaaaggaagatgcaaaatcgaaggaaatgctcgataagttgcatgaagcactgaaagagaaagatgaagaaatggatcatattgattctataaaccagacccttattattaagcaacgaagaaccaatgatgagctggaagaagccaagaaagaactgactactgacctacttaatatgtcatcagctcgatccattgttggtgtcaaaaaaatgggtgagcttgacaagaaagctttcattgtctcttgcaaagagaaaacagcagacgagttgtcattgtcaattctgtgctcgaaatgggaagatgagatcaggcaaccagaatggcatcctttcaaagttatagatgttggtggacaggcaaaggaaataattcgggaggatgatgagaagctgcaagctttgaaggctgaactgggtgtgcaggcgcacgatgtggtcgtcaaggcccttcttgagatgaacgagtacaatccaagcggcaggtaccccataccggagctgtggaacttcaaggaggaccggagagcaccgatgggcgaggcagtagcctacatagtgaagcagtggaaggcgaacaagaggaagcattaggcgggcctgatgcctgatggcccttgtgccattggttcctgggtcgatgtccctgacagtgagagctgagaccctgatcccctgactttttctgctgatggaagacctagtaccagtagcactactaaaaaaattgtccgatctcttggacggttagattggctatggcacctagtgcaatgatctatatgtataaaaaatatctgtagtgtttaatgattttaccagaactagataaagattatagaatatttattattatacctgttgtgttggaaagtgaacgtggagagagagcgttacggcttccggagagatcagcgtagtttctgtgcgcgtctcgaattccg

SEQ ID NO: 5905 - DNA, 1069 bp, Zea Mays
agacaggaacgggggtgtaagccgatccgcgagaaaaatccaacctacaagacctacaaggccaagcgacatcccaatccgagcgtttcatcttgccctctgctctgtcccctcacaccttctcgccaggctcagtggtgacatcagctgaggtccggtagtttgcctctgcagccatgcctcaaatccagaacaccatgcggcaaaactgcacactcctagctgttctttgtggggagtttgctgagaagcggcagacaccagcttccctggcgccagacacaaagcggctgcggctgtcataccctttccctgagctcgcttcgtctgggagactggaggtgcacacgctaatcaatcccactttggagcaatttagagaggcacagcaggcggtgcatcctgtcttcttgtatcttcaggggcagcagcaagagaatgaggaggagattggcacgcttgtctggggtgatacagatttatctgacccgcagatgtttgtctcactcatcaccccaccatttccgaccatggtttatttagaggttcccactggggaaaagcttgcccagtcacttcattcaaagtttagtgttcctggttatagttcctgcagccatacatgggatgcatttcaacttgcacatgcctccttccgactatactgtgtaagaaataatcatgtacaaagtgttaagcttggcccctgcctacttggggatgctccaaaaacaaatgtcatccctgctggggatgaagtgaatgaggaacaaggttgttctgaaggttttccagatataagaatatatgatgaagatgtgagcatgaaatttcttctctgtggagtaccatgcaccctggatgcatgtttgttgggggcactagaagatggtttgaatgcgctcttgaatatcgaggagctacgacaaggaagttagtaccagacatactgatttttacgcagcatagagttattacataattataaatcggaatattcatatatcaaaattattactaaaagagggggtggggtgaatgcccactagttgcttaccgctattggctt

SEQ ID NO: 5906 - DNA, 2896 bp, Zea Mays
atgcccgagaggacaatggacacgcacgcagagggagctgccggctgggacaccggacaccacaccattcacatatctcgcgacagcagaaaccacgtcgcgacgctgccacagcagcaggctatgatggtgctcatgagttccatcccagttctcaggccgcgaatgcggttccaaaatactccaagcaaacaggcagtttcgattgggcgaagcgcgtggaaaatccaccgcgccaggaaatcccagagcggcgtcggatcgtggcctcgtgcagcggcatccgcagcagacaggaacgggggtgtaagccgatccgcgagaaaaatccaacctacaagacctacaaggccaagcgacatcccaatccgagcgtttcatcttgccctctgctctgtcccctcacaccttctcgccaggctcagtggtgacatcagctgaggtccggtagtttgcctctgcagccatgcctcaaatccagaacaccatgcggcaaaactgcacactcctagctgttctttgtggggagtttgctgagaagcggcagacaccagcttccctggcgccagacacaaagcggctgcggctgtcataccctttccctgagctcgcttcgtctgggagactggaggtgcacacgctaatcaatcccactttggagcaatttagagaggcacagcaggcggtgcatcctgtcttcttgtatcttcaggggcagcagcaagagaatgaggaggagattggcacgcttgtctggggtgatacagatttatctgacccgcagatgtttgtctcactcatcaccccaccatttccgaccatggtttatttagaggttcccactggggaaaagcttgcccagtcacttcattcaaaggggataccatatgtggtatattggaggaatctattttcatcttatacagcatctcattttcgtcatgcgttaatgtcagtcattcagagttcctgcagccatacatgggatgcatttcaacttgcacatgcctccttccgactatactgtgtaagaaataatcatgtacaaagtgttaagcttggcccctgcctacttggggatgctccaaaaacaaatgtcatccctgctggggatgaagtgaatgaggaacaaggttgttctgaaggttttccagatataagaatatatgatgaagatgtgagcatgaaatttcttctctgtggagtaccatgcaccctggatgcatgtttgttgggggcactagaagatggtttgaatgcgctcttgaatatcgagattcgtgcgagtaaacttcagaaccgagccagtgctcatccacctcttcaagctgaagatcttccacatggagttgttacaatgcgctgcgatatcacaacttgcagttctgcacatgtgtcgtttcttgtttcatgcagtgcccaaacttgttttgatgatcagcttctagggagccgtatcaagaatgaaattattgagaagaggcagttagttcgtgctctattgaataatgaggataacaagccatcttcatatgagcctttgccttccatgtgcgtggcttgcggagcttctacttttgaagtctggataaccatgccaaaatgggcagcacaggttttgaaacatcttgcgccagaaatctcctacagaagcttggttgcacttggaattgcttgggtaaatggtacaccagtgtcctcatttgataggcaggatgcagaccggcttcttttcttttgctctaaccagtgcggagatcaagctattcaaaatggctcatatgctcatgtatccagctggtcagcaccccttaccaaggatagaaccactggaagtctcgagtcaaaacagatgtcatttggtgcaaaaggagttgtaggggataatacgatctccctatcatcattgaaaccaaggctaaagcctgcaacaatgagaccccttcctcactctcgcaagcaacaaatgcatccctttatggggtttcctcagtccatcattcacgatgctagtcaagttaagcctagcttgccagcccctcctgtgaagcacaacgcagtacctgttaccgcagtgacaccgagaaaatcatcatctgggtcaccatcatcctggtcacgtgttcagctaccaatcccattgaatcctctgccaataaagaaacatgagtgcaatcggttgcctatccacagttgctctgaagaagacttcttgaaagatgtcatgcagtttctacttcagaggggccacatccgacttgtacctcagggaggactggcagaatttcctgacgcagtgttaaattcaaagcgtcttgatttatataacttatacaaagaggtggtataccgaggtggcttttatgtaggcaatggcataaattggaaaggtcaaatcttttcaaagatgcacaaccatacagttacaaacaaaatgacgggtgttgggaacaccctaaaaaggcattatgagacgtacttgcttgaatatgaacttgcacatgacgatattgatggggaatgttgcttgatttgccacagtggtgctctgggtgactgggtgaactgtggattatgtggagaatgggcccaccttggctgcgatagacggaaagggctgtctactttcaaggactactcgaaggcggatgggatggaatacatatgtccccagtgtagccttgcgaaatacaaaccgccgttgcctgcaccatgaaatatgttgattaacttctgttactttcttaagggtgatggtttggatagaaattagtggctaaggatgtgtagtgttgacctgtactattgaatatgatcctgtacgatttgtacaatttttataaaatttctgatttccgaagggtgtctggtctgtttgtaagaccttagtttttaa

SEQ ID NO: 5907 - DNA, 2150 bp, Zea Mays
aacccacaccaccgcaccacgcacctccaccaccagaagaaaaaaccaaggcggagggcggagaggagagcaaggagggtgaagggggaaaagggtaataaaaataaaagaggagaggagaagcaagacgaggaggaagagggagcacccagaggtaggggagggggaataattccgcaggggctgagggatctcggcgagtccggccgcggagcagcgcagcgaggcggcgatccgagggcgatcggaggcgggcgggcgtagacgccggcgagatttgtgttggtgacaagccatgaacagcgcaaccaccagttgttaagtaaccctcctgtaaacttgaagcaaccgaagcggagagcagaaatggtgttccaaaagaggtcctcgtcagagttggaggcgtccggtggaggccaagtcgcggagatgccgcgcgttcccaagtctgcgaggggcaagagatcggtcaggaagaaggaggcccagaacccgccccagatgtcagcattcgaccttctcgcgacggtggcagggaagctgcttgatgagggggtgggctcgctggggaacatgagcgctggtgccccagctttgactgcatgcgcgaaggatgtccgtgtgaagaaggagcagtgtgacgaggaaatgaagcagttcaagcatgaggtgacagatcaggatagctgcaatgagagtgcaattctcccgcacattgtgttccagcgggcggtgaataatgctcggaatgaggatcctaaggcgaagtctgaggcccaggacaaggaatcctccatgatcagctgtaccaaggctgaactgggttgtaattttggtgtgattgcagataggtggtcgcctgaatccgtggaatcaggagccttcacaggagatgcagtggcgagcctgatgccacctgccccagcaggatttcataagaatgcacccgaaatgtataatttgcttgattcaatggatgtggatgtcaagcctcctcctttggtcagctctgacagcaccggcgagatgccattgtatggcgataaagttcaccgctcaacctccttaccaagggtctcgaagggagtggggttttttgctgtagatagagatgatgacgacgataagtcctctgggtgcactcatcccagcaccaccactaacaaggatttcaggtccaattgtacagctgagtatagtaggaggacacaaaggagtacattcaagcgtaggaagctctttgatcgccattcagttctagcatctgaatttggtaccgcacatggaaagggaaacacgaagaaggttaccggaagagactcccatgctgtgtctttggaagcaaacaaggggactagttcaacgccattccagaaatctcgtgggtcaaatgattgccatgtgaaacttaaaattaagtcttttaaggtgcctgaacttcttgttgaaatcccagaaagtgcaactgttggctcactaaagaaaactgttctcgaggcagtgactgcgattctcggaggtggtctacgtgttggtgttcttcaccatggaaagaaagttagagatgataataaaacgttgattcaggctggtattggtcaggaggatatgctggacaaccttggcttttcacttgaacccaactgtacacaaaacccacaagtccaagctcctgaagatatcagtttcctggaaaccattgatactgctgaacccctcgcaaggattgcacctgctgactcgtcttctaagcatggtgaagttgacctatcacaggagtttgcattaaccccattagcaatgaactaccagggcagtgatcatgattctgtgcactcccctgggggcgtctcatcgcccgataaagtctccacaaactcgcgagctttagttccagttccagctgcagatcccaatgcaggagctatagttccagcgaataagtctaagaggtcaccagagcaggggcaacgcagaatcaggcgcccgttctctgttgctgaagtagaagcacttgtgctcgcagtcgaaaagcttggaaccggaaggtggcgagatgttaaacttcgcgcgtttgacaatgcgaagcaccgtacctatgttgatcttaaggcaatggattaaccgtgtcgaaattgtggtgcgaacag

SEQ ID NO: 5908 - DNA, 1495 bp, Zea Mays
cgtccgcgtccgcgctctccaaagtttcgtccaccatttcgctcccgcaagcaccgatttgtttactgctctctccgacgcgcggcggcggagctccctacgacgactgaaccatgtgcggcggcgcgatccttgccaaccttcgcgagccggcgccgcgccggctcacagagcgggacatctggcagcagaaaaagaagctcaagaggggcggcggcggcgggaggcgctcgttcgcggcggaggacgatgaggacttcgaggccgactttgaggtcttcgaggccgactccagtgattcagatttggagctcagggaggggactgacgacgacgtcgtcgagatcaagcccttcactgccaagaggactttctccagcgatggcttaagcaccatgactagtgctgtagcaaggtcagccaagaggaagagaaagaatctatacaggggtatccgccagcggccttggggcaagtgggctgctgagatcagagatcctcagaagggtgttcgtgtttggcttggtactttcaatagtcctgaggaagctgcaagagcttatgatgccgaagcgcgcaggattcgtggcaagaaggccaaggttaactttcctgatgcaccagcagttggtcagaagcaccgttctggctcagcttctgctaaagcatccaagtcaagttttggacagaagcctatcgtcaaaggaagtaactcctttggctgctcagacttgggctgggagaatgataccaagacaccagacatcacttccattgctcccatttccactattgcggaaggcgacgagtctgcatttgtcgacagcaattcaaacagctcatttgtgcttcctgccctggagaacagtgctgttgatctcactgatgggctgacagatttagaatcctatatgaggtttcttctggatggtggtccaagtgattcagttgatagccttctgaaccttgatggatcgcaggatgttggtagcgacatggacctctggagcttcgacgacatgcccatcgtcggcgatttcttttgaggattttgaagcttggtcataggagtatgtacatagggactaggggtaagcactgccgggggagattgggaagcacctgcttggcaccttgggggtagcatttgctcgtgtctagctcagagatgcagaagttgcattctgaaactacttggttatcgacctgttccctattttagctatctctttatgagagccatttatgagactgaaccattttgttttgctttcttttcgttgttacaatatatggtttaacattatgatttatggatatgtgccaaatatggtgctcaacagtggtcaaacatgccttttagatgctcttgtttctcgtattgttgtgtaccttgtgatatttcattcgttgaaattgagttaaactagttatctgctgaaacttttcttgtacaagcaaaagtattcaagatttaatcttattggcatttggc

SEQ ID NO: 5909 - DNA, 1248 bp, Zea Mays
cagctacccccgactcggttcgtgacgactgacgacgagtgacgagatcccaattcccggtcagttcgtgtttcccggaaaaaacccagcgccctccccaccgccgcccgcctccctcgcctcctatcggaatccatcccgatggcgcaaggcaccgtgccgtccgcagccggggccggcggaggcggctgcgcctcggcccccgccgtctccacgaccccccctggcacgccacgggcctccgcggcagccgcgccgccaccgcctcctccctccttcgcgactggattctactacgccgtggagctctacttcgacccggcgctagagaaccaggtgctcaaggcgtggaacgcgctggcgcggcggcaacttggcagccgcctcatcgacgcggccgctcgcccgcacctcccgctgctccacctccccgccgccgcgctcccgccgcctggcaccggcgcgggcggggacccgctcctccgcctcgcaccctcgctccgcgcgctcgcgtcgcgcctcgacccgctcgcgctcgcgctctcctcgctcgccgcgctcccggcctccgccacctcctctccacacgacaacgttctcttcctcgcgcccactccgtctgccgcgctgctcggcctccatgcgcagctctgcgaactgctgcggaaggacgctggcgtcgagatccccgacccgttccggccggaccactggctaccacggtgcgccgtcgccatcgacgtgccacgcggccgcatggccgaggccttctgcgtgctccgagagctaaagctgctccccgtctctgggtacgggatggacatcgcgcttgtcgaggtcggggcaaccgtcagggagctcgtgtgctacccgctcggcggcagcggtagcactggagccgactgagaggtcctgttgtattttgtaccatatctagatcatggatggacaatcatacttaacaaggacgtaacaatcggacaatttgccttatcaaggagctacatttggaagaaggctggactaacacacatgcagtattttgtttagtcatttctttaatcttttatccgataatgtatttgatgccctatccctccattgtagactcttcacatacagggtatcatctgtcctccatgtagtgaattgtcagttgtgttcatgtgccctgagaaccacttgtgctctcttcgttccttcgctcagctgatttgtttacatgactcatccatgtcttgatgcctt

SEQ ID NO: 5910 - DNA, 1318 bp, Zea Mays
cagctacccccgactcggttcgtgacgactgacgacgagtgacgagatcccaattcccggtcagttcgtgtttcccggaaaaaacccagcgccctccccaccgccgcccgcctccctcgcctcctatcggaatccatcccgatggcgcaaggcaccgtgccgtccgcagccggggccggcggaggcggctgcgcctcggcccccgccgtctccacgaccccccctggcacgccacgggcctccgcggcagccgcgccgccaccgcctcctccctccttcgcgactggattctactacgccgtggagctctacttcgacccggcgctagagaaccaggtgctcaaggcgtggaacgcgctggcgcggcggcaacttggcagccgcctcatcgacgcggccgctcgcccgcacctcccgctgctccacctccccgccgccgcgctcccgccgcctggcaccggcgcgggcggggacccgctcctccgcctcgcaccctcgctccgcgcgctcgcgtcgcgcctcgacccgctcgcgctcgcgctctcctcgctcgccgcgctcccggcctccgccacctcctctccacacgacaacgttctcttcctcgcgcccactccgtctgccgcgctgctcggcctccatgcgcagctctgcgaactgctgcggaaggacgctggcgtcgagatccccgacccgttccggccggaccactggctaccacggtgcgccgtcgccatcgacgtgccacgcggccgcatggccgaggccttctgcgtgctccgagagctaaagctgctccccgtctctgggtacgggatggacatcgcgcttgtcgaggtcggggcaaccgtcagggagctcgtgtgctacccgctcggcggcagcggtagcactggagccgactgagagggagccccctgttttatgccaagatgatcttcttgctgcctgattttctgccatctgcttaccacccgtggtcctgttgtattttgtaccatatctagatcatggatggacaatcatacttaacaaggacgtaacaatcggacaatttgccttatcaaggagctacatttggaagaaggctggactaacacacatgcagtattttgtttagtcatttctttaatcttttatccgataatgtatttgatgccctatccctccattgtagactcttcacatacagggtatcatctgtcctccatgtagtgaattgtcagttgtgttcatgtgccctgagaaccacttgtgctctcttcgttccttcgctcagctgatttgtttacatgactcatccatgtcttgatgcctt

SEQ ID NO: 5911 - DNA, 2620 bp, Zea Mays
ctcgctcgccacccaccctgacccagagtccacaccgaaatatccgcgtggcgtggactcgggcaccactctccattcctgcatcccattcccatctcttcttcgcctcctccgcctcgccggcgtcaccgtccggccccgcctcttccccccgctcgaagctcgatctctcctcccgttctccgcccacgcaatccctgccaccgccgaatgcggaacactcgcctttggtgaccgactgacctaccctgcttctgccgggttagttgagtgtccgcgcctaccggaccccgcgccgcgtccggatctcgaatgcgccgccgccgccgtcgcgcgatctagcggctgcgcgctgccccgcaggagggtagagctccaggggcccggtgtggtcaggcggcggatatggcaacggaggcgtctacctctgcggcgggcgggatctgggtggaggggatgtccgcggacaacatcaaggggctggtgctcgcgctctcctccagcttcttcatcggggccagcttcatcgtcaagaagaaggggcttaagaaggccggtgcgtccggcgtccgcgcaggtgttggtggttactcttacttgtatgaaccattatggtgggcaggaatgattacaatgattgttggagaagtggctaactttgcagcatatgcttttgctcctgctatcttggtcacaccacttggtgcacttagcatcataattagtgctgctcttgcagacattatgttgaaggaaaagctgcatatatttggtatacttgggtgtgttctttgtgttgtgggttcaacaactattgtacttcatgcccctcaggagcgcacaattgaatctgtagcagaagtgtgggatcttgctactgaaccagcctttctatcttatgctgccatcgttcttgctgcaacatttgtcctcatatactactttattccacgatatggtcagacacacatcatggtctatattggtgtttgttcccttgtaggatctctgtcggtcatgagtgtgaaagctcttggaatagccttgaaactgaccttttctggcatgaatcagctaatttatccacaaacatggttgttcaccattgttgttgttgcatgtatagtaacacagatgaactacctgaacaaggctcttgatactttcaacacagcagttgtatcaccgatatactatacaatgttcacgtcactaaccattttggctagcgtgataatgttcaaggactgggatcgtcaaaatccaactcaaattgtaacagagatgtgtggttttgttaccattctttcggggacgtttcttctccacaagacaaaagacatggttgatggcctcccgccaactctacctgtccggattcctaaacatgaggacgatggagctgaaggaatccctctcagatccgctgaaggcatcccgctcagatcaccgagggcaacggaatcgtttcgatcaacgctataatgcgcgctctttaattcagcttacctgagcatcaatggtgaaggaagaatgcaagctcattgaccaaggtggcaatgatgtcgccgatccacaacgcgatggagacgaggacagtgatctcgtgtgcctgcgctctcgtgttcggctgtgcgcctgggttctgagaatcctaaacgcgtcgcggccgtgaactattcacattgcaaagctgcaggaatggcagggagagatgtcccagaagcaattggagagtgtagcagtagcagtagccagtctggtagacaactagctagacctgcttgcttgatcattcctccgcgtccgggtccggctcgaggcctgcgatctgcttcagtggcttccaaacaaagcttctcctgcacgcgtgcaacagggccacacgtacgtaatcaggccttagccacaagtggtcccgtgtgggaaatttagacatggagggaggtagaaggaagcgcatgtaccagttgccgcattctgcgatcaccctgactttggggcggatgtccgggagcatggccaggaactgcagctcagccttggacagaacctgcacgtagaccagacgagaggcccgaagaagaggttcaggaacagagcactcgtcagtggtgtgccgatcgatggaggcgcgtgcatgtagatgtaagcaggcacctcaccttggcttcgatgatccagacgacgaggcctttggcgtccgggtgcagcaggctgagcctgtagtccacctccggcgggaagtaccaccgcgccaccggctgcctgccgaggctaggctgcagtcaccgcaccgccactccaatcgagtcagttcgtcgatcgaccgctcggttcccgcacgcgacgaaaggacacggcacagccacagcagcaacaacaagcaaagaaagagagaagggaacgtatgtcgtgctcacgtgatgtccgtgctcatgtgagcactttaaatcgtgagtgttctttcttaatccaacgattagtgctttttattcacttaagtcctctcaccttaacgatgagtgttcctggccagcagcatgatcgttagattaagaaggaacactcacgatttaaagtgctcacatgagcacggacgtcgcgtgagcacgagata

SEQ ID NO: 5912 - DNA, 3338 bp, Zea Mays
ttctttctaccacaatcttccactaggtgaagatgtcccaccactgcaattgaaagaaggtgtcttcaggtgcatcatgcagctctttgattgccttctaactgaggttcatgagcgttgtaaaaagggtttaagcttggcaaaacgcttgaacagcacacttgctttcttttgctatgatcttttatcaattattgagcctcgccaagtttttgagctggtttcgttgtacatggacaagtttgcaggagtttgtcaatcagtccttcatgactgcaaattgacattcctgcagataatatgcgaccatgatctattcgttgagatgcctgggcgggatccttctgatagaaactatctctcgtcagttctcatccaagagatctttctgaccttagaccatgatgatttatctcaacgagcgaaggctgctcggattttggttgtccttatatgcaaacatgaatttgatgcacgctatcaaaaaagcgaagacaaattgtacattgctcagctgtattttcctcttatagggcagatccttgatgagatgcctgttttctataatctgaatgccattgaaaagcgtgaagtgctagttgtcattttgcaaattgtgaggaacttggatgatgcaactcttatcaaagcatggcaacaaagcattgctagaaccagattgttcttcaagcttcttgaagaatgtataatccatttcgagcacaacaaaacaggagacaacatgctacttggtgctagttctcggagcccagatgtcgagcatcctgcatccccaaagtactctgaacgattgtccccatcggtcaacacatatttgtcggaggcttcgaggcatgaaataaggggaacaccagaaaatggatacatgtggaacagggttagccctcaattaagttcccctaatcagccctattcattgagagaagcacttgctcaagcacaatcttcaagaatcgggtcaaccgccagggcattgagagagtctctacatccagtgctgagacaaaaaatggaactttgggaagaaaatctcagtactgccgtgagcctcgaagtgttgggaataactgagaagttttcagttgctgcaggcgctcgaagcatcactactgattacgcgaagctagattgtgtaacatcaatcttaatgggtcttttatctaggaaccaatccttggctttttggaaggctttccttcctgtggtctacaatatatttaatgttcatggtgcaacactaatggcaagggagaatgaccgcttcttgaagcaaattgcttttcatcttttgcggcttgctgttttccgaaacgattcgattagaaaaagagctgttgttgggctgcagattcttgttaggaactcattcaactatttcaaaaacactacaaggttaagggtcatgttgacaattactttgtccgagttgatgtccgacgtgcaagtaactcaaatgaaattcgatggttctcttgaagaaagtggtgaagctcggcgccttaggaaatcactggaggaaatggctgatgtgagaagcaaggatctgttaaaagattgtggcctccctgttactgcattggaggcggcccctgaaggctcctctgataataggtggtcttgggtagaggtgaaacatttgtctaaatgtctagtccaggcccttgatgctggtctggaacacgccctcctggagatgcaatcatgggctgaagcagcacaatgtgcagttgctgtagctggcgtgatcatgcaggcacttgttggaaggaatgatgctgtgtggagcaaggagcatgttgcttcgctgcgcaagatttgccctattgtcaacactgatgtgagtgcagaagcatctgcagctgaagtcgagggatatggtgcatccaaattaacagtggactcagcggtcaaatatcttcaactagccaataaacttttcacacaagctgaactctaccatttttgtgcaagcattcaggaactcataattcctgtgtataaaagcagaagggcttatggacagctggccaaatgccacacatcgctcacaaacatctatgagtcaattcttgaacaggaggctagccctataccattcattgatgccacatactaccgagttggtttctatggtgagcgttttggcaagctcaataaaaaggagtatgtatttagagaaccacgggatgtacgtcttggtgatattatggagaagcttagtcatatatatgaggctaaaatagatggaagtcacactttacacataattccagactctagacaagtcaacgctgatgagttgcagcctggcttctgctatttacagatcactgctgttgatcctgtgatggaggatgaggacttgggtagcaggagggaaagaatattttctttatctactggtactgttcgtgcacgtgtttttgaccgttttcttttcgatacaccattcacaaaaaatggaaaaacacaaggtggtctagaagaccagtggaagaggcgcacagtgctccaaacagagggttcctttcccgctttggtgaaccgtctgccagttatcaaatctgaatctctggagttctctcctgtcgagaatgcgattggaatgatcgaaacaaggacagctgcattgagaaatgagctagaagaaccacggagttctgaaggtgatcaactcccaaggcttcagagcttgcaaaggatactccaaggaagtgtggctgtgcaggtcaacagtggggtattaagtgtgtgcactgcattcttatctggtgagccagcgactaggctcagatcccaagaactgcagcagctcatcgctgcattgcttgaattcatggctgtctgcaagcgtgcaatccgtgtgcatttcagattgataggggaagaagaccaggaattccacacccaacttgtcaatgggttccagtcactcaccgctgagctatctcactatatccctgctatactctccgagctatgatagaactgtagcaagccagaaattaggtagcatgtgaatggttgttcattcattcagttgcaggttcccaccaaatgtccatatttccattagctttggttgtatagttctaggaaccggaaattaactagtcttcgaagttctgtaccgtattgcagaaccgattcctgattttggagtgtaaagtctgtataatacctagtgttatctgttatgcaccagttatatgctgagttccttcttttttgcagtttgctactatgtcacaactagcggacattttgcacttgtattgtgatacatagtgcatatatatatatatatatatatatat

SEQ ID NO: 5913 - DNA, 2504 bp, Zea Mays
cccaaaaccccgagatgtgggctcatctcttccttatcgacgctgtggccaccgaaccgcccacgtcacccccttccgtcctcccccgagacaatccccacgcaaccgcgcaccggagcggcggagcctgacgagtctacacaagcggtggggggagcaaaatctgcgccagttcgcctcgcctacttatacactccgatcgcccccgtaagcaaagatggcaccaccatccatgtgtcttgcggcaaagggggtgcttcccttctcggcacttatttcaagtggtgttacacaaaggccagtgtcagtgaccgcttccttggagcacaaaaccagcgatgctagaaggaagttcctaaaacttgcgcttgggaatatcggagttggactgcccaccttgttgggtgttaagaaagctctcgctgatgagcaaggaatctcgtcctcgaggatgtcttattcaaggttccttgagtatcttgacaagggtagagtgaagaaggttgatttatttgagaatgggacaattgctatcgtggaggccatttctcctgagcttggcaaccgcgtgcagagagtccgtgtgcagcttcctggtctaagccaggagcttcttcagaagttgagggaaaagaacatcgattttgctgctcacagcaaccaggaggactctggttctcttctgttcaaccttattggaaatttggcattcccacttattcttatcggtggtctatttttactgtcaagaagggcacaaggtggccttggtggacccaatggccctggttttccccttggttttggtcaatctagggccaagtttcagatggaacccaacactggtgttacatttgatgatgttgctggtgtggatgaagcgaagcaagacttcatggaggtggttgagttcttgaagaaacctgaaaggttcactgctgttggtgctcgcattcctaaaggtgttctgcttgtcggtcctcctgggactggtaaaactttgcttgccaaggcaattgcaggagaggctggcgtaccatttttctcaatttcaggttctgagtttgtggagatgtttgttggtgttggtgcttccagagtacgtgaccttttcaagaaggccaaggagaacgctccttgcatagtgtttgtcgatgaaattgatgctgttggaaggcaaagaggtacaggtattggtggtggaaatgatgaaagggagcagactctaaatcaactactaactgagatggatggttttgagggcaacaccggaattattgttattgctgccactaaccgagctgacatcttggattccgctttacttagacctgggcgctttgacagacaggtgtctgttgatgttcctgatgtacgtggaaggacagagattctaaaagtgcatggtggcaacaagaaatttgattctgatgtttctctcgatgtcatagcaatgagaacacctgggttcagtggagcagacttggcaaaccttctgaatgaagcagccattctggctggacggcgggggaggacagcaatttcttcaaaagagatagatgattctattgacagaattgtggctggtatggaagggactgtgatgacagacgggaagagcaaaagtcttgttgcttaccatgaagtcgggcatgcaatttgcggaactttgacacctggccatgatcctgtccaaaagaattgttggcggccttggtggtagagctgctgaggaggtgatatttggagagcctgaggtgaccactggagctgctggtgacttgcagcaaattactggcttagccaagcagatggtggtaacgttcggtatgtctgaaattggtccatggtctctgatggagggtggggcacagagtggggacgtcatcatgcgaatgatggcaaggaactccatgtcagagaagcttgcggaggacattgattcggcagtgaagcagttgtcagatgaggcctacgagatcgcattgaggcacattagaaacaacagggaggccatcgacaaaatcgttgaggtgctcattgagaaggagacactggccggagacgagttccgggcgattctttctgagtttgtggagatccctgtagagaaccgggttcccccagccacaccggcggccgccctccctgcctaaagtcaagtcttgtagggggtgaaatttgttgttgtaagatgttcatattttggattcttggtgtacactaattctacttcacctgccgggtttttggtagacgacatgtaacttgctcatggtgaactatagtaaaatgtaattagcttaaaaggcctggcgcaacattttcggtttctagcttctggcgagtgaattctcttgctcgtagattaacgagaaaattgcacggttcctacttcataaagctatgttcttactaagaacttgtcattttcctttttggaactctgggattgaggtcagcaaattgccaaatttctaaatactaatctaaggatctctttg

SEQ ID NO: 5914 - DNA, 966 bp, Zea Mays
gagaaaaccttcgacagtgacccggtccggtgggtgtggctcgcttcctctctgtccgactcctttccttcattttcctcttctgacctccggcagcaccatggagaacgtcgccgcgaatccttccgctgcggccgccgccgcagggaatggcgtccaagcatcgggggccggaggggagcgcccggaggacgcgtcgaagcagaacctggcgcaggtgacgagctcgatccagaagacgctgggcctgctccaccagctcaacctcaccgtctcctccttcaactctgcctcccagcttcccctcctccagcgcctgaacgcgctcgtggcggagctcgacacgatgcagaaactagccgagggttgtaacatccaggtgccaatggaggtcgtcaatttgatcgacgatgggaagaaccccgacgagtttactagggatgtgctcaacagctgcattgccaagaaccagatcaccaagggcaagactgacgctttcaagagcctacggaagcatctccttgaggagcttgaacaagctttccctgaggacgtagaagcatacagggagatccgtgctacttctgctgctgaggcaaagcggttggctcagtcccatggcaatttgcttaatggagatgtcaaagtgaaagctgagcattgactgaaggagaggctggatgatatgatggtaaggtcgcatcgaatggcttaagaaacttgtagggggaaatggatatgccttgtgagtgtgagactgatcaaacccttgcaaaagttctgtgatagtcactgcttggctgattgaagtaagtttgatgttgatatctgctgggaatatatataatcaatataaaaacttatcaaagatgcagaggaccttttagacgtatgaatgactcgtgagcaactatatggcctggccacgggtgctttcggagagattcaaagtgcatccaaatgtgg

SEQ ID NO: 5915 - DNA, 2376 bp, Zea Mays
gctgcctcgagctcgacgcccctcccctcgacgccctgcctctgtcttcctcctcgcgtcttcttccctcgcttccatttcttttcaaaccctaagaacccgattccctgctcaaaaccctaaccctagcccccgcctcctctactccgcgtcacccactgctccgcggcatccctcgcggttcccgccgtccggggcgccaggccctgccactcggcccttgcggacctagggtttctcccgagcttctcgttgcgttcactgccttgggcgagccggtgcgggcggatggttaggcgaggaggtggtgggcggagatgagatgaggttgcagcggcgttgggggttgtgggaactatgagtaggctctcgttcagaccgcggccgctagacatccacaagaagctccccatcctcaagtctgtgcgtgagttcgaggatgaggagccagggatcgcaccactgtcctctgcgagggctggggtgctgctgcgtcactcaggagctgacttcaccgcgtctggggccaacaatgccacagaaggcgagggaaatcaagcactcagtaagaaaaatgcccaggaaatacctacaccacaatttgatggtgttgacacatatgaaagggactatactcgtacctttgcacaaccgacatcttatatacgtggaagaggagccagggctgagatcggtgaatttgtcgagtatgaccttgacaatgaagacgaggactggcttgaagaattcaatagcgagcggaagaatataaaccctgaaaagttggaggccctcctattcaagttggaagttttggaccacagagctcgtgaaagagcaggagccataacaccaactttcataggaccagtgccagtcctcttacagctagatgctgctatggaggctttgcagtacttatctgttcgaaatgccgttttccaagctgtatacaactactggaaatcaaagagggagcgatggcaaaagcctattcttcggcgtttgcagccgcctccaccagtgaatgatacaaatccatacaatgtcttcagaccaagagaaaaggctcatcgtcttcatacaagaaggatgcaaagaagggaaaacaatatccaatcattcgaaaaactccgcttggtgcgacgcaacttggagcaagcaaaagcactaatggatgctttgattaagagggaggagacaaagcgggaggccatggagtgccaagttaacctgcagcgtgttcagatgaaatataagcatgaggcccagcttgttgaggatgggactaccttgtctggcttccagcaaacttcgagcagatttgaatcgagcgatgatgatgtggattcagatgatactgcaactgaacagacatacatacgtccagcagttttccatccaaggttttctgctaataagctatctgtgatccctccacttcgcataaagcgtgaacgagagctaaaaaggagacctcagcagaatggctgtgtatttaaaagggatcctgaggagccagtattcttattcacaagaccgcttgatccggagaagttggttgcagcaggtatcaagccaccaccagatcctcctattgagaatggtgccacatcaccaccatttcggtgtcgaggtaggattggacgaggcggccgcatcatctttgatcgatggaatcctcttctccggacaccaattgaccaggagacttattatgtgccatacggtcacaggcccccctcacctgaaggtgccaaattggcccttggagagtccattgtgagttgagcccagtggttcattctgatggaaggcagagaaagctccttgataagcagcagcctcagtggaagttcgagagcatatgggatctcgtggggctagcatttcttgctcagatgtggcttggtcatcttttttcacagctgttgtaaaattattgcagtgtaggtgaaagagtagatctttttgtctaatctttgcatttagggtcagtattcatatcatgctctctcatttgattattcatttggaggagaggaaatccttctcattgctaagttcagcttttctgtataattcttcaacaccttgttgcatgcattcaactaatgcacgtgtgtatatactgaaacccaatgtgcattgcccttttgtggcagatgtcattagtcagtaggttaggcagaaaatgggaatggaaaggggccaacaatgttattgaatctgttgctgaatgttgggttggcgcgcagcttcctcttgtaaccgtgtacagattcaggtttttgttgtgtaacaccgccaacaaatagctggttattgtcaggactgccatatgttctgattcttgctgatgacactgggctactt

SEQ ID NO: 5916 - DNA, 2537 bp, Zea Mays
cgagctcgacgcccctcccctcgacgccctgcctctgtcttcctcctcgcgtcttcttccctcgcttccatttcttttcaaaccctaagaacccgattccctgctcaaaaccctaaccctagcccccgcctcctctactccgcgtcacccactgctccgcggcatccctcgcggttcccgccgtccggggcgccaggccctgccactcggcccttgcggacctagggtttctcccgagcttctcgttgcgttcactgccttgggcgagccggtgcgggcggatggttaggcgaggaggtggtgggcggagatgagatgaggttgcagcggcgttgggggttgtgggaactatgagtaggctctcgttcagaccgcggccgctagacatccacaagaagctccccatcctcaagtctgtgcgtgagttcgaggatgaggagccagggatcgcaccactgtcctctgcgagggctggggtgctgctgcgtcactcaggagctgacttcaccgcgtctggggccaacaatgccacagaaggcgagggaaatcaagcactcagtaagaaaaatgcccaggaaatacctacaccacaatttgatggtgttgacacatatgaaagggactatactcgtacctttgcacaaccgacatcttatatacgtggaagaggagggctgagatcggtgaatttgtcgagtatgaccttgacaatgaagacgaggactggcttgaagaattcaatagcgagcggaagaatataaaccctgaaaaacttatcaacaatgggatcaacattgtcttctctgccttcttccccaccaaaagcttcatcaacatcactcacatctatgtcatctggtggatcaggctcaatgtttggtctgcctagcttgcgttggaaggttgcgccctcgaagttggaggccctcctattcaagttggaagttttggaccacagagctcgtgaaagagcaggagccataacaccaactttcataggaccagtgccagtcctcttacagctagatgctgctatggaggctttgcagtacttatctgttcgaaatgccgttttccaagctgtatacaactactggaaatcaaagagggagcgatggcaaaagcctattcttcggcgtttgcagccgcctccaccagtgaatgatacaaatccatacaatgtcttcagaccaagagaaaaggctcatcgtcttcatacaagaaggatgcaaagaagggaaaacaatatccaatcattcgaaaaactccgcttggtgcgacgcaacttggagcaagcaaaagcactaatggatgctttgattaagagggaggagacaaagcgggaggccatggagtgccaagttaacctgcagcgtgttcagatgaaatataagcatgaggcccagcttgttgaggatgggactaccttgtctggcttccagcaaacttcgagcagatttgaatcgagcgatgatgatgtggattcagatgatactgcaactgaacagacatacatacgtccagcagttttccatccaaggttttctgctaataagctatctgtgatccctccacttcgcataaagcgtgaacgagagctaaaaaggagacctcagcagaatggctgtgtatttaaaagggtatcaagccaccaccagatcctcctattgagaatggtgccacatcaccaccatttcggtgtcgaggtaggattggacgaggcggccgcatcatctttgatcgatggaatcctcttctccggacaccaattgaccaggagacttattatgtgccatacggtcacaggcccccctcacctgaaggttgaagcggtttttcatatgcacatagtgcttaatggcactggcacagctatggaatttgtgaagcctctgagcaattgtttttccataggtgccaaattggcccttggagagtccattgtgagttgagcccagtggttcattctgatggaaggcagagaaagctccttgataagcagcagcctcagtggaagttcgagagcatatgggatctcgtggggctagcatttcttgctcagatgtggcttggtcatcttttttcacagctgttgtaaaattattgcagtgtaggtgaaagagtagatctttttgtctaatctttgcatttagggtcagtattcatatcatgctctctcatttgattattcatttggaggagaggaaatccttctcattgctaagttcagcttttctgtataattcttcaacaccttgttgcatgcattcaactaatgcacgtgtgtatatactgaaacccaatgtgcattgcccttttgtggcagatgtcattagtcagtaggttaggcagaaaatgggaatggaaaggggccaacaatgttattgaatctgttgctgaatgttgggttggcgcgcagcttcctcttgtaaccgtgtacagattcaggtttttgttgtgtaacaccgccaacaaatagctggttattgtcaggactgccatatgttctgattcttgctgatgacactgggctactt

SEQ ID NO: 5917 - DNA, 1208 bp, Zea Mays
ctgaacacaggcgttcttcaacctcggggctgcggagccgcctcttggcctcttcttgttcctattcgttctcgcctagtaggctactaggctggagcagaacggagaaccagagacaaggaggttattcggacacagaaactcctctctcgatgataatcttacgttcaatgataccatgatagcacttcaattgatgcgcacacagtttccaaagctggataaggttttggcgcagccattcattttgcagtcacaattgtatagcagtgtgaaggatagaacacaagttgacagagacttggagtcatttaagaaagacaaagtgttacggatattcaaacttagttctgggcaagatgatcatgcaatcatgttcatggatgattatttgaaacaggtctcttttgctattaaacggtcagggggtaaagaccaagatggtagtgaagtatttgagtggtttgagagatatgtggtcccttcaaaactggatgttagcataactcaactagagctgtgctcactgttatcacagggtggtgatgtaacagacaaacatatcacactattgatgaatgctggtctcttaactcgtcaacttattgatccaaatatttactggttttctattccaagaattggccccatattgaaaggcctatcccaggaatgaaattctttcgctgttgaaccgtagaaagtacaaggagatgccgctttcttcactggagaatacaaagttaagattatcacctcttgatacgcggttcctccttcgcgatttgattggatctgggcacataaaaacagttcaaacgcccactggtttgctcgctcgcgtatcaagggattaatagagctctctgtcgtaatcctacttatctgtctgccttatctcttatctgatcatgcacgatttggtgattctagtttcgttttgcattttacctgttttcaaacagcattcaacatgaccccaactcgtcgatagtctttttcattttaagagggtggttgggactccgctctacgttttgatgttccgtggaaactccagcaactcggttccccaaaaagcgtttttgatggagaaattcgttttaagatgtagatgtggagttcagggttaattacccaccaatgtcattcattaaatgccattcattatgatgagaaaataacatttcgtctcaatctattccttc

SEQ ID NO: 5918 - DNA, 1568 bp, Zea Mays
tcggcttccacttcgcccctccgcaccggccgcccgccacccgccgccccgcctccttatataaccgaacgaagtccaaagccatccaaagaccaaaaaccctcacgaaattctgagatccatccagaaacgtcgctccatggcgattatctccgacttcaaggaggacgaggccccgcagcagccggcggcggtcggccccggcgtcgaggagaccctggtggcagcgctagagaggaccggcggtgcactcccctttctccaggcggccatcgatgtcgctcaccgcaggtctggcctgttccgcgacccttcggcggtgagcaaggttaccgcgatggcggcggccgtcagggcgcaggtggagaccgaggagagggcagccagagaggtcaagaggaaggcggaggaggccgagaggaaggctgcggccgaggcgcagaaggctgacatggaggcggcgacggcgacggcggaggagaagctggagaaggaccgtatggatgcggataaggcggaggaaggcaacgttagacaaccaaatgctggcaatggtcttgatttggagaagtactcatggactcaacagttgcctgaggttaacatcactattcctgttcctcaaggaacaaaatcaagatttgtggtcgttgatataaagaagaaccatctgaaggttgttctgaagggccagccacctatcattgataggatggaaaaactctttccatattgcttacaaagcacaaccaaatggagtggtggaagtctgttataaagggtggccctgaagttgatacccaaaaggtggaacctgagaacagcaaactctctgatttggatcctgagactagacaaactgtggagaagatgatgtttgaccagcgccagaagcagatgggccttccgacaagtgatgaaatgcaaaagcaagaaattctcaagaagttcatgtctgagcacccggagatggacttctctaaagcgaaaatgccttgaggatttgttcgggcagttatttctaccagtctgcttaggttgtctttgagtctggtatcggtgtcaaacaaatcttcatctgtttttttttttttgtaatgcgtcaggaatatcaggcttgttctttttcatctcaatccatatgcattggaagcgtttgggtgggtttaaatccatagtaggtcaaaagctttactaaattttccaatgcaatccattccattggtcacgtggcttgaggatttgttcgggcagttatttctaccagtctgcttaggttgtctttgtgtgattgtgtctggtgttagtgtggaacagatgtctttgtgtgattgtgtctggtgttagtgtggaacagatcatctttttttagtagcgtcagaaatatcatttagaactgtgacgtctttcgaaactagagttcaagctcttggatatcattagtcacgtcgtcattaaaatctcagtaaagcctatttagaaacaaagtatttttatagctttcaggtaatatcagtaaagtatttttatacttttcaagtaatattatggtttctaagtaatactat

SEQ ID NO: 5919 - DNA, 1638 bp, Zea Mays
ctacctctgtctatgagagagaaagagagcgtttaaaaaaattaaaagaaaaaacagaggggagagtgaaccatcatcaatgctccaatgatcccccttcaagactccgattcctttctcccccctctctctatctcgagccttttctttgaccgcctctctctctaacctcttatataagatgagaagattcgctcttcaccgcctcgcagggctacactccattctatccctctctatatccccccgcaccctctcctggtcctggccatctccatctcccgtctctctctctctctacgaactccacctcgcgaacagccgctgcttgcctgccgcgttggagagaacggaagaaaagcgagcgagggagagggacagcaactccctcggtcgctttcgacggcctggatctccccgcacgcgggatcgtacgaccggcacgctgttgtcgctttccaccgcatagtaaattgccaaggctgttgtaatgggggtcaacggtcatcacgaacctcgcagaggatgtaatggcaccgtctgcaatggtagtgtaagatcactagatcattttggtgatgtagatccatggacggcatgggcatacaagcctcgaacgatctcgctcttgctgatgggaacatgctttttaatttgggcaagtggtgctctcgatccagaacggagctcatctgctgatcgtgtttcgtcagtcaagaggggtgtatttgcgatgattgctgtttttttggcttactcttttcttcaggcgccttcaactgtactcattagaccacatcctgccatttggaggctagttcatgggatggcagttgtttaccttgtcgccctcactttcttgcttttccagactcgtgatgatgctaggcaattcatgaagtatcttcatcctgatcttggtgtcgaattacctgaaagatcatatggaactgattgccgcatatatgtacctgaccatccgaaaagcaggtttaacaatgtttatttttttctaggagataatttttgatgagtttgttatcgctcatatcctcggatggtggggtaaggctataatgatacgaaaccaaccacttttgtgggtgttatcaattgggtttgaattaatggagctcacttttcgccatatgttgccaaatttcaacgagtgctggtgggacagcattgtcctagacatattgatctgcaattggtttggtatttggactggaatgagaactgtgcggtacttcgatgggaggacatacgaatgggttggtttgagccgccaacccaacattatcagtaaggtaaaaaggatgctgggacagttcacaccagcgcagtgggacaaggatgagtggcaccctacgcggggtccttggagattcatccaggtgctgagcctctgcgttgttttcatggctgtcgagctgaacacattcttcctcaagttctgcctgtggatccctccgcggaaccccttgattgtctatcggctggtcctttggtggttaatcgcgataccaaccatccgcgagtacaatacctacttgcaagacaggagcaattttggatgctcggtctgctgagccctgacttttccactatttgtcgtgctcacatgctatcgctgac

SEQ ID NO: 5920 - DNA, 2141 bp, Zea Mays
ctacctctgtctatgagagagaaagagagcgtttaaaaaaattaaaagaaaaaacagaggggagagtgaaccatcatcaatgctccaatgatcccccttcaagactccgattcctttctcccccctctctctatctcgagccttttctttgaccgcctctctctctaacctcttatataagatgagaagattcgctcttcaccgcctcgcagggctacactccattctatccctctctatatccccccgcaccctctcctggtcctggccatctccatctcccgtctctctctctctctacgaactccacctcgcgaacagccgctgcttgcctgccgcgttggagagaacggaagaaaagcgagcgagggagagggacagcaactccctcggtcgctttcgacggcctggatctccccgcacgcgggatcgtacgaccggcacgctgttgtcgctttccaccgcatagtaaattgccaaggctgttgtaatgggggtcaacggtcatcacgaacctcgcagaggatgtaatggcaccgtctgcaatggtagtgtaagatcactagatcattttggtgatgtagatccatggacggcatgggcatacaagcctcgaacgatctcgctcttgctgatgggaacatgctttttaatttgggcaagtggtgctctcgatccagaacggagctcatctgctgatcgtgtttcgtcagtcaagaggggtgtatttgcgatgattgctgtttttttggcttactcttttcttcaggcgccttcaactgtactcattagaccacatcctgccatttggaggctagttcatgggatggcagttgtttaccttgtcgccctcactttcttgcttttccagactcgtgatgatgctaggcaattcatgaagtatcttcatcctgatcttggtgtcgaattacctgaaagatcatatggaactgattgccgcatatatgtacctgaccatccgaaaagcaggtttaacaatgtttatttttttctaggagataatttttgatgagtttgttatcgctcatatcctcggatggtggggtaaggctataatgatacgaaaccaaccacttttgtgggtgttatcaattgggtttgaattaatggagctcacttttcgccatatgttgccaaatttcaacgagtgctggtgggacagcattgtcctagacatattgatctgcaattggtttggtatttggactggaatgagaactgtgcggtacttcgatgggaggacatacgaatgggttggtttgagccgccaacccaacattatcagtaaggtaaaaaggatgctgggacagttcacaccagcgcagtgggacaaggatgagtggcaccctacgcggggtccttggagattcatccaggtgctgagcctctgcgttgttttcatggctgtcgagctgaacacattcttcctcaagttctgcctgtggatccctccgcggaaccccttgattgtctatcggctggtcctttggtggttaatcgcgataccaaccatccgcgagtacaatacctacttgcaagacagcaaaccatttaaaaaggtgggatccttctgctggctttccctggctatatgcattgtggagctcctaatctgcatcaagtttggacacggtctgtttccaaagtcaatgccttcgtggctgatcacattctggtcagcagtcgccttgcttctcgtgctctttgtgtggacgtggaaataccgaacaatgaaaaggaaaatgatataattgtgaccaaaaaaatgatttgtttgcctccattctttacccgatttagtgttatcgtgtacataaaaatttattcaaattgtgtacatgtgctagcagtcaagtcttggtgatctgaagaggattatccatgagaaatttctatgccttctttgtctttgtattttccgtcagcgaagtaggatactggttcccctttggccctttaattcgtctgtattgccgcgtactacttcgttggccgtctcttaaatgtggagaacccttgatgcaacaacctatgaaataatgggattcgaatcccaaactgttgaataatgtttctcgatggcccaggaaaccatatctgcaggttgcacgacactaaca

SEQ ID NO: 5921 - DNA, 1488 bp, Zea Mays
ctccactccaccactgctcgtctaacccggtggccatttggtacaggcgtcggactcccaggaggatgaccggtggcaagaggttcggcggcgggcgggtgccgacggggaccccgtccctcgcgtggtcgtccgtcgtcatcgtcgcctccctcctcgttggcgcctccatcgtccacaacatctacaagcctgacatgaccattccacctgtggagggtgccgccggcggcggcggccaagaaagctgagctacgaatggctggacactgcatgcaagagaggaggctgggcatgggagtagtgagggaccggccatcagcacctttttttttttgttctagaacaaaaacgatattatgttgttcttttctgttttgctaccaaaagatgtgaggctgcatagtatttgcttcgttaggcgctactggtcacgcgtaaccatggtatatgtacgttgattttgttttttctaatgcctaataatcactacactcaaaatgtacgggcttgtggtggcactgcggcgggaggtggttggttggttccacttccatccaggctgctccgtggatgcgacggtgattcacgagcggatacgcaagtgtagctgtggcctgcacttggggccggattgtgacccattatcaggcttaggcctgcgtgcggggtcgtttgccgttgtgtacacatggaagaacggggcaccaagtcttgcttccattgccgccgccccttccgtgcacgcgcgcacggcgcacctatacatatgcaccgccccatgccccgcacgccctccctctcccagcgacaccagagagccgaatttacttcgttctcagcctccgttgcccctcgcgcgcgttacgctgtaccaccaggctcgatcggtcgatcctttgctgggcgtcagagaagcatggcagcagctggcaagtcgtcggccatggaggaggtggtggcggcggcggattgactggcaggccgttgacaggggcatcgcctacctgctcatggtggccacgtacgcgcttcactagagccgtcttggcttcggtctgctccggccggcggcagagatcacgggaaggaaggctttgtgagctctgcttcccggcctcagcgtgagagttcccccgcgccaaacttcattcgtttctcttccactcttcctcttgtatggagatggagatggagatatgcctgtgtctttaccactagaaaaaaatgttgttttttctattgtctttctgtgattattctgtgcaaaatggtcaattgttgccaaaacgatcaatgttaccatggtttcggcttgcgtctatcttctgttgtgattgggttcgacattcagagtttgcacaaggccatacatagcatacatatatggcagagtttgcagcgtgaggaaaactgtcatcgccgtgtattttagcattatacataacataccccatccgttcattccaataggcatataagctacca

SEQ ID NO: 5922 - DNA, 1529 bp, Zea Mays
aacaaaagcagctccatttagcagaaaggccaatcgagcactcgagtgatgttgtcgcggttctgctctggtggccatttggtacaggcgtcggactcccaggaggatgaccggtggcaagaggttcggcggcgggcgggtgccgacggggaccccgtccctcgcgtggtcgtccgtcgtcatcgtcgcctccctcctcgttggcgcctccatcgtccacaacatctacaagcctgacatgaccattccacctgtggagggtgccgccggcggcggcggccaagaaagctgagctacgaatggctggacactgcatgcaagagaggaggctgggcatgggagtagtgagggaccggccatcagcacctttttttttttgttctagaacaaaaacgatattatgttgttcttttctgttttgctaccaaaagatgtgaggctgcatagtatttgcttcgttaggcgctactggtcacgcgtaaccatggtatatgtacgttgattttgttttttctaatgcctaataatcactacactcaaaatgtacgggcttgtggtggcactgcggcgggaggtggttggttggttccacttccatccaggctgctccgtggatgcgacggtgattcacgagcggatacgcaagtgtagctgtggcctgcacttggggccggattgtgacccattatcaggcttaggcctgcgtgcggggtcgtttgccgttgtgtacacatggaagaacggggcaccaagtcttgcttccattgccgccgccccttccgtgcacgcgcgcacggcgcacctatacatatgcaccgccccatgccccgcacgccctccctctcccagcgacaccagagagccgaatttacttcgttctcagcctccgttgcccctcgcgcgcgttacgctgtaccaccaggctcgatcggtcgatcctttgctgggcgtcagagaagcatggcagcagctggcaagtcgtcggccatggaggaggtggtggcggcggcggattgactggcaggccgttgacaggggcatcgcctacctgctcatggtggccacgtacgcgcttcactagagccgtcttggcttcggtctgctccggccggcggcagagatcacgggaaggaaggctttgtgagctctgcttcccggcctcagcgtgagagttcccccgcgccaaacttcattcgtttctcttccactcttcctcttgtatggagatggagatggagatatgcctgtgtctttaccactagaaaaaaatgttgttttttctattgtctttctgtgattattctgtgcaaaatggtcaattgttgccaaaacgatcaatgttaccatggtttcggcttgcgtctatcttctgttgtgattgggttcgacattcagagtttgcacaaggccatacatagcatacatatatggcagagtttgcagcgtgaggaaaactgtcatcgccgtgtattttagcattatacataacataccccatccgttcattccaataggcatataagctacca

SEQ ID NO: 5923 - DNA, 1569 bp, Zea Mays
gcttaaaataacatactcctacgcctgtctctgttcacaactcttccgagcacgcggccgtctcctttgtcatcatcatcagctcagatctagcagcttcgccttctcaggtggccatttggtacaggcgtcggactcccaggaggatgaccggtggcaagaggttcggcggcgggcgggtgccgacggggaccccgtccctcgcgtggtcgtccgtcgtcatcgtcgcctccctcctcgttggcgcctccatcgtccacaacatctacaagcctgacatgaccattccacctgtggagggtgccgccggcggcggcggccaagaaagctgagctacgaatggctggacactgcatgcaagagaggaggctgggcatgggagtagtgagggaccggccatcagcacctttttttttttgttctagaacaaaaacgatattatgttgttcttttctgttttgctaccaaaagatgtgaggctgcatagtatttgcttcgttaggcgctactggtcacgcgtaaccatggtatatgtacgttgattttgttttttctaatgcctaataatcactacactcaaaatgtacgggcttgtggtggcactgcggcgggaggtggttggttggttccacttccatccaggctgctccgtggatgcgacggtgattcacgagcggatacgcaagtgtagctgtggcctgcacttggggccggattgtgacccattatcaggcttaggcctgcgtgcggggtcgtttgccgttgtgtacacatggaagaacggggcaccaagtcttgcttccattgccgccgccccttccgtgcacgcgcgcacggcgcacctatacatatgcaccgccccatgccccgcacgccctccctctcccagcgacaccagagagccgaatttacttcgttctcagcctccgttgcccctcgcgcgcgttacgctgtaccaccaggctcgatcggtcgatcctttgctgggcgtcagagaagcatggcagcagctggcaagtcgtcggccatggaggaggtggtggcggcggcggattgactggcaggccgttgacaggggcatcgcctacctgctcatggtggccacgtacgcgcttcactagagccgtcttggcttcggtctgctccggccggcggcagagatcacgggaaggaaggctttgtgagctctgcttcccggcctcagcgtgagagttcccccgcgccaaacttcattcgtttctcttccactcttcctcttgtatggagatggagatggagatatgcctgtgtctttaccactagaaaaaaatgttgttttttctattgtctttctgtgattattctgtgcaaaatggtcaattgttgccaaaacgatcaatgttaccatggtttcggcttgcgtctatcttctgttgtgattgggttcgacattcagagtttgcacaaggccatacatagcatacatatatggcagagtttgcagcgtgaggaaaactgtcatcgccgtgtattttagcattatacataacataccccatccgttcattccaataggcatataagctacca

SEQ ID NO: 5924 - DNA, 1285 bp, Zea Mays
gcgcgacccttactcccaccgtcccacggccacgggcttgcggccagctcccctcgccgatcgtttccaccaaatccaccggtcttgcggccccatcttccgctccgacgatcccggggactttccaagcgatggcgcgcggcgctcgctttctccttgttctcgcgttgctcgccgcgctactcgccgtcgtcctccagctctaccgccacaggaagccgaggttgtggatggtggaagagctatctgtgtacaatggaaccaacgaggagttgcccatattactcgcgattttgggctcagtgtttgatgtcacgaaagggaggtcacattatggtcctggaggaggttatcatcactttgctgggagggatgcatcacgagcatttgtttctggaaattttacaggtgatggtctgactgattctttacagggtttatcaagtagtgaggtaaacagcgtagttgattggaggaaattttacttcgaaagatacatatttgctggtaaacttattggacgttactacgacagtgaaggaaatcctacgaaatatctgaagggtgtagaagtgaaggcaaagagaggtacacagcttcttgaaaaacagaagagtgatgaagctaaaatacctggctgcaattcaaaatggagccagcaagaaggtggtgaagtttggtgcgacgcgggctacccaagactggtgaggaggccaggcgacatagctctgaccggacaagttagccaaaggtgcgcttgtttccaggaaaacgagctcgacaaagccgggctagtggtgtacgaagggtgtgattacttgagccagtcttgcaaagtaaactaggctgtacatatctatccccttcccttcgtccacgaacctgtactcagcgcaaccagccacgcatcatgatgggctgggccttctgttccgtcccgcactcccgcatccatcctctcgaaacacctggtgctgcaacgtcgtgtttcagaagccaagatacgcgattgatttgattggaagatacgtgcaaccgaatcaaatgatggtaacactggcgctgccgccgtgcattattcgtgtagcgcaagatcgatcttaaaggctgtccgtgttattgtgttaatagccatggggccttggctgtcgatggatcgagtcgatgctgccttgcaagttgcaccgtcggcatcatctttcaagtctctttatcacactacatatttcaaactctgtattctacatgtatgccaatgaattgaagatggtggttctgaatgtct

SEQ ID NO: 5925 - DNA, 1364 bp, Zea Mays
gcgcgacccttactcccaccgtcccacggccacgggcttgcggccagctcccctcgccgatcgtttccaccaaatccaccggtcttgcggccccatcttccgctccgacgatcccggggactttccagtaagtagcagcctcaagcaccaattcgtctctctgccgaagttaccaagggcaccccagttcgccgaggtggatcggtagcaaaaaccgatactggtacgttgccatggaggcagtttgatttggtggacctaacggccttccggatctcttgggagccagagcgatggcgcgcggcgctcgctttctccttgttctcgcgttgctcgccgcgctactcgccgtcgtcctccagctctaccgccacaggaagccgaggttgtggatggtggaagagctatctgtgtacaatggaaccaacgaggagttgcccatattactcgcgattttgggctcagtgtttgatgtcacgaaagggaggtcacattatggtcctggaggaggttatcatcactttgctgggagggatgcatcacgagcatttgtttctggaaattttacaggtgatggtctgactgattctttacagggtttatcaagtagtgagtgaaggaaatcctacgaaatatctgaagggtgtagaagtgaaggcaaagagaggtacacagcttcttgaaaaacagaagagtgatgaagctaaaatacctggctgcaattcaaaatggagccagcaagaaggtggtgaagtttggtgcgacgcgggctacccaagactggtgaggaggccaggcgacatagctctgaccggacaagttagccaaaggtgcgcttgtttccaggaaaacgagctcgacaaagccgggctagtggtgtacgaagggtgtgattacttgagccagtcttgcaaagtaaactaggctgtacatatctatccccttcccttcgtccacgaacctgtactcagcgcaaccagccacgcatcatgatgggctgggccttctgttccgtcccgcactcccgcatccatcctctcgaaacacctggtgctgcaacgtcgtgtttcagaagccaagatacgcgattgatttgattggaagatacgtgcaaccgaatcaaatgatggtaacactggcgctgccgccgtgcattattcgtgtagcgcaagatcgatcttaaaggctgtccgtgttattgtgttaatagccatggggccttggctgtcgatggatcgagtcgatgctgccttgcaagttgcaccgtcggcatcatctttcaagtctctttatcacactacatatttcaaactctgtattctacatgtatgccaatgaattgaagatggtggttctgaatgtct

SEQ ID NO: 5926 - DNA, 1369 bp, Zea Mays
ccttgagaaaatggagtttctaaactagttcttatctttttttcccagttttatccttagagggcagatgctgctgcagctcaagatagccacacacacagacagtgacacacttaagagctcgagatctcactctcctcacctcagctctcagagaggaaggacactgcggccgggcgatggcgagcgtggagggcaagagggagacggtgctggtcaccggcgccagcggcttcatcggatcgaccctcgtcggcctcctcctcgaccgcggctacaacgtccacgccagcgtcctcaaccccgatgacaaggcggagacggagcacctggtcgccctgggcgccggcgccggcgagggccggctgcgagtcttcccgggcgacctcctcgacggcgccgcgctcatggccgccgcgcggggctgctcgggcgtgttccacctcgccaccccctgcaccgtctaccccgtgagcgacccgcaggggcagatggtggtgccggcggtggagggcacgctcaacgtcctgcgcgccgccaaggaggcccgcaccgtgcggcgggtggtggtcacctcgtccagctccgccatcatacccagccccgcgtggcccgccggcgagccccgcgacgagcggtgctgggccgacgtcgactactgcaagaagaacgaggtctggtaccctgtttccaagacgctggcagagaaggcggcgtggaggtttgcggaggagaacggggtagacgtggttgtcgtcaacccggtgactgccatgggcccaatgattccgcccaccatcaactgcagcatgatcgtgctcctacgcctgctacaaggttgcacggaggagtacagggacatctggatgggggcggtgcatgtgcacgacgccgccatggcgcatatcctggtgttcgagagcccggcagcgtccgggaggcacatctgcgcccagtccatctcccactggagcgacttcgcggccaaggtcgccgagctgtaccctgagtacaaggtgcccaattgcgtacgttgcaggttccccaaggatacccagcctgggctggtgcgacagggagccgaggaggggtccaagaagctcgtcgcgttggggctgcacttcagccctctggagaagatcatcagggacgctgtggaggccctcaagagcagaggctacatttcgtagctagccgaccgacggcagctatagtggagtagtatgcctgtcgaatttcgattcccaagtggcaaattctgcaaaacgagttcgccaatatgaacaataaataaagaacgttgtgataaaataaagcagattttctgttgcatttggcccttcaaagcatccgtggtggtaagatttcc

SEQ ID NO: 5927 - DNA, 1054 bp, Zea Mays
acgatatccacgtctgcgcaaatgattctaatcactcgattgccaatcaacggcccacgttggtcgactttcatcacctcttccctcgaattctctggaataggaatcgtctcgactcgctccctcgtttctttcgcctctgaacacttctgctcgaaccttgtctcatgtcgcctctcttcgttcccgtcgtagcgtccctcttccacctcttctctccccgcttccttgtcaaaatcgattcatcacccattgctttcgtccttactgcagtgtccatttttggttgtttggtgaaatttgtcgctatcttcgtcgcctctagttcgtcgtccatttcttaaagttcaaataggcctgctttgtccccttttttctcccgtcccgaggtacgcgattgcagcaaatccggcttcctccgcttcagatctccttcaatcgtcgtcttccacttcgcgtttccctctccgtactcatatggctttgtctgcatgaatgctttactggtcgcgaagccctttgttttctctagtttgcagttcgcatagctgcctcctttggatctaagtttgccagatctaaagcatcagttgaacggtcataatggtgaatcaacaaggaactcggcggggcatctctaaaaggttcagcttggttgtaatctataaactggaggaatgtagataccaatgacgtcttactccatcagaagctactagctcctaatgaagaaccaaatttctgaaaaaatacggactacaacattatccgccattttagtaatttatgaaactataaacactgtttttgtgacatgtaaatgatattatcttccaaaaaatttgctattttgtcacttctgttttgggctctctgctattatgtcaccctgtgtctatgacttatgggatcatttatcatctgtgtctataatttatgggcctaatggtaaattagtgaagtccacaacttagagtgacaaaatagcaaatggctctcttcttctacatgcgcctgagaaatgcaatagacccttatctacattccatgtgaa

SEQ ID NO: 5928 - DNA, 1088 bp, Zea Mays
acgatatccacgtctgcgcaaatgattctaatcactcgattgccaatcaacggcccacgttggtcgactttcatcacctcttccctcgaattctctggaataggaatcgtctcgactcgctccctcgtttctttcgcctctgaacacttctgctcgaaccttgtctcatgtcgcctctcttcgttcccgtcgtagcgtccctcttccacctcttctctccccgcttccttgtcaaaatcgattcatcacccattgctttcgtccttactgcagtgtccatttttggttgtttggtgaaatttgtcgctatcttcgtcgcctctagttcgtcgtccatttcttaaagttcaaataggcctgctttgtccccttttttctcccgtcccgagccctttgttttctctagtttgcagttcgcatagctgcctcctttggatctaagcctcacggactgctgcatgttgctacccccgtcgcttccattcccctgcaagcccacgctctgctatggatttcccacctaaagttgtttgtccattcatgacccatgttcatgtgcaatagctacaactttcaaggtatttgagagattgctcaaaaagtttgccagatctaaagcatcagttgaacggtcataatggtgaatcaacaaggaactcggcggggcatctctaaaaggttcagcttggttgtaatctataaactggaggaatgtagataccaatgacgtcttactccatcagaagctactagctcctaatgaagaaccaaatttctgaaaaaatacggactacaacattatccgccattttagtaatttatgaaactataaacactgtttttgtgacatgtaaatgatattatcttccaaaaaatttgctattttgtcacttctgttttgggctctctgctattatgtcaccctgtgtctatgacttatgggatcatttatcatctgtgtctataatttatgggcctaatggtaaattagtgaagtccacaacttagagtgacaaaatagcaaatggctctcttcttctacatgcgcctgagaaatgcaatagacccttatctacattccatgtgaa

SEQ ID NO: 5929 - DNA, 1814 bp, Zea Mays
ctctcctcaccttccttccctccccctccctgctcggtgctcgcacacgctggcgcggcttgcccccacgctgcgctcccaccaccaccactatataatccccgatcgcctcacgcacacgcaccgacccaccggccgacgaggggcgaccgccgcaacacaaatccacacgcccgccgccaccgccgccatacggacccactcctcctttgccctggtgcgagcaggcttcggcagcaaaccccgcagactgctcccggacgagggagaacgcgcggggctgggctagccgctacccgctagccaggggaccggggcggaggcagcgaggaggtacgtatggacaagtacgaggcggtgcgggacatcgggtcggggaacttcggggtggcgcggctgatgcgcaaccgcgagactcgagagctcgtcgccgtcaagtgcatcgagcgtggccaccggattgacgagaatgtgtacagggagatcatcaaccaccgctcgctgcgccatcccaacattattcgcttcaaggaggtgatacttacaccaacacatcttatgattgtgatggagtttgcagcaggtggagagctttttgatcggatctgtgatcgtgggcggtttagtgaggatgagttgatctgtggagtgagctattgccattacatggtacaaaacgcacaagcagaaaaatttctgttcattcgacaaacaaaatcacaatctactcttttaagaacaaaagaattgtatcccttgtgtttattgttttttagaagaccacactggttgttaacgtaaaaggtgtactcaatgtatcaccgtgtatgtgtattattatttctcataattcattctgaggacaaaattttcaaataccagcaaatatgccatagagatctgaagctggagaatgttctcttggatggcagcccagctccacggcttaagatctgcgattttggctattccaagtcatcagtgttgcattcaagacccaaatcagcagtaggaacgccagcatatattgcacctgaggtgctatcccgtcgcgagtatgatggaaagcttgcagacgtatggtcctgtggggtgactctttacgtcatgcttgtgggagcatacccatttgaagacccagatgaccccaagaatatacgcaacaccattcagcaaataatgcaagtgcaatacaagataccagatcatgtccacatatctacggaatgccagcaacttattgcccgtatctttgttgccaatccaatgaggagaatcacaatgaaggaaataaagagccatccatggtttttgaagaacctaccacgggaactcacggagactgcacaaggcatgtactacaggagggataacagggtcccttcttattcagaccaaacgtcggaagaaatcatgaagatagttcaagatgcaaggaccatgccgaaatcatccagatcaggctatgggtggagcagtgagtattcggatgaagaagaagagaaggaagaggaacacagaccagaggagcatgaggaagaggaagatgaatacgataggagggtgaaggaggtccatgcaagcggagaactccgtatggacgctcttcacatatgaaagctagtggaagagaaagttgcatgtagataactgggttgttgcggatctgaaggatccagtgggatgtatgcagttttggcttgagaatttgcttctgtttgtcaattttcatgtaacataatttaatacaccgagacaacagactaccatgttcttatattggtaaatatgaagcatgtaccttctatctgcat

SEQ ID NO: 5930 - DNA, 1934 bp, Zea Mays
ttccttccctccccctccctgctcggtgctcgcacacgctggcgcggcttgcccccacgctgcgctcccaccaccaccactatataatccccgatcgcctcacgcacacgcaccgacccaccggccgacgaggggcgaccgccgcaacacaaatccacacgcccgccgccaccgccgccatacggacccactcctcctttgccctggtgcgagcaggcttcggcagcaaaccccgcagactgctcccggacgagggagaacgcgcggggctgggctagccgctacccgctagccaggggaccggggcggaggcagcgaggaggtacgtatggacaagtacgaggcggtgcgggacatcgggtcggggaacttcggggtggcgcggctgatgcgcaaccgcgagactcgagagctcgtcgccgtcaagtgcatcgagcgtggccaccggattgacgagaatgtgtacagggagatcatcaaccaccgctcgctgcgccatcccaacattattcgcttcaaggaggtgatacttacaccaacacatcttatgattgtgatggagtttgcagcaggtggagagctttttgatcggatctgtgatcgtgggcggtttagtgaggatgaggcccggtatttctttcagcagttgatctgtggagtgagctattgccattacatggtacaaaacgcacaagcagaaaaatttctgttcattcgacaaacaaaatcacaatctactcttttaagaacaaaagaattgtatcccttgtgtttattgttttttagaagaccacactggttgttaacgtaaaaggtgtactcaatgtatcaccgtgtatgtgtattattatttctcataattcattctgaggacaaaattttcaaataccagcaaatatgccatagagatctgaagctggagaatgttctcttggatggcagcccagctccacggcttaagatctgcgattttggctattccaaggtggtttgatggatccatggttaatgtaaaatgctgtacttagtaaatcttcataaattctcgttaaatattttttcccgtgtctggaacagtcatcagtgttgcattcaagacccaaatcagcagtaggaacgccagcatatattgcacctgaggtgctatcccgtcgcgagtatgatggaaagtggtacttgttcatgcagcttgcagacgtatggtcctgtggggtgactctttacgtcatgcttgtgggagcatacccatttgaagacccagatgaccccaagaatatacgcaacaccattcagcaaataatgcaagtgcaatacaagataccagatcatgtccacatatctacggaatgccagcaacttattgcccgtatctttgttgccaatccaatgaggagaatcacaatgaaggaaataaagagccatccatggtttttgaagaacctaccacgggaactcacggagactgcacaaggcatgtactacaggagggataacagggtcccttcttattcagaccaaacgtcggaagaaatcatgaagatagttcaagatgcaaggaccatgccgaaatcatccagatcaggctatgggtggagcagtgagtattcggatgaagaagaagagaaggaagaggaacacagaccagaggagcatgaggaagaggaagatgaatacgataggagggtgaaggaggtccatgcaagcggagaactccgtatggacgctcttcacatatgaaagctagtggaagagaaagttgcatgtagataactgggttgttgcggatctgaaggatccagtgggatgtatgcagttttggcttgagaatttgcttctgtttgtcaattttcatgtaacataatttaatacaccgagacaacagactaccatgttcttatattggtaaatatgaagcatgtaccttctatctgcat

SEQ ID NO: 5931 - DNA, 1901 bp, Zea Mays
ccctcacacccgactacaaaaaccttccggcgccgccgcctgatcgctccagcgccctcgccgtcggcagctcggccgccgtactcccgctaccgagctaggaggcatcaccttcgccggtccaacatgggtaagacacgtggtatgggagctgggcgcaagctcaagacccacagaaggaaccagaggtgggctgacaaagcctacaagaagagccatctcggcaacgagtggaagaaaccctttgctgggtcatctcacgcaaagggaatcgtccttgagaagatcggcattgaggctaagcagcctaactctgctatccgtaagtgcgctcgtgtccagctggtgaagaacgggaagaagattgctgcctttgtgccaaacgatggttgcttgaactacatcgaggagaacgatgaggtgctgattgctggattcggtcgtaagggccatgctgtgggagatattcccggcgtccgtttcaaggtcgtgaagcgtacgacatttttctatcctgttgctaatccgggcgaactagcaaagcagtgcaaatctggaaaccgcgacctgatcgcagaacgccagaacaggaggctcgggcccgtaccgtaccgcatccctatcattgccaggtcagcagcctatccggccgcccccgcccggagcacgccgccggcgccgacgtcggcgcgtcgcatggatatggcccccgcgtctgtctacttcaacccgcgctcggtcgaggaaatcttcaaggacttctccggccgccgcgcggggctcgtccgcgccctcacctccgatgtggacgatttctgcagattgtgcgacccagataaggagaatttgtgtctctacggccttcccaacgggagctgggaggtgtcgccgccggcggaggaggttcctccggagttgcccgagccggcgctcggcatcaactttgcgcgcgacggcatgcagcgccgcgactggctcacactcgtcgccgtccactctgactcgtggctcatctccgtcgcattcttctacggtgcccgcctcaacggcaacgaccggaagcgcttgttcagcatgatgagtgatcttccttccgtcttagaagcattcgcggacaggaaacacggcagagataggtctggggttgatagcagcggcaagtccagacactcatcaaagagaggaaaagatggccatgccaagagtttcagggcagcagctcctgccgccaaggagtatgacgaagacgatgacgaggaagacgaggaggagcacacggagaccttttgcggaagctgcggcggcctttacaacgcgagcgagttctggatcggctgcgacatctgcgagcggtggttccacggcaagtgcgtgcggatcacccctgcgaaagcggatcacataaagcactacaagtgcccggactgcagctcgaagaagatgaggcagtaggtgtaggtccccgcgtgatctgactgacccgtgtgatctgatccaaaccataactccctccgtttgtttgtctcaaggtcgcagctagcagatgtgaattccttcatttgtggggcttgtttatgtggtggtaggaagaggcaaaggactgatagatagagatacatgaccgttttcttttatatatattcgttgttcaccgttttgcctgcttcgtcgcagtcctatcgctgtgtgaaggcatgaactgatgagtgggttgttcactcaatagttgataaagaatttcatcggtttcatgtcatcaaaaaagcatgtacgacaacttataaaatacaaacgaaactataatgaatctctcacaaagactggccacatgagcacatttggtgtgagactaacattgcattgtgtatgatcttattaagcatatcatatatatatctcta

SEQ ID NO: 5932 - DNA, 1176 bp, Zea Mays
ctagtactcctatctaataaaaatagtattagatttgtatataagttgtttgtgtttagaataagcttcaatttcagttgtactccatgaccgaaaagtgaattaaaaaaactaaaacaagaaagaacaaattctctaaaaaacacctagcggaaaaagaaaaggaaaaaagtcgcccctccgttgggacctaattcacgcgtttcagggctcctcccatttcgtcggcttcgtttgtcgtcgtcgtaagctgcagctagtgtggactggagatccaccactccaccagtccggtccatctgctggacctcgattggtttcttcttacctaggaacatccggggatgtcgactcctgcgaggaagaggctgatgagggatttcaagcggttgatgcaggaccctccggccggcataagtggcgccccgcaggataacaacataatgctgtggaatgctgtcatatttggacctgatgataccccgtgggatggagatatcctgcagaatcagtggagtccgatatatgatgtagctgcgatactcacgtcaatccagtgcatagcatgctacgatgtttcatttttctttcgagagatcaacggagggaggagggatgagtgtccctacctgaaagttttcccacagatgttggcaaaaagccagtgatagaggtcattgttgtgcgatccaaacccgaattcgcccgctaactctgaagccgcccgcatgttcagcgagaacaagcgagagtacaaccgcaaagttcgggaggtcgtggagcagagctggacggcggactgatgatgccctgtgttgcgtcgcgctgtgctgcgcagctgctcactgcgccccgcgtccgtccattccataccaaaaaaagaaaatggcaaagccgaactcagctgttgctgctttcgttgccctgtgtcaagacgactgcttctctatgaacattttaccttcctgtgctgtatctggaatacaaacttaattatctctagcactgtggcaacatcttatcttatatgaaatttcctccgggaaaacgagaatgatttgcttgggtgattatttcatgaccagccaggttgctgtactaaactatggtacttatttcagctaattttgaatttgaactgctctccgtcttaaattacatgtcattctatttttt

SEQ ID NO: 5933 - DNA, 591 bp, Zea Mays
gtagagggccgccggagtagagggggcgcagccgcacgctggagaaggggcgacggctactgtctggctggtgtggtacagccaaagaaagccgaggataagccccaggccgagtgaccaagcaggagttttctactttatatatcatggttaactatggacatttgtacactcacagatgctggaagaaaattttctcttgccgctaccacttagaatgtgtgttaccagtttgaaagccatgtctggtccaatttttgttttcccgcattgacatatgcttccagttggtgctcttaactcgtacaccattttggctattgtcagcgtaatattctgtggacaaatttgactcagaataagaaacttcacaatatcgcagtcttaaattaactgctccacggttgatttgttagtgtttgttgttgagctgttgagggttgttagtgggggccgatttggggcagctgcacaggagaatgaatctgcatgattgccagtttacccgaaggccatcctgacctgacctgaaagctcaaatcaggtattcaggtgtaacaggacggttttttactgtaatatgtactctta

SEQ ID NO: 5934 - DNA, 1104 bp, Zea Mays
atgcattaatggcgaccaagcttccatcgtcggaggggcaatcgagttcgtgaaggagctggagcagcaggtccagtgcctcgaggcgcagaagcggaagctgctggttcaccagcgcgtggcggcggcgaagcctgcagacgcgacgccaatgcgcgccagcagcagcggcgccagggcctgctgcgcggattcggcggcggcggcggcgacgacgagcaactgcagcagcggcttgacgacggaggacgcggcggcggaccacgcgctgccgccgcccccgttcgcgcagttcttcacgtacccgcagtacgtgtggtgccactcggcggcgcgcgaccccgcggaggaggaggacgggcggcggtcaggggtggccgacgtcgaggtgaccctggtggagacgcacgccagcgtccgagtgatgacggcgcggcggcccgggcagctgctcagcctggtcaccgggctgcaggcgctccgcctcgccgtgctccacctcagcgtcgtcaccgcgctggacgccctggtcctctacaccaccagtgtcaaggtacataactgtactaaaaaagtggaggaagggtgcggcctggcgacggcggacgacatcgccgccgctgtgcaccacgtgctctgcatcatcgacgccgaggccaccgagcagcagctgctcgcggcagcggggccgcaaccgcaatagggcccgcccgcgcccgcgagccgacctaccggcgatcgagaggaggccagcgtagaagcgacgtacgtgactccaagtcatgtgtacaagcataggcgttttgcagggtccggtgaaacgccttgtgtagtttgatctttgtatttttggctgctttttttttcatatcttttcagtagatgtgtaagcgtgcgtgtgttcagcatgttgtcacgatgtttgattcagcgttcgatctgtgacgattagctcaccagcagtccatttccacattgttcttcaaggatgtgcaggcggccgccacaatttttttttacgctgcttcgtgtgttcccaacgttcgaattctattcagactcttccggctaatatgttttctttttcaattagttaaacttttc

SEQ ID NO: 5935 - DNA, 1137 bp, Zea Mays
cggtggtcgtgttgtggttggcgttggaccaaccgagtgacgcccacatctgcccggcggtcccctccacccgggatccatgtggacgtatgcggatgcggtgagcaggtagcatccactgcactctgcagaggaggaaggaagaggaccgacaaagatggggatggcattgccattgccgccggcgtcacaggggttgttgcgttccaggaggatgagcttcctcgcttcgccgccgctgtcgctcaaggcagccggtggaatcagcatcccatgcccgtggcgattggatggccgccgtccacgagcagccccagccagtgttcctcgactagcatcagtgcgaagcgtggtgctggacatcgagggcacgacgagccccatctcgttcgtgacggacgtgctcttcccctacgcccgcgacaacgtccgcacgcacctggacgccacctactccacccgcgagaccaaggacgacatcgccctgctgcgcgctcaggtcgagcaggacctagccgagggcgtccccggcgccgtcccggtcccgcccgacggcgccggcaaggaccgcgtcgtcgacgccctggtcgccaacgtggaggccatgatcgcggcggataggaagataacctcgctgaagcagttgcaggccttgaggtgctaatatctatcagacctggaaacgcgccactccctgctgaaaaccatgggtttgggacagtcgagtcatttgctgaaatcttgacatgaagggaggatgcatcctcaacatgcatgcatgctgtgctatttaaagatggaaacggattgaactagtttcaaaaggcagatggaatggtttcatggccatgatttgcatcttcatactagctttatttacattgcccatgttcagtttgtcggagaccataaacacatgggatcaccaagttatcttacccttgattggtttcctttaactcgtccggtttgctgttcgtttcttcagtttcgtcaggcattgggtctgttagtcagggccaggggcaaagctaggtagaagcctgtggatgcacatgcaccacaattttttgtaaaactagtgttttgtccaaatttttaccatatatgcaccacctacaacttattactacgcat

SEQ ID NO: 5936 - DNA, 1418 bp, Zea Mays
cggcggtcccctccacccgggatccatgtggacgtatgcggatgcggtgagcaggtagcatccactgcactctgcagaggaggaaggaagaggaccgacaaagatggggatggcattgccattgccgccggcgtcacaggtaggggttgttgcgttccaggaggatgagcttcctcgcttcgccgccgctgtcgctcaaggcagccggtggaatcagcatcccatgcccgtggcgattggatggccgccgtccacgagcagccccagccagtgttcctcgactagcatcagtgcgaagcgtggtgctggacatcgagggcacgacgagccccatctcgttcgtgacggacgtgctcttcccctacgcccgcgacaacgtccgcacgcacctggacgccacctactccacccgcgagaccaaggacgacatcgccctgctgcgcgctcaggtcgagcaggacctagccgagggcgtccccggcgccgtcccggtcccgcccgacggcgccggcaaggaccgcgtcgtcgacgccctggtcgccaacgtggaggccatgatcgcggcggataggaagataacctcgctgaagcagttgcagggccacatctggaggactgggttcgagtgccaagaaatcaagggggtggtgttcgacgacgtgccgccggctctcgagaggtggcacgccagcggcatcaagacgtacatctattcaagtggcagcagggaagcccagaggctcatcttcgggaacactacctacggcgaccttagaaggcacctgtgcggattttttgacgcaacaattgggaccaagagagacgctcgcagctactatgagatctggcagacggtcggggtggaccggccgtctcagatactgttcctcacggacgtgtgccaggaagccacggcagcacaggctgcaggccttgaggtgctaatatctatcagacctggaaacgcgccactccctgctgaaaaccatgggtttgggacagtcgagtcatttgctgaaatcttgacatgaagggaggatgcatcctcaacatgcatgcatgctgtgctatttaaagatggaaacggattgaactagtttcaaaaggcagatggaatggtttcatggccatgatttgcatcttcatactagctttatttacattgcccatgttcagtttgtcggagaccataaacacatgggatcaccaagttatcttacccttgattggtttcctttaactcgtccggtttgctgttcgtttcttcagtttcgtcaggcattgggtctgttagtcagggccaggggcaaagctaggtagaagcctgtggatgcacatgcaccacaattttttgtaaaactagtgttttgtccaaatttttaccatatatgcaccacctacaacttattactacgcat

SEQ ID NO: 5937 - DNA, 1592 bp, Zea Mays
cggcggtcccctccacccgggatccatgtggacgtatgcggatgcggtgagcaggtagcatccactgcactctgcagaggaggaaggaagaggaccgacaaagatggggatggcattgccattgccgccggcgtcacaggggttgttgcgttccaggaggatgagcttcctcgcttcgccgccgctgtcgctcaaggcagccggtggaatcagcatcccatgcccgtggcgattggatggccgccgtccacgagcagccccagccagtgttcctcgactagcatcagtgcgaagcgtggtgctggacatcgagggcacgacgagccccatctcgttcgtgacggacgtgctcttcccctacgcccgcgacaacgtccgcacgcacctggacgccacctactccacccgcgagaccaaggacgacatcgccctgctgcgcgctcaggtcgagcaggacctagccgagggcgtccccggcgccgtcccggtcccgcccgacggcgccggcaaggaccgcgtcgtcgacgccctggtcgccaacgtggaggccatgatcgcggcggataggaagataacctcgctgaagcagttgcagggccacatctggaggactgggttcgagtgccaagaaatcaagggggtggtgttcgacgacgtgccgccggctctcgagaggtggcacgccagcggcatcaagacgtacatctattcaagtggcagcagggaagcccagaggctcatcttcgggaacactacctacggcgaccttagaaggcacctgtgcggattttttgacgcaacaattgggtacgctgtacatctagtatcacacctttccgctcactgatgattcgtatgcgtcactgtgactatggctgttaatctatcctttttggcctggcgcgcgtctgcaacgaaaggaccaagagagacgctcgcagctactatgagatctggcagacggtcggggtggaccggccgtctcagatactgttcctcacggacgtgtgccaggaagccacggcagcacaggctgcaggtgatcatctcaccccgcgctttgcctcgctgaaaaagaatgccacaccacgtcgttaggcaaccgccttgaggtgctaatatctatcagacctggaaacgcgccactccctgctgaaaaccatgggtttgggacagtcgagtcatttgctgaaatcttgacatgaagggaggatgcatcctcaacatgcatgcatgctgtgctatttaaagatggaaacggattgaactagtttcaaaaggcagatggaatggtttcatggccatgatttgcatcttcatactagctttatttacattgcccatgttcagtttgtcggagaccataaacacatgggatcaccaagttatcttacccttgattggtttcctttaactcgtccggtttgctgttcgtttcttcagtttcgtcaggcattgggtctgttagtcagggccaggggcaaagctaggtagaagcctgtggatgcacatgcaccacaattttttgtaaaactagtgttttgtccaaatttttaccatatatgcaccacctacaacttattactacgcat

SEQ ID NO: 5938 - DNA, 1598 bp, Zea Mays
cggcggtcccctccacccgggatccatgtggacgtatgcggatgcggtgagcaggtagcatccactgcactctgcagaggaggaaggaagaggaccgacaaagatggggatggcattgccattgccgccggcgtcacaggggttgttgcgttccaggaggatgagcttcctcgcttcgccgccgctgtcgctcaaggcagccggtggaatcagcatcccatgcccgtggcgattggatggccgccgtccacgagcagccccagccagtgttcctcgactagcatcagtgcgaagcgtggtgctggacatcgagggcacgacgagccccatctcgttcgtgacggacgtgctcttcccctacgcccgcgacaacgtccgcacgcacctggacgccacctactccacccgcgagaccaaggacgacatcgccctgctgcgcgctcaggtcgagcaggacctagccgagggcgtccccggcgccgtcccggtcccgcccgacggcgccggcaaggaccgcgtcgtcgacgccctggtcgccaacgtggaggccatgatcgcggcggataggaagataacctcgctgaagcagttgcagggccacatctggaggactgggttcgagtgccaagaaatcaagggggtggtgttcgacgacgtgccgccggctctcgagaggtggcacgccagcggcatcaagtcgcagacgtacatctattcaagtggcagcagggaagcccagaggctcatcttcgggaacactacctacggcgaccttagaaggcacctgtgcggattttttgacgcaacaattgggtacgctgtacatctagtatcacacctttccgctcactgatgattcgtatgcgtcactgtgactatggctgttaatctatcctttttggcctggcgcgcgtctgcaacgaaaggaccaagagagacgctcgcagctactatgagatctggcagacggtcggggtggaccggccgtctcagatactgttcctcacggacgtgtgccaggaagccacggcagcacaggctgcaggtgatcatctcaccccgcgctttgcctcgctgaaaaagaatgccacaccacgtcgttaggcaaccgccttgaggtgctaatatctatcagacctggaaacgcgccactccctgctgaaaaccatgggtttgggacagtcgagtcatttgctgaaatcttgacatgaagggaggatgcatcctcaacatgcatgcatgctgtgctatttaaagatggaaacggattgaactagtttcaaaaggcagatggaatggtttcatggccatgatttgcatcttcatactagctttatttacattgcccatgttcagtttgtcggagaccataaacacatgggatcaccaagttatcttacccttgattggtttcctttaactcgtccggtttgctgttcgtttcttcagtttcgtcaggcattgggtctgttagtcagggccaggggcaaagctaggtagaagcctgtggatgcacatgcaccacaattttttgtaaaactagtgttttgtccaaatttttaccatatatgcaccacctacaacttattactacgcat

SEQ ID NO: 5939 - DNA, 2374 bp, Zea Mays
aggcacactgtcgtcatactcccgtcccgacttcccgagacgccgcattggatgctccctccgctcgaatctgccgctttccattatcgctgacccaagcaacattctctgcttcttggtccttgccttcttggttcgccctcccgcaatctctggttctggcctctgggcatcgcgggagtaaggcatttcttggttttcctttcctgagatgggtctgagaaagagaagcgccatggttggtgaggcagccgtgttcgccgcatcttggtagccctcactcagcattggcatcctctcgttcttggacttggagttaactcagccatgaggaagcatgggtggcagctgccgtaccaccctctccagtgttcagcgactgactggctgactgacgggcgagctgcaggtggttgcgatagccgtgttctcggcactggggttcgccttctacgtcttcttcgtgccgttcgtggggacgaagccgttccagattgtggccatggctatctacactccattgattacatgtgttgttgtgttatacatatggtgtgcggcaacaaatcctggagacccaggcattttcgattcaacgaagaatttgaaattagataagaatgaaaagcactcctatgtgaattcggatcaggggattaatcatggaggaaggccattaagtgagacttttggtactgctgataacagtgagaagctgagcagcatgcttgagaggaacgattcgccttcttggcccagattttctggaattatttccctggttttgaagaacagtaagcattgtagagtatgtgacaaatgtgttgatggctttgaccatcactgcagatggcttaacaattgcatagggaaaaggaactacaaaggtttctttgttctaatggcttctgcagttatcctgcttgtgatgcagtggttgtcggggggacttgtgttgattctctgtattgtgaagcgaggagaattctccaggcaggttgtcacaaagttgggaagcagcttctcaacagtggcttttgtaattgttgtggcaacttgcaccattttagcaatggttgcaaccgtaccacttgcccagcttttatgttttcatgtccttcttgtaaaaaagggaattagcacatatgattacatcatagctttgagggagcacgaggaacaacaagaggttcctggacaccaaagcccgcagatgtctattgttagttctgttactggttttagcacagccagttcttttgggcctcttcatcgtggttcatggtgcactccaccaagattattcctggaagaccagttcgatgccattcctccagagattggcatttcacggaattcaggcagtaagaaaactaaggaagaggaaggagcaaggagaaaagctggagcagtgaaaatcagtccatggacattggcgcggcttaatgcagaggaagtctcaaaggcagccgcggaggcaaggaagaaatccaaaatcctgaaaccagttggaaaacatggcgccccagagaacagcagcaaaccagaccatttgcctagctacaagagacggctagacaggagaggtttccctgctgaactctctcttgacccacttgcaactctatctgcaagcggcaccgaaagcaactacagcgacgcagcaacagaaatctgtggcagtctagccccgttacagctcgaagcgagaagtgctttccaaccgagtactgcagcgtccacaagaaatgttgcttcatcgcctgaaagtagctttgactcaccaaatctccaccccttccgcacttcctcggccacagctgatgagatgcagggagccatgatgcatacagctcacaggggcatcgagtttaaaagatcgtcaagcgatggttatgaagcatcaggaggtgaagatagcgaccgcatcccttcaaggatcgtgcacaggtcgtcaaactgggccagtgtctttctgcattctggtcagggagaccctccagctgatctgctgacgacatcagctgaaggttttgtagctaacgactctggttcctagagcaggcattgctgggtatgacagagcgatgttgacaagacattgactagtatctggcattaggtttaggtttaggcgcttaatttgtctgattacatgcggggatttggattagttctaggggccgattacatgtctgtaaaactgccttcttgctggtgccacttttttggcattccattgtcgccttcggcaaaatgtgaatttgacgccattgtgcttgctgagcttgatccaaagtactgtcgctgagtagtcttttgtaatcacatccgagtgagattaataaggtgtttggctcggcaattaccgtct

SEQ ID NO: 5940 - DNA, 1442 bp, Zea Mays
gccgtgaaaactacgcagagcagtaaaataaccgcagttaccagctgacctccctcaattcctcggccatccgtacgtctccgccttcggggctttcttcttggtctcgttccttggctggacaaaacacctgtggcagcggccgcgctgcttgcctcgccttgctctcggttcgtggggcatggcggcttcgccggcttgtgctccggggctcatctccggccccaccctccctcccctgcccgttgccttccgctgctactgggcccaaaagccctcctccgcgtcgacctcctccaggcgcccgtgccgcaggcggttcgttcccgttgcagctgcctccacccgcacctcctctgcggctgctcggggcctcgacgccgacgacttccgccacccgctggacaagcagaacactctgctgctgagagcaattcccgggctcaacgacgtgggcaaagctttgctaggacccgtctcggagcaagttatggtactccagaacattggaacatcagttctcgtctccccgaaccagcttccagatctccaccaactgctggttgaggctgcgaagctcttgaacaccgaagctcctgacttgtacataaggcagaatcctgttccaaatgcctacaccttagcaatcaacggcaaaaaaccattcattgtcgttcacacaagccttgtggagctgcttactccaagggaattgcaggctgttttggctcatgagctgggtcacctcaagtgcgatcatggtgtttggctcacttttgccaatatactcacaatgggagcatacactgtccctggttttggcatggttgctggcttcctggaagagcagctatacagatggctacgagctgcagagctgacttgtgacagggcagctcttcttgtggtgcaagatccgaagaggtagtcatctctgttctgatgaaattggccggaggatgcccatctcttgccgacaagctaaatgtggatgccttcctggagcaagctcgttcgtacgacaaggctgcatcgaacccagttgggtggtacatccggaatgcacaaaccagagagctttcacaccctttgcctgtgatgcgagccagagagatcgatgagtggtcaagaagccaggagtacaagaccgtaatgcaaaaaatgtttcagatggggctgaacagagtatagttagtggcgacacatacgaagaggactgtagagtctgtagcttgtgtatggaagggaatgtctgtatatggagaaggctggtgtttctggaaaaaaaacagatacaaacatagacatattgtatatatttgcagttgaatttagtctccttgtatatgatatatttttttcttttttgttactgtgtaatactgtaactagaatgaataaaagtttgtttgagtttgccggataactggaaagatcggcat

SEQ ID NO: 5941 - DNA, 2621 bp, Zea Mays
aaccgcctcccgacgctttctcttccatgcgcgcgtcttggtcagagacaggtggatagaatatggtcaatttgcttaccagacatggccggtgcacaggaaatattgggcaatccactgcaatttgcttcagatcagctattgagtcagccatcagaaaatgctttgaaggcaatgctgtttctggagtttctgtctcttctttcccctgaaaaattatccagtacctatggttgcatccatgcaaactacttcggtttgggcattccacaagaactcagtgtttcactggcaacctaccttgagagccatcagctgttgcttggttcgaacttctatgcgagacggcatttggctgacaactcaattggagatgctccttccatggctccagattttgcgccgtccatgtcctctggcgatgacgtgaagcttcctcagtctgttacagaaacaccgtatgcaccttccagctcttacaacaatgaaaatccaaaccgacctcatcacagtaaacctgcacagaagcatcggggagtacctccaatttcacttctggagaagcataaagactatgttagattagtcttgatcgtggttctaccaacagcggcattctcgttcattgctgcttttctaattttctactgctgcggatgcaacaagaacaaggtctctgtcggtgagcaacgagatgatcatcctcttcttcacatgcagttggctaatgtacctggttcatcacccgatgcccgtgtttctgccagtcaccttaacaaggataatcgaagtcattctggagtcagcatgagtcggtgcttttcatgctgttttaaaagatccactgatgccacaccatcttcagaagtgattggaggaacaccagagaataatgtcacaagtgatgctcctaaaccgatgtcgcctccagctcctccacctttgccacctccgatcaagaaggctcctcctcccccacctggacctcccagaggttctaaagcaagacttgctcagctgtcacctgttgagtcaagtcgttctgaaggatcatctgccagcgagcagaccagcgaatcatctgaagcagaagttaatgctccaagaaccaagcttcgacctttctattgggacaaagttcttgctaatcctgatcagtcaatggcatggcatgatatcaaattcggttcttttcatgtgaatgaagatatgatagaggaattgtttggttatagtggtggaagcagaaataaccttaaggataaggaactcccctctgcggatcctgcatctcagcacatttctcttctcaatgttaagaaatcatgcaacctggcagttgttttaaaggcaatgaatatcagggtacaagacattcatgacgctcttattgaagggaacgaacttccaagggtgcttcttgagacaatcttgagaatgaaaccaactgacgaggaggaacagaatctcaggctttataacggggatttctcgcagctaggccttgcagaacaagtgatgaaggcattaattgacacgccttttgctttcaagagggttgacatgttgcttttcatgtcctccttgcaagaagatgcttcaagtctcagggattcgttccaccaattggaggccgcttgtggggaactgaagcaccgcctttttctcaagttactagaagccgtgctcaaaactggaaaccgtttgaatgatggaaccttccgtggtggtgctaatgcattcaagcttgacactctcctgaagctatcagatgtcaagggtgctgatggaaagaccacattgctgcactttgttgtgcaggagattgttcggtccgaaggtgtccgcgaagcaaggctagccatggaaaacggaagaagtccagctcatagtgcttcagatgacacttccaatggatctcttgaagaggacggtgatcactactccaaccgcggacttagcattgtgtcaggacttagcagtgagatggacaacgtcaagagggtagccgcactggatgctgagcctctgtttgccactgtggtgaccctcagacaagagttgctgaaatcaagggagttcctgaatgaaattgcgacagtagaagagacgagtggattcagacgttcgttggaaagctttgtggaacacgcggataatgagacggggtttttgttgaaagaagagaagaggttgagatcgttggtgaagaaaacaatccggtatttccatggaaacgactctaaagacgacggtttccggttgtttgtggttgtgagagatttcttggtgatgctagataaggcgtgcaaggaggtcggggcatcacagaagggtacgaataaatcacgaagcagtggcagtggcagtggcaatggcaatggcaaccctacgttcccgtcaatcctacaggagcaacagttccctgctgttattgatggccattcagatagttcacatactagcaattgacgatgagatactaacctttttttgtaaagaaaaaaaaatccgttttggagaggaaatacattttagcatacatgtagatttacatacgtatcatcctacgggatctttttatttttaatattttaatcaatattttaataataaccgtg

SEQ ID NO: 5942 - DNA, 4026 bp, Zea Mays
ggagaagcaaacacaccagatcctggatgcttgaataaagtcttgagaagggatatgcagaaaggccaaccggacattcttgagatcaataggctgcgaagacagttactcttccattcatacttgtgggataaaagactggtatttggcgcaagatcagatagatgtcgtcatgagaagacccattccatagatagtgtcgctgagcaaaatgtaatactaaagcctcaaagtgaatgcagcgggaataggtctgccaacaaagatgctaaatatgttgagtgccttcaggaaagtatttatggagggaatcacactggagttgatgtgggtactgtcaattcgaatcatgtccatcaaatggctacaggcgaattggattcgcttcagagagacatcaaagctcctctatacagcagtgttagtgtaaatggtgagtcgattcccttggaaccagatcttgttgctcgacgcaccctttcagaaggtcagtttcctagtgtattggatgtgactaatgcacttgaagcgaaatggaccggtaaagatgatcctgtttctagcaaggtaaccatgccagaatctacagcatcttcagaggactcagaagaacatatgggtgataatacaccttcatacgcctctatattgctgagcaagctaggggacagtgcagcagatcattctaattggatagagatgcctttcttactattttaccgttccctcaataagcaatggaatcgatcaaaccgatttgatgcactcaacgaatatagtcccgaatatgttcctttcttaagggaagtggagcgtcatattggacctaaatttttctttcctataggaatcagtgatactgttgttggagtttatgatgacgaacctactagcattatctcttatgcgctggcctcccatgaatatcatcttcagatgtcagatgaactggaacgagaaatgacagacacttcactcccactatgtgactcaagaagtgtctcgttaactgaactggatgaatgtacttctgaacttctaagaagtgttgtctctacagaggacattatcctctccatgtctggaagaaagaacccacttgcttcagattcacttgtgcctcgaaaagtaagtcacataaaagtgaattttggggatgaaggtcctctaggacaggtgaagtacactgtgatttgttactatgccaaacaatttgatgctctgaggagattatgctgtccatcagagcgtgattttgtcaggtcccttagtcgttgcaagaaatggggtgctcaaggaggcaagagcaatgtattctttgcaaaaacaatggatgatcggttcataattaaacaggttaccaaaactgaattggagtctttcatgaagtttgctccagattacttcaaatatgtatcagagtcgatttgtactggaagtcctacttgcatcgcaaaaattcttggtatttatcaggttaagagcctcaaaggaggtaaggagatgaggatggatgttcttctgatggaaaatcttttgtttgagcgcgatgtgacaacattgtatgatttaaagggctctgccagatcaagatataacccagactcaaatggtagcgataaagtacttcttgatcagaacttaattgaagcgatgcctacatcacctatatttgtcggaaacaaggcaaagaggctgctggagagagctgtttggaatgacacgtcctttcttgcttccatcgatgtaatggattactctttacttgttggtgttgatgagaaaaggcatgaacttgtaatgggtattatagatttcataaggcaatatacgtgggacaaacacctagagacatgggtgaaagcttcagggatactaggtggaccaaagaatgtgtcgccaacagtaatttcaccaaagcaatacaagaagcggtttaggaaagccatgtcggcctactttcttgtcgtcccagaccagtggtcgcctccagtggtcatccccagcaagcaagctgagagtggtcaagacagggacgaacaggttgtcttgacagaattgtgagatgcatgcattacttttaggaacattcagggaataactcctcttttttgcaacatctatagattttgattttatttaaattttgttcattgttttttcttgtagctgtattttctgggtattcctaccctttcctttttttggggaggatctatagaaagttttagcccaagtctttgaaactggtcattgtaaataccatccttcttctaatgaaatgatacacagctctcctgcgtgtttaagaaaaaaaagtctttgaaacttaagtatgtgtctcccgccccctcccctccccggcgctccagcccccccccccccccccccccccagcctcacgtcggtgtccactctaggctcggcggccacccatattcctccctcggcaccggcaaactcctctgtttctgccccgctggtcgctcaaaggctcagcggtggagcgatgatggagattcctcctttggtgtctcgccggagcctcttcaggtgcaagcttcctacaaggacgtcctaatctcatcaggggagcttgttcatcccgcttcttctcgggaagaggaaggcagctgggttaaggttctcggtcgtcgtgatcgtaggcggcgctcccagtcctcccccctagtttggctcttgtggacttgcgtgggaggtgcttcaactgcttctcgccatctcatcgggttgctgagtgtcggcggcaggtgcggtgcttccattgccggctgcctgggcactgtgcctagcgtgcccgcgacggtcgacggctactcatcatccgcgtcgagtccaggtgtggcgccccgtcgtccaagtggcagcgccgatggaagcccctagaggccgtatggaggatcatgcaaggtgtgccgggggaggctctgctgatggcggacgaaggcgtactcgccgtgggccgaggaagaggcggggacggagctctggtggtcatggtgatcgtgatgccgccgatgccccctctccctctttcgcattcagataccagtataccaccatcccgtctgtttcctccggatgacatgtgagttacatcaaacactcatggaaaatttggcaggctgagcaagatcttcaccgcactcttcttatctcagctgttgatctggagggttctggtggcgccacggaggtcttgatcgcactaagcttgagttttaaccttgatgctgatgtgatcgacctacgcatggtcgcaccaaattcctccatcgctctatttccgaatgttgggatggatgatcaggttctatctggaggacaatctttgtatgtgccccccattcggttgatcatcaagcgctggtctcgtcaggcaatggtatccggtggtggcgctgctggatattaatctttagggtattcttgctcatctatgggggatggagacggcggagcacattctgcgaggattctgtctgctgagccgtcagccgtagtaaagtctccaagtttgaatctggcgggaagggtggtgactgttactccagttgatggccttgctctcccaacttgggatgttgagctggaggcgcctgggtcccatcttgtctcttcgtctgctgctgcttctctggtaataatgtctccaactttgattcaagtggagggcttcgcaaaggatgctaataatgatgttctggtctcagcgatccaacagatggatggttttctcacagttgtgaaaatgtaccagattctatggctattgtgcagcttccacctgttttaccccagacaccttgcaaagtaacccaagttcatactagaagaaagcacctattgcaaactcaggaagctacggacgatggtggtgtggctaaggaattcatgaataagattttgcaatccctttcaggcgttctacctgtttctccttcgtcgaagctaaaaaaacagaaggtctattgcgcccaattttgttccaagaagatccaggag

SEQ ID NO: 5943 - DNA, 3214 bp, Zea Mays
aggggcagtttcatcaatccacatctcgcccttcgcctgccttccttcacccggacgcagcagcggccaaccaaataaaaacacgccgcgccgccccgacgcggcgcgctccgtcttcctctctccccgatccctgcgacgggcgacgcggccttgccttccacatcaaaaccaacctgaccgccacagccgccgcgtcctcgtcctcttcctctgccatcctcccggcatcgcccttcgggatcaccgcgtcggaaccctaccggatcaccattcgttcgcgcgcgccccgccccgccatggaggacttcgcgcgcgcggtggaggacggactcaagctctcgaagaggctcgtgctcccgggaggggtgccgccgccgcgcccgccggcggggatggagcgcaccgtgtcggccgcctcggcgtcgggtcccgacccgcggctgctccctaccgcgccgatggcctacgcgctcgtcaccgacccggccgccgtcgacacccccgacgtgcccagctaccagccctacgtctacggcgacctcgacccgcccgcgctcatcccgctgcagatgaaggaggtcgacctggccgtcgactgcgcgctcgacgccgcgcacgtcaccctgcgcgcgcgctggtggctgcactgcatcacgcgaagccgcgactccgacgtgcgcctcgtcgtgcccttgggcgagcagggttcaattctaggcgctgaggttactgttggaagaagatcatataatacccaagtaatcgaagtagaagaccacactttggagaaacatgcaaaaattgagagtggtggccttttgcagccacatctgtttttcttgacaatacctcaggttgagggaggagcagatatttgtgctacatttcaatggtctcagaagttactttatgatagcgggcgtttctctgttgacatacctttccgttttccgtactttgtgaatccattaccaaaagtgttcatgaagaaggaaaaaattcagttgactgtgcacagtggtttcagtaaagagattttgctgcaaggaacaagccacccgttgaaggaaaagagtaggcaaggagataaattgtttttccatcatgaagccattgttgagaattggtcgatcaaagatttcaatttttcatacaatgtttactcgggtgatttgtctggtggtgtgcttgtgcaaccagcaacattatgtgactatgatgatagagatatgttctgcatttttcttctacctggaagtggcaacagaaaggtatttggaaaagcagttgtgtttattgttgacacaagtggaagcatgcaaggaaagcctcttgagaatgtcaagcatgcagtttctactgctctttcagagcttgtggaaggggattatttcaacattataacatttaatgatgagcttcactcattctcttcctgtttagagcaagtaaatgacaaagcaatagcaagcgcaactgagtggatgaatgcaaactttgttgctgagggtggtacagatattatgcatcctttgagtgaggcaatggcattactatcaagtgttcatgacacacttccacaaatatatcttatcacggatggttctgttgatgatgagcataacatctgccgaactacaaaaactgatctctccaacagagggtctaggtctcctcgaatttctacttttggactaggatcgtattgcaaccactatttcctgcgcatgttagcttcaattggcaagggacattatgatgctgcacttgggacagcatcaatcgagaatcagattcttaaatggttcaggagagcgtcgagtacaattgtggcaaatatctccattgatgctttgacacatcttgatgaattcgaagtggattctgagtacattccagacctttcagcgaactctcctttgtgtgtatctggaaaatacaaaggaaaattcccggacacaattaaagctaaaggttacttagctgacatgaaggagatctcggttgaactgaaggtccaacaactaaaggaaatacctcttgacaaagtattggtgatacaacagattgattttatgacatcaaaggcatggatgtctgcagataaacaagtggagagaaaggtgattaaattaagtacacaaaatggtgttccgtcggagtacacagatatgatctttcttcaaacaaatctggataaagtagaaggaacacaaaaggtaggtctaacatgttattcttcgaggatattcactatcttctggtgcaggggttttcatgaaataacttcggatcacttatgttcattttctaaatataaatcagttaaaaaagggggtcttttcatatatggaggcaataattaattagctcataattatttactgttgttggcccctgcaattataaatagtttgatgtgaagggacttcttcctgagctttgtgtacttgaacaggtcaagcaaaaactgaaaggacacaaaggcagagatgagcaacagatttatggcctgaaactgggattcggtaacaaagatgctacacgggaaaatctcatcacaggatttggagacatgaatccggcagagaaatctgtgatgctccaaaagggatcgggctgttgcagccgcgtcgcagactgcctctgctgcatgtgctgcatcaaggcgtgcaacaggatgaacgaccagtgcgccgttctgatggcacagatctgcgcggctctagcgtgcctcggctgctacgagtgttgtgcagaggtgtgctgtggagggtcggagtcgtagtaggaagtgttttgtatatttgtatggaagattggagaattggagtgtacataatagagttcgcggaagcccggttctggcccggctcttggttgtatccgtccaaacgttctataatttgctcgttacatgcaatgcaaaagagggatggcacacttgagtagtattttgctgttgtgcagtgcaaacgagggatgtatctgctggcagttcgtgtgcttggagtcggaggtgatataaaataacagttatcattagatctagatcggatgtaccagatcgtttgattgcatgcttgcatcaggataagtgattgcataggatattttcccgacttgttatgctattaagtagctaaaattagggtacaggacccgctaaatttagaggacgtagatctggagggagtagaggacgtcctcg

SEQ ID NO: 5944 - DNA, 2458 bp, Zea Mays
ctttcttctcggcgtcctcgcagtttcgcgtttacccaaaatacccctaccttaaaccctccgcctccgccgccatgcgccgcctcctccaaaccctccgcccgctccaagccctacccctcaaccccgctcccggtatccccacccctctccgcctcctctctaccgcctcgtcggccgcgtcctcggactctgactccgccgcttcccccgccgtggccccgccccccgctgccgatgccgactttgacagcgccgactacgacctcccgacccctggtcccgccccctccagaaaaatcaacaaccccgccgccgcgctgaggaaggtccggttcgacccctccctccgcgcgcgcgccgacgaggcgctctttggtaaggggctgggcgcggcagccgttgatgaggaggatgaggaccgctcacgggacgtggcgctcgcgctgctcgatgcggcgctggaggcgcctgacgaggatgaagaggatctcggggaggtcagggaagaagaccagatgtcgctttccgttggcattgtcggcgcgcccaatgccggcaagtcctcgctcacaaataccatggttgggacaaaagtggctgcagtctcccgcaagacaaatactacgactcatgaaattttgggggtgctaacaaaagggaacacacagatagtatgtcgtttttattaagtttatttattcttgtgctggcagcctagtagaaaatgaaaccacaacttcaacatttgacttaatcatatgtaatttccttgaaatctttttaacatagctagggcgttttgtgttcacagttaactggattttggacgtgtgttgcctcaaatgatacatatatgaaactagttgtgttttactgcagtgcaagatattaatgtgtaacaaattctcacatatcaggtagtggtgcatttcatggcttgatatgtatctatttaattctgtccaaattaacaaaattataggccgaattatatgtttttaatttatccatcataggaccattaacacacaaaaacaagaacatgctgctaatatgtatggctatcagtactagctgtacagttatcttgtattcagctaataaaattctctgcagtgcttttttgacaccccagggctcatgttagggcaccatggatttccttatagggatgtcacagttcgtgtggagagtgcctggagctcaattaacctctatgatttactaatagtcatgttcgatgtcaataggcatcttaatctgccagattcacgagttataaagttaattaaacgtttgggtacggaggtgaacccaaaccagaggcgtatattgtgcatgaataaggttgacttggtggaagacaagaaggacctacttaaagttgcaaaagaatttgaagatcttcctggatatgaaaggtacttcatggtatctgggctaaaaggcaagggagtgaaagaccttgtacagtatttgatggagcaggcagtaagaagaccttgggatgaggagccaactgtaatgactgaagaggtaatgaaaaccataacgttggaggttgtgcgcgagaagatgctgcatcacatccaccaagaaatcccctatgtaattgagcatcgtctgatgggctggaaggagctaaaagatggttctcttagggtggagcagcacttcattgcacctaagcaaagccagcgtcagattcttgttggtaaaaatggttctaagatagggagaatcggtattgaagctaatgaagagctaaggtccatattcaagagagatgtccatctaattctccaagttagagttgcgaaaaagagaagtgcctgaacagacagattttagtgcctgtatagaccgcaactgatctgagaactgcagtgcagtgttgtcacaatgtattcaggagacatggttggtaagtggtgcttgggcgcatcagttcgggtgactgctttgacagaactttggatctatgatcaaatggaggtgccgagctataacctagcgtgtggagccttgatttctgaataaaagatataccgggagcaatccacacgccagtggtgacaaggaaacggcttgctgaatagcgagctgctcgtgtgctggcgaatctggggtctgtgatactgatatgcagatacgaatgcgctggacaccgttttgcctactctctgattcgaaaagtagtccctctccttctcaggtctcagcctgtattttctataggttctttagacagtgttgtaacgacaggatgatcgagcatgtcggcgttgaagtttgctgctgatcttccgcggtgttttgaacagcggaaatttaaggatgaaatccggtggaaaatttacacgatggaaaatttccccgggacgtgcgcgtgctgtactgctgatacagaaatgctccctatatctatatttatcatcgtctatatttatcatca

SEQ ID NO: 5945 - DNA, 1594 bp, Zea Mays
cctctctctctctccatctccttcacgccacaccacaagtgtcgaaacggatcaaagagcaagcgacggggacgagagagacgagaggaccgtcgtctccccctcctccctcacaactcacacgcgagacggagacgcggccgcagccgaggtctgcataaaagcgcaaaagatctctcgctctcggctctcctcctctccccctcacccccgcttacccccgccggcgagttcaccctgacatggtcggccggatggagcggcagaccgcgtcgtcgtcagcttcgtgctcctcctcctcctcttcctcctcggtctgcggcggcaagaagcgccctgatatcctcaacatgatccggaatgcagcctgtcttaattcgtcatctactgataccggcaagggaaggagtaaattgtcaaccaacaaagttacacatggattccacctggtggaaggcaagtccggccatggcatggaagactaccatgtggcagagtacaaatatgtgaagaaccatgagcttggtctcttcgccatctttgatggccatttaggagataaggtgccaagttacctgaaagctaaccttttcagcaacataatgaaagagcctctcttctggtctagtcctgaagaagcaataaagaatgcatactgctctacaaacaaatatatcctggaaaatggcaaacaacttggaccaggtggttcaacagcagttacagctattgtagtcgatggtaaggacatgttgatcgcaaatgtaggcgactctcgagctgttgtgtgtgaaatgggctctgctaatcagctcactgttgaccatgagcccgatacaactgaggaaaggcagaggattgaaaagcacggtggctttgtaacgacatttcctggtgatgttcctcgggtgaatggccagcttgctgttgctagagcatttggtgaccaaagcctcaaggcccacttgagctctaaacctgatactagacatgtaccaatagactcaagtatagagttcgtcatacttgccagtgatggattgtggaaggtaatgaagaaccaggaagccgtggatctcgtgaagtcaatcaaggatcccaaggcagcagcgaagcgattgaccactgaagcgttggcaaggaagagcaaagatgacatctcttgcattgtcatccgtttccgctgctgacttaccccctcaacagcacttttttatttccgatccacgcctcatgatatggattgagacaatctgtctgtaatcatctgccttgccgattttttttctggtagaatctgctctacctaccgtagttgtggacagacctggaactaattaggacagtgaagacttgagagctggtaggtgagtgtgtgcagggtgtccattccattcgcctgtgcatatatacacccaggccccagcgtagactgtgcatccgttgaccgggacttgggggtcctgtcaggacctagtgcttgtgatgctaatggacctaatggtgcgaaggaacttgtcgatatctgatttggtcaatttagtttattacatcgctctcagtcgtagggtagatgcatctgatttcaatgaac

SEQ ID NO: 5946 - DNA, 1674 bp, Zea Mays
cctctctctctctccatctccttcacgccacaccacaagtgtcgaaacggatcaaagagcaagcgacggggacgagagagacgagaggaccgtcgtctccccctcctccctcacaactcacacgcgagacggagacgcggccgcagccgaggtctgcataaaagcgcaaaagatctctcgctctcggctctcctcctctccccctcacccccggtgcgctgtctgtgtcccgtctccgcgagaccgcgagcaagttctgtcttcgtccgtccatccgtgcccggtcttactgttggcgctccttgattagcttacccccgccggcgagttcaccctgacatggtcggccggatggagcggcagaccgcgtcgtcgtcagcttcgtgctcctcctcctcctcttcctcctcggtctgcggcggcaagaagcgccctgatatcctcaacatgatccggaatgcagcctgtcttaattcgtcatctactgataccggcaagggaaggagtaaattgtcaaccaacaaagttacacatggattccacctggtggaaggcaagtccggccatggcatggaagactaccatgtggcagagtacaaatatgtgaagaaccatgagcttggtctcttcgccatctttgatggccatttaggagataaggtgccaagttacctgaaagctaaccttttcagcaacataatgaaagagtcctgaagaagcaataaagaatgcatactgctctacaaacaaatatatcctggaaaatggcaaacaacttggaccaggtggttcaacagcagttacagctattgtagtcgatggtaaggacatgttgatcgcaaatgtaggcgactctcgagctgttgtgtgtgaaatgggctctgctaatcagctcactgttgaccatgagcccgatacaactgaggaaaggcagaggattgaaaagcacggtggctttgtaacgacatttcctggtgatgttcctcgggtgaatggccagcttgctgttgctagagcatttggtgaccaaagcctcaaggcccacttgagctctaaacctgatactagacatgtaccaatagactcaagtatagagttcgtcatacttgccagtgatggattgtggaaggtaatgaagaaccaggaagccgtggatctcgtgaagtcaatcaaggatcccaaggcagcagcgaagcgattgaccactgaagcgttggcaaggaagagcaaagatgacatctcttgcattgtcatccgtttccgctgctgacttaccccctcaacagcacttttttatttccgatccacgcctcatgatatggattgagacaatctgtctgtaatcatctgccttgccgattttttttctggtagaatctgctctacctaccgtagttgtggacagacctggaactaattaggacagtgaagacttgagagctggtaggtgagtgtgtgcagggtgtccattccattcgcctgtgcatatatacacccaggccccagcgtagactgtgcatccgttgaccgggacttgggggtcctgtcaggacctagtgcttgtgatgctaatggacctaatggtgcgaaggaacttgtcgatatctgatttggtcaatttagtttattacatcgctctcagtcgtagggtagatgcatctgatttcaatgaac

SEQ ID NO: 5947 - DNA, 1492 bp, Zea Mays
cccaagtgcatccgcattccacccggaaccgcggtctcagcgctcagatggctcagatgtcacccacccgcaacaagtgcgtcctaaccgccatctgagcgcgttcttgtccaccctaacctggtgcctctcacggccgcattcgcaccgcgatgaactacgccgcagccgccactaacgcccccgcggcggcgcccgcggcagcgccggcgtcgggcacagaacacgcccactacccgtattacgctggctattcttatccctacggcgcctatcaccaacctgccccgcccacgtactcctccgccgtggccgccgcctcgtcatcctactactaccccgtccctgccgccgcgtcgtccaccgccgcgcagtacgacccctattcgggttaccagcactacagtcacccggagggaggaggctcggcgggggctggcctggtgggctgctacagcaccgtcggcgaggcgttgcagcaggccgcggtagcatcgacgacgcaggctgctctggaggcgaccacaaaggaggcggggaagcaattcggtttcgatccccagagctacgctcagcagttgccagagcctccaatggaattacacaaccagctgcagccccaggcttgcaccatgcccagtggaatgctcattttgggtatcctgtgccgaaatatgtcttgaggaaacaaatgaagaaaaagccgaagactgtgcaaccagcgccatgtgaggtgtgcaagattcagtgtgatacactagaagttctcctgatccataagcagggaaagaagcacaagaaaaatttggagaaattacaagactcaatcacccgtaaaccaattataaagcccccaagcaatgtcatcggtccaagtatgccacctgttgctgtatccaactgtgtggtgccctctgtacagccgaagaagaagagcagctcagcagcaacccgggaagatctggaggtgaagaagaggcgagtccttgaggctggagcagcgcagggcgaagtaaaaatctgccaagtgtgcaatgttgtagtgaacagccaaaaagtgtacgagttccatattgcggggcagaagcaccaggccttggtacgtaagcagcaaccgctacgttttgtcacatgatgcagagccattttgctcgtcgtctttcgtctggcctcatgcttgtccggaagttcctctggaacgagaactcacaacattcgtatcttcaactttgttagcacatttcctcgtttagtgctcgtgctcctgtactactggtagcgtgccaaaaggttaacaggttttcattggacttttgcctgctggtcataattctgagtgctgaaactgaagactatattgtatgtcgcaagttctttatcagcatggtttggttgtatctagtaaaaaatcatggttggattgtagatcgtcaaagtttgctgttgctataaagcactccttccattctaaattataagttctgttatattt

SEQ ID NO: 5948 - DNA, 1535 bp, Zea Mays
tgaccatctcctttctcctcacttctcaccatctgttgcaaaataataatttgtataattcagtttactgcagaggttttgcgtgcacatcacgatgaagtgtggtttattcaattctcaaataatggaaagtatttagcctcagcgtcaaatgataaatctgcaattatatgggaggttgatgaggatggagagctattactgaggcatacattgagtggccatcaaaagtcagtgatgatggttgcatggagccctgatgattgtcagctcctcacatgtgggcaggaagaaaccatccgacgctgggatgttaaatctggcaaatgtcttcatgtttacgagaagtctgccactggtttgatatcatgtgcttggttcccagatggaaagcaattatctggtttagctgatcaaaacttttgcatttgggatttagatggtaaggaagtagattgctggaaagggcagggatcaacaggaacatctgattttgctgtagcaaaagatggaaaccttataataagcatgagcaagcagaacacaattcttctatttgatagggagacaaaacaggagagaataattgaagagggtagtacaattacttcattttgtctatcagaagacggtgatttcctgcttgtaaatcttgtaagcgaagagattcatttgtggaacataagaaatgatcctgttcgtgtcaaccggtacaatggtcataagcgcacccggtttgtgataaggtcttgttttggcggatttgagcaggcgttcattgctagtgggagtgaagattcacaggtctacatatggcatagagccactggcgatctcattgagactcttgctggtcactcgggcacagtcaactgcgtcagttggaatcctgcgaatccccacatgctcgcctcagcgagcgacgatcacacagttcgtatatggggggcaaagaagtccagtcttaagcgcaaggatgttgggagcagcaattgcaacagtaacggttctcgctcgaatggcaatgcacataacaacgttttcgttcaaaagtgcaacgggaacaacaccaaatgatttgccagggcaatgtatccccatggatggttgactggcgtctgtaaatccccctgtcctttacttccctcgtggaagaagaatcgccaccgccatagttaagacaacaacaacaaagctgcagcacaaagtgtggggaacctgctaggtttcgtgcgctatctttcccttgttccttcatgactgtcatcacatgtatttcttaattcaagctgggatggaattatggtattactttgcatctttgatatcttgatttgccctctctgattgattgtaactgcattttggtggtgatggttgttaactcctcttattgcattttgccttgagaagaaacaaatgttggcctaggatgctccgtctaaagaacgggacggaacatcttatcacaaatttaagtagattcatggatcatttatttccaatgaattaagtggtctgtttgattgtcatat

SEQ ID NO: 5949 - DNA, 1355 bp, Zea Mays
cgtgcctcttccgctccccgttcccgcaataaaggcctaccctacctgattagcccgtgccctcgcgcggcatcacacagattcccgcgtcccgccgtcggcgactcggcgtcctgctgattgcgtcgcgaggagtgctcgtagccgccctcctctctcagattcagtcgcccatggcgaggaatccaggccgcaccgtcttcatcggcaacttggatgaaaaagtatctgaaagagtcttgtatgagattcttattcaggcaggccatgtagtaggcctacatgtacctagtaataaggagagtaacagtcgcaaaggttatgcttttgctgagtatgaaaccgaggatatcgcgcaatacgctgttaggcttttctcgggacttgttcggatcaatggtaaaacgctcaagttcgtggtaggttttcatttctatctaggtacattagttgtgtataatattctgcctacaagcattacttgtgtatacaccacttgtctataatagcagacagttgttcttacgttatctgtcatactatctgctgaaatattaacatttgcctcaatcacgtgcaactttttatataattgtctttatgccttcaaatgtaaccaagttcagacatctattttcttgttacgtttttgtagattgctggtcatgacaaaccgtcttcaaatgacaataagtcggtactgctcaatcatgtaccctcttcaaatggcaataacccacatatccggtggtaaacgggaggattggaggttatggtttttcttccactccttatcctaatggtttccacccgcaagctttaccgggtggaccagtacacagccatggcaaggtttagcaacagtacgtatgcttacaataggcaggaatttggttctgttctgaacattgcgcagagaggtcctgttatgaatgcctttgcccatgaggctgcgaatcagccaatcatgtatgttgagaacgtaggtgcagaagaacgtagtatgttaagagtaggcaggttccacataggttcttgacacctcaatacctcggtaacgtctaggtaggttgtagtacctcctagtcttgcccaagcttgtaatatggttatcaatcctctagatcttcagtagaacattgcattattcttgaaggcaaaaaaaagtcttcttgtgttctccattgtccattgtcccaaccctgaaggcagcaggtgttacttatacaaagacagtgaagtacactattatgttcgtgctcgtgccagccaaaccggtgaatccaactcgttcgttcggtttttttttatatatcaactcgttgggttggattgctggtacaacagaaagttcg

SEQ ID NO: 5950 - DNA, 807 bp, Zea Mays
ccgaacaacgccctcctatcactgccacgtcaccgcatttgcacccagctttcctcccatcccatggcttccctcctctgccccgcctcttcctgcccctctgcttcactgcgccgcacagccgcctcccccgctgcaccatccttcgcctcaagtcggcactacggagccccgcttacgttccgagtcgcctctcagccgccgcaggcccttgccgcggccccttacggctacggcagcgacctgctcaggcccatcgacacacagacgatcatcatagccgccgccgtcgtatccgcagtctccctctctctcgtcctcggcctcaagggcgacccggtgccgtgcgacagggggcacgaagtgtgtgttctgcaacgatggcaaaatgaaggtggaaaatggagtcgttgagtgccgtgtatgcagaggagcagggctaatactttgcaagaagtgtgctggttctggatactccaagcggttgtagcggaatcccggtttgactggcattctgtgcagtttgacatccgaaagatggactttgtacagatgtatatacactcttctcttctctatcagcaaatatgtatgtccaggcagagatgagcttgaagggaagctgatttacagtctgctgatatattatcagttgcagttcatttatcatgcgcttcttctctgtttatcaaactgttcacacaagtctgctgatatattttattagcgtgcggcttcgtaatcataacgttataagcagaaccgatcgtccggttttgaatgtctacaaccagagcgtgatcccgg

SEQ ID NO: 5951 - DNA, 440 bp, Zea Mays
atttgctggaagcatggccgacacctatgacctatccatgtagagcaccggcccagaaactcctactgctcttcttagctcgccgaaatgacgcacggcctcgccgtcggcttcggctccctccgctgcggtccctccgtgtcgtcgtcctctgccaccattcatcgcaccctggtcgctccccctcgtcgaagcttacggatatgctcctcgaccttccctcctccacccgcgcccgccatcgagggtcgtgacgtcagcctctcggtgaccacgcggcggggcagggtgttgccggtgcttaagggatgctccctccttgtcccgcccgggcagctctggatgctcctcggccccaacggctgcggcaagtccacgctgctcaaggcctgagaattgaaattggaactgaatttatgagactggtgattgccttaaga

SEQ ID NO: 5952 - DNA, 6345 bp, Zea Mays
ctggccctgccgccgcattggcctcctcgtcctcctcctctcccgctccatgccgcgcggaacgatggagctggagatcgtcgaggtgggcccgtccagccgcccgctgcaatacgtctctcgcccgccacttccacctccaccgccgccgccgccaccgccaccattgcagcagcagcagcaaggggaagcaggggacgccaatgcggcgccgcccctggtgcagcatttcgacagcgagaagctcccgcagacgctcgtctccgagatccgccccttcctgcgcgccgccaacgacatcgaggccgagaatccgcgcgtcgcgtacctgtgtcggttccatgcattcgaaaaggctcatacaatggataaactttcagcagggaggggtgttcggcaatttaaaacagcacttctacggagacttgagcaggatgagagcagcactaaatcaaaaatgacacaaagaggtgatgcccgagagatgaagtcattctatgagaagaaaaagaaagccaatgcacatgaacacttgcctgtcctggcagaagtgctgaaggctcttctcagcggaactggcttggaggtcaagtcaaaaaccaattatgcttctcccagagatcaaagttgcagtcgctgctgtgtttagtgttcgcagtcttccatcagtcaacatgaaggatgaaaaaaatcatacagatattcttcggtggctgcaaagttggtttggattccagaaaggaaatgtcgccaaccaaagggagcatctaattctattgcttgcaaatatgcatgctagattgaatcccaagtcatcctccgctcaaatgcttgatgacagagcagtagatgaattgttggcaaagacatttgagaactatttgacctggtgcaaatttttggggagaagaagcaacatatggttgccctctgtgaagcaagaaattcagcagcataaacttctatacatagctctttatcttcttatatggggagaagcatcaaacttacggttaatgccagaatgcttatgctatatttttcatcatatgtcatatgagctatatggagtgctctctggggctgtaagtttaattactggggaaaaagtccgacctgcatatggaggagatgatgaatcatttcttaacaatgtagtgaagccaatatacaatgtcatatttcaggaatcacaaaagaacaagaacggggcatctgatcactcaacatggagaaactatgatgacctcaatgaattcttctggtctgctgattgctttaagcttggttggcccatgcgtcttaacaatgatttctttttcacatcaagtgcaactaaggactctcaggttctttgcggatcaagattatcaaaggtgccacatggccttgaaaactgtgctagctgtgttccactagtgtcactacacacatctcagcagaatgagcaactaaattcccaactgcctcctgaatcatcatcaacagaaaactatcttaattcagaagcagctgaacaaagacaacagcaagctatgagttccagttctcaacagagatggttgggaaaaacgaattttgttgaggtccgttctttttggcatctcttcagaagctttgataggatgtggacactccttgtgcttgggcttcaggttctgataataatggcatggcatggattagaaagccctactcagttacttgatccaataatttttgaggatattctaagtattttcatcacgaatgcagtacttcgagttattcaagtcatccttgacattgctttctcatggagaaccaagggaacaatgagagttgaccagatactgagatttactataaaactctctctggtggtggcatgggcgattattcttcctgtattttatgctaattctcaaaactataaggcttgctcaactaaacgctctaaaacctttttgggaatgttctgcttgtcaaaatatatggtggttgttgcattgtaccttgcaagcaatgtggttggtatggcattattttttgtcccagctgtcaccaactacatagagacatctacatggagaatttgcaatgtgttgtcatggtggtgtcagccacaattatacgttggacgaggaatgcaagaaggactcgtatctatactgaagtacacaactttttggactattctattgtcatgcaaatttttattcagctactactttgagattaagccacttgtgggaccaacgaaagaaattatgaagatcaatgtgaacagatatgagtggcatgaattttttccacaagtcaagagtaatgctggcgctattcttgctgtatgggctcctataattcttgtctattttatggacacacaaatatggtattcggtattctgtactattttcggtggtatgtgtggtattatccatcatcttggtgagattcgcacaatgggaatggtgagaagtcggttttattccttaccagaagccttcagtatgtctctttgtcctcctgcaacaccaatacagagaaagggaatgttttttagtttcttggagaagagaattttcaagaaattaggtaaagatgaaagatattacccaagaaagtttgcgctggtttggaacaatataataagtagcttccgttctgaggatttaataagtaatagagagatggaattgatgacaatgcccatgacaccaatgcataattctggttctatctgttggccattgtttttacttgctaaaaagttttcagaagcagtggatatggcagcaaattttactggaaaaagtgctcaactcttctggatgattaagaaggatcactacatgttttgttctataaatgaattctatgaactgacaaaaaatattttcagatttcttattatcggggagacagagaggagggtggtagctgccatatttgatgaaatagataagagtattcaaaattcaagcctggtgattgattttcggatgaatcatttgccttcactgttccaaaaatttgaccagctggctgaacttctgtttataaacgaacaaaaacatcggcatgaggtgacaattctgctccaagatattgttgatattgtagtccaggacatgattgtggatcctcaaagtatactgaatgtggttaactcttcaaagagattgatctctgatgatgatggagcattcagctattatgaaccagagctgtttgcatcagtcagctcaagaacaagcatccgatatccatattttgatcagcaaaaagaacaggttaaacgcttctatcttttgcttagtacaaaagaaaaggctgcggaaataccatcaaatttagaggctcggcgacgcatttcatttttcgccacatctctgtttatgcatatgcctgctgctcccaaagttcgcagtatgttgtcatttagtgtaataactccatatttcatggaagaagtgaagttttcagatgaagagcttcattcaaatcaagatgaagcatccaccctttcgtacatgcaaaagatatatccagatcaatggaaaaactttctggaacgcgttgatacaaaggtaactaatgatgaaattagatattgggcttcctaccgtggccaaacactgagccgaactgtacggggaatgatgtactacagaaaagcattgaagctacaggctctcttagacatgacaaatgatcaagatttatatgaagcacttctagcaattgagcaaggaaaaaataaaagaaatatccaccaagcattagcagctgaactagaagcacttgcagatatgaaattttcatatgtcatttcatgtcagaagtttggggaacaaaaaatcaaaggtgatccccatgctcaagacatcatagatctgatgatgaggtgccctgctctgagggttgcttatattgaagagaaggaagtcatagtaaataactgttctcatatggttgaagggaaggaagtcatagtaaataactgtccccataaggtttattcatctgtgttaataaaagcagagaataatttggaccaggagatttaccgtataaagctgcctggtccacctatcattggagaagggaagcctgaaaatcagaaccatgcgattatcttcactcgtggagatgctctacaaacaattgatatgaatcaagacaactatctggaagaagcttacaaaatgaggaatgtccttcaagagtttgtaaggcatcctagggacaaagctccaactatccttgggttaagagagcatatcttcactggaagtgtttcatctcttgctggcttcatgtcatatcaagagacaagctttgttacaattggacaaagatttcttgctgaaccccttagggtacggtttcactatggtcatccagacatttttgatcggatatttcatttaacaaggggcggcataagtaaagcgtctaaaactataaacttaagtgaggatgtgtttgctgggtataattccatattgcgtcgtgggaatataatttacagtgaatacattcaagttggcaaagggcgtgatgttggtcttaaccagatatccaaatttgaagctaaagtggcaaatggcaatagtgagcaaacaatcagtcgtgatattcaccggctaggtcggcgatttgatttcttcaggatgctctcatgttattttacaacagtgggattttactttaatagcctaatatcagttgttggtgtttatgttttcctctatggccagttgtacttggttctcagtggcctgcagagggctctgctacttgaagctcagactcagaatataaagtccttagaaacagcccttgcatctcagtcttttctccagctgggactgcttacaggattgcctatggtgatggagctaggtttggaaaagggtttccgtgcagctctgagtgattttatcctcatgcaattgcagttagcatcagttttcttcacattctcacttggaacaaaagcacactactacggccgtactattctccatgggggtgctaaataccggcctacagggcgtaaatttgttgttttccatgcaagctttactgagaattatcagttgtattccagaagtcattttgtcaaaggatttgagttgatcttccttttgatagtctaccacatctttaggagatcttatgttagcaatgtcgtgcatgtgatgatcacatactcaacatggtttatggcagtggcttggctgtttactccttttctttttaacccagctggttttgcttggcaaaaaattgttgacgactgggctgactggaataggtggatgaagaatcaaggaggcataggagtgcaaccagagaaaagctgggagtcatggtggaatagtgagaatgcacatctacgttactcagtattgagttctagaattcttgaagtgttgctctcactacgcttcttcatatatcaatatggacttgtttatcacctgaatatctctcaagacaacaagaatttccttgtctacctgctttcatgggtcgtaattattgccattattggttttgttaagcttgtcaattgtgctagccgtcgtttgagcacaaagcaccaactcgtcttcaggctcataaaacttttgacattcctctcagtggttacttccttggtccttctctattgtctctgtcgattatctatcatggatttgatcatctgttgtctcgcattcataccaactggctggggtctcctccttattgttcaagttttgagacccaaaatagagtactacgcagtatgggagcctattcaggtcatagctcacgcttacgactatggaatgggatctctgcttttcttcccgatcgctgtgcttgcatggatgcctgttatctcggccattcaaacccgggttcttttcaacagagcattttcccggcaactacagatccagccttttattgcaggcaaaactaaacggagatagcataaccgatggttttacatcgcatattggggatttgtgaatatgatctattggttggtcatcagagcaataagtttctgtactctggtagcataaatgtcgtgtgcagtgtgatccattattctttggcctaagcctgttccacatctaacatagtaataccttggtttcggtttttattgccgtgtaactttacatatcatttctgtaaaaaagaaacagctctagcattgctcttagatgagttgagactgatgaatctcatgatacctacacagttacaaaggtactaccttattttcatgtgaaatacgacacttattgtactactgtattattatgctttaacgtgcagtaccaaatcatttgccac

SEQ ID NO: 5953 - DNA, 2603 bp, Zea Mays
ccggccgttccaccactacacccccccaaaaaaaagtgactcccactgaaactcagtactactagtaatgaacggctcgcctctcgcaatcagcagggcacccgcgcccacacgccagtgacgaagccgccgccgccgccgccgcacgcacgcaccggcggcttctgccttctgctgccgatgccgctcgcccgctcctgcgattgatgcgcgcacttcaacgcgccgtcctgacgcccgggccccaccaccacaccgctttataaagtgaccagctcgcgctgctggccccgtctcttcttactcccttcttccgcggtggtagtaccgcgacggaagcagaggcggcggcagcagtggacgcggaggagccctagccagcctccgggtgccggcgcggcgaggtgagtggttcagtccgacggctggcgtccgcgtgtcggattgcgcgattcccgctgacattccggtgctggatttcggcaggttgtggattcgatggcggtggcgtcgcggctggcggtcgcgcgggtgtcgccggacggcgcgcgccccgcggcggcggcggcggcaggggggagggggaggagcgggctcgcggcggttcggctcccgtcgaccgccggttgggtgaggaggagggggcgcggcggggccgtcgcggccagccctcccacggaggaggccgtgcagatgacggagccgctcaccaaggaggacctcgtcgcctacctcgtctccgggtgcaagcccaaggagaattggagaattgggacggagcacgaaaagttcggtttcgaagtcgacactttacgccctataaaatatgatcagattcgtgacatactgaacggtcttgctgagagatttgattgggacaagataatggaagaaaacaatgttatcggtctcaagcagggaaagcaaagcatctcactagaacctggaggccaatttgaacttagtggcgctcctctcgaaacattacatcaaacttgtgctgaggtcaattcgcatctttatcaggttaaagcagttggagaggaaatgggaataggatttcttgggcttggctttcagccaaaatgggcactgagtgacataccaataatgccaaagggaagatacgaaataatgaggaattacatgcctaaagttggtactcttggccttgatatgatgttccggacatgtactgtgcaggttaatcttgacttcagttcagaacaggatatgataaggaaatttcgcgctggcctcgctttgcagcctattgcaactgcaatatttgccaattctccgttcaaagaaggaaaaccaaatggatttctcagcttaaggagccatatctggacagatactgataataatcgtgcagggatgctcccttttgtctttgacgactcatttgggattttatgcaaggaaagcttccacaggctcctggggagttgcccactcttaacgattgggagaaccatctaacaacaatttttcctgaggttaggctaaagaggtaccttgagatgagaggtgctgatggtggcccatggaggagattgtgtgcgttgcctgcattttgggttgggctgctgtacgacgaggaatcgttacaaagcattttagacatgacttttgattggacaaaggaggaaagagagatgctaagacggaaggtaccatcgactggtttgaagacgccgtttcgtgatggatatgtaagagatttagctgaggaagttctaaaactggccaagaatggactggaaagaagagggtacaaggaggttggtttccttagagaggtcgacgaagtagtgagaacaggagtgacgcctgcggagaggctgctgaacctgtacgagaccaagtggcaacgcaacgtcgaccatgttttcgagcatttgttatactgattactgaggatgacgccgccgaacgacgttggactgagcttgtagatgtaccccgtaccctaatacagagtctcgtcttgattcattcaatgcctgagccggaagggctcagtttcaggcacacaggagcagagctttcggttggttgttgacggggggcaaccgctgcacagcccggtgctgtgcctacaaataacttcgcctggaactggaacggatcactcatcactgtgctttgctttgacttgatctgcctgtctctccagggagatggaacaaactactgtttgtaccggcccgttttgttttgcagctatgaaaatcgccgtattgaaaataagtccgtcttctgcacgatggaactgtttgtttttcctttttttttggattgttgggacttgggatgtttgttcggggttaacatggcaaaagtgatctcatcgacgataaataaatgaactgatggtttgatccggaatctgcgatatctgcatgttcctttgtagccggtctttatggtctgctacctctgctacgataccttagggtacatgattttccgtacgcatcgtctcttagctgcatttgttgcatttgtgatttaggaaactcagagttgtatcatgctgttttttattgtttcttgtacttagaaaactgttctactgtcttagggttgtatatgcc

SEQ ID NO: 5954 - DNA, 2637 bp, Zea Mays
aaaaaagtgactcccactgaaactcagtactactagtaatgaacggctcgcctctcgcaatcagcagggcacccgcgcccacacgccagtgacgaagccgccgccgccgccgccgcacgcacgcaccggcggcttctgccttctgctgccgatgccgctcgcccgctcctgcgattgatgcgcgcacttcaacgcgccgtcctgacgcccgggccccaccaccacaccgctttataaagtgaccagctcgcgctgctggccccgtctcttcttactcccttcttccgcggtggtagtaccgcgacggaagcagaggcggcggcagcagtggacgcggaggagccctagccagcctccgggtgccggcgcggcgaggtgagtggttcagtccgacggctggcgtccgcgtgtcggattgcgcgattcccgctgacattccggtgctggatttcggcaggttgtggattcgatggcggtggcgtcgcggctggcggtcgcgcgggtgtcgccggacggcgcgcgccccgcggcggcggcggcggcaggggggagggggaggagcgggctcgcggcggttcggctcccgtcgaccgccggttgggtgaggaggagggggcgcggcggggccgtcgcggccagccctcccacggaggaggccgtgcagatgacggagccgctcaccaaggaggacctcgtcgcctacctcgtctccgggtgcaagcccaaggagaattggagaattgggacggagcacgaaaagttcggtttcgaagtcgacactttacgccctataaaatatgatcagattcgtgacatactgaacggtcttgctgagagatttgattgggacaagataatggaagaaaacaatgttatcggtctcaagcagggaaagcaaagcatctcactagaacctggaggccaatttgaacttagtggcgctcctctcgaaacattacatcaaacttgtgctgaggtcaattcgcatctttatcaggttaaagcagttggagaggaaatgggaataggatttcttgggcttggctttcagccaaaatgggcactgagtgacataccaataatgccaaagggaagatacgaaataatgaggaattacatgcctaaagttggtactcttggccttgatatgatgttccggacatgtactgtgcaggttaatcttgacttcagttcagaacaggatatgataaggaaatttcgcgctggcctcgctttgcagcctattgcaactgcaatatttgccaattctccgttcaaagaaggaaaaccaaatggatttctcagcttaaggagccatatctggacagatactgataataatcgtgcagggatgctcccttttgtctttgacgactcatttgggtttgagcaatatgtggactatgcattagaagtccccatgtattttgtgtaccgaaataaaaagattttatgcaaggaaagcttccacaggctcctggggagttgcccactcttaacgattgggagaaccatctaacaacaatttttcctgaggttaggctaaagaggtaccttgagatgagaggtgctgatggtggcccatggaggagattgtgtgcgttgcctgcattttgggttgggctgctgtacgacgaggaatcgttacaaagcattttagacatgacttttgattggacaaaggaggaaagagagatgctaagacggaaggtaccatcgactggtttgaagacgccgtttcgtgatggatatgtaagagatttagctgaggaagttctaaaactggccaagaatggactggaaagaagagggtacaaggaggttggtttccttagagaggtcgacgaagtagtgagaacaggagtgacgcctgcggagaggctgctgaacctgtacgagaccaagtggcaacgcaacgtcgaccatgttttcgagcatttgttatactgattactgaggatgacgccgccgaacgacgttggactgagcttgtagatgtaccccgtaccctaatacagagtctcgtcttgattcattcaatgcctgagccggaagggctcagtttcaggcacacaggagcagagctttcggttggttgttgacggggggcaaccgctgcacagcccggtgctgtgcctacaaataacttcgcctggaactggaacggatcactcatcactgtgctttgctttgacttgatctgcctgtctctccagggagatggaacaaactactgtttgtaccggcccgttttgttttgcagctatgaaaatcgccgtattgaaaataagtccgtcttctgcacgatggaactgtttgtttttcctttttttttggattgttgggacttgggatgtttgttcggggttaacatggcaaaagtgatctcatcgacgataaataaatgaactgatggtttgatccggaatctgcgatatctgcatgttcctttgtagccggtctttatggtctgctacctctgctacgataccttagggtacatgattttccgtacgcatcgtctcttagctgcatttgttgcatttgtgatttaggaaactcagagttgtatcatgctgttttttattgtttcttgtacttagaaaactgttctactgtcttagggttgtatatgcc

SEQ ID NO: 5955 - DNA, 2140 bp, Zea Mays
accccccccccccccctgtcgcggctgaatgattcagggcagagtctttcggaggaaaaagttgtatcttttccggtgttgttcttcatcctctgggtctgggagctgtattttgtcccgttgctcctcctcccactgatgcaggaagccaacaatcaaaatgttccgcagctttcaccaaaaggatgctgcggcggcctgcacttcggcgacgtgctgaagctgaacgtggagaccatggcgtggagccttgtggccacgacggggcagtgcccgggcacgcgggacagccacggcgccgcgctggtgggccaccggatgctcgtcttcgggggcaccaacggcggcaggaaggtgaacgacctgcacgtgctggacctgcgcaccggggagtggacgcgcccgcagtgcaagggcgcgccgccgccgtcgccgcgggagagccacaccgtcaccgtcgtcgggggcgaccgcctcgtcgtcttcggcggcagcggggagggcgagggcaactacctctgcgacgtgcacgtgctggacgtgcccaccatgacgtggtcctcgcccgaggtcaggggcggccacgcgcccgcgcccagggacagccacagcgccgtggccgtcggccgcaggctcttcgtcttcggcggggactgcggcgaccggtaccacggcgacgtggacgtgctcgacgtcgacaccatggcgtggtcaatgtttccggtgaagggtgcatcgcccggcgtcagagcaggtcatgcagctatgagtgttggatctaaggtatatattatcggaggcgttggcgacaagcactactacagcgatgtctgggttcttgatgtcacaaaccgctcgtggagccaacttgaggtgtgcgggcagcgaccgcaggggcggttttctcataccgcagtggccatgaatactgacatcgcaatctacggaggatgtggcgaagatgagcgtcccctgaatgagcttctcattctgcagttgggctctgagcatccaaacggccgctacaacatttccatgtgcaaggttcttagcaaccactggagccaggagaagaggaagtttctcagatcagaagctagagatgcaagtgtgagcaatggggagatggctcagaaaccccgagaagcagaaacggagcaaaggaacccgttcctgcgtggcctagagaatggccgcgtgaagcgaaggagaaccggtgaagctcgcccgaaggaggccgagtcagagcaagaggagcactcgctgtccctttcccaacattcctcgccgtcgcagtcggatcaggagcagaccggagctcacaagcttccggcctcggccaacacgtcgccttcagccctgcagccgttcgctcgtctcaacggcaatggcgctcagctgagggccgccggacccggaggcgtctcctcgaggcctctcaaggcggaccagcttctccgcaccatcgcgccacagcatcggcgggaggtgcagttcctttcctccgaccatcagccgcagccccgggggcctcccggcccaccacaccttattggcgcagaggttcatgggacagtcgatggagcctttgattctgggtacctcgtgaccgccgtcgtgaacgggcagctcttcagaggcgttctgtttgctccgggacctggggtcacagctccgaggccggcggtgcatcaccagatcctgacgagctccgccgtgcctccccagcaacggccgctgctggcgcacgccatccccgtccacgcccggccagtgccgctgccgcaggccacgggcttcgtgctgccggactgtgcccaccacgcgcggcaagggttcccggcgaaggccgtcaagtccgagccggagcgaggcagcagcgacctgcacgatgttgtgctcacgctgggagggcctggagggggcaagtgagcccccccatggaaggcctcaagaactgtcgaggtcctggcctgctgctgttggcctcttggattgctttgtaaattagtctggttgaggaaaaaaataagactagcagcttttctataatctttcccgggtgattttagggttctaatatgtgactttacatatataaatatagtgttagcttgatgcagctagttttgttctgagc

SEQ ID NO: 5956 - DNA, 1359 bp, Zea Mays
tgcgctgcggctgtttgtctggcaccggaaagaaaaaatccttctcggctcggcacaccgctgccggccatcgccgcagccggagatggaggacatcgaggacgtgctgggcccggtcggcctctctgtcggcggagcgcctccggtgctccgcctcctgctagcctccgtcgcggcaagctcaagcgccggtcgtccagggctgcgcatgcgcggcctcagctcgaggcccggatccccggcacgcagacgattcacgtcaagactatcgggtgctcacataaccagagtgacagtgaatacatgtcagtggatcgtgtgaaaactgttgtcggcttgtcgctgaaggtgtccgggagatttggttgagtagccagtagcgaagataccggtgcttatggacaggatatcggtacaatcttccaaatttgttaaacacgattgttgcggagcatcctgttgaccgaagcacattgctccgcataggcatgacaaatccacctttcatactagagcatctgaaggagatatctgccgttttgcgtcacccctgggtttattcgttcctccatgttcctctgcaatctggaagtgatgctgttttaacggcgatgagtggtgaatacactgttggcaagttcagaaaggtagttgatgctttgtgtgagcttgtccctggaatgcaaattgctacagatattatctgcggctttcctgggacgccctgctgctaggatgaagaaggtatcgagcaatgaagtgaaaaaagcggagtcgtgaactgacttcagttttcgaatcattgtcaccgtaccaaggaatggtaggcaaagtagagaggatctggatcactgagatcgcgaccggtggtgttcgcttggttgggcataccaagggatacatccaggtgctggtaattgcccctgatagcatgttaggagcgtcagcaaatgtgaaggttacatctgttcggcgacgtctttggtgaagtggtggaagaaggatctgttgcggcaggagaagcaccgaagcgaactagcgcgacttgtagtggtggttcttgagcgagcgtgtcgatggtcgattttggcggtttgttttgtttactcggtctgttctgtatggcgttgcaaaattgtgctactgtacaaatacatggttgcgaacaggttaacgcggagtcttctgatgctgcgtcacgacggatcagggtttgatgaaagtgaagaacatggtgcgatttgctaccgtgttcggaaaaatttggtagtgcatcgaaacccaaggcgtgacgtgttctctgtgtcatcactttaaaaaaaaaaagaaaactgtgttcgcacacgaggcaaaacagaa

SEQ ID NO: 5957 - DNA, 1502 bp, Zea Mays
tgcgctgcggctgtttgtctggcaccggaaagaaaaaatccttctcggctcggcacaccgctgccggccatcgccgcagccggagatggaggacatcgaggacgtgctgggcccggtcggcctctctgtcggcggagcgcctccggtgctccgcctcctgctagcctccgtcgcggcaagctcaagcgccggtcgtccagggctgcgcatgcgcggcctcagctcgaggcccggatccccggcacgcagacgattcacgtcaagactatcgggtgctcacataaccagagtgacagtgaatacatgtcaggtcagctctctgcatttggatatgcaatcattgaagagcccgaaggagcagatttgtggctaattaacactggatcgtgtgaaaactgttgtcggcttgtcgctgaaggtgtccgggagatttggttgagtagccagtagcgaagataccggtgcttatggacaggatatcggtacaatcttccaaatttgttaaacacgattgttgcggagcatcctgttgaccgaagcacattgctccgcataggcatgacaaatccacctttcatactagagcatctgaaggagatatctgccgttttgcgtcacccctgggtttattcgttcctccatgttcctctgcaatctggaagtgatgctgttttaacggcgatgagtggtgaatacactgttggcaagttcagaaaggtagttgatgctttgtgtgagcttgtccctggaatgcaaattgctacagatattatctgcggctttcctgggacgccctgctgctaggatgaagaaggtatcgagcaatgaagtgaaaaaagcggagtcgtgaactgacttcagttttcgaatcattgtcaccgtaccaaggaatggtaggcaaagtagagaggatctggatcactgagatcgcgaccggtggtgttcgcttggtaagtgcataccaattcttccgactaattgctgattatgttcatgcctggcgcaaagcttactcctgcacaggttgggcataccaagggatacatccaggtgctggtaattgcccctgatagcatgttaggagcgtcagcaaatgtgaaggttacatctgttcggcgacgtctttggtgaagtggtggaagaaggatctgttgcggcaggagaagcaccgaagcgaactagcgcgacttgtagtggtggttcttgagcgagcgtgtcgatggtcgattttggcggtttgttttgtttactcggtctgttctgtatggcgttgcaaaattgtgctactgtacaaatacatggttgcgaacaggttaacgcggagtcttctgatgctgcgtcacgacggatcagggtttgatgaaagtgaagaacatggtgcgatttgctaccgtgttcggaaaaatttggtagtgcatcgaaacccaaggcgtgacgtgttctctgtgtcatcactttaaaaaaaaaaagaaaactgtgttcgcacacgaggcaaaacagaa

SEQ ID NO: 5958 - DNA, 1674 bp, Zea Mays
cccgggcccggcccagcccagcgcaggcgtgcgaacacgaagctcccctggacggagctctatcgcgtagtacggagtccacagggcgaggaaagatgctagcaggcgcccccaccggcgatgcgggccccagctccggcgctgggagcaacccacccactcggccacggaggttccccggggcggcgcagccggagatcatgcgggcggcggagaaggacgatagctacgcagcccacgtcacggaggcatgccgcgacgcatttcggcacctcttcgataaaattgcttggtcagtccctttactacttgctaacaactggttcaggccagcaaacacttggtgaagaatattgtgatatatctcaggttgcaaccttgcatggacttccacctactcctgctaggcggattctattcattttgtaccaaactactgtgccctaccttgctgaacggatcagctccagaattgttgcccgtagtattgtactcaacgaatctcagtttgatgaccatcctgaaagtgataattctagtagtgacattgcacaatccaccacaaatagtgacattccttcaagaagcttaagtgtttctgctctgtcagggttcagaggccgagttcatgccttgtggcaatgggttcttcagaaatggccttcaatgctgccatatgctcaagattttatacagttggctatccggacaaatctaatgttcttctattttgaaggtctgtattatcatttgccaaagcgagcagctggtattcgctatgtattcattggcaagccaatgaatcagagacctaggtatcagatcttgggtatttttctgttgattcagttgtgtattcttggagctgaaagactccgaagaagtaatatatcgtcaatagctagttccattaatcaaatatcatctggaggctatccatcgactacaggtcggggcatccctgttctaaatgaagatggaaatatcatcagtgacatccgcagtggtaaagctgcagatatagcttctcattcagagacctccaatggcaagagcaaatgcaccctttgtctcagcatccggcaaaatcctactgccacaacctgtggacatgttttctgctggaattgcataatggagtggtgcaatgagaagcctgagtgccccctatgcagaactccgattacccattcgagtttgatttgtatatatcattcagatttctagcaaatcatttcgcacagtaggagtccatatcatacttcactggcgtcaaaatttccagaccatatttcggcaagaaaactgcatgccaaaatggtttcgtatacttaagtgggagaagagtacgagaccatttcaagaggttaaagatcagagagttgcatacgataatttgttgtaggttgaaagtttagattgaattagggaccacaggtagtagaaattatttattggcagttcggatagtagataacttgtattggacaccgatgtgaattttattggttagaacaatgtccgactcgaatcatcgagctatttagcaatatgttgtgtccattttcgtcgcacttataccagcttgtatgttttgactaagttaggtgcaggtatgttactataattttcatttatgtttgagtatagaatataaaatagctgggtggacat

SEQ ID NO: 5959 - DNA, 1232 bp, Zea Mays
ggccactccaccatcatcagcaattcagggagcccgccggcccgccccgccccgcctcgttacccgcccacccaccgctgcttctgcccgactgctccatggaggggaccacgcaacccaccgcgggggcgcgggaaaagctgctccccacctccgccgccgcctctctgccgccctacctcgacccgcaccccgccgactcctcctcctacgcggtcctcctcgtccccgtccgccgccgcctgcgccgcggcggccgctgcatcgccccctgcctcaccgccctcctcctcgcgctcgcgggcttcctcctctggccggccgacccggacatctccctcgcccgcttccacctggggcacgtctccgtcgtggcgcgccccgccgtcgccgtcaccatatccgccgcgctcaaggtccgcgtccgcaacccggacctcttcgcgctcgactacacccgcctcgacgtcgccatcggctaccgcggcaagccgcttggcctggtaacgtccggcggcggacgggtccaggcgcgcgctgtctcgtacgtcgacgccaacctgcagctcgacggcatacgcgtcgtcgaggacgcgatctacctgctcaaggacctcgcgcggggatccgtgccctttgacgccctcgccgaggtcgagggtcaccttcacttcttcttcctcagtatcccggtcaaggtccatacgatgtctaatgcattatagagagaaaccaatacaggacggtgcagcacaaaaattgtgaggaaagaagatctacacaatcttcttgcattgatctagataccattcatctgtcagacatgaatattgttggaggattaggctttagaggagcaggtcatatttataagcctatgcgtaatcctgtgccatggggagaatatcttgcgtggttcatgttaatccacacaaccaaactatagtacatcaggactgctaccccgagtgaaatgcttacggcgtggaaggatgtgtgctatcttgcctcgcgaatgaatcgtttggttcgtttctaagcttcgcttggagccgttgtaaaagtaagaaacaactaaactctactggataatgtgcctattgtaaagccgttaacacgtcatgttaatatcaatcagtttccctacaatgagaaaattgatatttcgcattggtgttacgtacggtgatgtttgagttcactgcagagtctgcgatatttgtcacacggag

SEQ ID NO: 5960 - DNA, 1831 bp, Zea Mays
gcttcgtctcccgagtcccgaccccggaactagccgtcgccgtcgctctcttctcagagccactcagcagtccagctccagcggccttcccaccaaaacctgcagcaccgcacgcacatgacatgcctagcctagctcctctgcctgcctatatattcgccttcctgcagcgatgcccccctcgtccaagcgcaagcgcaactcgctccccagcgctcctccttaattaatcccttgcatgccttccagccgcgctcgcgcctcatcagggacggcggcggcggccatggacccgtggatcgcgcagccttccctcagcctcgacctcaaggtcggcctccccacgccggccaaggtcgtcttggtcgaggagaccaacaatttcttggccgtcagcaggacgaaagaccgggaggtggaggcgctcgaggctgagctccggcgagtcggcgacgagaacaagcgcctcagcgagatgctgcgggccctgctggccaactacaccgagctgcagggccaggtcaacgacatggttgtggtggccgccgccgccaaccgccagtcctccacgtcggagggcggctccgcggcctcgccgtccaggaagcggatccggagcgacagcctcgacaccgccccgcaccaccaacaaaacacccgcaagccgtcgccgtcgccgccgttcgcggcccacgaccagatggagtgcacgtcggccgcagccaccgccgccgccgccttccaccacgagccgggcagccgcgtccgggaggagtgcaagtccaaggtgtcccggcgatacgtccacgccgacccctctgacctcagcctccggtgaaggacgggtaccaatggcggaagtacgggcagaaggtgaccaaggacaacccctgcccgcgcgcctacttccggtgctccttcgcgccgtcgtgcccggtgaagaagaaggtgcagcgcagcgccgacgacaggaccatcctggtggccacgtacgagggcgaccacaaccacgcccagcctccgcggcacaacggcggcggcagcaaggccgcgacgaggtcgacgccagcggcgaccgaggccgcgcgaccggcgccgccgccactgccgctgcagcaccagcaccagcaccagcagaaacaagaggccgcgacggggccgtcgtcggaggtcgcgaggaagaacctcgccgagcatatggcggtcaccctgacgcgggatcccgggttcaaggcggcgctagtcagcgcgctctccggccggatcctcgatctctccccgcccagggattaactaattaatacgtagacgagcatgatgattattcattgacgaactgttattagtccgtagacagcaaatttgttcagaagcatatatgtcaatttttcaccaggccaagaagtgaatttgagctgcttactgcgaatatatgcatctccgttcgaagttgctaattcaagcacgtacgccattcaaggttcaaggtagatgatgtagcctggagattaacggcgtatataattatatatatgccacatgccagtacaccttgaagcgatcaaggttgaggacgaccgagtttgtacggctccggagcgcgtggtatgtagaacatcgatattatcatcgcatgcatgctggaagcgacaaacaagttcgtgcaaatctctcgctcgcaggtgtaaaattcagggagacctatccctgccgaagtgccgatatagtatttcatcttattcggctgctatttttttcgcagatgtacccgcctttcctattacacaattaagctcattcatcatatgcatgaactcatgttcaatattag

SEQ ID NO: 5961 - DNA, 1735 bp, Zea Mays
agctgctcttgcctcttggcccgatcatttcatttccccacctctctaaaaccctcgctcttgcccgctgttttacacctaaaagaaaggtcctcgccgtcgagccgccggctcccatctcccgcgccgtcgccgacgaggacacaccagacgcctcgctgatggccttggctcgcctcggacggtctcttgccggccgcctccaccgttctatctaccgtccaccggcgcccacagactaccatgcctccgtttcccgacccttcgctccgacccacacaggcgtatgcgtacgaggttttgcaagcttgacgtacaatgccagcagcatgattggccacaatctcgaggggccgttgccagtccacattgtgaaggttctggatctcgtagtacatatgaatcatgctagaccgatgtcaacagcagcagcatcaaaggtgcctgttggagcccggaaggttggtctgaaggttgccatgatgagtcctggtttcgtatatgagccgtacagcccacgggaacgcattcccttctggaaaagatggtttacactaagtggctggagaaggacaaaggaggacatcattttggagcaatttagttcagggttgagatccaaatgctcacttcctctcatccttggtagcacaatgctccatcactgctgaaatcaacctagtatgaagaacgcatatgctgtttcaaggctgaggaagaaaactgggtataccaaaaatcaattctacgatcaagcattaaaaatatacaaggaggttaacactttgatggcacatggagacacatcatcgcttcggaaaattctgacagagaggatgcattctactataaaaaatgaactaaagagaagacagtccatgtggaattctgtacactgggaactggtggagcctgctgttagtatcagaactttgagggctcgcatgattggcctcgataagaatgacctggataaagcttttatacagcttacacttgagtttgttaccaaacagaaatttgaagcctataattcaaagggtgcagttgtgtctggagacaagtcgaaggaggtacttgtgaaagacatttgggtgtttgagaggtccctttttcaccccggagcatattggcgtgtatgcggaagaattacactgtaaccatatctgttttggtgtccacgttcaatttctcaccctggagctgaacaagagctagttcaataaaattttgccctgaactcctttttttttcatccggttctaactgatgcctaacagggtctatgcagtgatgtagtatttatgcctttcttctttgtgttttttattagcagaaaatacaggttttctatttatgcttttgttagagaactagctcttggagagggggcatattgaccccatttggaagggtttgcatctcagcagcagcaggtatcagaattgagaatactgcctaatgtgctcgacaagtaaaagctggatctcttttgtctatggcactttcatgctattcatacgcggtcttctcctgcattggcattgcaaatctccgtttaattaaatttctggtggttatagtaaggctacaggaaaccttccatggccaggcacctctgtgtaactgtcacgtgacctggctctcactattctgaacattcatcttgtgctgactgctgaacgcctgggctctgttcagcgactgatgtaacacatcgtattttggagaaggc

SEQ ID NO: 5962 - DNA, 1512 bp, Zea Mays
cgggtgcgcggcgctcctccacgcgcagcagcagccggctccagtccagctcccgccggcggccatggatacttcgtggattatgaacgggctgggttttgccgagaaaataagaagcgcaactcggtcgctcaccctccgattcggtgaactttttgcgagaccacgtgccagatgcaccaactgcgactgcgacattgacgttagtgatgtttctttggtgtggccagcacttcctgccggtgtcaaattcgatcctaccgacctagagcttctgcagcatctacagggaaaatccagcctgccgaattcagtgtcccattcgcttattgacgagttcatacctactatacaagagaaggaggggatctgctatacacatcccaaaaatctccctggtatgaagatggacggtagctgcctccatttcttcaacagagttcggaatgcgtatgacactggtaaccgcaagcgtcgaaggatcgtcgtcgccaccgtcggcgacgacgtttctgacggcggcggcgttgctgctagcgggaacagcaggtggcataagaccggatcgtccaagcccgtattcgacgaggacggcgtgaggcagggctggaagaagatcttagtcctctacagagctcccaagaaagtcggcggcaagccagagagcgagaactgggtgatgcaccagtaccatctcggcgcaagagaggacgaaaccgacggcgagtttgcagtctgcaaagtattctaccagtcgccgttgaggaaaaacggcagacctgctaaaacagacgctgcggctgcggctgcggctgaatccgatgcgtctgttggcaaaatcaaccctaggaccccgatgacgacagatcctccccggccccgccggctcaacagcagcccgtgcaacaccgagcagtatacccccatccaggaggatcagggggaggaagaagaagaagaagaatgtggcacgtcgaagatgaaggccgaaccatccgaatgttctgcgtgctatgctgaagcatcaccgactattcctacctccgacgaacccatgcaggccacggatgatgccctggacgcaggactcgacacacctctgcccgtcgatgggcctagcatggacctgttccatgggttgcctgacctggataacgctcatccgttcactggacttggcacatggatcagtttagatgtgagctaccttgtttgttcgcttgttgcaatagatggcaggcatggccacgaacgacgagctcatgggtttgtgtcgtcgtccgcaggacatcctcggaccacaggatggcctcgcggcctggccggacggattcctctgatgcgacgcgaagaaggctcggagctggcggcagcagtggaaggagccagttctgttgttaatcgtcggctcgtcgccttgtgagatgatgcttcgtgcgcaagactgcattttcagaatttcatgagaagttttgtacagcagtaatagttgtagaaccgagagagcttagc

SEQ ID NO: 5963 - DNA, 1647 bp, Zea Mays
tgcacttgtccttgaaatggaattttttttacatcgagttcgtttcctgcccatgctatgttagggtcgcactccagcacgccagggtgacaacagaacggagcagatgcaggagctgtacaacagcctgaccgcttccaacgagctggtcagggtcctggccaacgtcctgggccccgcgggcgcgctcaacccgacggcggcgtccgtgctcgcggcgctgcgctccgagctggacgccgcgcgccagctcgtgaagcagcagcgcaggcgcggcgtggacggcgaggagcgcctgctgcggaggcagctcgcggaggaggtgcgcgcgtggaagtgcaggcacagggagaaggcggcggcggccgcgcgcctcgtcgcctcggagctcgacggcgagcggcgggcgcggaggcgggcggagagggtggggacgaagctggcggaggcgctggcgggcgcggaggcgtcgctgcgggcggccacgcgggagcttgggctggagcgggcggcgagggcgcgcctggagaaggtgtgcgacgagctcgcctccagagacgttggcggcggcacggaggcggaggcggaggacgacgacggcctcaggcgggaggccgccgccaccgcgctggaggagttggaacgggagagggagatgctgcaggtcgccgacgagctgcgcgaggagcgggtccggatgaagctggcggaggcgaggctacacttcgaggagaagaacgccgccgtcgaccgcctgcgccaggagctcgaggccttcttgggcaacgaacgtcgagaacaaacgcctgcccaccatgaaatggccaaggaggaggaggaggaggatcaccagctgcagatcgtccttgcctccgaattcggtgtccacggcatcgatcctctggtcacagagaagagcggacaggaagaaaatgccgaagctggtgacgacgacgacgactcggaaggcagcgacatcgagctgaacatggacggcaacagctggagctacaccaccacctccaggtccagggacacgacggccaagaacgcaacgtcggcgcacggctcactttcggacagagcaacggaatgtggcgccgacgccggcgccttcgatcgtagatctgaagcgacgagagatgcgccggagcaggactgggcggctgacggatgcagcgacggcgggaccaccggcagggacgaggacgaggacgccgagaggtacgaggcgatcaagaacctcagggagcagatgctgaccggccacgccttcctcttcctgtccaagggcgaggcagacgatgacagcgatcggcgtcgccgtggtttcgcttctcattttgaagaagatggggacctctggtgagccaaattgcttggtgttcaaccgttgacagtaaaagcaccaatcctttgttcgaaatttgtgcatagttttggttttggtgctccatttgcacagcacagttatagagttctttatctctgggatttggattcatactcagttttggtgttttggcactggcattttgcgtttgatgtcacaataaaaaaaattaccaatgcattatttctgtatacagaactataaacttacaattgtaaagttacacgcttattgtaaacttcattgtatctatg

SEQ ID NO: 5964 - DNA, 6876 bp, Zea Mays
aaaattttgggtcacggcctccctcgaaaccctaggccacaagcaaaactctgctcctcgcttaaacccgcgagcctccggacccggatgttgttccggttccgcccggccccctcgtagccatcgcctccttttagcgccgccatcccacctcgccggcggccatggcgaccccgtcttatgcggcggtgaagtgcctcaacacgtcctcgtccagccgcaagcgtttctcgtttaagagcttctcgcagcgggtggaggagatcgacatcgatgtgtaccgcagcctccacacactgaaggcggagccatccagcggatcgtccttcttcctcgacgcaattgtggagtggagggagcttaatactgcagaagacttcatctcattttatgaggagatgataccattggtacaaacacttcctcaaattgtcttgcaccgggacaagctcttttccgcacttctacaaagggtaaacatgagtgcaagattgtccctggagccaatactcatgttgattgcagctttctccagggatattctagaagattttttgccttttttaggaagacatgctagtgcacttttatctcttcttaacgacggaggtgatcgcgaccctgaaatcttggagcaggtcttcacatcctggtcgtatataatgatgtacttgcaaaagtatctagtgaaagatactgtccaaattcttaggatcacagcagcgttgagatatttcccgaaggactatgttagagaatttatggcagaatctgtttcatttttgctgaggaatgcacctaataatcagctaacgcaaggtctactgaaagttctacttgaggctgctaaacaaccatcacctgcacggatagacggggtggtctctttgctgtggcatgtcatgaaaggaacttccacaaagctacactcaaaagctgggcaggtcttgaagttcttgttgagcaagtcaattgtttccactctccgtgataaatttcctgatgataaggtgaagatgattaaacttgttgagttgctggttagtagatatgtgttccctggtagcaacataacaggatcttcttcaattgaggttcttggaagtattcttgactttatgctttctgttctggatgttccaaccattttgggcaatttgtccatcatatcacctttctatgccccagtgttcaaacttaaaaatccgagggtgattgtctttataaagaaacttttggtaaaaggtccccaagttgcacaacattttgaaagtcaaatattaagtgcaatggataatttcattgtaagttcacccgaggatgtcatatttatccttttaaatttctttaaaggatcaaagaagcaaatatttctttgtagcactgatggaaatcatctggattcagtggagaaaacttgcaagttctttgaatcaaaattttctttgtggatagagttattagatgatacagccggcactggtaatcgatctagtaaccagttggtttttctaaatggcataaattcaaaggatttacatgcagggaacatgaatggtcttccaatgactacctggagaggtctacttggtgcagcattgtcatcgtaccacaaactactgttggtcaacaccagcagaaattcagaatttagttttttcttatcgcttgccaagagtcacagtacatgcccacaagtactgtctgctgtagctgaatatttggattccctgcaaggagtatcatccatggaagtgacaaaagaatttgatccacaaaatctcttggagctgttctccatctttgctttcaatttgagcagtccaaccaaggatgttcggattttaacattgaggattctatcatattttgtgaagatggatcaacgtctaatcacagatgaggagcgaccacacaagaggcagagaacagaagtttctggagaggaagctgttgctaaatacgctaatgttgtggatattcttttgattattgagtcaatgccaatttcagtatctactagccgtaaaattgctatcttcatttctcggatacaaatgagtttatcttccaagatggttcatgatgattacatacctcctctcttacatggtattattggcatattgtacaatagatttagtgatctatggccacaaacactggattgccttgctgttctcattagaaaacacaaggagcttgtttggggtcagtttgttccgttcattgcaattcaccaatcaaaaggactgactgtgaaaaatcaggagaagctggaagctgcaacccaaccacagtctatttttgactgcttcaacttgtatcttgctatggactttgattgcacaccagctgtgaccgtggctaccttattgcttcaatcgctccaaaggattcctgatgttgctgaatcccgctctcgacaacttataccgctatttctcaactttatgggctatgatgatagcagcatctttagtgctgattcatatatgcctgaaaaatgtaaaggcaaacaatggaaagcgattctaaaagaatggttaaacttattgaggttaatgcacaatgcaagatcgttatatcagggcaattttctccaggaagtactaactaaaagggttcttgatgacagtgatcctgaaatacaagcaaaagcattggattgccttttgaactggaaggatgaattcttgatcccgtacagtcagaaccttaaaaatctgattgatgtaaagactcttcgtgaagagctgaccacatgggcagtttcacatgactccttgtcaattctgaaagaccatagaagtcgtgtggttcctctggttatccgcgtgttggcaccgaaagtaaggaaactgaagctactaggttctcgaaagcacacaggtgccagtcatcgaaaggcaattcttcgtttccttttgcagtttgattcaaatgaacttgagctttttttttctttacttctgaggtccttgatccctggcagcctccagcttaaaatgtttggttctcagccagacaaccttcttggaagtttctctgacattgttggaacttcaacagaaatttgtgtagagaattttacatggaaaaaggcaaatggtttcattcatctggttgaagaaatttttggtacttttgatatgccacatataagcccatttcttaatgttttattaatcattgtcgctcgcttgctggagagttgcatgaggaatcttagaaatgagagtgatgggaaatatccttgcaaccaaacaaatgaccatggtaatggttgttccataaattctgaagtgggcaattctgtgaacgtggatgaatgctttaaagaaatgcatctagaaggccatatggagcaacctcactctatcacgcagacaagtgtatccatcaagcagttgaaggatttgaggtcttcatgtattagagttgtctcgtcagcccttagtcactatgaaagccatgagtttggagaaaacttctggggtgtttttttttcttctgtgaaacctctgatagactgctttacacaagaggcttccagtagtgagaaaccaagttcattatttgcttgttttatggctatgagccggagcccaaaattagcaccactgttggggtcaaataatcttgtaccagctattttttctattttgactgtgaagacagcgtcaggatccatcaccacctatgcacttgagttcattgagaatctgttgaggttggatattgatttgcagcagcaagatgaacatttagtgaagaaagttcttcttcaacatatggatgttcttatccatagtctccatgattttgttaatcatcgcaaagagctcaacaggagatctggtacatggcttgggcaacgtgaacttaggctgttcaaattattgctaaattacatcacagatccctcagctgctgataacttcatagaccttattcttccatttttcagcaagaaagatttgaactccgacgattgtttggaagcactatgtgttgtgaggggaataattcaaaatctgagatgcaaagtatctgaaaaagttctaaatgcactgaacccattacttgcaattgttggattggaactgcgactatgtatctgtgatatttatgctgggttgtcattgaatgatccttcgatgttgtttctggctgggttaataggagatctgaatgcagtttcagcttcagaacttggtgaactagattatgacacaagacttaacacctatgataaggttaggccacaattgtttcttggcttgacagaagagcatgtgggcgccatattatctcattgtgtgtatgatatgtcatctgaagaattaattttgcggcaaagtgcatctagggctctgcagtcgttcctggacttttccgcctcagttatgaataatgatgtgtccaaatactctattgatgataaatttagagagaataataccagaagcatttgcacgatgggctgtattcagaagatattggaaaaaacttatctgcacaatatgggagtagcaatgactaaagatgtatcaattcaaaaggaatggattattttacttagggagatggtctccaattttaatcatttagcatccttaagctcatttaggcctctctgtaaggtggatatagaagaggattttttccacaacataactcatttacaggctggtaaaagatcaaaagcactgttgctttttagacagggaatcaaggaaaacaacttttcagaggatatcactatgaaagtctttgttccactatttttcaatatgttttctgacgatatcactatgaaagtctttgttccactatttttcaatatgttttctgacgtaaaagctgggaaaggcgaacaagtcagagatatatgtttggatacactatctgctgttgctgccaaagtgcagtgggaacactatagaacaatattgaagagatgcttccgagaattaaaccttagacctgataagcagaagatcatattgaggctgatttgttccatattagatgcattccatttcatgaaacctgcaaatgatgcctcaggaaattctgatgctttgagtgaagatattgattcttcccttacattctctttggtcacagtctcttctgataagcaacagtacatgcaaaaggtagtgtttccacaggttcaaaagttgttaggatcagatccagagaaagtcaacgtcaacataaacctggtagcactgaaaatacttaagttgctaccggtggattattttgagtcccaactttcaagcatcattcatcgaatctgtaacttcctcaagaatcgtcttgaaagcatacgtgatgaagctaggtctgctttagctgcttctgttaaggaactggggattgggtatttgcagtttgtggtcaagatattaagagctatacttaaaagaggttttgagttacatgttctgggctacacacttcattatttgttgtcaaaaaacattactgctgatatgtatggtaggcttgactactgtttagaagatttgttggcagtggttgacagtgatttacttggagatgttgcagaacaaaaggaagttgaaaaacttgcctccaaaatgaaagagacaaagaagagaatgtcgtttgagactcttaagctgattgctcaaagtattacattcaagaccgatttactgaagaagataatctcacctgtttctttacatcttcagaagcaacttactccaaagttgaaaaccagacttgagatgatgctacacaacatagccttagggattgagtgcaactcatctactgaaacatcaaacttgtttatcttcgtatattgtcttattgaggatactattacaggaagcagatctgaatgcaaagagaatacacaatctagtcctgatcaagacagtactgtaagaaagaccttcctgggactaggtgagagtggatcacagaattcttatatacttaccaagtttgcacttgacttacttcgtaatcgtctgaagagcatcaagcttgacaaggaagatgaacaactcgtgaagatgttggatccttttgttgaccttctgcgaaagtgtatgagttcgaaacatgcaagtgtcctctcagccacatttagatgttttgccttgttggtgaaacttccgttgccatctctgagggacaatgcaattactataaaaaatgtacttatggagattttacagagagctggaaactccaatggtcatttagtcacatcttgttttaagctacttgctgatctacttagaggattcaggatttcactttcagataatgagcttcagatgcttgttcatacccctatgtttgtagatcttcagacaaacccttcccctgttgccttatcgcttctcaaaacaatagtcaggctaaaattggtttctcacgaaatttatgatatagttgttaagataggagagttgatggtaacaacattaactgaatctatacagcagcaatgcattcaaattatgctacaattttttctgaactatccactttctgagaagcgcttacagcaacatattgactttttcctggcaaacttaagttatgaacatccttcaggaagagaagcagtgcttgaaatgctccatgacattcttaccagatttccccagaggattattgatgagcagggtcaaaccttttttcttcatcttgtagttgctctagccaatgaacagcatcagaatgtgtcttcaatgatccttagagctattcaaaagctgttaggacgcattggtggtcagggaaagagttacatttatgagtattcactttcgtggtacactgcagtggactgggttggtggttgcaatttgcttttgc

SEQ ID NO: 5965 - DNA, 6908 bp, Zea Mays
ttgatcggttgcttgaagtgggagaagggaacatgaatggtcttccaatgactacctggagaggtctacttggtgcagcattgtcatcgtaccacaaactactgttggtcaacaccagcagaaattcagaatttagttttttcttatcgcttgccaagagtcacagtacatgcccacaagtactgtctgctgtagctgaatatttggattccctgcaaggagtatcatccatggaagtgacaaaagaatttgatccacaaaatctcttggagctgttctccatctttgctttcaatttgagcagtccaaccaaggatgttcggattttaacattgaggattctatcatattttgtgaagatggatcaacgtctaatcacagatgaggagcgaccacacaagaggcagagaacagaagtttctggagaggaagctgttgctaaatacgctaatgttgtggatattcttttgattattgagtcaatgccaatttcagtatctactagccgtaaaattgctatcttcatttctcggatacaaatgagtttatcttccaagatggttcatgatgattacatacctcctctcttacatggtattattggcatattgtacaatagatttagtgatctatggccacaaacactggattgccttgctgttctcattagaaaacacaaggagcttgtttggggtcagtttgttccgttcattgcaattcaccaatcaaaaggactgactgtgaaaaatcaggagaagctggaagctgcaacccaaccacagtctatttttgactgcttcaacttgtatcttgctatggactttgattgcacaccagctgtgaccgtggctaccttattgcttcaatcgctccaaaggattcctgatgttgctgaatcccgctctcgacaacttataccgctatttctcaactttatgggctatgatgatagcagcatctttagtgctgattcatatatgcctgaaaaatgtaaaggcaaacaatggaaagcgattctaaaagaatggttaaacttattgaggttaatgcacaatgcaagatcgttatatcagggcaattttctccaggaagtactaactaaaagggttcttgatgacagtgatcctgaaatacaagcaaaagcattggattgccttttgaactggaaggatgaattcttgatcccgtacagtcagaaccttaaaaatctgattgatgtaaagactcttcgtgaagagctgaccacatgggcagtttcacatgactccttgtcaattctgaaagaccatagaagtcgtgtggttcctctggttatccgcgtgttggcaccgaaagtaaggaaactgaagctactaggttctcgaaagcacacaggtgccagtcatcgaaaggcaattcttcgtttccttttgcagtttgattcaaatgaacttgagctttttttttctttacttctgaggtccttgatccctggcagcctccagcttaaaatgtttggttctcagccagacaaccttcttggaagtttctctgacattgttggaacttcaacagaaatttgtgtagagaattttacatggaaaaaggcaaatggtttcattcatctggttgaagaaatttttggtacttttgatatgccacatataagcccatttcttaatgttttattaatcattgtcgctcgcttgctggagagttgcatgaggaatcttagaaatgagagtgatgggaaatatccttgcaaccaaacaaatgaccatggtaatggttgttccataaattctgaagtgggcaattctgtgaacgtggatgaatgctttaaagaaatgcatctagaaggccatatggagtcattatttattatcatgaagctactttgcattttattcaacaacaacaacatgcattttatttgccaaatgtttatatcttctcttaactaattgcaacagcaacctcactctatcacgcagacaagtgtatccatcaagcagttgaaggatttgaggtcttcatgtattagagttgtctcgtcagcccttagtcactatgaaagccatgagtttggagaaaacttctggggtgtttttttttcttctgtgaaacctctgatagactgctttacacaagaggcttccagtagtgagaaaccaagttcattatttgcttgttttatggctatgagccggagcccaaaattagcaccactgttggggtcaaataatcttgtaccagctattttttctattttgactgtgaagacagcgtcaggatccatcaccacctatgcacttgagttcattgagaatctgttgaggttggatattgatttgcagcagcaagatgaacatttagtgaagaaagttcttcttcaacatatggatgttcttatccatagtctccatgattttgttaatcatcgcaaagagctcaacaggagatctggtacatggcttgggcaacgtgaacttaggctgttcaaattattgctaaattacatcacagatccctcagctgctgataacttcatagaccttattcttccatttttcagcaagaaagatttgaactccgacgattgtttggaagcactatgtgttgtgaggggaataattcaaaatctgagatgcaaagtatctgaaaaagttctaaatgcactgaacccattacttgcaattgttggattggaactgcgactatgtatctgtgatatttatgctgggttgtcattgaatgatccttcgatgttgtttctggctgggttaataggagatctgaatgcagtttcagcttcagaacttggtgaactagattatgacacaagacttaacacctatgataaggttaggccacaattgtttcttggcttgacagaagagcatgtgggcgccatattatctcattgtgtgtatgatatgtcatctgaagaattaattttgcggcaaagtgcatctagggctctgcagtcgttcctggacttttccgcctcagttatgaataatgatgtgtccaaatactctattgatgataaatttagagagaataataccagaagcatttgcacgatgggctgtattcagaagatattggaaaaaacttatctgcacaatatgggagtagcaatgactaaagatgtatcaattcaaaaggaatggattattttacttagggagatggtctccaattttaatcatttagcatccttaagctcatttaggcctctctgtaaggtggatatagaagaggattttttccacaacataactcatttacaggctggtaaaagatcaaaagcactgttgctttttagacagggaatcaaggaaaacaacttttcagaggatatcactatgaaagtctttgttccactatttttcaatatgttttctgacgtaaaagctgggaaaggcgaacaagtcagagatatatgtttggatacactatctgctgttgctgccaaagtgcagtgggaacactatagaacaatattgaagagatgcttccgagaattaaaccttagacctgataagcagaagatcatattgaggctgatttgttccatattagatgcattccatttcatgaaacctgcaaatgatgcctcaggaaattctgatgctttgagtgaagatattgattcttcccttacattctctttggtcacagtctcttctgataagcaacagtacatgcaaaaggtagtgtttccacaggttcaaaagttgttaggatcagatccagagaaagtcaacgtcaacataaacctggtagcactgaaaatacttaagttgctaccggtggattattttgagtcccaactttcaagcatcattcatcgaatctgtaacttcctcaagaatcgtcttgaaagcatacgtgatgaagctaggtctgctttagctgcttctgttaaggaactggggattgggtatttgcagtttgtggtcaagatattaagagctatacttaaaagaggttttgagttacatgttctgggctacacacttcattatttgttgtcaaaaaacattactgctgatatgtatggtaggcttgactactgtttagaagatttgttggcagtggttgacagtgatttacttggagatgttgcagaacaaaaggaagttgaaaaacttgcctccaaaatgaaagagacaaagaagagaatgtcgtttgagactcttaagctgattgctcaaagtattacattcaagaccgatttactgaagaagataatctcacctgtttctttacatcttcagaagcaacttactccaaagttgaaaaccagacttgagatgatgctacacaacatagccttagggattgagtgcaactcatctactgaaacatcaaacttgtttatcttcgtatattgtcttattgaggatactattacaggaagcagatctgaatgcaaagagaatacacaatctagtcctgatcaagacagtactgtaagaaagaccttcctgggactaggtgagagtggatcacagaattcttatatacttaccaagtttgcacttgacttacttcgtaatcgtctgaagagcatcaagcttgacaaggaagatgaacaactcgtgaagatgttggatccttttgttgaccttctgcgaaagtgtatgagttcgaaacatgcaagtgtcctctcagccacatttagatgttttgccttgttggtgaaacttccgttgccatctctgagggacaatgcaattactataaaaaatgtacttatggagattttacagagagctggaaactccaatggtcatttagtcacatcttgttttaagctacttgctgatctacttagaggattcaggatttcactttcagataatgagcttcagatgcttgttcatacccctatgtttgtagatcttcagacaaacccttcccctgttgccttatcgcttctcaaaacaatagtcaggctaaaattggtttctcacgaaatttatgatatagttgttaagataggagagttgatggtaacaacattaactgaatctatacagcagcaatgcattcaaattatgctacaattttttctgaactatccactttctgagaagcgcttacagcaacatattgactttttcctggcaaacttaaggtatgatgaatatccatagttactttatcatgatatctcactgtatgctaacactctggaaaattgcagttatgaacatccttcaggaagagaagcagtgcttgaaatgctccatgacattcttaccagatttccccagaggattattgatgagcagggtcaaaccttttttcttcatcttgtagttgctctagccaatgaacagcatcagaatgtgtcttcaatgatccttagagctattcaaaagctgttaggacgcattggtggtcagggaaagagttacatttatgagtattcactttcgtggtacactggtgagaagaaaagtttgtggagtgcttcagctcaggttattggtttacttgttggcgatcacacattacaaatgggcaagcaccttaaaagtattctggctgttgttaagaaaataatggaatcatctattattgcttctggagctatacaattaggcttatctgatgaagctgccctgccattgtggaaagagacttactactctgttgccatgatggagaggttacttcttcgctttccggagttgtattttgagaaaaacatggaggacatatggataatattatgcaagttgttgatccatcctcattcgatgttgcgtagtatttcaagctctctggtagcatcatattttgctacagtggagaagaggaaacatgaacagaaattggatgccccatcatggttgcttgttcaaccgagcaggctattcataatagctgtttccttgttgaaacaattgaggagtgagctgagtgatactacggcaaataatctgattgtacagaatgttgcatactcagtctgcaacttgcatatgttgattaggcaatcgacctccacacatcagttttggtctagcattagttctgatcgtggtgctttccttgagggttttgaattgcttggttcaagaaaagcaaaaaatatatttctcctttgtacttcaacatctagtgatgtatctggatctagcctcgacaccaacgaagagcctacatctttgttagtttcgtcaatcctaaagaagatgggaagaattgcaatgcaaatgcaggatacacagataaagaacgtgttcaattgcttcaatatgatttcatcagctcttggtcctgatgaatcactaacctatgctgatcacctcttggccccattgtataaagtttctgaaggatttgctgggaaagttgttagtgatgaagtgaagcaactggcccagggggtccagaacaagttacgtgacctgattggttccgagaaatttgttgaagtctacaagagcgttcggatgggcctgaaacagaagcgggacggtagaaagcaggcacagaagattgttgcagccgtggacccagaacgcaatgccaagcgaaagcagcgaatggcagccaagcaccgggaacacaagaggcgaaagataatggcgatgaagattggcaggtggatgagatagcttggtatttaggctctgcggaattcggtgaatcatataattgtagaggataatttttcgtgctacaagtgctggcataaaattatgtttctgttttatatgctgtctcactgacttactgcccgacgtaattttattgttgagttaccgaaccataccgtaagtaaaaattaagaggcataagcaatgaagacatagaattgattgaattatatttttttggggtggatggataagtaacaatatattattaaatgtgcaattaagagttttctggctgaggtttgc

SEQ ID NO: 5966 - DNA, 7615 bp, Zea Mays
caaaactctgctcctcgcttaaacccgcgagcctccggacccggatgttgttccggttccgcccggccccctcgtagccatcgcctccttttagcgccgccatcccacctcgccggcggccatggcgaccccgtcttatgcggcggtgaagtgcctcaacacgtcctcgtccagccgcaagcgtttctcgtttaagagcttctcgcagcgggtggaggagatcgacatcgatgtgtaccgcagcctccacacactgaaggcggagccatccagcggatcgtccttcttcctcgacgcaattgtggagtggagggagcttaatactgcagaagacttcatctcattttatgaggagatgataccattggtacaaacacttcctcaaattgtcttgcaccgggacaagctcttttccgcacttctacaaagggtaaacatgagtgcaagattgtccctggagccaatactcatgttgattgcagctttctccagggatattctagaagattttttgccttttttaggaagacatgctagtgcacttttatctcttcttaacgacggaggtgatcgcgaccctgaaatcttggagcaggtcttcacatcctggtcgtatataatgatgtacttgcaaaagtatctagtgaaagatactgtccaaattcttaggatcacagcagcgttgagatatttcccgaaggactatgttagagaatttatggcagaatctgtttcatttttgctgaggaatgcacctaataatcagctaacgcaaggtctactgaaagttctacttgaggctgctaaacaaccatcacctgcacggatagacggggtggtctctttgctgtggcatgtcatgaaaggaacttccacaaagctacactcaaaagctgggcaggtcttgaagttcttgttgagcaagtcaattgtttccactctccgtgataaatttcctgatgataaggtgaagatgattaaacttgttgaggatgttccaaccattttgggcaatttgtccatcatatcacctttctatgccccagtgttcaaacttaaaaatccgagggtgattgtctttataaagaaacttttggtaaaaggtccccaagttgcacaacattttgaaagtcaaatattaagagtatcatccatggaagtgacaaaagaatttgatccacaaaatctcttggagctgttctccatctttgctttcaatttgagcagtccaaccaaggatgttcggattttaacattgaggattctatcatattttgtgaagatggatcaacgtctaatcacagatgaggagcgaccacacaagaggcagagaacagaagtttctggagaggaagctgttgctaaatacgctaatgttgtggatattcttttgattattgagtcaatgccaatttcagtatctactagccgtaaaattgctatcttcatttctcggatacaaatgagtttatcttccaagatggttcatgatgattacatacctcctctcttacatggtattattggcatattgtacaatagatttagtgatctatggccacaaacactggattgccttgctgttctcattagaaaacacaaggagcttgtttggggtcagtttgttccgttcattgcaattcaccaatcaaaaggactgactgtgaaaaatcaggagaagctggaagctgcaacccaaccacagtctatttttgactgcttcaacttgtatcttgctatggactttgattgcacaccagctgtgaccgtggctaccttattgcttcaatcgctccaaaggattcctgatgttgctgaatcccgctctcgacaacttataccgctatttctcaactttatgggctatgatgatagcagcatctttagtgctgattcatatatgcctgaaaaatgtaaaggcaaacaatggaaagcgattctaaaagaatggttaaacttattgaggttaatgcacaatgcaagatcgttatatcagggcaattttctccaggaagtactaactaaaagggttcttgatgacagtgatcctgaaatacaagcaaaagcattggattgccttttgaactggaaggatgaattcttgatcccgtacagtcagaaccttaaaaatctgattgatgtaaagactcttcgtgaagagctgaccacatgggcagtttcacatgactccttgtcaattctgaaagaccatagaagtcgtgtggttcctctggttatccgcgtgttggcaccgaaagtaaggaaactgaagctactaggttctcgaaagtccttgatccctggcagcctccagcttaaaatgtttggttctcagccagacaaccttcttggaagtttctctgacattgttggaacttcaacagaaatttgtgtagagaattttacatggaaaaaggcaaatggtttcattcatctggttgaagaaatttttggtacttttgatatgccacatataagcccatttcttaatgttttattaatcattgtcgctcgcttgctggagagttgcatgaggaatcttagaaatgagagtgatgggaaatatccttgcaaccaaacaaatgaccatggtaatggttgttccataaattctgaagtgggcaattctgtgaacgtggatgaatgctttaaagaaatgcatctagaaggccatatggagacaagtgtatccatcaagcagttgaaggatttgaggtcttcatgtattagagttgtctcgtcagcccttagtcactatgaaagccatgagtttggagaaaacttctggggtgtttttttttcttctgtgaaacctctgatagactgctttacacaagaggcttccagtagtgagaaaccaagttcattatttgcttgttttatggctatgagccggagcccaaaattagcaccactgttggggtcaaataatcttgtaccagctattttttctattttgactgtgaagacagcgtcaggatccatcaccacctatgcacttgagttcattgagaatctgttgaggttggatattgatttgcagcagcaagatgaacatttagtgaagaaagttcttcttcaacatatggatgttcttatccatagtctccatgattttgttaatcatcgcaaagagctcaacaggagatctggtacatggcttgggcaacgtgaacttaggctgttcaaattattgctaaattacatcacagatccctcagctgctgataacttcatagaccttattcttccatttttcagcaagaaagatttgaactccgacgattgtttggaagcactatgtgttgtgaggggaataattcaaaatctgagatgcaaagtatctgaaaaagttctaaatgcactgaacccattacttgcaattgttggattggaactgcgactatgtatctgtgatatttatgctgggttgtcattgaatgatccttcgatgttgtttctggctgggttaataggagatctgaatgcagtttcagcttcagaacttggtgaactagattatgacacaagacttaacacctatgataaggttaggccacaattgtttcttggcttgacagaagagcatgtgggcgccatattatctcattgtgtgtatgatatgtcatctgaagaattaattttgcggcaaagtgcatctagggctctgcagtcgttcctggacttttccgcctcagttatgaataatgatgtgtccaaatactctattgatgataaatttagagagaataataccagaagcatttgcacgatgggctgtattcagaagatattggaaaaaacttatctgcacaatatgggagtagcaatgactaaagatgtatcaattcaaaaggaatggattattttacttagggagatggtctccaattttaatcatttagcatccttaagctcatttaggcctctctgtaaggtggatatagaagaggattttttccacaacataactcatttacaggctggtaaaagatcaaaagcactgttgctttttagacagggaatcaaggaaaacaacttttcagaggatatcactatgaaagtctttgttccactatttttcaatatgttttctgacgtaaaagctgggaaaggcgaacaagtcagagatatatgtttggatacactatctgctgttgctgccaaagtgcagtgggaacactatagaacaatattgaagagatgcttccgagaattaaaccttagacctgataagcagaagatcatattgaggctgatttgttccatattagatgcattccatttcatgaaacctgcaaatgatgcctcaggaaattctgatgctttgagtgaagatattgattcttcccttacattctctttggtcacagtctcttctgataagcaacagtacatgcaaaaggtagtgtttccacaggttcaaaagttgttaggatcagatccagagaaagtcaacgtcaacataaacctggtagcactgaaaatacttaagttgctaccggtggattattttgagtcccaactttcaagcatcattcatcgaatctgtaacttcctcaagaatcgtcttgaaagcatacgtgatgaagctaggtctgctttagctgcttctgttaaggaactggggattgggtatttgcagtttgtggtcaagatattaagagctatacttaaaagaggttttgagttacatgttctgggctacacacttcattatttgttgtcaaaaaacattactgctgatatgtatggtaggcttgactactgtttagaagatttgttggcagtggttgacagtgatttacttggagatgttgcagaacaaaaggaagttgaaaaacttgcctccaaaatgaaagagacaaagaagagaatgtcgtttgagactcttaagctgattgctcaaagtattacattcaagaccgatttactgaagaagataatctcacctgtttctttacatcttcagaagcaacttactccaaagttgaaaaccagacttgagatgatgctacacaacatagccttagggattgagtgcaactcatctactgaaacatcaaacttgtttatcttcgtatattgtcttattgaggatactattacaggaagcagatctgaatgcaaagagaatacacaatctagtcctgatcaagacagtactgtaagaaagaccttcctgggactaggtgagagtggatcacagaattcttatatacttaccaagtttgcacttgacttacttcgtaatcgtctgaagagcatcaagcttgacaaggaagatgaacaactcgtgaagatgttggatccttttgttgaccttctgcgaaagtgtatgagttcgaaacatgcaagtgtcctctcagccacatttagatgttttgccttgttggtgaaacttccgttgccatctctgagggacaatgcaattactataaaaaatgtacttatggagattttacagagagctggaaactccaatggtcatttagtcacatcttgttttaagctacttgctgatctacttagaggattcaggatttcactttcagataatgagcttcagatgcttgttcatacccctatgtttgtagatcttcagacaaacccttcccctgttgccttatcgcttctcaaaacaatagtcaggctaaaattggtttctcacgaaatttatgatatagttgttaagataggagagttgatggtaacaacattaactgaatctatacagcagcaatgcattcaaattatgctacaattttttctgaactatccactttctgagaagcgcttacagcaacatattgactttttcctggcaaacttaaggtatgatgaatatccatagttactttatcatgatatctcactgtatgctaacactctggaaaattgcagttatgaacatccttcaggaagagaagcagtgcttgaaatgctccatgacattcttaccagatttccccagaggattattgatgagcagggtcaaaccttttttcttcatcttgtagttgctctagccaatgaacagcatcagaatgtgtcttcaatgatccttagagctattcaaaagctgttaggacgcattggtggtcagggaaagagttacatttatgagtattcactttcgtggtacactggtgagaagaaaagtttgtggagtgcttcagctcaggttattggtttacttgttggcgatcacacattacaaatgggcaagcaccttaaaagtattctggctgttgttaagaaaataatggaatcatctattattgcttctggagctatacaattaggcttatctgatgaagctgccctgccattgtggaaagagacttactactctgttgccatgatggagaggttacttcttcgctttccggagttgtattttgagaaaaacatggaggacatatggataatattatgcaagttgttgatccatcctcattcgatgttgcgtagtatttcaagctctctggtagcatcatattttgctacagtggagaagaggaaacatgaacagaaattggatgccccatcatggttgcttgttcaaccgagcaggctattcataatagctgtttccttgttgaaacaattgaggagtgagctgagtgatactacggcaaataatctgattgtacagaatgttgcatactcagtctgcaacttgcatatgttgattaggcaatcgacctccacacatcagttttggtctagcattagttctgatcgtggtgctttccttgagggttttgaattgcttggttcaagaaaagcaaaaaatatatttctcctttgtacttcaacatctagtgatgtatctggatctagcctcgacaccaacgaagagcctacatctttgttagtttcgtcaatcctaaagaagatgggaagaattgcaatgcaaatgcaggatacacagataaagaacgtgttcaattgcttcaatatgatttcatcagctcttggtcctgatgaatcactaacctatgctgatcacctcttggccccattgtataaagtttctgaaggatttgctgggaaagttgttagtgatgaagtgaagcaactggcccagggggtccagaacaagttacgtgacctgattggttccgagaaatttgttgaagtctacaagagcgttcggatgggcctgaaacagaagcgggacggtagaaagcaggcacagaagattgttgcagccgtggacccagaacgcaatgccaagcgaaagcagcgaatggcagccaagcaccgggaacacaagaggcgaaagataatggcgatgaagattggcaggtggatgagatagcttggtatttaggctctgcggaattcggtgaatcatataattgtagaggataatttttcgtgctacaagtgctggcataaaattatgtttctgttttatatgctgtctcactgacttactgcccgacgtaattttattgttgagttaccgaaccataccgtaagtaaaaattaagaggcataagcaatgaagacatagaattgattgaattatatttttttggggtggatggataagtaacaatatattattaaatgtgcaattaagagttttctggctgaggtttgc

SEQ ID NO: 5967 - DNA, 1162 bp, Zea Mays
gttgccttaaaaaagatgtaacccttctgtctgtcatctgatgttggtaattggattatggtgttgaagatgttattgcagatacgaaggcacacaaggtggtcgttaaggggaaaaaggcagctgctgacccaatgaaggtggtggaacgggtgcagaagaagacaggccgcaaggtagagcttctctcaccaatgccaccaccgaaagaagagaagaaggaagaggagaaaaaggaagaacctgagccaccaaaaaccgagaagaaagaggaggcaacggtgctcgctgtggtgctcaaggtgcatatgcattgtgaggcttgcacacaagtgatcaagaagagaatcctcaagatgaaaggcgtgcaatctgtagaggcagacctcaaggcttctcaagtcactgtgaagggtgtgttcgaggaggccaagctgtctgattatgtgtataggcgcactggcaagcacgctgctatcgtcaagtctgagccggttgcagctgagaatgttgatgatggaaatgccaaggatgacaagaaggcagccgaaggtggggaggagaagaaggatgatggcaaggaggaaaagaaagatgaagacaagaaagaagcggataatcagaaggatgatggcaatgctggtgatgaagggaaagacaaagaccctggcgccgttgctaacatgtatatgcactacccgaggtccaatcatctgagcgaatacggatatgcctaccagtaccctcctcagctcttcagcgacgagaacccgaatgcctgttctctgatgtaagaaagccagaaccaagtgaccttaagcgcgaaaataagaggggattgagttatcccctgattttggaggttcaggaagtttagaacttttctcttctatttctaaggttgaactttctgtctggtacaaagtaaactctgggctggtttgtggacttttcatattgtgtatgctactggttagtaggattttgtgttgcacctttcacctttggcttttatttctgtacaaagatgtattatatatgctagttttgaaatagcttgctgctagtactctgtagtctgttgtccggaatagacggagctttctcagttaacattgccagtgatgtcggaaaaatccatattcttggtgtccttttctaa

SEQ ID NO: 5968 - DNA, 1573 bp, Zea Mays
ggccgacgggtcgtgcggtcgtgcccaacggccttctcagcccatctcgtgcccacgtccctcttcccatttctgaccaacccctcttcatccctcggactacaaatgcggcgcaaccgtgagcgcagctgcagttggggagtgtgcagcagtatgttctcggtctcgccatcgcatctcgcagagtagacactcaaatccgattgtcgagggggagaaggtggagatcgttgtaacggctagttgcgtcggcccgatggacccgtcgtaccatggcggcggcgccgccggtggaagcgccgacgaccatggccaaattctttgggattggacagaacagcattgtgaacctaacgattcaagtcatgatgctactaaatttgtgtgggattgcctcaatcaagatgacaatgagctgttgggattgcttggaaatcaaaccccattgagatactgccgtgatttcttcgctgaccttgatgatatcacatgcaaggagaccctggacctggaggaatctcgggaatcaaagcggcggcgcacattggagtaccctttggagtctagtcagtcagaagttgggactcatgaaaccggttcacctttcgtcacacctgaggtagcagaaatttcattgctctgcactgataaaccacagagcttaaattgtggtatgcaccacactttaaataatctagatgaagcaccctaccagcaagaagatatccttttggaacattgctcttatggaacggcagtgtaccttgagccagatcaaacaccttgtagccagcagagcattgcatgtacaaatgatcaagctggtatttcaggaacaagtgagattgcaccaatgacagaaagtttcataatgcaggaaactaggaagctttctacactcaaagtctccaatggagcaagctcgtcactagttacgaaggacaacttaactacctcagtagcatatccttttactctcatcaaaccatcctggcaagaaggcgatgttaccttgcaggatataaatcggcgaatccgtcctcctaagaaggccccagagatccttggaacttcagcattctctggcaagccagtgattaacaagacaagaatcagaacagaaggagggaaaggaagcatcacaatactaagaacaaagggctgagaaccggaaaatacctttgatccttatttatctgctcctttgtggtcaattgtacaggtctgagcacttgaggctgccattgattcacagttcatggaacagagggcttagagcttgaggatgccattgattcttatttatctgccattctctcgattgcttttggcactctggtcaatgtgcaggcctcttagctttccagctgttactttttttctttcagttttgtaccgtgactttgtcttgtgaatagtattatgacatgtggatgtggtcaacgatatatacaaagcactaaagttaatggaattagtgtgttaaattccatgtacttgagtctgttcaagctctgtgccgagaaaatttcttatatgacactagcaaactcacttattgcttctattgccc

SEQ ID NO: 5969 - DNA, 1227 bp, Zea Mays
gagtaacccgcaaccaccgcacattaggtaccgagagggcaggcaagaaccgagcaaatcagggcagcaggtgcctgctgccaagtcttggtcttggtcttggtgcgctgtgtaaagacgactcagcgatggaggggtcgacggcgaccgagggtcatgtggtcgggatcccggtgagcacaagggcttatggcatcgaggaacccgacttctcggtagaagagacgacgcccgaccgtggagagttcccgagctccttccagtactacagccatggtgcggaaaggaaccaagaaagtcgaagcatgtcgctgatcaagctatctttcaccttccagatgctgccagttcgacgacgaccgccgccgatcggccgacgagcaatcaacaagccactaggaagggagacaagatcgtccggggcatcaaagaacatgtgaccctgggaccgaagctctccgacacggtgaaggggaagctctcgctgggcgcgaagatcctccgggccggcggcagcgtggagaagctgttccggcagtggttctcggcggacaaggacgagaagctgctgcgggcgtcgcagtgccacctgtggacgacggcggggcccatcgccggcgtgctgttcgtgtcgacggcgcgggtggccttccgcagcgaccggtcgctgtcgctggcggtgtccaccccgcgcggcgactgcagcttccgcgcgccgtacaaggtggccgtcccgctgcggaaggtcggggcggtgcggcccagcgagaacaggcaccggccggagcagaggtacgtgcggctcgccaccaccgacggcttcgagttctggttcatgggcttcgtcagctacaacaagtcgctgcagcacctggagcgggccgttgcgtgcgcgcggcaggcgcggtgacggtgtgctagttctgggccggctctgtatgtgtaggctgcagctgcaacatgtcgttgtacatctgggcgatcggttgccctggtaagcaggttggtcatagactcacaggcgaccggtcaggcatgtggtcttttggggttgggcaagaaattcaccatgaatttgaaatagagagtgctggtgtagtggtgtgacaatggcgaaaccgccatcaatatccattcttttctcaagcaaaaaaaaaaacatctgccagcatgcatcacaaggcctaccaaaactgcactgatgcgaatgctggtttcttacagaga

SEQ ID NO: 5970 - DNA, 638 bp, Zea Mays
ctgagctgactgtggatctcatccgtatcgtatatacgtcgtcctgtttggatccaccgcgttttgctaattcccttcgaaccggccggtggccttcgttctcccaccaggcctgtctgtctgctgtatccgccagagcttccatggattccaccctcttcatcatcggcgtcataggcaacatcatctcagttctcgtcttcatatcgcctatcaagacgttctggaggatcgtgcggggcgggacgacggaggagttcgagccggcgccgtacgtgttgacgctgctcaacgcgctgctgtggctctactacggcctcaccaagcctgacggcttcctcgtcgccaccgtcaatggctttggggctgtcatggaggccatctacgtcgtcctcttcatcgtctacgccgccaaccatgccacaagggttaagaccgcgaagctggcagcagcgttggacatcggtggcttcggagtcgtgtttgcggccaccacattcgccatcagtgaatttgaattgagaattatggtgataggaatgatatgtgcctgcctcaatgtgctcatgtacgggtcaccccttgcttctatgctaggtgtggccgtgtggggcacgtgcaagcaaccttactcgttc

SEQ ID NO: 5971 - DNA, 887 bp, Zea Mays
aagaaagtcacgcagtcacacgcatccgcagcactccgccactccctctgcttcagacagaccagtgcgcgctcaattaccccccgacccctaccgcgtccaccacaccaaaccgtttcacccggacctgcccccaacaccctgctctatcctcatagcaaaccaccgcctgaattgggcggcaattgggagaggattcgcggcaggtagggcgctgatccgttggcgagatgattgcggctgtcaaccgagtgccggcaggctggggcgaggatgagatgtccgtgctgccgcggcacaccaaggtggtggtcaccggcaacaaccgcaccaagtcggtgctcgtgggcttgcacggagtcgtgaagaaggccgtcggtctcggaggatggcattggctggtacttactaatggaatagaggtaaagctgcagcggaatgctttaagtgtgattgaacctccgacaggcaacgaggatgatgataaatttgattgtgaaaacctgcggtggaatagttcagacttggtctccgatgatgcacaatcaccaaagccacaaaggtcaaggagcaggcagcataggggtttccacagaaaatcctttagccgttcaatgtcatgtgactcccaatctaagacgtctgtttcatcttcctcgagagctcacacgaaagttgacctgagcaagttagaactgactgcactgttgagatattggcgccacttcaatctcgatgcatgccctaatccatccagggagcagttagttgatgctgttcaaaggcacttcacggcccagcaattggatgagttgcaggtcattgtcagctttgtgcaagctgagtctcatggcaaaacccttctgcaatagtagccgggaactgtt

SEQ ID NO: 5972 - DNA, 898 bp, Zea Mays
aagaaagtcacgcagtcacacgcatccgcagcactccgccactccctctgcttcagacagaccagtgcgcgctcaattaccccccgacccctaccgcgtccaccacaccaaaccgtttcacccggacctgcccccaacaccctgctctatcctcatagcaaaccaccgcctgaattgggcggcaattgggagaggattcgcggcaggtagggcgctgatccgttggcgagatgattgcggctgtcaaccgagtgccggcaggctggggcgaggatgagatgtccgtgctgccgcggcacaccaaggtggtggtcaccggcaacaaccgcaccaagtcggtgctcgtgggcttgcacggagtcgtgaagaaggccgtcggtctcggaggatggcattggctggtacttactaatggaatagaggtaaagctgcagcggaatgctttaagtgtgattgaacctccgacaggcaacgaggatgatgataaatttgattgtgaaaacctgcggtggaatagttcagacttggtctccgatgatgcacaatcaccaaagccacaaaggtcaaggagcaggcagcataggggtttccacagaaaatcctttagccgttcaatgtcatgtgactcccaatctaagacgtctgtttcatcttcctcgagagctcacacgaaagttgacctgagcaagttagaactgactgcactgttgagatattggcgccacttcaatctcgatgcatgccctaatccatccagggagcagttagttgatgctgttcaaaggcacttcacggcccagcaattggatgagttgcaggtcattgtcagctttgtgcaagctgcaaagaggctgagtctcatggcaaaacccttctgcaatagtagccgggaactgtt

SEQ ID NO: 5973 - DNA, 2170 bp, Zea Mays
caaaacttcacccatgagctggattgaaccccaaaagtaactaatagactggacccaaaaataactaatggtctaaaatgcataaaacactgcgttttacagtttagaacgccaaaacgctaaaacgtgatttcaacctctaattagagttttgacgtttaaacgtagtttaaacatcgtttaaacgtagttttaatcacactgcctgatcggtagcagcgatggggctggcagtagcgacgtagagcaaacccgctcgcccgtgcctgggttcacacaatgggagagagacggttagagagaaaggattttttttaaaaaaaatacttacatgtgggtgctacatggtgacatggagcttaaatagctaacagagggtgatttccattgaggacgcccttactgatcttgtgggagaaaatccatttaagagttaaagaactggctgtaagtctgcaagtccatgacactggaatttgacatctcaccatgcagtcatccacatcactcctggatctccaaggtttatctctttctgtttcccctaaggagataaggaaaaggcgaagatggaaatagaagaatgccaaaatgttaaccataggcaccgttatatatttgttattgctatttactttgatttatcaccacctctcatgcggcatgcgtgtgggggttatttctgattagtgacataagcgcttacatgtcaaagtcaaactgattaaatgtcagtgccacatcagtggaaaacatcctttgagtggaatcagaaggctaatttggccagtttcagtagttgagggctgttggatgtcagtattatacttcagtggcagtttgagggtgtaaaatgtgctttaccctagagtttaagacaaaattagaaaacatgtttttccagagagtgaaaataagatttcatcgactttcctttcctcaacattttcactttacgtttggaagaactgttgcttcggtttctagccagtatggtaaatatgataggatcgccttacctattatgagttctcctaagaccgtatccagcagtttacccatagtttaccaaaatcattgatttacaatgttctgcactgtagacttcactgttcatagagtgaatatgggtatgaggatgaataagctattgaagatagtctaagtgattagaaaacttctgttgattttgacctttagtggtctgtgcatccttcagttagttgtaaggttgtttcataatgtcacatggaactgcagttaatcaagataaatttgaaaaattataggaacttctagaaagtaccatttttgcaggtaattgtggggaaacacccagtgtcctggaagcctggatcaacaaatagaggactaatagcttctcttatggtgatcgatttgtcttggtgctaactgcaacccaccttccaaaagcattcaactgcttgaggttgcaacaaaagctccacgtgatgaaggttggtgctactcagcagtctttccacaggctcaattaaacagttcccggctactattgcagaagggttttgccatgagactcagtgttaccagtcaaaagaatgtaaagatacaagctgcagaagcaatgtggtccaaaaaatagtcgagtattgacgagagcaaaactacatataaagtcatcacagattactgtaaagtgttttttgcattccaaccaaatgatctcaagtccaaaacccaaaggaagcgaaagtcgcaccgtgtgagctctcgaggaagatgaaacagacgtcttagattgggagtcacatgacattgaacggctaaaggattttctgtggaaacccctatgctgcctgctccttgacctttgtggctttggtgattgtgcatcatcggagactgcaagaaaaaaaaagattaaagaagccagcttttcagacgcatataaccacgttgcaggagatggttaggaaagaagacagctgtgcctcaaactaaattcaatctgttcagatccgtgaccttaaatggcatgtagatttttctcaggtgttctttaatcaaatgcaatgctaacctctataaggaacattatctgtttctagaacttttgtttttgtctttgatagatctgattgtatatcgggttattttcctactagttgccgcagaattttgcaatcca

SEQ ID NO: 5974 - DNA, 2462 bp, Zea Mays
cccaggcccaagcaagccttttcttctcccgttcacctcctctctctctccccccactctcggcgaccgactgggctaccgccgccgccgacgccgccatccgccagtcgtcaggtgcccaggtcttcacccccgggcaccagcgcgcaatatcagtctcgccagccggttgtccaagttgaaagaggatggggcaggagacggaggtggtgcagtcggtaagcgacctcccggtgcaggaccctccaggagaggagttctccgccgccgacctcgcctgggtcaagtacgccacctccgagcaccaccgggacgacgtcgccctcataccctacgaccggatggaggccttcatcgccggcgagagcaacaaccccgagtgccccacgcgcttccacatcgagcgcggccgcaagcgtgagaggggcagcctcagggagtaccggagtgacgagtacctcctctacaggatgtattggtgctcctttggccctgagaattatggggagggagggacaatcttgcctagcagaaagtacaggctcaacacgaggaaccgtgctgcacgcccgcagtcgatgcgtggctgcacctgccatttcaccatcaagaggctctatgctcgcccttccctgctgctcatcatctaccacgagaggcgccatgtcaacaagtccggcttcatatgccatgggcccctcgacagggatgccatcgggcctggcgctaggaaaatgccctacattgggagtgaaatccagcagcagaccatgtcattgatctacctcggtgttccagaagagaacatactgcagacacatatcgaaggcatacagcgctactgtagcaaggatgccaaggttgataaccttgcctctcagtatgtccagaaacttgggatgatcatcaagagatcgacacatgagttggatctggatgaccaagctagcatcaggatgtgggttgacagaaataggaagtctgtattcttctaccaggattcaactgaggcagatgcctttattttggggattcagacacaatggcaattgcagcaaatgatgcgctttggccatcagagtcttttggcttctcattcctcatttggtgtaagcaagctaaagattccacatggggaattggtggttttatcattgatgacccggcttcagagctgggtccaatcagggaggtgttcgcctgcccagttctgttctccatgtggcacatcagaagaacctggcttaaaaatgtaatcaagaaatgcagcaatgttgaggtgcagcgggaaatttttatcctacttggcaaaaccatatgcaatatatggagtgagaaaaaccctatggatgccctagggcaattgtttcaagactttgttgatcaaacagcattcataaaatatttcaagtcattttgggttcccaaattggagatgtggatcgactccatccgaaatctgccattagcaagtcaggagtcatgcggtgccattgaaggttaccatctgaagctgaaggtaaaagcatatgatgacgtgcagctggatgctcttcaacgtgtggactggctagtgcataagctcacaacagagctgcattcgagctactggatcaacctatttgcagacgaaagcgggtcatttcccgaggtgaaagcagactatatcgcatccacgtcatggcaaagggcactccagatacctgacgatgctgttaccttcgacgacaaggatcctcttgtagctagagtggtcagccagaaggaaaccagccagacacggactgtgtggagccctggttctgaattctctctttgcaattgctcgtggtcgatgcagggtaacctatgcaagcacgtgctaaaggtcaacatggtctgcggagcacgcaaagactttcagccctcgctgtcgttccagtcgttccagcatgtcctgcttgatctgtggcagaaaccattggacgattcgttctcgcttgacctctcggtagcgcgggtcatgcagatgcaggagaagatcaaacatgtggctgagctcgccacctccagtggtatcgcccaagttgcagggaagttgccgatgcaatggacaaaaaagagagggagaagagtaggcgtcaagcccacaagcgcgctgctgcttcctcgttctaagggcagtttgcagaaggacttgaccccgaagaacagcaggaagaggaagaggctatctagatttaaagggtaaaatgcgccgccttttcttgtggcgtctctgtaattagagtattagacgactactttttttgtttttgtttattttttgcctgctgtattccatttcctcaattacctcggggctgactgagaacttgctcagcgacttccacttcccttatgtctcctagttttaggaacaaatacaatagctgtgcaggctgtaatgcgaagcgactggatgggtggatgttttgatagtt

SEQ ID NO: 5975 - DNA, 900 bp, Zea Mays
gttcatgctaatcctcacctccttcccttgctgccgtctcagttgaactgctgcagcatgagccagaagttggttatgaactaccatataaggttcccttccagagtctcccatgctatatcgtgaattttcccaagcaaagcacctgccaggcgccaatatgccaccggggtagccattaaaatacttaaaatcaactccaaggctcatcgaacgttatccagtgcttcaccgtgtttctgaactccctaaagcagatgttgtcatgttggtcagtttggtgttggtttaatttctacgggtgtcgtatatcagagtcaatcaaaaagtttgactagcaactaatggtgcctatacatgtatttatggagcttcttctggtcatatgtgtagtggatctctcctcctgttgttcccttcaatcatgtccaaggtcaagaaccattcaggtcataaacccctacgacaggggccacgagggctcatcttcgccactgcccctactcccaccttctgcatgtcctgctcggtgctgttccattccctagcgatgttctccggctaaagacgcttggagtttgtggtgtggtgacacttaatgaatcatacgagaggcttgttcccacatccctatacgaggataaaagaagtaggcgcaatgaggagtcgtgttcattcacaagctctaacagagaaagttggggcagatgttcatctttaggtgcagccagtgatgaattattctcaggcaataataatgataagcagatatgagcccttgggcctccagttcgggcaacaagcatatggcaaagagagtgagggggcatgatattgttttccaattccaaactgtgatgatgtgtagaggcaaaggatccttcagagttcatcactcat

SEQ ID NO: 5976 - DNA, 2176 bp, Zea Mays
ctgctagttttgggattgttcatattcaactgatatgggatgaggttggcgaaagtgatgaagatcgtgacaagatgttacttcagctagagcaagagtgcttagatgtttataggagaaaggttgatcaggcttctagctccaggtcatgtctcctccaacagctttccaactccaaatcggaactgactagactcctttctgcattaggagagtcatctatttctggtgcttttattttcagcttcttcacaaatttaagccgaagttctgccaaacagacagcttctgcagcagcttatcagttcagctgcttctcaaaatgaaataaaagcagccaacaagcagaagctgctttttaccagcttatcagataagctgctttttcaataagcagcagctgtaccaaacagggcctatgtttcttttatgttttgatatattatatgttcaatcatgatgtcattcccctaatacagggcccatttctcttttctcctaatttttgcagcctgacaagacatctggtacaatcaaggagcaactagcagctatatcaccatctttagagacactccgcaggaaaaaagagagtagggtgaaagagtttgctcatgtacaacttcagattcagatacttcgtgatgaaattgctggggatctacatattggtgaacagttggaaacaccccatgttaatgcggatgatctttcagtgaggagattaaatgaatatctttctgaactacaagccctgcaaaaggaaaagagtactaggctctcaaggattcttgaatccgtgagttcagtgcacgatctctgttctgtacttggcatggattttgtgggcactgttactaaagttcatccaagtcttgatgactctgttggtgtccaatccaagagcattagtggcgaaacaatatccaagctgtctaaaatggtgattgtacttgaagaagaaaaatcgaagaggtttgcaaagcaaccttttcgtcacgtaacatgcataatgtcctcaacattggatgatgtgatagttccaggagctctggctcttgatgtaattcagcaggcggaactcgaagttgaaaggcttgatcagctaaaagctagtaggatgaaggatattgcattcaagaaacagactgaacttgaagatatatatgcccgggctcatgttgcagtagattctagtgctgcaagagataggataatgtctattattgagtccagtagtttcgagccttcagaactactggctgatatggagaaccagatacttaaagcaaatgaggagtccttaagcagaaaggacatattggagagggttgataggtggatgtcagcatgtgaagaagaaagctggcttgaagactacagccgggacgataacaggtacagtgcaactcggggtgcacatctgaatctgaagcgtgcagaaaaggcccgtgttttggtcaataaaattccggctattgttgacacactgcttgcaaagacccgggcatgggaacaagagcatggcgtggccttcacctacgacggcgtccctcttcttgcgatgctggacgaatacaaaatcctgaggcaggagaaggaagacgagaagcgacgaatgagggaccagaaaaagatgaacgaacagctagccgccgaacaggagaagctgttcgggtcaaaaccgagccccgcgcggccgcagtcgtcctcgaggaaggtggctggcgcacggaccaacggcggtggcacgccagctcgcaggctgtcggccctccagagcggcggcaggaccgctagccgggatgggaggagggatgcgagcaggcccgtggcccccgtgaactacgtcgccatcgccaaggaggacgtggcctcgcaggcgtccagcaaccacactgggccgtccaccccctgaccggccgtgccagcagtaactgaactgttgtggcggtgcttagatatatatataccagtgcagtgcagtagtcagagctgattgtagatcggataatggaaaaaaacaaacgaagctggatatggtatcacacattatcagttgtcactggttgttcgtctggtcgtcctatctagcgaactcgtcctcgtgtagccgtgacaatttgctcgtcgctgagttggagacagggaatgtcaagttagagctagtttaata

SEQ ID NO: 5977 - DNA, 2586 bp, Zea Mays
cttttcgccgttctctgtcagtttgtcaccctgcctctgacgaaaactctcctctgactccgctccacccccttctctcacttgtctatcggcggccgtcacctccgctgggctgctggcctccccactttgcagttgctgcacaggcaagacacggaggcaggcaccacgagtccacgacgcccgctcgcgcgctccgtgaatcccctcgtgactcgtgagggctcgaggcccgacgggaggacgaggaggcaagaaccctagccccggcgccggcggcccgtaaggctgctgagtgaaaatgggagtggcaggtcacaacgatccattgttaggtgaaacgacatgtgggtctttgctgcagcaacttcagctgatatgggatgaggttggcgaaagtgatgaagatcgtgacaagatgttacttcagctagagcaagagtgcttagatgtttataggagaaaggttgatcaggcttctagctccaggtcatgtctcctccaacagctttccaactccaaatcggaactgactagactcctttctgcattaggagagtcatctatttctggtgcttttattttcagcttcttcacaaatttaagccgaagttctgccaaacagacagcttctgcagcagcttatcagttcagctgcttctcaaaatgaaataaaagcagccaacaagcagaagctgctttttaccagcttatcagataagctgctttttcaataagcagcagctgtaccaaacagggcctatgtttcttttatgttttgatatattatatgttcaatcatgatgtcattcccctaatacagggcccatttctcttttctcctaatttttgcagcctgacaagacatctggtacaatcaaggagcaactagcagctatatcaccatctttagagacactccgcaggaaaaaagagagtagggtgaaagagtttgctcatgtacaacttcagattcagatacttcgtgatgaaattgctggggatctacatattggtgaacagttggaaacaccccatgttaatgcggatgatctttcagtgaggagattaaatgaatatctttctgaactacaagccctgcaaaaggaaaagagtactaggctctcaaggattcttgaatccgtgagttcagtgcacgatctctgttctgtacttggcatggattttgtgggcactgttactaaagttcatccaagtcttgatgactctgttggtgtccaatccaagagcattagtggcgaaacaatatccaagctgtctaaaatggtgattgtacttgaagaagaaaaatcgaagaggtttgcaaagattcaagctctagcttcccagctatctgatctttggaacttaatggattctcctgtggaggaacagcaaccttttcgtcacgtaacatgcataatgtcctcaacattggatgatgtgatagttccaggagctctggctcttgatgtaattcagcaggcggaactcgaagttgaaaggcttgatcagctaaaagctagtaggatgaaggatattgcattcaagaaacagactgaacttgaagatatatatgcccgggctcatgttgcagtagattctagtgctgcaagagataggataatgtctattattgagtccagtagtttcgagccttcagaactactggctgatatggagaaccagatacttaaagcaaatgaggagtccttaagcagaaaggacatattggagagggttgataggtggatgtcagcatgtgaagaagaaagctggcttgaagactacagccgggacgataacaggtacagtgcaactcggggtgcacatctgaatctgaagcgtgcagaaaaggcccgtgttttggtcaataaaattccggctattgttgacacactgcttgcaaagacccgggcatgggaacaagagcatggcgtggccttcacctacgacggcgtccctcttcttgcgatgctggacgaatacaaaatcctgaggcaggagaaggaagacgagaagcgacgaatgagggaccagaaaaagatgaacgaacagctagccgccgaacaggagaagctgttcgggtcaaaaccgagccccgcgcggccgcagtcgtcctcgaggaaggtggctggcgcacggaccaacggcggtggcacgccagctcgcaggctgtcggccctccagagcggcggcaggaccgctagccgggatgggaggagggatgcgagcaggcccgtggcccccgtgaactacgtcgccatcgccaaggaggacgtggcctcgcaggcgtccagcaaccacactgggccgtccaccccctgaccggccgtgccagcagtaactgaactgttgtggcggtgcttagatatatatataccagtgcagtgcagtagtcagagctgattgtagatcggataatggaaaaaaacaaacgaagctggatatggtatcacacattatcagttgtcactggttgttcgtctggtcgtcctatctagcgaactcgtcctcgtgtagccgtgacaatttgctcgtcgctgagttggagacagggaatgtcaagttagagctagtttaata

SEQ ID NO: 5978 - DNA, 1879 bp, Zea Mays
gatgaaatttaacgttatagatactcacctagaaacgaaaaccaattcagtttttattttggtttaaaatttgaaaagtaaaagtcaaaatttggtctttttcaaaattatcgagctgaacctcgacctcctatggtgaaaaaaaaaaacagatcatcatcacaatcgacgattgcatttcacacgcgaaatttccccttttccaacgccacagcaaacagcatccacagcggagagcgtctctttctccttcccctccctctttccacgacaccaaaagaaaccgaaaaccatcgacgcgctccgtccaccctcccctaccccgcgtcctcctcccctacgcctcccagcccagcggcaaaacctaaccctagatgggcgccgtcacctctacggtcgcggcgcgctttgcctttttcccgccgagcccgccgtcgtacgggttcgagcagccggcgccgcttccggcccctgccacacccgagcctccggccccggccacatccaagccgccgcctccggccccggccacacccaagccgccgccagcgggggaggagaagggcggtggcgcggtggtggagctcacgggcgtcccgcggagggttaacgtggaggcgcggcggctgcggacgaagcggggcacggaggtggtcgcgatgcacgtgcgccaggcgggggccaagctcacgctgctctactcccacggcaacgccgccgacctcggccagatgtacgagctcttcgtcgagctcagcgcccacctcaacgtcaacctcatggggtatgactattctggttatgggcaatctactgggaagcctagtgaacaaaacacttattctgacatagaagctgtatacagatgcctcatagaaacctatggagcttctgaggataatatcattctttatggacaatcagtgggcagtggtcctactttggatttagcatcccgattaactcgtttaagagcagttgttctacatagcccaattttgtctggcttaagagtgatgtatcctgtaaaacatacatactggtttgacatatacaagaacatcgacaaaattccattagtcaggtgtcctgtgttagtgatacatcagatgaggttgttgactgttcccatgggcggtcactgtgggaacttgctgaagtgaagtacgagccgctgtggatcaaaggcggaaaccactgcaacctagaactgtacccggaatacatcaaacatctgaagaagttcgttggagccatagagaaatcgccacccccacctccgatcgacgagtgcatggagagctcaggcccgtcggattgtaccccagcagaacccgagtgtacagcggactcaaggaagagcacggactgcagggacaaagcaaggccaagcatagatcagagacaaagcacggaccggcgggacaagccgaggggcagtacggataggagggacaagacgaggaagagcgtggaccatcccgagaagccgcgggctagcgtcgatcaaccggatcggccgaggaaaagcatcgaccggtttggaggcatgatgaagtcggtgaggctgtgcaatatcgactgcttcaaagtgacagcaacctctgggagctgaagagaaggaacggatggatagtagcaggaaaggttagtgttgggtgccgtctgtatgtattcttcccttcgtgtaacttattcaattgggtgattggtttggccgcagtagaaggcgtgtttttgttttctttttcttcgctccttcctcatacaattacaatggtgttgtttccgttgggctgttctttttaacatgagatgaaataataatcttgttgataaacaatacaatgcttgcgaacttccatggcggagccgactt

SEQ ID NO: 5979 - DNA, 1414 bp, Zea Mays
gtcgctataggggtacgtgatttttgtgtttcttatttactcaccaaatcccatctaaaggcctactaaacaaactaaaccctatttctcaaaccctagattcggatccgccatcaacaggctccgccatcaacaggctcgaacgccctctcctcaaaccctaccagatcttgtcgttcggcgcctcaaaccccagattcggatccgccatcaccatagaggtgggggctgacggcatagcgctcatcaccatcgccaacctgcccgtggtggatgcgccatcgcctgaggtgagccgcggggaaatgagggatccttggaggcagagctggcgtcgcgtcgctggtggacgctggtgctggtgaacatggcgtcggtgctggaaaagatagacgagatgttgctgctcgccgtgtacaataaggtgtgcacgtcgctgggcgcttctcgacggcgctgggctcccaaaccctttgtcgcgcgctcgttcaagccgcctactacctactcaaagcctacgcctccgcgcgccatgatcgggcccgtgtcgtcgctgtcggagccttcacctgggccaccatcgccttcctcgtcgccatctccggcagcttcctctagattcaggaggggactgctggatggcacaaagtggcgaatgaagcagccaggactattccgggaagggagaatggtggtaattgtgacataaaaaacctaagcagaggttccaaagtttatctgccagtatttgtcgaaggagcgaatcttagcaccggtgatatgcacttctctcagggcgatggtgaagtttcgttttgtggagcaattgaaatgagtggattccttgagctcaacttcttccagggattcatccctttgatccatccatcaaaaacaaagttcagtgcagcggtggttttgttgtaatgggtcagaggtggcagcaggaccattggcaccttcatcaatttaagttcagtgcagcggtgaggttcgacatgccccgtgcctactatcactctcgatttgaagaagagtctcaagattctgcaggtgttgtgttactcctaattcagttaccttactggcaataggatgccattgcaacttctgaaagtgcaaccatctgattgaagcggatttaattatacaagatagatctagaattgctttacttgagattcaagcaatgttggatgcttttgtgactgatcatctctggagcttttgtgaatgatctagctagctatctgtaaatgatcttgttgtgaatgatattataattgtgatgttttttgtgaatatataattgtggtgcttttgtgtttatgtgatggatctatgactgtggtatactgattaattgtgtatgtctttatgatttgtgtataaaaatctatgatttgtggtgctt

SEQ ID NO: 5980 - DNA, 927 bp, Zea Mays
cagcccacagggaggaggcctgcaactgcaacggtccagccgcacccgcgctcggcatacggcgcctctcggcctacgttctccgtgggccgtggcggcgtgccgcccatccgccctctgccctcgccccacccggccacccgtcgacgacggtcctccgccctcgccccacccgtcgacgacctcgtctcctccgtgcgcgggcctcggctagctcctgcttggcgctgggtagcgggctcgtcggtgctgggtagcgggctcgtcggtgctgtgcagatccacccgcgccccgccttgttctgtgctgccgcttggcgctgcgtcactgaccaagtgcgtgcctgccagccgaccgacggccagcaccacatttcgcagagccgttggtgctctctcttggctgtcagcaccagaagcacagcgcagagtcgccccagccccctgcgcctgctgcatagtctgccactgcccctcagttgttgtggtggccaagggacgaatcactctctcattctcaatgtggcacagtttcttttcgatgcaccggatagcctctcgctcgggtttgcttggtaggagatgttacagctatgccatgaaagggggcacttcgatcgccggagtaggcgacatcattgctgtcgcatcagggaaaggaggcgtaggcaaatccaccactgcagttaacattgctgtagcacttgccaaggagtttaagcttcaggttggtttgctagatgctgacatatatgggccatccattcctacaatgatgaacctccatgctaagcctgaagtaaatgaagacatgaagatgattccagttgagaaccatggtgtgcgatgcatgtccattggttttcttgtagacaatgatgcaccaattgtttggagaggtaatgttacaattgaatcttataaatg

SEQ ID NO: 5981 - DNA, 1966 bp, Zea Mays
cagcccacagggaggaggcctgcaactgcaacggtccagccgcacccgcgctcggcatacggcgcctctcggcctacgttctccgtgggccgtggcggcgtgccgcccatccgccctctgccctcgccccacccggccacccgtcgacgacggtcctccgccctcgccccacccgtcgacgacctcgtctcctccgtgcgcgggcctcggctagctcctgcttggcgctgggtagcgggctcgtcggtgctgggtagcgggctcgtcggtgctgtgcagatccacccgcgccccgccttgttctgtgctgccgcttggcgctgcgtcactgaccaagtgcgtgcctgccagccgaccgacggccagcaccacatttcgcagagccgttggtgctctctcttggctgtcagcaccagaagcacagcgcagagtcgccccagccccctgcgcctgctgcatagtctgccactgcccctcagttgttgtggtggccaagggacgaatcactctctcattctcaatgtggcacagtttcttttcgatgcaccggatagcctctcgctcgggtttgcttggtaggagatgttacagctatgccatgaaagggggcacttcgatcgccggagtaggcgacatcattgctgtcgcatcagggaaaggaggcgtaggcaaatccaccactgcagttaacattgctgtagcacttgccaaggagtttaagcttcaggttggtttgctagatgctgacatatatgggccatccattcctacaatgatgaacctccatgctaagcctgaagtaaatgaagacatgaagatgattccagttgagaaccatggtgtgcgatgcatgtccattggttttcttgtagacaatgatgcaccaattgtttggagaggtcctatggtaatgagtgctcttgagaagatgacaaggggagttgcttggggggaccttgatattcttgttgttgatatgcccccaggcactggcgatgctcaactatcgatgtcccaaaggcttcggttatctggtgctttaattgtttcaactcctcaagatattgctcttattgatgctagaagaggagccaacatgttccgcaaagttcaagttcctattctgggattggtagagaatatgagttgttttaagtgcccaaaatgtggtgagaaatcttacatcttcggggaaggtggagcgcagagaactgcagaggaaatggacatgaaattacttggtgatgtgagtgaatcttgtgattgcaattggcaccaattcttaagttatgatgaatatgctcgaatgttttatatctgagaaaaggttgaatctttttcgagcattagacttcaatttctagatatcatgaatgtgagacgtagagaacactctgtcagtaatgaacaccccaaatttggttttactgcagatggatgattgacatatcggttttctatgtttatacatgtccttatgatcttatgctacacagcggttgtttttcttcaataggtacctcttgaaatcagcatcagaacaggttcagatgaaggcagccctatcgttatatcatcacccaactctgcatcagcacaagcgtacgtaaatgttgctgagaaggtgactcaaaggctcaatgagctagcagaggagcggcgtatgggcccagaaatcttactttgagacattcaagccacttttctacacaccttctcctgtttgacggtacggcgcaacaaaaaaaaaatgcactgataaatagtgttgttggaagtaaacttcaagttttatcagttgggttggaaattttactcgaataaaacctctgctgccaaccttgtctttgtcacgcatgtccattatctagtattctagtctctgcattttttcatgactcattgagtgataattatatactagtgattggcatggctctgctccatcccagagcagttctactct

SEQ ID NO: 5982 - DNA, 1587 bp, Zea Mays
atccgacgtgtcgtcctcccgttggcgggagaaacgtcatagggaccgacacatctgccgggcctacaggtttcctcccctgggcgcccacaggtcagtgacacgcgcgcggccatggagaaaggattgagaccacgtcgccttcgacccttctccgtcctcccggaacgcccgtcccgtccgtcctccccccatccacatccatcccgtgtgcttctactgctcctcgatttgatcaccgattaggggaggcggtttaccagtgagcacgcgcgagagataggataggaggaaagggaagctagcggcttcgctctcgcggggagatggcgcaggcggtggaggagtggtaccggcagatgcccatcatcacgcgctcctacctcaccgccgctgtcgtcaccaccgtcggctgcaccctcgaaatttggattttctattccacatgttctttcttgcacggtactgcaagcttctggaggaaaactcatttagaggaagaactgctgactttttttacatgctcttgtttggtgctactgtcctaactggcattgttctgatcggagggatgataccttacatttctgagacatttgccagaattctgttcttgagcaattcattgacatttatgatggtttatgtctggagcaagcacaacccttttatccatatgagctttctgggcctgtttacctttacggctgcgtacttaccatgggttcttttgggcttctctatcctcgttggaagcagcacatgggtggacctcttgggtatgattgctggacatgtgtactacttcctggaagatgtatacccacgtatgactgggcgtcgccccctaaagacaccgtccttcattaaggcgctatttgctgatgacaatgttgtggtggcacagccacccaatgctgggattggtgctggtgcaaggttcggtgctattggtgtagatccccaggctcaatgatgaattactttcagtgacctgagggccgaggctgtgactgatctgggatgcggcagtttgtattctctgcgcaaattgcggaactgtacaagccattgttcttgtgtatttatacaggctagatgagagttattgtgcataacaaaaagattagtagtatcggaggcggctaagtttgtcacctgttggcagggcccggaggaaaatggatcgtgatgggcaaacaggccaacccctgttgcagaaacttgttcatgtgacggtttaacatctgacctgctaccctttcatgcatcggtgaatttagtctaggaaactgtttgaagtggggaaatttggtgctttggcagcgagaatttggatggagcgctgtaattgcagaatggtgcaaggaatgactcctaacattgtggacgcctggatggtgttcgttttccttcctgattctgctgtgttcaccgatccggatgatctggtctcctggaagcagtctttgtccatttttccttcatcagctgctctttaaccgtaaaatcggcgttcgtcatttcaagtgttgtgaccgtatcccttttctgttatataaataaaatgtttcagttagctgtttt

SEQ ID NO: 5983 - DNA, 2648 bp, Zea Mays
cccgctcgctcaacccttcatcattccttgcttcctccagtccctgccctcctccctccatcgccccgttccatcccctttcccttccctttcacgagatccccatccggccatccccacctctgaccgcacctcccatgccgcactagttcacccgcccactccccacccaacacacgccgcccagcgagatccagagccgaccggtcgccggccctcgccctccgccccctccgcaggtgctcggcggaatgtcccaccgccagccggcgccaatgccggacaccctctcggacgccttcgccgccgcggtgctcctctcctccaccgacaagccggacacgctgcccccggggaggctctcgccagtctccccgctcccgcactcctcctccaagcacgggcaccagcaccctcaccccaccccgagctcctcctcgggctcctctggctccgtctcccggtccctactcgcgcccgcctccagcctcgcctcgcgccggagccactccggcgagatcccgctcccctccgacgcgcccccacgcgggaccgcgcgcccgggtcaccgccgcaccggctccggccccctcatcttcacatccggcgcgtgctccagctccgccacctcgccgctcaccaacgcgctccccgcgggcaacatctgcccctccggccgcctcgccaagccgctcccctcctcctgctccgccgctactccgccacccccgccccgcgcctcccgccacgacgtgctcggctccgggaccgccaactacggccacgggagcatcgtccgctcccgcgccgccaccgacgatgacgcggtcctcaggcgcgccatgtcggccgccgaccccgaggagctcaagagggccgggaacgaccagtacagaaagggctgcttcgaggaggccctcaggctctacgaccgcgccctcgccctctgccccgacaatgccgcgtgccggggcaaccgcgccgccgctctcattggcctccaccgccttggcgaggccgtcaaggagtgcgaggaggcgctccggattgatccatcctacggccgcgcgcaccaccgcctcgcgtccctgcatataaggacacattgaggatgctctgaagcacctgtcacttgcaatcccacagcctgacctcctagagttgcacaaattgcaaacagtggagaagcactttgggagatgtctggatgcgcgaaaggctggtgactggaagagtgtgctaagagaaagtgatgctgctattgcggctggggctgactcctctgctctgctcttggctgctagagcagaagcccttttccgtctcaatttacttgatgaggctgatgttgcaatctctagtgcctccaaattgaattatacatcttcatgctccccagacaccaaattttgcgggtttattgccaacgcctacctcttttatgtacatgcccaagttgacatggcattaggaaggtttgaccatgcggtgtcctccatagataaggctagaataatagatccaggaaacactgaagtgataaccatgcataacaaagtgaaatctgtggccagagcacgatctctagggaacgagctcttcaattctggaaaattttcagaagcttgcgttgcttatggtgaagggctgaaacaacaccctgtgaataaagtcctgtactgtaatagggcagcttgtaggttcaaacttgaacagtgggagaagtcaattgaggactgtaatgaagctctcaagattcaacctaattataccaaggctttgctcaggcgggcagcatcttatggcaagatggagcgatgggcagaatctgtgaaggattatgagattctcagaaaagaacttccaagtgacacggaggttgctgaggcctatttccacgcacagattgctctcaagtcatctcgtggtgaggaggtatccaacatgaagtttggaggagaggttgaagcaattattggaatggaacaattccagttggctacatctttgtcaggtgtttcggtcatccatttcatggcagcttcaaatcagcagtgctgcaagatttctccatttgttaacacgctctgtaccagatacccatccgttaacttcctcaaggtcgatgtgaacgagagccctgctgttgcacgcgccgaaaacgtgaggacagttccaacattcaaaatctacaaaaacggcattagagtcaaagagatgatctgccccagccaacagctgctggaatattcagtgaggcattacgggatttaggccacgaagccgatgacttgatgttaccttccgcctccagcttctctggagcgagcacaggctttagccggagcagaaccagtcaagttcatcttgatgaggggtaagcatgagaatggaaaagcgaagagcaactcttccccagcattttcaaccccacagcccacccccattctccatttgttgattacatacctactcgatttattcatttaatctatctcgtccgtacatcattgttgcaaaatttctgtagaacccccaaaaaacatctcctgattcatgtgaagaatgactgtaaatttttacttccatgtttaccagacaactgaggaaaaaaggtatagattgcattttttttgtactatctaaat

SEQ ID NO: 5984 - DNA, 628 bp, Zea Mays
gccgtggcaacaaggtgcttcatatgctgtccaatttgacttttgaggaggcagacacaaagcatgatgggaaaattgacaaagaagaatggcgcaatttagtagtgaggcatccctctttattgaagaacatgacactacaatatctcaaggacatcaccactacatttccgagctttgtcttccattctcaggtcgatgatacctgaatttctgaaaactaatgaatgtcagaaggtggactgcttgctttgctaagcaaactttcagtgcctgtttgatggttcaaaaatctcatcgtcctgaaggcatcaaatcatcgtttgttgttaataatctttttccttgttttttatttggaattcttgctggatcctgtgtgaatcctcttctattttccctctcaattgttcctttattctatttcggttttgatggccagtacttgagtcagttaatgtgtacaaagttgcgtctgatgctgcccgtcattgaattgtatggcatgtgaggaagatttaaattgtatattcaacttttgtggtcatgatagttgcacatatttttaccatcctttctaatttatatttgttatttttttcaatatagtaaagttcttgaactgaaa

SEQ ID NO: 5985 - DNA, 1924 bp, Zea Mays
agccaggcacggctccagcaacgacacccgagtacggagtacccgacccgcctgcctgcctcctgcctgcctgtggtcgcctgtatcacaagctcccaaaaccgccgcgcacgctgccaccaccggtacccaacgaacatggcggcggcgccgtcctccctcgcctcctcgtcgcatatcccccgccgcgccacagccacggccccagcacagtcgcactcgcctccgttgccgcagcagctccgccccgccaggtccttcaaacgcggggcgctcgcgcagcacgtccggtacagctttgccggcagggaggcatcgaggcggcgcacaccaggtgcttgcttcgtggtctcatccagccagccaggttccttgtcacttcagttggccttgctgccatcgatgtgccggcagcgactattcctgatgccacgacgacaagcgtcactgagcggacttcggtttcatctcttttagaggttgtatcggaggacttgctcagccttaacaacaatctgaaatcgcttgttggtgcagaaaatccagttttggtttctgcagctgaacaaatttttggtgctggtggaaaaagattaaggccagcattggttttcctggtgtctagagcaactgctgaattagctggtttgtcggagttaactgcagaacatcgacggttggcagagataatcgagatgattcacactgcgagtttaatacatgatgatgtcatagatgatagtgggatgagaagagggaaggaaactattcaccaactatatggtacacgtgtggctgtacttgctggtgattttatgtttgcacaatcttcttggtttcttgcaaacctagaaaatattgaagttataaaattgatcagtcaggtcatcaaggactttgcaagcggcgagataaaacaagcttccactctttttgattgtgacatcacacttgacgactaccttctcaagagctactacaagactgcatctttgattgcagccagcacaaaatcagcttccatattcagtggcgtcagcaccactatttgtgaaaaaatgtatgcatatggcaggaatcttggtctatccttccaggttgtcgatgacatcctggatttcacccagtcagccgaacaacttggcaaaccagcagcaagtgacttggcaaagggaaacctgactgctccagtcatcttcgctttgcaaagtgaaccagagctaagggagatcattgattctgagttcagtgacacggattcgttagctactgcaatagagctcgttcatagaagtggtgggatacggagggcacatgagcttgcaagagagaagggtgacttggcaatccaaaatctgcagtgccttccaagaagtgacttcagaagtgcccttgagaagatggtggaatacaatcttgagaggattgagtagtggattttacttgaatgctccatcaggtacatatctccatttggggtttggggtagttctcatatagatctttatattcagcccctttgggaagatacatttcactgaaaaatcagatgaatcacactatttcatacaaattctggggatagcctttgagcaggccactactatcaagttgattttgtaacagcttgtgcagaatcataagaaaccctaggacttgaccgcagccccttgcgcctacatgtatccgagcattctacttggcagttcttgtaaataatagaaccatacagtaacttagcattcttttttgttttgcaatctgagcatgcttacaagcaacaaagtgtgtgctatatttgtacggatctacgtgcacctaacatcatgcacttgtacaattgctttgcactattatgtactatttccgatttaacagtaatacggatttaacagtaataataccgttcattttctacataaga

SEQ ID NO: 5986 - DNA, 2383 bp, Zea Mays
agccaggcacggctccagcaacgacacccgagtacggagtacccgacccgcctgcctgcctcctgcctgcctgtggtcgcctgtatcacaagctcccaaaaccgccgcgcacgctgccaccaccggtacccaacgaacatggcggcggcgccgtcctccctcgcctcctcgtcgcatatcccccgccgcgccacagccacggccccagcacagtcgcactcgcctccgttgccgcagcagctccgccccgccaggtccttcaaacgcggggcgctcgcgcagcacgtccggtacagctttgccggcagggaggcatcgaggcggcgcacaccaggtgcttgcttcgtggtctcatccagccagccaggccttgctgccatcgatgtgccggcagcgactattcctgatgccacgacgacaagcgtcactgagcggacttcggtttcatctcttttagaggttgtatcggaggacttgctcagccttaacaacaatctgaaatcgcttgttggtgcagaaaatccagttttggtttctgcagctgaacaaatttttggtgctggtggaaaaagattaaggccagcattggttttcctggtgtctagagcaactgctgaattagctggtttgtcggagttaactgcagaacatcgacggttggcagagataatcgagatgattcacactgcgagtttaatacatgatgatgtcatagatgatagtgggatgagaagaggtacatgatgatataatgctattatctaatatgccaaaagtactatcaataaaaccatgtcattttgggaatagatgaatgttatattcttcttagaaacatttctagctatagaaacatggattactacgaaagggcctctatctgagttggttatacggtccgagtagtacttctcatgtcctaagtttacccctttgtaggagtgaatttcagactgggggttaaaaaatcccctcgtctgagaaatattctcttaatacaatactaggggttgtcttacccctgtaggtcgagtttttagaaacatggattatttgctgcactctttttcaagtgctctttagggaacatttgattattgtaataacataatataagtagcacagttccgttttcgttttccttcttttctgaaaattggccagtaacttttaaattgattgagatagagatgagcattcacttcggttctaagtgttgggcctaaagcaggcagaggttaaccaggcatcccaccatcacaataggatattgcttgttttgaatgtaaggccactctcgtttttttcacacgggagagtggggggtgggggtggggggctggatctcacaacttgaccagtttattctaatgtagagctaactgtttcagggaaggaaactattcaccaactatatggtacacgtgtggctgtacttgctggtgattttatgtttgcacaatcttcttggtttcttgcaaacctagaaaatattgaagttataaaattgatcagtcaggtcatcaaggactttgcaagcggcgagataaaacaagcttccactctttttgattgtgacatcacacttgacgactaccttctcaagagctactacaagactgcatctttgattgcagccagcacaaaatcagcttccatattcagtggcgtcagcaccactatttgtgaaaaaatgtatgcatatggcaggaatcttggtctatccttccaggttgtcgatgacatcctggatttcacccagtcagccgaacaacttggcaaaccagcagcaagtgacttggcaaagggaaacctgactgctccagtcatcttcgctttgcaaagtgaaccagagctaagggagatcattgattctgagttcagtgacacggattcgttagctactgcaatagagctcgttcatagaagtggtgggatacggagggcacatgagcttgcaagagagaagggtgacttggcaatccaaaatctgcagtgccttccaagaagtgacttcagaagtgcccttgagaagatggtggaatacaatcttgagaggattgagtagtggattttacttgaatgctccatcagaatcataagaaaccctaggacttgaccgcagccccttgcgcctacatgtatccgagcattctacttggcagttcttgtaaataatagaaccatacagtaacttagcattcttttttgttttgcaatctgagcatgcttacaagcaacaaagtgtgtgctatatttgtacggatctacgtgcacctaacatcatgcacttgtacaattgctttgcactattatgtactatttccgatttaacagtaatacggatttaacagtaataataccgttcattttctacataaga

SEQ ID NO: 5987 - DNA, 2051 bp, Zea Mays
gaaagaggctgacatcctgaagccaccagaatgaggaaccaaaaccaaacaacaccaatgggcggcgcggcgatatagctagggtagagtagttcacttccccatcaccctctctcggtctcggtctctcctcccctcctacgccaattgctacccgtcgtcgcgtcgcccccctcctaccgtcctacgtcttccacctctccccgcttcctcttcctccctgctgagcggaagcgcgcaagcaatcgctgccttttcttggcgtgcgcagctcctggtcggcacggcagccccccgcgggatctcgcttgctggcctggccgcgcgacattgaggcggggcgcctggagctcggagccgccgtagctggtgttggtgcctcggagccgatcgggtgtctggttcctgatttgatctgcagctgcagctgcggcggcggcggccgacatggcggcttcgggagggctcgagcagtggcagaaggacgggttcttccaggcggccgaggaggtgcaggagtccgcggacttttggagcagtttgagagggctgtaagttcaagcaacgataagtattcattggaagaaggtacagtagcacggcgtcggcagtttgttgtagccattgaggatcagatatctcgtgtagagaaagaaataaatggttctttaatggacaatggcgggcaagggctcaactgggtgaagttagatgacgaagagcgagatgatctagttgctttcctttcagcacctgcagagttctattcagaaatgaagagcacagacatcagtgaccgtgttctatctagacaaaagaatgtgccagttggcaggaacgatcagagtgatccacctttaatcattaaagacatatatgaagtggcacgcacagaaatttctactgttaagagtgatgtttgtggtctagctgaggagttacatggccttagaaggaatttgagttcagggaatgatcattggaagattgacattggtaacaagatggatgatgatagaaaattgtcaactggggttcaggccgcaagtcagacaactccttcatcaagcatccggagaagcgcagaatctataacaagagtgagatggttttggaatagcttgtggaaatccaagagggatgaacaacgcccattaagatatgatatgtcatataatcttgacctcagggttgtatccttattaacacagagatttaatgggctagcggagagaagcagaaattatttgacaagttggaaggaaaattccaggacttctggaaggacgggtgggcttcatatacaaggccaacaacagaacattcagtttggccgttctattcggatcaccctcttactggtgctgagtatctttctgattgtgccatttctcgcctcggcatgacaaggcatgtattgcttcaccggtgaggaacattggggcagcttaccatggtcctgctcgtactacatacagatcatgactggtggtgttctctcgccggcaaatgcagcaaaccaaccatgtctttcctgtgtggtgtggctgctgcatatgtgacaggaaaagaagcacggcggtgaaggtttcaactgtgcaatgcgtgatgctccgataccatgaactcctcaccgggcgcataaccatgctaagatttatcagggttatgataaatttgtgatggctgattgctgccaaaggaggtggctgttctcatctcactactctatatcccacgagtgaaagcaattgtaaaaagttctagagccactctatatcccacgaacgaaagcaactgtaaaaagttctagagctggtaggataagtcctgaatactgttattgataataatacatttaatactgtatttgccaaaccgttcgccgccgctcgtatggttttctgtttagaggtgctcttttgatccaggtttctgcacttgtcctcattttatggtatgcttgccattacccacgaactataattatatgtgccgtttggttaatgaaatgtaatgtaaatggtaatggtaatgattcatgctcaaat

SEQ ID NO: 5988 - DNA, 825 bp, Zea Mays
cctaaagaagggcagacctagtgtagtggtgagagctgtctcattgcatcagatcacagattcaaagcaatatcttcgcaatttatgagagaaggttaaggccctgtgcgagaaggccaaggagatattgatggaggaaagcaacgttcagcctgtcaagagtccagttacaatatgtggtgatatacatggacaattccatgatcttgtagagcttttccgaattggtgggaagtgtccagacaccaattacttatttatgggggattatgtagatcgtggctactattctgttgagactgtcactctgctagtagcactaaaagtgaggtacccacatcgaattacaatccttcgtggaaaccatgagagtcggcagatcacacaggtgtatggattctatgacgaatgtctacgcaagtatggcaatgcaaatgtatggaagacatttacggatctttttgattattttcctctgacagctctggtgtgtactcttaagactggaaccaccttttttcagttgtatctggagcatctattctatgcatcatcttcccaatatgcagaatcttaaaacactaaaatgatgtagtagatagaaccacaaatggcttagtagctagaatctcatcgttcttttttagcaccagtttcagattcttcagtcggcagtatatttatgaattatgagttatgaccaacttcttttaacccgttagagcatgttggattggaaattgagaaccatagcatagagtatgtattcagatgttccaattatttggaacaccctgttgaacatcaattgtcttcatttgtttg

SEQ ID NO: 5989 - DNA, 435 bp, Zea Mays
gtaaaaaaaaaaaaattggggtcctccgcctcccgcaatgcctcccccttccgcctccgcctcccgcttggcgacccactggatagctgacgccctcgccgacgacgagtccctcgacttctccgtgctgaagggttggaagctccggagaattggagaaggatttgcttccacctttaagtcaagacatccaggaatatatatgtaccaagaaatttacactaccagaaacttctttccagttgagttccagcgccgcttaagccccgcgccttgttccccggtttccccgcgacggttgagcccggcttctcggtcctcggccccatccaggtgtatcgtcgccggtgcacggtcccagcttccaactgggctccaggcacccccgaatcccctgcgtccagcacctcatccaaccatcccggtaatggttat

SEQ ID NO: 5990 - DNA, 548 bp, Zea Mays
caccaaagacacggttttaaaatgactgtgtcctgaaatagaaaacaaatggaatgatcttcttcgatacggagctcccgtaaacgttacttttattttgcagttcagcggttcagccccctcaagtcggggtactctgtaaaaaaaaaaaaattggggtcctccgcctcccgcaatgcctcccccttccgcctccgcctcccgcttggcgacccactggatagctgacgccctcgccgacgacgagtccctcgacttctccgtgctgaagggttggaagctccggagaattggagaaggatttgcttccacctttaagtcaagacatccaggaatatatatgtaccaagaaatttacactaccagaaacttctttccagttgcttggaagttttggagaattggaggatttgctttccacctttcagtcaagacatccaggaaaatatatgtacaaagaaatttacactaccagaaacttctttccagttggcacccccgaatcccctgcgtccagcacctcatccaaccatcccggtaatggttat

SEQ ID NO: 5991 - DNA, 619 bp, Zea Mays
ctgtaaaaaaaaaaaaattggggtcctccgcctcccgcaatgcctcccccttccgcctccgcctcccgcttggcgacccactggatagctgacgccctcgccgacgacgagtccctcgacttctccgtgctgaagggttggaagctccggagaattggagaaggatttgcttccacctttaagtcaagacatccaggaatatatatgtaccaagaaatttacactaccagaaacttctttccagttgcttggaagttttggagaattggaggatttgctttccacctttcagtcaagacatccaggaaaatatatgtacaaagaaatttacactaccagaaacttctttccagttgagttccagcgccgcttaagccccgcgccttgttccccggtttccccgcgacggttgagcccggcttctcggtcctcggccccatccaggtgtatcgtcgccggtgcacggtcccagcttccaactgggctccagggcctcagtgtatcagggttgcatgagattcagtgtagcagggtagcaggggattcggtgtagcagagtttcagcacccccgaatcccctgcgtccagcacctcatccaaccatcccggtaatggttat

SEQ ID NO: 5992 - DNA, 859 bp, Zea Mays
ctcagtctcagcccaccgctgtatccatccttccctccaactccacagaaccaacaccgacatcgaagcggcgaaccaaccgccgcaatcgggccacaccaatcaccgccgcaacaacaggcatgccgcggcccccgccgccgggccgcgggaccccaggcgcaaggcggccgatccgggacttcttcgccacctggctcgccaccctccgctcaccgctcctcccgctgctccgccgcgcgctctccacctcctcctcgtccggctcctgggacgacccgctctcctccgccgccgcggctgtcgaggctcacttccaggcgcactggtccgcgctcgacgctgccgcacgccaggacccaacgcgggtcatcgccgcgggggactggcggtccccgctcgagctccccttcctgtggcttggggacgtccacccctccctccttacctcgctcctccgcacgctctcgccctcgccgcgactcctcgctgccgtcgaccgcgtcgaccgccggatccgcaccgccgtccctgccgtctccgaccgcctccgccaggcccaggaagcttttgtggccgccgaggcaaccggcgccgccgacgtggaggcgttcttggcggagctaaagggcgtcgctctcgaagccaaccggctgcgtcggggcgtactctcagacctcgtcgccgccgctggggggtaccaggcggcgctgtacctcgaggcgctctcgcgcttcgtgttgtccatgcacgaccccgaggtgctccgccgcttcgaccagtgtcgcgcctcgcctcgtagctagttacccttcttgttctcaaggtattgaatgatgtacacgatacttgtttcatt

SEQ ID NO: 5993 - DNA, 1327 bp, Zea Mays
gttacacggcaaaatttgggccactgaaaccttgtttactgtgtagacgcttctgcatgagatgcttaagacacgctgcagccaagtgcgggaaacggtgtcccaaatgcaggcagttcatcagcagctcgaaatcgtgcaccatcaacactgtgctctggaacaccattcagctcttatttcccagtgaggttgaggcaagaaagggttcgagctcatcaccttcaccatgcgacaaggacgatgtgagagctaataggttctcacaaggtggccccggtatgagaactaggagcaggagcagcggcagcggcttcatcagcagcgagggtaggacaagaagcagcttcatcgaacccggcgccagtgcgaacttcatcgtcagcacatatggcagcgcaagaagcagtaacagcaggaggggcttcgtccctgcctcgcagctgctgttgacaagattagagcaatctgaagatgccgcggcgttggcgtacaggttgcaacaggaggagttcgtgaatgcctttgaggagcctgagcaggagaggcagccacgcgacgccgtgtccacagcacgagacaccctgagagccatggcctcccgggccatccgcctccgtgctagaggctggcctgtttagtactactattgctctgctctgcatggaagttgagacctctgaacatataggcatcggtggggttgatagctctcgacattcactagggactctagaagatgtctgccccacgattgttcacgggaaggcccagcgacagctatgggctcccaactagaggagaagacgcgtaggctcaaagctgctgtcgccggtgagttgtaaaaatgctaaaaatctcattctctaagttttcagatgaagtgcacctagtaagacatctctagcagcttattcatactcatatttaaaataaactctacaaacaatataatctacagtgtaaaatagtccaaaatgtgtttttagtgaccatatgtgtgaactattgtacattgcccttatatggtcactaaaaatatcattttacatcgttttatattgtagattgcactgtttataaagtatggtttgaatatagatataggtatagataagctgctggtgatggcctaaggcattagtgttgtcaaatgctgagtcagggggcacatgagactaatagtgtagaccttctctattttggtctcgatccttggtgagacaccaggaaaccaatgagtgagcttgtccgaagataccctgaagccacacttctctgggttaaccatcatgcagatttgatgaagacattaagggggtgtttg

SEQ ID NO: 5994 - DNA, 4830 bp, Zea Mays
atggacagcacggcgaacttgttcaccgccgcccccttggacaacgacagcaatagaagcaagcctccggccactaggtgcagcgcctggaggagcaaaccaccacgaacactcatcagatcaataaccgccaatgacggcaagagatggaggagcgaatccaggaggcaagcttgccgtcacctgcacgaggatgaggcgcgcgaggcgggatctgccctcggcgaccctctggaaaccggagccaccgccgctgctcccgctgcttgggtatctaacgccgccacgacggccccatctgagcccacaggatcccctgctgatgtcgaagccttcgctgatcctactgccgtcggtgacgatgagcacgactccaaggaggtcttcctgcgcagcgatgatcgccgaggacatgagcgccaataaatctgtcgccgtcagagagacaaaatcgaggtatgtgtgtgatgttgtatttcagatattcagtgtccaacacagagttcgattacagcttttatccctcacacacgccacggcccacacgacccaacaccattacaagatacggcccacacttatttattgtgccccatccggcacgccagccttgtcaccatctttaggcatcacctcccgcactaccggctctcgcttcttcctccctcgccttgctctccctggttgtcaggcgtgacatctgctccctcctgagtgcttgcttgtccccaagcaacaacatatggaaagcactgacgcaccacgtaaaagtcttcccaagttgctgaatcgctgggaatatggctccagcggatgagtacctttggaacagcgcgaccacctttctttaccaggcgcctgtccagaatctcttcaggaacgacatcctgttgagccaagtcattgtatcaaggcaaaatagagaaaactggggagtaattggcagtgaacagcttcaattgcgacatgtgaaagacaggatggatctgggcagacgaaggtaactccaggcgataggcaactttaccaattaatattaccaatattcctctcactccacttatggagccccttagtaagctgctgaagctttaccttagccatggcaacctgcaccttaatattactcttataggtatgaccgttagcccaccactccaaggctttaaccatcttgtcactcttcatcatctcaccattggccaccttgactgctgccagcccacatttgatcagtggtaaccccaatctgtcaaccatatgcctgctgatgaagctggctgaccttccggaatccaccaacacaagcatcacttggttcttaatgagggccctcactcccatgcactcctctaaagtggtaccagtgatagcatgcaacgacaacagatactcctcacttttctccttttgctcaatcttacccaacatttcctcggtcagagtcattcccaaaccttcagcagacaatgcgcattcagctgcatctgcagtttctttggacacttggcttggtggcctggttcaaaaaaatttcccacacgtaaaataaagtacattttgtctacaatactccttaactagtcgttcctttgacaactccattggtgtgttctgaactcgggtttcaggttgaggaagaaccactgaaccggtgttgtacaactaacttcaattttttgcctctgcttctccaacaccagtttctgcatctgagcgagtaaagctgctcggtccacagtagacagcaaatgagactgcactggaccctgcaactccggtttcactcctttcataaactgggaaacataaagtgtctcatgcaacttggggttatgcgctgctgtcgaataccgaatttcctcaaactccttcaggtaatcttctacataccccttttgatacgagttcagcagattgtgcatcgccttgggatattcctctgccccaaattttgctttcaccgcctcaccaaattcctcccaatttcccagcccgtgctctggtttgtaaatctgaaaccaacgggatgcatttccctccatatgcaaagaagtagacgtgaccctcactgtttcaagaacacggtacataacgaaaaaatccacacacttcgctaaccagatcttcggctcaaccccttcaaactttggaaaagttggcctaggtagtggaacatgctgataatcctgatcctcctcccgacgagaatttccctcgcgttgctggactggagaaattccacgatgcctttggggttgtggaggagtgttgagtcgtgcgttcagacgtggttccccgttcgggcgctccccgatcggcgtctccgagaactccagatccggagccatcatctccagcctcatctccgccaccaccttcctcgtctattccagctgttgcgccaaccgcacccgttcctccgccgccttctgggccacggtcgccgtgagctccgcttggaccatcagttgttgttgcaccgcatccactccttcaaccttctccgacagccgatccagcttgtccatcatccgatccccttgctccttctcctagttgtccatggtgtccaggataaactgggtctacatagatggcttaggcaccggcgccgtggcgactacccacgccgaggacaaagggctttgataccagatgttatgcccgtggccgccagcgacgatcgccgaggatgtgagcgccaagaaatctaccgccgtcagagagacaacgtcgaggtatgtgtgtgatgttgtatttcagatgttcagtgtctagaacaaagttcgattacagcttttatccctcacacacgtcacgtcccacacgaccaacgccattacaagatgtggcccacacttatttaatgtgccccatccggcatgccagccttgccgccatcttcaggcatcacctctcgcaccaccgccatcaacattgtctacctctttgtcaactcgatccagcaatgcatgaagcatgttgagattgatattcactttgtccatgagcacgtcgtcgtcggggacgttcgtatcctccacatcccaacaagctcgcattttccagtcatcttcaccaagggtcttccatcctcggtgttcttggagttatggtccagtctcaacatctaccgtggctagagtttcgactgtggaaagtgttagacagtaattatattatgcccgcttttatggttatgtaggtgtgtgttggctatgtgttatgggcctagctgagccgagcccatgtatagcctattaggcctaatagggttagggaaaccctagacctatatattataatccctacaccaatcaatacatcttcgaatcattctcctaaatcctctgataatgttcaaaatgaagtgccaaggggtttgaatctaaagtaatgggattttacctataagtacatctagtttcttgaatgatgttgttttctatgaacctatagttgccttttgaaaatattgccttaataattatttacaacactgattattctataaacttatttgagcgacccgagcctctacctcaacctcgtaggaagaccgaaccgagccgcaccgagcggagactggctcgactcagctcgtttctagccctagaaatttggtcaccaatttgtggatattatttgtcttggtggtggtattgttgtttcacatttaactgattcacattttaccaataagttcctactgtagcatatccaccattggtgaaacttcttcaggttagctattatagcaagcatgtgctctcagggctcgtgatctctacaggtggattgcaagtgtctttgaagaaaacttcaacgtcagctttggtagggtatctccaggattcagacatcaatactaattgtgaagggaaaagtagagagtatatattgagttgtgatctcctatcggtccttcagcactaccagaaatgtgatcgcgtaattactcccacattgaagactattgaggctctcgagtaaaaaggttttcttgaacaaggaggggtacagtgagttctacggtggactggtagattcggcgggttttgagatgaagggatccaaggatttcacaaagttatgtgcaggtccctcaatccttggatacatttcttcacagtcagatggaatttgcactacggcattttctcaactcctcacattcctaggccacagataccccaagatagcatttatcatttcttgcctgagaacgcagaactccgtgcaaggatcagctcagctgagctcaaatactctgcattctgcaatcttacagatccgaaaagctgcagccgaccaggtgtacgtgtaccttgtgctgctgcaaaatgatggtcttattacgtcggagaatatggataaagcccgggaattacttgtggagacatgctgggaaggagatgtgaaggaagcagcgcaggaggtcagaaatcaacgagatggctggtcaccactacacaggagtctggaaaccaagaaacaaaaaagaacgcttgccacttcgactgatgagaacaaatcttattcgtcgttggtcgatttcagtggatactaaggatgattggggttttcgttggccttccatcttattttcgaccaaaagtttgtatgagtgttgctctccgcatttaactgtactagcgcagtagcgctcactgtcgaatgtcgctatctgtttggatgagtgtggttgttttgagattttcgttattttgtctggtggtggactggtggttggggtggggaggagagagttgtactgctggacgatgtaatttttggaacgtctgatcaaagtagtaagttactctt

SEQ ID NO: 5995 - DNA, 1895 bp, Zea Mays
gtccaaacagcaccagggaacagggtcccatggggtggtggtctggaggggaactgatttggtcaccagcctgagcccctgactgtgcagtgtccacaaagatcccgggctgctccttcctcccagaggaagcgtacaaacctggaggggaactgcccgtctcctcggctgacccgtccacctccttcttttcccctcgtgtccgccgctacacgcgccgccggaaccctagcctccaccgccacaggcagcagggatggagaaaggagcctcggaggcgtcgcccccttgcgctcgctgcggcaagcccgctcagcttcaatgccccaagtgtgtcgaacttaagttaccgcgtgagaatgcagctttctgcacacaggattgttttagggcagcatggagctctcacaaatctgttcacccaaagcctggtgcaccggcatcccagcagtctccagaaggttggaaatattgtctgagaaaagggcgggaacgtgcattgcaacttcctcgttttgattggacaggtccattgagaccacatccaatatcaaagatgcgtgtggtgccagatgaaattgagaagcctgattgggcgcttgatggaattcccaagatagaaccagatagtgatttgcagaaaagagtagagattaagacccctgatctcatagaaaggatgagagtaacatgtcgaattgcaagagaggttttagatgcagctgctcgtgtaattaaaccaggaattacaacagatgaaattgatagagtcgtccatgaagagacaattgctagagaacttccattcttgatcctcaggtggatacccatctccattgaattactatttcttccccaagtcatgttgcacgtctgtcaacgaagtcatttgccatggaattccagatgccaggaaacttgaggatggtgacattgtaaatgttgatgtaactgtatactataaaggtgttcatggtgatttgaatgagacatattttgttggaaatgttgatgaagcttccaaacaccttgtacgttgtacctatgagtgcttggagaaagctattgcgatagttaaacctggagttcggttccgagaggtcggagaagtcataaacagacatgtttcaatgtcaggtttatctgtggtgaaatcttattgtggccatggcataggggaactgtttcactgcgccccaaacattcctcattattcaagtacgtttcttgcaactatttcttatttatatttcttgtattagtgcagtaaatatgacgctgctgtgcaagctatgtcataaaggcttcacagctggggagatatgctggtgttttttaatgcaggaaacaaggccgttggtatcatgaaagctgggcagacatttacaattgaaccaatggtcaatgcaggggtttggaatgatcgtctgtggcctgacgattggactgcagtgactgcagatggtaaacggagtgctcaatttgaacatacacttttggtgacagaaacaggatgtgaagttttgacggcacggttaccctcatcaccggacgtttttccatggttgaagaagccgtgatggggaacgccaccaacagcaagtgatactgttacactgggtcagcaaaaagttttgttctgctctatcagtcggccaaagctgaaattttcaaatattctagatcagagtgattagcatgctactgctgaacagtcgcagcaattgtctatcgtgcggaactatttctgggagtgtgtattgttaagtcggttttcttcgagttatacgagacgtatggcttcttgagatgtgtcaccaatatgattatgccatcagtttacttttgatttcacagaacacaatttccatcatttcgagtaggttattttttat

SEQ ID NO: 5996 - DNA, 1306 bp, Zea Mays
gcctgtttggtaattggtactcggctccactcggcgagattcgggagcgcgcttccaaacgccgccgcgattcggcatcctgctcgcgtgagaagcgctcatccggcattccggctccaaccgtccattctccgccccgcttcgccttttttcccgtcgcttccttctccgctgctcccgccgcccttctccggcaggattcgacggcggcggcggtctctgcgagcctcctcttacttcacggctgcctggagggcttcccgagccgcggcgatctctcacagctcgccttcctcgtcatcctgcaccgctgcggcctcccgcgccgtcgagagtgagcgagttcgggagcgctaccgctaccaaacatggagcttagctggagcgggagcccgtgtgagctggttgggagtcctaccaaacaggcattctaaccctaatcgagtggtgccttccctagccgtcggctatggacaagttcctcgtgccggcgccgcctcattgtggcgaggagcccgcgccgcctcctaggagacaccggtggaggcgcatcatcgcggagctggacggccgcatagactccaggttccagcacagagattcgcgcctccttcttgattccttcaccgaggtggatcgaataattagtgcttcaactataaattttcatccagtaagggagggtgtttcagcaatagaattcgatagaaagggaatatacattgcatcagtgacactctcagggtgtctgacggtgcatgactttgagactttgtactgctctaaatatggcccaccatgcagtatgccagatgaatcatcaaattatgtgctccatatatctaaccgaattcccctaaatgctgtccgatggaatccaggaaaccaagacgagattgcttgcacatcaaatcaaagtgataacgttttcctctttgatattggctatgtctcatctacaccaactgaagttttgcataaaggaaaatcgaaattcccctcgctctactctgaatcctgcaagagtttgactgatataacttttacttcagatgataagtcacggatatttgcatctggccttgatggggcagtgtacatgtgggacaggcgatcaagtaagacacactgtcttgagcttgtggcatctccagaagctcagttcaacactgtcaagttaactgtggataatcggactgtgtttggtgcaactaaaaatggcacaattcatgttgggatctccgtggagggagggcatcagctgcttttcaaagccacaacgaggttcagcaattgatgtcagtgc

SEQ ID NO: 5997 - DNA, 2520 bp, Zea Mays
tctttgtgatggaaagcttcttattagaagcatctgcaaccgtcattccaggctcacgaggaaactcatttactcgaatcatgtcggactttgtcaggagtagatatgataagcaagaagatttccaagttttgttgagcaagaaagatcctggagaacaacctcagcacaaggattacctgtggatggctcactggaccaaagcaagcagcgctgcagaaccccgaaacaatgacagcaatcctttggaggataccaacaatggcactactacgaaagatagcgagaccttgccttatgaattcatgaaatctacagttgctgaaaggctcatggtaggagtacgccatggaagtgcctccatgcagcatgtccgacaattcaagtctagtatgcggggtatgccacgactttccaatgaattgggaccaaagaatagtgaacaggttgatgagtcttttgaaaaatctttgaaaaacgatgctatgaacttgagaactaggcaagttgtgtcagaaacatattctattcacaagctttcagagttaccgttggattttcagaaccttgggagctcagatgatccaagtccagattggagccactttccaatgttcgaaattaatcaaaagattgacagtattgtcaaccgtaaacgaaggtctccacctctggatctaaatgtgtctgcatcccatgtgatggccctatcgtcacaagaatacatgatgcactcacatcaaacagctgatgagaacatggatacgtgcaaacctgcagaaggctttgcatctcgtgtagaagatcatgctggcttcaattcagatcctccagggccaaagttaaaagggcaattgttggataccatgtcatgttcttgcagcaaggatgacaacaactcagcagattgtccaatagatgagcagcacacaagccactattttgcaaactcaaagcatgaactaccctctgtatctaacaaaaagaagttcaagtttgcaggaaacaaccacaatcgaattgttgcaagtgcgtcccacgatctgaagacaaaaagatctgctgtccataaacaacaaagtgctgcagaggcagtgttctgtgcaccagtacttgatagtgagtttcagaatgaacctataactatttccaacatcgacaagaaggatggtgaaaattttcatgatatgtataaatgtcttggcaaggctgtttcatgtcctttgttaccttatgagcatcgtcatctgaatacacagagaacggaatctgcagaaaatttgaaagtctgcacgcttcctgatcatcaaactgcaaataaattgacagaaaagagtcatggtgagctgctgacatatggaccaaagtcaaaggaaatgtatacaggttcttgtaaccaaagaaggaaaatctagcgactttggagtttgtatgtatggcaccaatattggcagtcagttattcagagcacagaatcaatcttcagctaagactgaaacattgcacagcgatactctcattgggtccaaatccccagcaggcatcgcttcattgtcggcacaaaaggactatggttgcacggacgaagcaaaaagtgagcagctcgtagctccgtccaggagaggagattcaggatacggtaaagaagatggatttcataatgtcaatgaaggtcatgatgtttggtccaaagcaactattggtagtaagcaatcatgcatgcccggaacgggaatcacgaacctagatctgatactttcccagatgagcagaatgagaaatcaaatttccattggtagaattcaaccaccaataggtgccgagccaagtgacagatggctcaagcgcctacagcctgacataccagatcctgacatccctggttccaggaggccaaacgttggaggcagccctccactcaggcaaagaaatcgttcgtttgacatggcacttccttgcaacaggactgacactggaacaactgactgtgttatggaggaccagagcttggataaagtggaaaaaacgcaagaaaagcaagaaagtaccccaattccagcgaagagcgtgaatagctggataggaagatggtgccagggaggcactcctgttttccatgaaggcccaggccagggaaggcaagcaacaaagcctggccggccatctgaagaactcgaaggtcggttcccaagcattgcagcgatggcgatgatggggcgagcgatgaacaagcttcggccgtgcgagcatcagaagatggggccacttgtggtgtggaagacagattgacctcatatatatatgtttttgggtgtaatatagtggtttctttccaaaaaaagaaaaaaaaatgaaaagcaacagtgaattttgcctggtttattgtttatggtgtaataaaccatatgatggctcatggtttattgttttctgaagtgaaagtagctaggtgtagtggatactggtgatgtaatggtctggtctcatataccaacaatataataatattttactgtttac

SEQ ID NO: 5998 - DNA, 3015 bp, Zea Mays
catgttcctcctctcccttcccctggcttcccaagtcccgtcccgtctcctgggctggctgaccagtgaccagccctctcccacgtcgcacgcctgtggctcctgacctttccaccaccggagttaatgcctccgcctctccgtcagcgccgcctggcctcgccgtctcgctgtgcgcggcgtgggtggtagcagtaccacgcgtggtggttgattgagccattggatgggcggaattgccgttggcgaggtgaggcgtggagactgagggggagctgttgtggcgcgtgtctccctgtcgctcacagcttctttttattcactccgcgcccggttccgttccggggaatgggttctgcggaaggattctgagccgcggagtcgggggagggaggaggcgcgacgctggtgcggccgctgctgcctcgatctcttgccgcctgggctctcgtacgtacgtcctcgtagtcgtcgccgcggcgcaatttggcggcgtgcgcgttccttgcctagattggtgcgatccaatttctgagaggcgtagaggtgcggcgccacagaacacgagcgcgcgcgcctggtgcttgctgaggagtagatatgataagcaagaagatttccaagttttgttgagcaagaaagatcctggagaacaacctcagcacaaggattacctgtggatggctcactggaccaaagcaagcagcgctgcagaaccccgaaacaatgacagcaatcctttggaggataccaacaatggcactactacgaaagatagcgagaccttgccttatgaattcatgaaatctacagttgctgaaaggctcatggtaggagtacgccatggaagtgcctccatgcagcatgtccgacaattcaagtctagtatgcggggtatgccacgactttccaatgaattgggaccaaagaatagtgaacaggttgatgagtcttttgaaaaatctttgaaaaacgatgctatgaacttgagaactaggcaagttgtgtcagaaacatattctattcacaagctttcagagttaccgttggattttcagaaccttgggagctcagatgatccaagtccagattggagccactttccaatgttcgaaattaatcaaaagattgacagtattgtcaaccgtaaacgaaggtctccacctctggatctaaatgtgtctgcatcccatgtgatggccctatcgtcacaagaatacatgatgcactcacatcaaacagctgatgagaacatggatacgtgcaaacctgcagaaggctttgcatctcgtgtagaagatcatgctggcttcaattcagatcctccagggccaaagttaaaagggcaattgttggataccatgtcatgttcttgcagcaaggatgacaacaactcagcagattgtccaatagatgagcagcacacaagccactattttgcaaactcaaagcatgaactaccctctgtatctaacaaaaagaagttcaagtttgcaggaaacaaccacaatcgaattgttgcaagtgcgtcccacgatctgaagacaaaaagatctgctgtccataaacaacaaagtgctgcagaggcagtgttctgtgcaccagtacttgatagtgagtttcagaatgaacctataactatttccaacatcgacaagaaggatggtgaaaattttcatgatatgtataaatgtcttggcaaggctgtttcatgtcctttgttaccttatgagcatcgtcatctgaatacacagagaacggaatctgcagaaaatttgaaagtctgcacgcttcctgatcatcaaactgcaaataaattgacagaaaagagtcatggtgagctgctgacatatggaccaaagtcaaaggaaatgtatacaggttcttgtaaccaaagaaggaaaatctagcgactttggagtttgtatgtatggcaccaatattggcagtcagttattcagagcacagaatcaatcttcagctaagactgaaacattgcacagcgatactctcattgggtccaaatccccagcaggcatcgcttcattgtcggcacaaaaggactatggttgcacggacgaagcaaaaagtgagcagctcgtagctccgtccaggagaggagattcaggatacggtaaagaagatggatttcataatgtcaatgaaggtcatgatgtttggtccaaagcaactattggtagtaagcaatcatgcatgcccggaacgggaatcacgaacctagatctgatactttcccagatgagcagaatgagaaatcaaatttccattggtagaattcaaccaccaataggtgccgagccaagtgacagatggctcaagcgcctacagcctgacataccagatcctgacatccctggttccaggaggccaaacgttggaggcagccctccactcaggcaaagaaatcgttcgtttgacatggcacttccttgcaacaggactgacactggaacaactgactgtgttatggaggaccagagcttggataaagtggaaaaaacgcaagaaaagcaagaaagtaccccaattccagcgaagagcgtgaatagctggataggaagatggtgccagggaggcactcctgttttccatgaaggcccaggccagggaaggcaagcaacaaagcctggccggccatctgaagaactcgaaggtcggttcccaagcattgcagcgatggcgatgatggggcgagcgatgaacaagcttcggccgtgcgagcatcagaagatggggccacttgtggtgtggaagacagattgacctcatatatatatgtttttgggtgtaatatagtggtttctttccaaaaaaagaaaaaaaaatgaaaagcaacagtgaattttgcctggtttattgtttatggtgtaataaaccatatgatggctcatggtttattgttttctgaagtgaaagtagctaggtgtagtggatactggtgatgtaatggtctggtctcatataccaacaatataataatattttactgtttac

SEQ ID NO: 5999 - DNA, 3405 bp, Zea Mays
catgttcctcctctcccttcccctggcttcccaagtcccgtcccgtctcctgggctggctgaccagtgaccagccctctcccacgtcgcacgcctgtggctcctgacctttccaccaccggagttaatgcctccgcctctccgtcagcgccgcctggcctcgccgtctcgctgtgcgcggcgtgggtggtagcagtaccacgcgtggtggttgattgagccattggatgggcggaattgccgttggcgaggtgaggcgtggagactgagggggagctgttgtggcgcgtgtctccctgtcgctcacagcttctttttattcactccgcgcccggttccgttccggggaatgggttctgcggaaggattctgagccgcggagtcgggggagggaggaggcgcgacgctggtgcggccgctgctgcctcgatctcttgccgcctgggctctcgtacgtacgtcctcgtagtcgtcgccgcggcgcaatttggcggcgtgcgcgttccttgcctagattggtgcgatccaatttctgagaggcgtagaggtgcggcgccacagaacacgagcgcgcgcgcctggtgcttgctgagaagcatctgcaaccgtcattccaggctcacgaggaaactcatttactcgaatcatgtcggactttgtcaggagtagatatgataagcaagaagatttccaagttttgttgagcaagaaagatcctggagaacaacctcagcacaaggattacctgtggatggctcactggaccaaagcaagcagcgctgcagaaccccgaaacaatgacagcaatcctttggaggataccaacaatggcactactacgaaagatagcgagaccttgccttatgaattcatgaaatctacagttgctgaaaggctcatggtaggagtacgccatggaagtgcctccatgcagcatgtccgacaattcaagtctagtatgcggggtatgccacgactttccaatgaattgggaccaaagaatagtgaacaggttgatgagtcttttgaaaaatctttgaaaaacgatgctatgaacttgagaactaggcaagttgtgtcagaaacatattctattcacaagctttcagagttaccgttggattttcagaaccttgggagctcagatgatccaagtccagattggagccactttccaatgttcgaaattaatcaaaagattgacagtattgtcaaccgtaaacgaaggtctccacctctggatctaaatgtgtctgcatcccatgtgatggccctatcgtcacaagaatacatgatgcactcacatcaaacagctgatgagaacatggatacgtgcaaacctgcagaaggctttgcatctcgtgtagaagatcatgctggcttcaattcagatcctccagggccaaagttaaaagggcaattgttggataccatgtcatgttcttgcagcaaggatgacaacaactcagcagattgtccaatagatgagcagcacacaagccactattttgcaaactcaaagcatgaactaccctctgtatctaacaaaaagaagttcaagtttgcaggaaacaaccacaatcgaattgttgcaagtgcgtcccacgatctgaagacaaaaagatctgctgtccataaacaacaaagtgctgcagaggcagtgttctgtgcaccagtacttgataaaaatttgaaagtctgcacgcttcctgatcatcaaactgcaaataaattgacagaaaagagtcatggtgagctgctgacatatggaccaaagtcaaaggaaatgtatacaggttcttgtaaccaaagaaggtcttatttctttgaaaagttaacgattccttccaaatcacaaagtacatatcctaaaaattctgcgtcttcaggaaaatctagcgactttggagtttgtatgtatggcaccaatattggcagtcagttattcagagcacagaatcaatcttcagctaagactgaaacattgcacagcgatactctcattgggtccaaatccccagcaggcatcgcttcattgtcggcacaaaaggtatcagtgtaccataatctgcagcaatcttatctcctgtcttgtgcataaagagtgttcctggactacttatattgctcgatactaaaaactaaacagcagcatatggtttggaactgtttttctattgtttggatggttttgaaagaaaaaaatcctgaaaagacttataaattttattgtcagaactgcattttgatgcatgggtttttagtgttagtagatctttcgtgtttacgctctttagttaaaatcttggaattttatcatatttaggttggtttggatatatgttcactggtttcacatgataattatttcaagctctgctcatagttatggacccgtatcagttgatagatctatgtactgattctttcattaccaataaatgtactacaggactatggttgcacggacgaagcaaaaagtgagcagctcgtagctccgtccaggagaggagattcaggatacggtaaagaagatggatttcataatgtcaatgaaggtcatgatgtttggtccaaagcaactattggtagtaagcaatcatgcatgcccggaacgggaatcacgaacctagatctgatactttcccagatgagcagaatgagaaatcaaatttccattggtagaattcaaccaccaataggtgccgagccaagtgacagatggctcaagcgcctacagcctgacataccagatcctgacatccctggttccaggaggccaaacgttggaggcagccctccactcaggcaaagaaatcgttcgtttgacatggcacttccttgcaacaggactgacactggaacaactgactgtgttatggaggaccagagcttggataaagtggaaaaaacgcaagaaaagcaagaaagtaccccaattccagcgaagagcgtgaatagctggataggaagatggtgccagggaggcactcctgttttccatgaaggcccaggccagggaaggcaagcaacaaagcctggccggccatctgaagaactcgaaggtcggttcccaagcattgcagcgatggcgatgatggggcgagcgatgaacaagcttcggccgtgcgagcatcagaagatggggccacttgtggtgtggaagacagattgacctcatatatatatgtttttgggtgtaatatagtggtttctttccaaaaaaagaaaaaaaaatgaaaagcaacagtgaattttgcctggtttattgtttatggtgtaataaaccatatgatggctcatggtttattgttttctgaagtgaaagtagctaggtgtagtggatactggtgatgtaatggtctggtctcatataccaacaatataataatattttactgtttac

SEQ ID NO: 6000 - DNA, 5546 bp, Zea Mays
gatcgatcgagctccaagaaagaatcgtagatagatagagtgcgccagcaggcactagcactagagtccagagcagacgaggcgactagcaaagaaacagaggggagggagagggacagcggcgggcgtgcgcatgtgagcggggagacaccggtggtgccgatgagctgtgcgtgggagggcaagcagtagcagtacaggcggctcgtcctcctcctcctccgtgctactaccatacaccatcccagtcgctccccgggcctcgccaggcaggcgcctgccccacacggccacgcccacccaccaggagccaaagccccacacgggacgggcggggacacgggcagcgaagcgcgccgcgcaggcgcaacgcaacaaagggaaaccccagccggaggagcaaaagctagcaagcgtgtccctccccctccctcactcccgtttcattccattcccccccagacgccgctaccgccgccgccgcacgcacgcttgccccgggatctggagatctggtagcgccagggggatggaggccagcgccgggctggtcgccggctcgcacaaccggaacgagctcgtcgtcatccgccgcgatggcgagccagggccgaagcccatggaccagcggaacggccaggtgtgccagatttgcggcgacgacgtggggcgcaaccccgacggggagccgttcgtggcctgcaacgagtgcgccttccccatctgccgggactgctacgagtacgagcgccgcgagggcacgcagaactgcccccagtgcaagacccgcttcaagcgcctcaaggggtgcgcgcgcgtgcccggggacgaggaggaggacggcgtcgacgacctggagaacgagttcaactggagcgacaagcacgactcccagtacctcgccgagtccatgctccacgcccacatgagctacggccgcggcgccgacctcgacggcgtgccgcagccattccaccccatccccaatgttcccctcctcaccaacggacagatggtcgatgacatcccgccggaccagcacgcccttgtgccctcgttcgtgggtggcggggggaagaggattcaccctctcccgtacgcggatcccaaccttcctgtgcaaccgaggtctatggacccttccaaggatctcgccgcatatggctacgggagcgtagcatggaaggagaggatggagagctggaagcagaagcaggagaggatgcaccagacgaggaacgatggcggcggcgatgatggtgatgatgcagatctaccactaatggatgaagctagacagccattgtccagaaagatcccgcttccttcaagccaaatcaacccctataggatgattataataattcggctagtggttttgtgtttcttcttccactaccgagtgatgcatccggtgcctgatgcatttgctttatggctcatatctgtgatctgtgaaatttggtttgccatgtcttggattcttgaccagtttccaaagtggtttcctatcgagagggaaacctatcttgaccggctgagtttaaggtttgacaaggaagggcatccttctcaactcgcccctgtcgatttctttgtcagtacggttgatcccttgaaggaacctccattggtcactgctaatactgttctatctatcctttcggtggattatccagttgataaggtttcatgctacgtttctgatgatggtgctgccatgctgacatttgaagcattgtctgaaacatctgaatttgcaaagaaatgggttcctttctgcaaaagatatagccttgagcctcgtgctccagagtggtacttccaacagaagatagactacctgaaagacaaggtggcgccaaactttgttagagaacggagagcaatgaagagagagtatgaggaattcaaggtcagaatcaatgccttggttgctaaagcccaaaaggttcctgaggaaggatggacaatgcaggatggaactccatggcccggaaataatgtccgtgatcatcctggaatgattcaggttttccttggtcaaagtggtggccatgatgtggaaggaaatgagctgcctcgattggtttatgtttcaagagaaaaacggccaggctacaaccatcacaagaaggctggtgctatgaatgcattggtccgagtctctgctgtactaactaatgctccttatttgctgaacttggattgtgatcactatatcaataatatttcctcaaagatttgatgggattgatcgccatgatcgatatgctaacagaaatgttgtctttttcgatatcaacatgaaaggtttggatggtatccagggcccaatttatgtgggtactggatgtgtcttcagaaggcaggcattatatggctacgatgctcccaaaacaaagaagccaccatcaagaacttgcaactgctggccaaagtggtgcatttgctgttgctgttttggtaacaggaagaccaagaagaagaccaagacctctaaacctaaatttgagaagataaagaaactttttaagaaaaaggaaaatcaagcccctgcatatgctcttggtgaaattgatgaagctgctccaggagctgaaaatgaaaaggctagtattgtaaatcaacagaagttggaaaagaaatttggccagtcttcagtttttgttgcatccacacttcttgagaatggtggaaccctgaagagtgccagtccagcttctcttctgaaggaagctatacatgtcatcagctgtggatatgaagacaaaacaggctggggaaaagatattggttggatttatggatcagtcacagaagatattcttactgggtttaagatgcactgccatggttggcggtcaatttactgcatacctaaacgggccgccttcaaaggttccgcacctctcaatctttccgatcgtcttcaccaggttcttcggtgggctcttggttcaattgaaattttcttcagcaaccactgccctctctggtatgggtatggtggtggactaaagttcctggaaaggttttcgtacattaactccatcgtatacccttggacatctatcccgctcttggcctattgcacattgcctgccatctgcttgctgacagggaaatttatcacgccagagcttaacaatgttgccagcctgtggttcatgtcacttttcatctgcatttttgctacgagcatcctggaaatgagatggagtggtgtaggcatcgatgactggtggagaaacgagcagttttgggtcattggaggcgtgtcttcacatctctttgctgtgttccagggactcctcaaggtcatagctggtgtagacacgagcttcactgtgacatccaagggcggagacgacgaggagttctcagagctgtacacattcaaatggacgacccttctgatacctccgacaaccctgctcctactgaacttcattggagtggtagctggcatctccaatgcgatcaacaacggatatgaatcatggggccccctgttcgggaagctcttctttgcattttgggtgatcgtccatctttacccgttcctcaagggtctggttgggaggcagaacaggacgccaacgattgtcattgtctggtccatcctcctggcttcgatcttctcgctgctttgggtccggatcgacccgttccttgcgaaggatgatggtcccctgttggaggagtgtggtctggattgcaactaggaggtcagcacgtggacttccccgtcagtgtgtggtcgaagaagtatttttgcagatgttttgtgcccatatttcttttttcaatttttgtccctctgtagatagaaacaaggggagaaggggaaaaaaagtacttgtatttcttttgttccatggtggtggtggtggtgggcggctcagcctcgtgagtgcagtattgggcaaaccggaggctgcggcaaccttgtgcagttcggccacgaatatactagggaagatcgcgaccaatcaatcaatcgatgaccgagttcaattgttcagcattctttattagttttggtgggtggatacttcaatcggtgagccgaacagacagttgttttgagtatgaattgctctgcatctgcaaagttgttgtttgtcatccgtcgtctcaatgaggcgagggtggaactggaatagatggtgctgtctggaacaggggaagcgcattgtttgtttgttttgtttattgttagcatctctgcactctattgcccacttcccccctcatcggtgttttttattgttgcatatcaattttgtggctcaaatgcccctttgaaacatatagcaccaaaattatcctaattaattaattggtttctaactggctactctatttgcaacaatggggatatataaccttaccatgtctgtttatcacagtgcatcttagattgcatcgtattgtaattgttttagttccttgacatactgtttgtgcaacaggaactgcttgatgtacttacggttgggtatctgtgtagctgtagctgccaagttgcctaaagaaaagttcccgacctttcacatgctgccacattgccacaataccttaagagcttttctatacttctatgatttgtgttttcgagatctgagttatttaaatgttgtctgctattttgaatttttatatgaagatcaaagttctcaattgataaagtaattaatataacaagcgaacaacacatagacaaactaattaatgtagcatatagacgaataaggaatcctgaaacattgaccgtgaagaaaattattgtgcacatatgcactctttctccaaaatttggcatttaatcttattgcaacatacttgtacagaggggcgagggttgttcagtgctttgacatgtgtgcaactattcaagcacaatggttagatgatatccccattcattttagattattacattgtggtgttcggcttcttcagtcaagcagcaatcatgcaacatgccttactgtagttttttatcactgcacatgttgctggacaaatttatggactggaggattatagaggactaacaagtgctactgggagattctcgagcaccattgaactaagagattccaaatagttctttggagtctattgttgatgttggcggggataatctagcagagatttgtcagattttttgtgcaacacggaggctacatgaggcagcaacgatcccattcttctcgcatgccactttacacaagctaaggatagcttctggtctcactcatggttgtggcagggaaagccgagtcagtagggtttgtcatgtagctggagttatctcagaccacatattagatgcagtgatgatgttaatggaggatgtttacatttaccgtgcaagcaagatgacttatattatgccttaggacaataagtattgttttcactctaatgaaatacttggtaaaaagttgtctctgtagttgtatatttgactgtgaatatttgaacccactgttacaattgttgctaattgaggtcagatttcagaggccaaataa

SEQ ID NO: 6001 - DNA, 2132 bp, Zea Mays
gagtctttgtcccatccaacatctcgatccatcccagcatcatccccacaattgaggcgattgaagcagaaaaaatcagtcgccgtagcagcgccgcctccgccgccgtggggaggtagcatctaggcccattccgccgcctccatctccggccagcaatggcttcggcggtggagcggcggagggaggagcacgcgcggagatcgcgttccccagcacggggcagggagcggaggggaacgccgccacgcaggcggagttccccagagcggaggaagggttcgcctgctagggcacggtctcctgctgcgaagtcaagtgcgtcgcatagggacagggagaggtcgcctccgagggagaaggtgaaggagcgtgtcaggtcgccagagtctcctgctaaggtcagcctgttgcacaaggggagagagaggtcgtctcccagggagaaggcgaaggaccagcgggtcaggtcgccgaaacgtaagcaggagcagtcacgatcaccctcacctgctaggcgacacttctctaggtcgccctcgccgcgctccaagaggacgaggggagcgcagggtgagcgggaggcggtgcagtttactggcagtgatcgccggaaggcaagtcacagggaggagcaggatacactgaggcacagggagcatgatgaggggagggatgcttcaagagacaggaaagtggatcgggaggcagtgcatgtaacaaatggtgatcgccgcaagccctctcatggggaagagagggactcatggggcaagcacagggaacatgatgaagggagggttgcatcgatagataggaagtcggatcgagaggataccagaggtactgcaaaagataagaaatatgttcgtgatgatgagaaggatcattctagggagaggggggctgggagggatgataagtatggtgcttcaaaggtggcattgccggtctgggatgatgatagacatggaaggcctaatcggggtgactggaaatctgcttcttcaagggagcaaaggctggactctggtgacagaagggattcaacaagagtgaaaccaacagatcatgatgggagcaatgggggatcgggaaggtctttcaggcatggtcgttcaatgtctccagaagagcacaggcatcggggcaggcatgaatctcatccatcatcgagagtgtccagaagtgcagcacatatcgaggatattaactcgagaggaggtgaagcatcccggaatggagatcctgatgctttggcaacaatgaacgcaactgcagaagctcttgaagcaaaagaaaagcaaaagccatcgtttgaattgtctggaaagcttgctgaggagaccaacagagttgcaggtgtaaatctattatattcagaacccccagaggctcgaaagtcagagattagatggaggctctatgtatttaaagatggtgaaccactgaatgagaaaggaaagttgcagatgtccccacagatcatccctcctgcagcaagcaacatgcagttcttcaatacagacttgtggagaaggagcaactagatggcatgatgacaaagaaaataaggccttatctgatggatcttgatagtacaaatggaactttcatcaatggaaatcgcattgagcctcggcgatattatgagttatttgaaaaggacacaatcaagtttggcaatagtagccgggagtatgttttgctccacgaaaattcaacagaatgagttttgagaaaattcaacagaatgaggattgaaacaatcagccttttatgctgtagaagaaaaatacagcaaaaacatgaggttttgcatgttttaaaatttttagactggagattggccggcttgaacttctggtctgtgatttcttcacgtgttcaagtctataaggatattttgtgaaccaacatgtagtgctattgtaatgaaaagagctagctgcctgtagcagatagccctggggtattgtttgtattcaagcatgttttgcaccgctggcattcacatcattcggtatcggaggcagctgtttatggatcaatgccatagtaatcttaatgagttaatcatggatttactagttcgataatttaaactttatcacagatgtgtccacctttca

SEQ ID NO: 6002 - DNA, 2190 bp, Zea Mays
gagtctttgtcccatccaacatctcgatccatcccagcatcatccccacaattgaggcgattgaagcagaaaaaatcagtcgccgtagcagcgccgcctccgccgccgtggggaggtagcatctaggcccattccgccgcctccatctccggccagcaatggcttcggcggtggagcggcggagggaggagcacgcgcggagatcgcgttccccagcacggggcagggagcggaggggaacgccgccacgcaggcggagttccccagagcggaggaagggttcgcctgctagggcacggtctcctgctgcgaagtcaagtgcgtcgcatagggacagggagaggtcgcctccgagggagaaggtgaaggagcgtgtcaggtcgccagagtctcctgctaaggtcagcctgttgcacaaggggagagagaggtcgtctcccagggagaaggcgaaggaccagcgggtcaggtcgccgaaacgtaagcaggagcagtcacgatcaccctcacctgctaggcgacacttctctaggtcgccctcgccgcgctccaagaggacgaggggagcgcagggtgagcgggaggcggtgcagtttactggcagtgatcgccggaaggcaagtcacagggaggagcaggatacactgaggcacagggagcatgatgaggggagggatgcttcaagagacaggaaagtggatcgggaggcagtgcatgtaacaaatggtgatcgccgcaagccctctcatggggaagagagggactcatggggcaagcacagggaacatgatgaagggagggttgcatcgatagataggaagtcggatcgagaggataccagaggtactgcaaaagataagaaatatgttcgtgatgatgagaaggatcattctagggagaggggggctgggagggatgataagtatggtgcttcaaaggtggcattgccggtctgggatgatgatagacatggaaggcctaatcggggtgactggaaatctgcttcttcaagggagcaaaggctggactctggtgacagaagggattcaacaagagtgaaaccaacagatcatgatgggagcaatgggggatcgggaaggtctttcaggcatggtcgttcaatgtctccagaagagcacaggcatcggggcaggcatgaatctcatccatcatcgagagtgtccagaagtgcagcacatatcgaggatattaactcgagaggaggtgaagcatcccggaatggagatcctgatgctttggcaacaatgaacgcaactgcagaagctcttgaagcaaaagaaaagcaaaagccatcgtttgaattgtctggaaagcttgctgaggagaccaacagagttgcaggtgtaaatctattatattcagaacccccagaggctcgaaagtcagagattagatggaggctctatgtatttaaagatggtgaaccactgaatgaaccactgtatgttcatcggatgacctgctacctttttggaagagaaaggaaagttgcagatgtccccacagatcatccctcctgcagcaagcaacatgcagttcttcaatacagttcattgtttttcagacttgtggagaaggagcaactagatggcatgatgacaaagaaaataaggccttatctgatggatcttgatagtacaaatggaactttcatcaatggaaatcgcattgagcctcggcgatattatgagttatttgaaaaggacacaatcaagtttggcaatagtagccgggagtatgttttgctccacgaaaattcaacagaatgagttttgagaaaattcaacagaatgaggattgaaacaatcagccttttatgctgtagaagaaaaatacagcaaaaacatgaggttttgcatgttttaaaatttttagactggagattggccggcttgaacttctggtctgtgatttcttcacgtgttcaagtctataaggatattttgtgaaccaacatgtagtgctattgtaatgaaaagagctagctgcctgtagcagatagccctggggtattgtttgtattcaagcatgttttgcaccgctggcattcacatcattcggtatcggaggcagctgtttatggatcaatgccatagtaatcttaatgagttaatcatggatttactagttcgataatttaaactttatcacagatgtgtccacctttca

SEQ ID NO: 6003 - DNA, 4051 bp, Zea Mays
cttgggcattgcttacatgatttggtagccaaaaatatgctggtattacattccaatcatagctgccaacacttaaggttcaatgtcttggcacaaaatctaagctgagtggtgtcagatcattgagggacatggctcctcgtcttgatgaccgtagtccaacgccaaccaatgacgagctggacaacaggtcagattgctctgatggtatgttcaacaagggtgttcattcttcatctgaaaatcatctgggtggaacttatcaagatgaatctggaaacatggaaacaggtttctcagcatcagggtcccatcggagttctaattctggagatagtactgcagatagaacaaacttctctcctagagtcaactctaatggagggctttttgtgggaaggcaggattctgctagttcctatgctagttatgttagtgccggcggtggtgatgatgggcttagatccaacaattcatcttttagttctcggacttcaggcccaaatttgctgcaagggagtactccaaaaacattttcgaatgacctttctcagttatctatgggggcgtctgactcatccaaagattttcttgaagctgctgaagaaacaattgaggagctccgtgacgaggcaaaaatgtgggaacgccactctcgcaagttgaaggctgatctagagatgctgaaaaaggagtgttctgaaaaatcaaagcaacatgctgaactagcagttgagctgtctgctgcacaagctgaacgggattcatataggcatgaaatagaagaattaaagtcatccttacaagatgtaaacacacgacagacaattacaggaacacctaaacgttcagactggatagacctgcagaaggaacttgaaggtgaggtgaagtttcttaaagaatcgaatacagacttaaccatacaactaaacaggactcaagagtcaaatatagagcttctttctattcttcaggaactggaggaaaccattgaagaacagagagttgaaatatctaagatttcaaaggtcaagcagactgcttatcctgagaatgggctgttagtaaaaaaagacagagagtgggctaagaaactgtcaatgaaagaggatgaaatcacaattccgagggagaaatcggatcgtgctctcaacattggaaatgcagatggtgcagcttccaatgccatttatcttgatttggagaaagaaaatgaaattttaagggctaaaatacaagagcttgagaaggactgctctgaactaacagatgaaaatttggagcttatatataagctgaaagaaaatggtctgacaaaaggtcaggttcctcatattgcaaacaacaatgagctgcaattcaaaaagcttacatcccggattcatcaactggaggaggatcttaggaataaggaaatgttaagagatgacagtttttctgagtcatcaatgtctaatgcagatgagatacagagaaaatgtgctgaccttgagctgaaggtgctaaattttaggtctcaaacctgtgagctagaagaaaagttccgaaaatgccaagaggagctggaacaaagaaatcttgagttatctgcgctgagaagaaagataaatggtttacattctaatgaactggaagtttgtgaatctggtgcgacatggaagtaccaagctagaatagcagatctagaggatactgaacctgagacagatacacttaaggctaggtttgaactgcagctacaggaaaatgatgaccttcgtcgttccaaggttgagatgcagaattttatttctgagtttcaggcagagaagagtcagcttgaggaacgcctgtccgcgtcgcttaaagaaagcagcatcacatctaaatgtctggatgaagtgcggaaagatatccttgtgctttccagcagtatagattcccatgtttcaaccaataaacttcttgagaggaacttagttgagctagagagctgcaaagctgaactagagttgcatgtatcggagctggaacaggaaaacatcgagttgtcagaacggatatctggacttgaaacacaactgacttacgtgacaaatgaaaaggagtcaagcgagctgcagttgcatgactccagatctctcatcatcaatctcaaagataaagtagagtgtcagcaatcagagatggaaactcaaaggctccagtttaagcagaaacaacaagaatctcaaagaagattgtgcgaagcacaagatgattctgaagttctgagaagatctaattgtaaactacaatctacggttgagagtcttattgaagagtgcagttctcttcagaatctaattgctgatctgaaaaggcagaagttggaattacatggtcatcttacgcaaaaagagcaggaattggatgagtcgaaaaaaaagaactttgagtttagcaaaacagtggagttccttgaggcaaaacttttgtcactacagaaggacatttcttctaaagaacaatctttattgtcagaattggagaatattttccaggagcacatggaacaagaagaaagaattaatcgcgcacatttcatgctcaataagatcgagaaagaaaagactcttgaagtagagaatcttgaaagggaggtcgtcagcctcgctgcacaggtctcctccacacacgaggagcgagaaagtgccactctgaatgctattcaagaggtatctgtcctgcgagcagacaatgctaaacttgaggctaatctccaagatgttagtgaacagctgagatgttacgagtctcaattggaagaccttcgtaaggagtctaaaagtaaaattaaaggattggttgattcccttaatgcctccaaacaaagcgaggaaatgttgacatcagatgctgaacatatgaaaaagttgatggaagctgctaaatccaatgaagatgcactaaggaagacttctaacgaactagaactgaagcttaaatccagtgattatgtgaaacaacaaatgctggaagaaatatctggcctgaaacttcaggttcagaaaataatgaatcttcaagatgaggtttccaaacttcagagttctcttgatgaggccaagttcgaaaaagggaaacttgaggagtttgtgcgctcggtgactgaggaatgtcaagaactaaaagcacagaaggctatgctaacagataaagtttcttatatgcaggagaccttgagaaatggtgaagaagaaaaccgaaacagaatagctatgcatgcaaagctcatgaggttggagagtgatctaacagcattagaagcatcacatgtacatgaagcagaattaaagaacgaactcagtaggatcaagagatcaaacagtgagtatcagaggaagatacaatctctcgggcaggaaaatgaggatctcactaggcgagttcaaattatggaaaagggttttgagcgaatgtcccacgctaaagagaaccttggaaagcaggagattggaggagataaccaggaagccatccagtcaacaattcagttactggaaattaagcttgcagaggcattggaggaaaataagatatacagagctcaacagaagagttcgatgtctgaggggcaacctgctggtggagatggcaaggagggcaataccgacaggattttgcagttggaaggagagctgagagatatgaaggaacgattactcaacatgagcttgcagtacgcagaggtagaggctcagagggaacggttagtgatggagcttaaagctatcaagaaaggcaggtggttttagcaggatgcggagttgttgcctgacataaaacatgaggctgacaccacaggtgggcatcatcaagccgtgctatgctccagcaccagtgagactaagagcaagcaagtgcaagtgcagagtcagacagtgatatagcctggacgtgctaactggtgctggagcatgtgtctctcactgaagctccgtatgatgcggcttataccccccaactcagtctattgagctctattgcctatttcaactattagaggatctgtatgagtgaggaagag

SEQ ID NO: 6004 - DNA, 4483 bp, Zea Mays
atccgatacaaaagagaggccctgcgattaccacaaattcttctctcatatcttatctactggagtaatcgctttgctgcttgcctttcatctgctgatttgctctctcccgctaggccaaggccgctgctgatgtgatggcagacactcgtcatccaacctacattccttcacctttgctacatcaatgtccccgccatttcagacaggctcttcctttccatagtctccgtagacaatggaaaaacaattgcaaagtccactaaagtagcttctcgtagtggaatatgccagtggcccgacaccatcttggaacccatatggttctccaaggaccaagtctccaaagaatttcaagagtgccagtacaggattattgtttccctgggatcggcaaaatctggcattcttggggagattcttctaaatctctctaattttctgaatttggccgatccaaccgctatctctttgccactgaagagatgcaactctggaacagttttgcagcttaaggttcaatgtcttggcacaaaatctaagctgagtggtgtcagatcattgagggacatggctcctcgtcttgatgaccgtagtccaacgccaaccaatgacgagctggacaacaggtcagattgctctgatggtatgttcaacaagggtgttcattcttcatctgaaaatcatctgggtggaacttatcaagatgaatctggaaacatggtttctcagcatcagggtcccatcggagttctaattctggagatagtactgcagatagaacaaacttctctcctagagtcaactctaatggagggctttttgtgggaaggcaggattctgctagttcctatgctagttatgttagtgccggcggtggtgatgatgggcttagatccaacaattcatcttttagttctcggacttcaggcccaaatttgctgcaagggagtactccaaaaacattttcgaatgacctttctcagttatctatgggggcgtctgactcatccaaagattttcttgaagctgctgaagaaacaattgaggagctccgtgacgaggcaaaaatgtgggaacgccactctcgcaagttgaaggctgatctagagatgctgaaaaaggagtgttctgaaaaatcaaagcaacatgctgaactagcagttgagctgtctgctgcacaagctgaacgggattcatataggcatgaaatagaagaattaaagtcatccttacaagatgtaaacacacgacagacaattacaggaacacctaaacgttcagactggatagacctgcagaaggaacttgaaggtgaggtgaagtttcttaaagaatcgaatacagacttaaccatacaactaaacaggactcaagagtcaaatatagagcttctttctattcttcaggaactggaggaaaccattgaagaacagagagttgaaatatctaagatttcaaaggtcaagcagactgcttatcctgagaatgggctgttagtaaaaaaagacagagagtgggctaagaaactgtcaatgaaagaggatgaaatcacaattccgagggagaaatcggatcgtgctctcaacattggaaatgcagatggtgcagcttccaatgccatttatcttgatttggagaaagaaaatgaaattttaagggctaaaatacaagagcttgagaaggactgctctgaactaacagatgaaaatttggagcttatatataagctgaaagaaaatggtctgacaaaaggtcaggttcctcatattgcaaacaacaatgagctgcaattcaaaaagcttacatcccggattcatcaactggaggaggatcttaggaataaggaaatgttaagagatgacagtttttctgagtcatcaatgtctaatgcagatgagatacagagaaaatgtgctgaccttgagctgaaggtgctaaattttaggtctcaaacctgtgagctagaagaaaagttccgaaaatgccaagaggagctggaacaaagaaatcttgagttatctgcgctgagaagaaagataaatggtttacattctaatgaactggaagtttgtgaatctggtgcgacatggaagtaccaagctagaatagcagatctagaggatactgaacctgagacagatacacttaaggctaggtttgaactgcagctacaggaaaatgatgaccttcgtcgttccaaggttgagatgcagaattttatttctgagtttcaggcagagaagagtcagcttgaggaacgcctgtccgcgtcgcttaaagaaagcagcatcacatctaaatgtctggatgaagtgcggaaagatatccttgtgctttccagcagtatagattcccatgtttcaaccaataaacttcttgagaggaacttagttgagctagagagctgcaaagctgaactagagttgcatgtatcggagctggaacaggaaaacatcgagttgtcagaacggatatctggacttgaaacacaactgacttacgtgacaaatgaaaaggagtcaagcgagctgcagttgcatgactccagatctctcatcatcaatctcaaagataaagtagagtgtcagcaatcagagatggaaactcaaaggctccagtttaagcagaaacaacaagaatctcaaagaagattgtgcgaagcacaagatgattctgaagttctgagaagatctaattgtaaactacaatctacggttgagagtcttattgaagagtgcagttctcttcagaatctaattgctgatctgaaaaggcagaagttggaattacatggtcatcttacgcaaaaagagcaggaattggatgagtcgaaaaaaaagaactttgagtttagcaaaacagtggagttccttgaggcaaaacttttgtcactacagaaggacatttcttctaaagaacaatctttattgtcagaattggagaatattttccaggagcacatggaacaagaagaaagaattaatcgcgcacatttcatgctcaataagatcgagaaagaaaagactcttgaagtagagaatcttgaaagggaggtcgtcagcctcgctgcacaggtctcctccacacacgaggagcgagaaagtgccactctgaatgctattcaagaggtatctgtcctgcgagcagacaatgctaaacttgaggctaatctccaagatgttagtgaacagctgagatgttacgagtctcaattggaagaccttcgtaaggagtctaaaagtaaaattaaaggattggttgattcccttaatgcctccaaacaaagcgaggaaatgttgacatcagatgctgaacatatgaaaaagttgatggaagctgctaaatccaatgaagatgcactaaggaagacttctaacgaactagaactgaagcttaaatccagtgattatgtgaaacaacaaatgctggaagaaatatctggcctgaaacttcaggttcagaaaataatgaatcttcaagatgaggtttccaaacttcagagttctcttgatgaggccaagttcgaaaaagggaaacttgaggagtttgtgcgctcggtgactgaggaatgtcaagaactaaaagcacagaaggctatgctaacagataaagtttcttatatgcaggagaccttgagaaatggtgaagaagaaaaccgaaacagaatagctatgcatgcaaagctcatgaggttggagagtgatctaacagcattagaagcatcacatgtacatgaagcagaattaaagaacgaactcagtaggatcaagagatcaaacagtgagtatcagaggaagatacaatctctcgggcaggaaaatgaggatctcactaggcgagttcaaattatggaaaagggttttgagcgaatgtcccacgctaaagagaaccttggaaagcaggagattggaggagataaccaggaagccatccagtcaacaattcagttactggaaattaagcttgcagaggcattggaggaaaataagatatacagagctcaacagaagagttcgatgtctgaggggcaacctgctggtggagatggcaaggagggcaataccgacaggattttgcagttggaaggagagctgagagatatgaaggaacgattactcaacatgagcttgcagtacgcagaggtagaggctcagagggaacggttagtgatggagcttaaagctatcaagaaaggcaggtggttttagcaggatgcggagttgttgcctgacataaaacatgaggctgacaccacaggtgggcatcatcaagccgtgctatgctccagcaccagtgagactaagagcaagcaagtgcaagtgcagagtcagacagtgatatagcctggacgtgctaactggtgctggagcatgtgtctctcactgaagctccgtatgatgcggcttataccccccaactcagtctattgagctctattgcctatttcaactattagaggatctgtatgagtgaggaagag

SEQ ID NO: 6005 - DNA, 1640 bp, Zea Mays
tacatcttccttcccaatggtatctttggactgatggaatattaccgtatatgcacctcccagtggagccacctgccattataccagatagtagacctccaacttcgtggccgcaggagggaaggatagacctgcaagatttgaaggtaagatgtttgttttccacagtatcctagaagctttctaagaaattgactcgctgtcatgtactccatgagcagataagataccgtccaaatgcgccgcttgtcctcaaaggaatcacttgcacttttgctgctgggaacaagattggggttgtagggaggacaggaagtggaaaatcaacacttatcagctcattgttccgtctcgttgatccggcgggtgggaggatacttattgacaagttggatatttgctccattggccttaaggatctaagaactaaactaagtattatccctcaagaacctacacttttcaggggaaccgtgcgcaacaatttggatccccttggccagcattctgatgaagagatatgggaggccttggagaagtgtcaactgaagacagcaatcagcaccacctctgctcttctggatacagttgtgagtgatgatggcgataactggagtgctggacagcgtcagctcttctgtcttggcagagttctcctacgcaggaacaaaattctagttctagacgaggcaacagcatccatcgactctgcaacagatgcaatcctgcagaaagtaatcaggcagcagttctcaagttgcacggttataaccatagctcacagggtaccaactgtgacagacagtgacaaggtcatggtcctgtcctacggtatgttatacaagacatttttcgtcatgtagcatctgcagaaaagtccaattcattcctcggaatatcagtatgacagataaactatcaatgccttatatgatatattacaagtatatcaccaagcttactctatacgtgtatgtgtatatgtatgattcatgacgatgattttctaattgtgcagggaagcttctagaatatgaaacaccagccaagctgttggaagacaaacaatcagcatttgctaaacttgtggctgagtattgggctaataccaagagaaattcaacatgatctaccattattgcaggacatgataaaagatatgatcattttaatcaagatatcgaaagattcaagggttctcaaattgaatctttaacaagacaaggaatgccatcatgattatttgattgatgtggttactgggagtgaataagatatcaacagaaattcaattttggtaatggaagcaatttttggagtgagggctgatgttcgagagaactccagctggttgattgaacatgtggtattcaatgcaaaatgaaatggaggatccacttctagcatgatcaatggcatttttcatacataagcctttttgaataagagaagcgaagtaccaagtcgtgaattgcaatgaagaatgagtaaagtgcagtgctgagaagaataattttcatgtatcttgtgtactcaataatgataaactttatatgactgagaaggaaactgtcgcaaattgtcaaagtgattattcaatagattagggctaacccaacaggttagctatatagtgtttt

SEQ ID NO: 6006 - DNA, 1195 bp, Zea Mays
tcatatgcaggtccctgacattgaggattttatatacgaaaaggccaaaacattgacatcgtcaagtaaggcaacaacatctttggtcaaggtggagaaaaaggttggagtttcttcagttataaaagaaacccaaagtagtcatttgcgcagttggagctccagataactgggaggcagttcttggaggcattaaaagcatgaggttatctggtgaagcccccgtagatacgaagggctgtgaaaaagctggttctctccttccacccaaggaaagaagatttgcagttctgatatcaactatgatgtcaagccagacaaaagatgaagttacacatgctgctgtggaacgcctctctgaaaacggtttacttgatccggatgctatagtgaggactgatgagaccacgcttgcgaatcttatcaaacctgtcggattctatcagcgaaaggcgcagttcataaaagaagcttctaaaatttgtcttgagcgctttggaggggatattccggattctctgaatgaactgcttgctctgaggggagttggccctaaaatggctcatttggtgatgagcattgcttggaagaatactcaaggaatctgtgttgacactcatgtgcatcgcatttctaaccgacttgggtgggtttttcgggaagggacaagacagaaaactacgacaccagaacagacaagaatttctctagagaaatggctacccaaggatgagtgggaacctataaatccattactggttggatttgggcaaactatctgtactccactgaggcccaaatgcgataagtgtggcatcaacaacatttgcccttctgcttttaaggaatcatcaagcccaattccaaagcaaaagaaaacaaggtctccatagaactctgactgtgacttgtctggcaccgacgtgagataatattttgggttgtccgtcggtggtaaatattatggggtttccttttggtcagttattgttggatcaccttggtgccgtaccattggcatttggcaatggcaagtcatgtatatcattttgtataccggtaaattgttcaagacggtatgaagacacgcttgtctaccagttactgtaacaagcgaaattttcatgtgccaaatgacacatgattcatgaaaggtgggtgcaatgagaaaattctcttgcgtgcaccaaagtct

SEQ ID NO: 6007 - DNA, 846 bp, Zea Mays
ataatacttacaagatatacattaaagcagtgggagtcggaccagctggtggagtcttcgtacatcagggagctcggcgacgacctgagcatcatccacctcaagttcggcgacgcctcctcctccaccaggaggcccgcccggcgccgtgacctggtcgtctatgagcggcgccaggccatggacgacggcacgctggtggtcgcggtggcctcgctgcccaaggagatcgccgcggggctgctaccgccgcccgcggccaccggcaagggcggcggaggctccgtcgtcggccgcagcctgctgctgcagtccggctgggtcgtcgaaaggctcgacggcgacgccggctcctgcgtcgtcacctacgtcgtgcagctggacccggccgccgggtggctgccgcggtgcatcgtcagccggctcaacagcaagctcgtcatgatcatcgccaagctcaggaggatcgcgcaggccaccgtgcctgccgccgccgcagaggtgtgacgtgcatagctaccagcaagtgatcgaaatcgaactagcagcatcgggtcagctgcacgtttagttgcattgtgtgtgtgcctaagtaaatagatatatacgtactatatgtcttctttttgtagggacagagggcatgcgtctatcttgggatgcacccgcatctgtatacgtactgctacaagactatgtcagtgagaattactatgtgtgcacgttttagtgttatagaattcgcctacacgactgttgatctttagcgaccttaatttatttctaactgttggtataaagctctactcaaacagtccagttagcctttacacaggtggtttcaag

SEQ ID NO: 6008 - DNA, 1448 bp, Zea Mays
ctgacacctgtccatcgatgttcagttacaagaaacggtcgtcaaggaacagagcagcagcagtagcatgggagtactagcggaactagtgactagtgagcccacattttataacacggttgcgcatgatgcaccagaaagacagttaatacaatttttttttggggggagctgtacatgcatggttagtaatacagtagtaatccgtatataatagccgtagatgcgtgcgatgctggcatgcatgtgactgcatgcacgttgagagccacatgcatttgccgcccgttcccgtccagtccagacacaaagaaactagacacgttgtgttaattaagccaccaaactactagtttcaccaagcttaaagtcagtcgatcaaaacttatatactataataagtgaatggagttcgatgctgtctcggattactgacagtactttctctctgtctctctctttgaaccatgagctcacgtactctgaacttcgccgactctgattctgtgaaaatattttttaccagaattcagtggaactatatcgataatgcgaatgttcagtggcggagcacccgttatgaccaagtatgacttaagccatacctaaaaatcatgtttgatatagtgcagtgggagtcggaccagctggtggagtcttcgtacatcagggagctcggcgacgacctgagcatcatccacctcaagttcggcgacgcctcctcctccaccaggaggcccgcccggcgccgtgacctggtcgtctatgagcggcgccaggccatggacgacggcacgctggtggtcgcggtggcctcgctgcccaaggagatcgccgcggggctgctaccgccgcccgcggccaccggcaagggcggcggaggctccgtcgtcggccgcagcctgctgctgcagtccggctgggtcgtcgaaaggctcgacggcgacgccggctcctgcgtcgtcacctacgtcgtgcagctggacccggccgccgggtggctgccgcggtgcatcgtcagccggctcaacagcaagctcgtcatgatcatcgccaagctcaggaggatcgcgcaggccaccgtgcctgccgccgccgcagaggtgtgacgtgcatagctaccagcaagtgatcgaaatcgaactagcagcatcgggtcagctgcacgtttagttgcattgtgtgtgtgcctaagtaaatagatatatacgtactatatgtcttctttttgtagggacagagggcatgcgtctatcttgggatgcacccgcatctgtatacgtactgctacaagactatgtcagtgagaattactatgtgtgcacgttttagtgttatagaattcgcctacacgactgttgatctttagcgaccttaatttatttctaactgttggtataaagctctactcaaacagtccagttagcctttacacaggtggtttcaag

SEQ ID NO: 6009 - DNA, 2698 bp, Zea Mays
gaaaaaaagaagaagaagaagaaggaaagtacctttcggtaatggtggttccttccgacagcaggagttggggtccaaagcgctagctatattaaaatcagcgcagcgagccttcccttcccttcccttcccttccttccatcgcacgcggcacgcgtcttggtcttcgtcttcgtcctcgtcttctcccccaccccacggtccacgcctacctccttagtgcttggttggtatacataccaccatcagcacctcgctcttctgctcagctctccccctctagcctcacctgccctatacacagccactactgtcgatcgattgaatttgaacccaccaggatcaggattaggattacagcatgtcggcgtccccggagttgtacaggcccgcggaagcgccggccttctcgccgtcctgcgccacgcagccgctcgtgttcgccggcgacgactactgctgcaggacgccgacgggcagcgggatctgctacctgagggagcccaccacgtgcccgcccgcgccccggaagccgccgccgccgccgcccatgtgcaggaagcgcctcttccaagcggcggatcagcagcttgctgaggcgggccccgtccctgttatcagcatccgcctcgacgagctggagcgcctcttccgcccctgtccgccgccgaccaccaccaccaccgacaagcggcgccgctccggctccggccccagccccagatccgccacgaaacatggtgctcagctgcagctgcgcagcatgaattgaattgggttagcgtaacgtagcttgcacgcaccaaccaaccactccctttttagtttttgctgctgcatctgtctgcttcttgttgctgcaacaagcaaagcgcaagcggtggcgcttctttttatttatttatttatttattacggagtacttgcttccgttctcaaatatttgtcatttgatagttcatttcaaaaatttgacaaataaaaaagaacgacgaagcaagcagtacccacctgtgtaaatcaaatcaaatatgcaaagttaccgccatagcaataaaatcacccgtgtaaatcagatcaaaaataccaagttgttgtggtattacaaattgtggctttgaatgtgaatcgtctcgttatgcctttctcgaagaaacagacatccactatgttttttcagacaacaggctttctcaggtcagagcagcccccatttagaggagctcgcttcgtaccctgctggcaccgcctccagcaccaagttccagccgctgttcacgctagccaaccacttcttcgcgctgttctcccagtcgtgtgtcccgccggttcgattcctggtttggtttgattgcgcagtgttccaatttgatccgagttctgttattttttgtgtttcttccagcgaagacactcgacatcgaagctgaaggagagcaagtgggagaggcgccgtggggcaaggaggatgtagccatcgccgatggtataccggagttcctgaagaggtccatcctgctacagacatttggtgtacagggccatcacacatgtcaggaggtggagcatgtcgtgatcccacctcatgtgccgccggaggtggagcatgaactaccagagccagagaaggctcaaagagacatatttgccttctttcgaggcaaaatggaggtgcaccccaagaatattagtggccgcttctacagcaagaaggtgaggactgagcttctacaacattatggtcgcaaccgcaagttctaccttaagagaaagcggttcgacaactaccgatcagagatggctcggtcattgttctgtctatgtccgctgggatgggcgccttggagtcctcggctcgtggagtcagtcctcctaggctgcattcctgttataattgctgataacatacgtatgccgttcccttcagtcctccagtggccggagatctcattgcaggtggctgagaaggacgtagccaaccttgaggtggtgcttgaccatgttgtggcaaccaatttgagtgtgatacagaagaatctgtgggatccagtgaagcgaaaggctctggttttcaaccgtcccatggaagtgggagatgctacatggcaagtgttgagggagcttgaggttttgctggaccagtctcaaaggaggagatacggtggatcctggagggcgtgagaaaccagaaaagatcagttttgtataatctgttgcagctgtgcagttgacattgagtctgaggcttgagcctgagatccaccggaaactcaggttattgttctcatgccagagatcccaatctcagttagtcaatgggaatatgggatgctagctcaacctttattggcttgttgcccggttagtgcctaactagagatcccgctcttgtacgtatagagaaattttatttgttctttggagaactggtgggatgagtttgattttctagccatagaaagaaatgtattacaggctgcagcatattagtgtatatttctttttcctggttgcacacttgtatagttatttatatgtccgaaccttggacttaaataggaggaatgcttagaaaagagttatttatatgtccgaactttgactttagacttttattggattttaactctagcatatccaactcttttgggcatgcatatggtaggtcatgcctggagagttggctttgtcggagccg

SEQ ID NO: 6010 - DNA, 1964 bp, Zea Mays
tcgaaggttagtgttagctggctcatgatcttggagggccagggcctagctgttttttctttctttccaaaagctgttattagagtgcaggtcttccgacttccgtccatgctttattaccaatcacattcctggctgttatccatctcttgtgccagcacaatgatgctttgtcatatctagggagaagtgagtaaaagccatgagtgatgattatgcttctcttcttcttttccttcttaatgacgtactgccagtacgtacgtgctgttgtcagggaactttcattcgatggctactgatcttgcttcgagcgcagtctgccgcggacctggcctgggagatagccgtcctggaggagcaagtcgtccgcaaggagctgcacctgctgtccctgtacagagccgcgttcgaccagtacctcggcgtctcccctcgcgcgtctgctcaggaaccgcgccatgagcgcagcagcagaagggctactgctgctgacgacgaaggcgcccttcgcctgaggagcatcaaggagtctgcgtcctacagcctaccaacgctctccgattctaaacgcgtagagctctccaggtgctcctcagggcggtccagcctggccaacttcctgagcgcctcgatcgctgagtacgtgcctaagatctcgtgcaagctctcggaggacatactgcggtgcgtctccgccgtctactgcaagctcgcgagcaggccgctgtcgcaggaggaggaggaggcgaggtccgagacgccgccgttcacgccttctctctcggtctcgtccgcgtcgagctccttctccctcaagaagcagcaccccgtccgtggctggagccctcggtgctactacaacgccgacgcgactgcgaccccggacgcgtacgcttcgtccggcgggagcagtgggcggtacagtggggtgatggttttcccagggatacatgtagacgaggagaagtttgagtatgcctgcaaaatgctggacactatcaggtggtattttgtgacccagtagatcgctgatcaaacggctggagaagattgatcctagaaagatggcacatgaagagcagctctgtttctgggtcaacatccacaatgccttggttatgcatgctttcatggcctatggattacaggaaaaacggatgaaaagcactgacttgattctgaaggctgcatacaatgtgggtgggcattcagtgaactcccaaactatccagaactcgattctaggatgccagtcccaccgcccttcactgtgggttcggacactatttacgccgacgaaaaaatctgggagctccatacatccatatgcgcttcagtacgcagagccaattgcgcactttgcgctctcgaccggcgcgttttcagacccacctgtgaggctgtacacagccaagaaactgtaccatcagctggagcaagccagggccgagttcatccaagcaaatgtcatggtccggaggcagaccatcttcctgcccaaggttctccacttctatgcgaaggatgcttccctggagctacctgaccttgttgacatagtgtgcgagagcatgcctgagctgcagcgaaaagagatcaggcagtatcttaggaggaggatcgacaagtgtgttcagtggttgccctacaagtcttctttcaggtacactgtgcatagcagtttggctgagtaggcacttttttttcttctctatgtgcttgtaaataaggagccatgattctaagaacagtcgtctgttggggtgtgtgtgtgtatgtaaaactatattgtgacagttctttctttcttagaggaaaattacagcttatcttaaatcctctttgtgctttaccacactactacagatttgcagatttcagttgtaccaactattggaatagtaaaccctaaccctaggggttgggtgatgtattaataggctgagtaaactgagccaggc

SEQ ID NO: 6011 - DNA, 5062 bp, Zea Mays
ctcgggcgcgccatctcttctcggcacggcatgtggcgtgcaggtgtgcgggctgccatgctagcgcacaaatggcgttcgggcaccgtgtaccctggcccccactcgaaaaaggggaaacccgtcaggcctcgctcctcaccgtaggccgatagccaaccagccagacaacacgtggacacggcagcggcagcggcagcgccctccgacccccgccgggccaccaggcagaaaaggaacggaacggcgcagccgcggcggcggcggcggcggcggcggctgtaggttcccgcaccagcgactggcggacacgtatatccaatcatccatcttctctcgcacggccgcacccgtcctcggactcgttccgtctgctagcaatgccgctggcgctcgcgcagttgcaggacctgcgggaccgcatctccgaccgcctccgcccatggagccgctccgcgcagttctgggtccgcgccgcggacatctacaccagctacaaggtgtgccagctgcgggctgggtttgtgaaggatgaggacgagcgggaggccatgtgggagcagcagcacgagctcggcgcccagaagatgtattccctctgctccgagctcggcggtcttttcctcaaggctgctcaaattctggggaaacctgacctggcacctatggcttgggtgaagagacttgttacgctgtgtgacaaggccccagccacgccatttgatgtggttagagatgttgtggagaaacagttcatgaagaatttcgatgacatattcgaattcttcgatgttgagcctgttgggtctgcttctattgcacaggtgcatcgagcaaggcttaaattgtcaaatactgatgttgctgtcaaggttcaacatccaggagccgaacatctgatgatggttgatattcggaatatgcaagcaatggccttgtttctgcagaagtatgacataaacttcgatctattctctgccacgaaagagatggaaaagcagatatgctatgagtttgactttgtgcgcgaagcaagtgcaatggaaagaattcgagaattcctacgtatcaccaataagaaacctccggttatggtgccccgtgtgattcctgggatggttaccagagaggttttggtaatggaattcatcaaagggaccccaataatgaatcttggcaatgaaatggctagaaggggcatagatcctagcggtaagattgcagccatggcaaagcaggagtaaagatgacagcaccatgaaacgttccactgtatccagatttgttccactgtatgcagatttgtcagagtactgacctgaattcaacagttagcgctccagtaatgccagaaatccagttgtgagatcctcccgaacagtctgcttattagaccattttgtcactaaagagaacaattgaggtgcaaggtcagcactacattgtccgtggatgcacctgtcagtccaaaacaacgtggaggcaccattaccaacttctgagacctctgccatggagaggaaagcccgggcacagccatgaatttgaacagaggcaaccaatgacgatgaggttctgttttttgcaaccataactacctaaaatcctgagtacccatccaaggttttgttggttggaaatgcccaagctgcccagctcaggggcagcaacatactttagtctaagtcaccagagaccagagtaccagacaatgcccacttttgtgtttttacgtcctctccaaagaaagcaccacctgatcttatcaatggctttaagggcccatggtggaagttcaatggccattgccaagtagactagcattgaggtgaggacaaattggacaaagatacgttgaccagcatatggtaacaggccccttccatcctggaagcccatctgctatcttgtcaataatgggctagatttgagctttagatcattttttctctagagagacaggaatttcaaggaagattttgtcagatcttactcttgcatatggtcaaatgatcttgaaggatggctttttccatgcagatccacacccaggaaacatccttatctgtaaggatacagaggtggctttacttgattatggacaagtgaaagaaatgccagaagatttacggcttgcttatgcaaatcttgtagttgcaatggctgatgatgatttcttgagggctgaggaaagtttcagggagcttggtattcgaacatgggccatatctgacaacaagttagaagaattgtttcagttatccctgcgaatgtttgatacaagattaccaccaggtgtaactgttatgtcaccttttgctgatgattcttcgcttactaaaattggagtggagagtttcccagaagagctattttcagtgcttcgaacaatccagcttttgcgagggctgactgtagggatgggccttacattctcgtgcgctaagcattggagatcaatcgctgaggatgcattgttgaaagcaggaagacaaagcgcttcaaaatcaagaaagcaaaagagaagttttctcaggagactgttttggtgaagtagggataggggctatcaaagaacatgatatacggacattctgtgatgaaagtatgaaacggaattagccaacagctcaagccttcgattcttatattcacagtacatcagttcacaattcatttactttgggtgcttgttatttgactcaacgatgttgctcattcctttataacaatgtgttatttggattttagtatatgtttagggattgtatctgaagttgacttgtccacaggcccttccataatctaactgagccctcctacatttttagcccacatagaccaaaatcagaccaatccttctggatgtagcacatcagatttgtagaccaaaaatatcggcctgttagctgttaccaagcctacatggtgtacgctcaactaacacatggtaggagtgatgaactctgttggttatggctctataaaggtccaacaacctcaggtcctcctgtacccgatccacctataaccatcatgctcacacacctattgatgtggtggtgtcgttgctctatgatttccctaatgttgaccttctataggctatatggggctcatggtcatgtcgatcgcctaagtgatgtagcctcaatctattgtgcctgtgtgggaggtgcatccaaaccaatctggatggaaccaccattcctggctctcttatctcagaataactatcgcctccttttgatccagatcaaggcattttcacatcttgcactacactcaatcaccacctcattgcccttatctagcctaggtgaatgagatggctccttgaaatatcccttgtgggttttggtagtttggatgacaacccaattaaaggactaacatgtgtgttaagtattgaacaggtacttaatgcaaagcttgcagggttcaacataagtgttcaagtgtgatggtccaaaggctgagatgactatggataatggacaccacaagtaagatgaacattgcttaagtgatactcggtgtgcgtaacttggacaactggttaagctaagtatggaggcaagaagagtttcgaggtactgagagcacggggggaaggtcaaggaggctgaggtacccaaagctatgggtgaagaagaagactttcaaagtcaaggttgatcgagttgagaagagctatggtgcattgaggatcacaacttaagggcatgacttacaactaatagggtaatacctatggttatgtggtgtaagtcataaggctcaaaatcaagctcaagaagtgaacaaggtcactagaaggagtagtgtcatagccaaaacttggaaacaacccaagagagctaagttcattttgacttttagtttgggttgttcctatgtttggatatgttctatgtgacctttgcagggtgttggagctcatatatgtcaatctagatcaagccaagctgatttgatggtttggagtccaacatcgaccccaaactggccaaaataggtaaacgatgaaaaatgttaagtatgcaaggtttgagtgttcaactatgctgcaaacaccttttactacatgtttggtactttggtttgctctctaactctttctgtagagaaagtgtcatttcaggctctgtttgaggaaaaacagaaaagagaggagaataatgggaaagaggtaactttttaggactaagtcaattggattatactctaaatatgtttgtctaagtctcaggaaattcctccccaaagttgaagtcaaatggagaaggaatggagcaaaaaacacttagtatgttgctgattggtgcaccggaccatgaacagtaacatatccggtgcacatgccaatgaataggaacgtatcggatgcataggataatgaacagtaacctgtcggtacaaatagcccaatgaatagtaccatgttcggtgcaccggacagcccctccaacaactctctccaactgctactcgatgccaacggctagctggtacaccggatggtccggtggcgcacccgactatttggtgcccatcagcgtagatggaaggcgctaatcaaatcctagactagtggcacgtggacctcgtctggtggcgcatcggacggtccggtgcccctcccacagagagcagttttcaagcagtttccaaaaggtaggggcaatgtctatatgcactgttggggctataaaaggacccttgaggtgcccatattcattgtaccaaggctcccaagtgcagcaatactttgtaaactcattacaaatcattcccatctccctctcttgtgtattcctctctagtttgtgtgttggcgcagttataagccaaaagagagtagaggtgctgttgcaagttagagtgggcaagatcttgagcaagcgaaggtgttattctgccggagtgctgtcaagaagattgtaaacagtcgtggcgccgttgtaaccaacatcgacatagtggaagccttgatatgaggaaggagttgaaatagactccaagccaggttggctaactccaacatggactaggcaatcat

SEQ ID NO: 6012 - DNA, 1582 bp, Zea Mays
tgggctcggttgccccatgccccggtcagtttcacacggctgaagccagccggaacgtgttgaggaggggtgggggatagggttttttcgcaagccagcgaggcagcgaccgttttgtcaccgcaacacccccgccgactccctcgccgccgccaggaatggagtccagcgctaagaagcttagcagcctccgtatcacctcactggatggcgatgatgacgaaaccgaggacccgcatcagccccctccagcaggaccctccgccgctgcagcagattctgatgacgacgatgaagaggaagaagcggaagtgactcttggtgtccttagcaaaccgaaacacccaggcctccttctccgccacttgttccccagcaaggccggcggcatcccggcgtggctagaccccgtgaacttgccgtcggggaagtccagctgctgcggtttttgtggcgagcctttgcagtttgttcttcagatttatgcagcagttgaagacaatgtagcagccttccatcgaactctgttcatgttcatgtgcccatccatggcgtgcttgcttcgagatcaacatgaacaatggaagcacaagcatgggaatccatgtagaagcgtgaaggttttccggtgtcaattgccacggactaatgccttctactcagctcaacctccaaagcatgaccggtctgacaaaccactgtgtccaggagcccatgtatgccactggtgtggtacctggaaaggtgataaaatatgtagtagctgtaagaaagcaagatactgttctgagaaacatcaggcactgcattggcgtactggtcataaaaatgattgcctccagataataagttcttctgctgcttcaaattcagttttgccaactgttggaaaagttcctgctaacactttttggccagaatttgagataaaaatagactatgaaggtagatttgattccgatagtggtgatgagaataactcgaagttgttggtgatgcaaagacatgggaaacctgatgctatgatgcagtcatggatggatcaatttgaggctgattctgacaacaaatgctgggcatcttttcaagagcgggtctcaagagcaccaaatcaagtgttgaggtattgtcgagaaccaaatgctaaacctctctgggcgttatcttctgggtgtccatcaaatgctgatatcccatcatgtagctactgtaaaggtccattatgttatgaatttcaggtaatgccacaattgctatatttctttgttgtgggaaatcaaccagactcccttgactgggcaacaattgctgtctacacgtgtcaaggggcatgtgaccaaagtgttagctacaaagaggagtttgcttgggttcaattgtaccctacaacaactacgaggcaataataatgtttgcctattccttgctgtccaatgctgcaggtgtcaaaaagtttgcagaaagtcagaaacaattcagtaaatacccccgccagaagaattggaggttgggatgctcgaggcagtgagtaggagttgacaggaaccgtctgcaattgccaatatccacgtgcaattttgtc

SEQ ID NO: 6013 - DNA, 1783 bp, Zea Mays
tgggctcggttgccccatgccccggtcagtttcacacggctgaagccagccggaacgtgttgaggaggggtgggggatagggttttttcgcaagccagcgaggcagcgaccgttttgtcaccgcaacacccccgccgactccctcgccgccgccaggaatggagtccagcgctaagaagcttagcagcctccgtatcacctcactggatggcgatgatgacgaaaccgaggacccgcatcagccccctccagcaggaccctccgccgctgcagcagattctgatgacgacgatgaagaggaagaagcggaagtgactcttggtgtccttagcaaaccgaaacacccaggcctccttctccgccacttgttccccagcaaggccggcggcatcccggcgtggctagaccccgtgaacttgccgtcggggaagtccagctgctgcggtttttgtggcgagcctttgcagtttgttcttcagatttatgcagcagttgaagacaatgtagcagccttccatcgaactctgttcatgttcatgtgcccatccatggcgtgcttgcttcgagatcaacatgaacaatggaagcacaagcatgggaatccatgtagaagcgtgaaggttttccggtgtcaattgccacggactaatgccttctactcagctcaacctccaaagcatgaccggtctgacaaaccactgtgtccaggagcccatgtatgccactggtgtggtacctggaaaggtgataaaatatgtagtagctgtaagaaagcaagatactgttctgagaaacatcaggcactgcattggcgtactggtcataaaaatgattgcctccagataataagttcttctgctgcttcaaattcagttttgccaactgttggaaaagttcctgctaacactttttggccagaatttgagataaaaatagactatgaaggtagatttgattccgatagtggtgatgagaataactcgaagttgttggtgatgcaaagacatgggaaacctgatgctatgatgcagtcatggatggatcaatttgaggctgattctgacaacaaatgctgggcatcttttcaagagcgggtctcaagagcaccaaatcaagtgttgaggtattgtcgagaaccaaatgctaaacctctctgggcgttatcttctgggtgtccatcaaatgctgatatcccatcatgtagctactgtaaaggtccattatgttatgaatttcaggtaatgccacaattgctatatttctttgttgtgggaaatcaaccagactcccttgactgggcaacaattgctgtctacacgtgtcaaggggcatgtgaccaaagtgttagctacaaagaggagtttgcttgggttcaattgtaccctacaacaactacgaggcaataataatgtttgcctattccttgctgtccaatgctgcaggtgtcaaaaagtttgcagaaagtcagaaacaattcagtaaatacccccgccagaagaattggaggttgggatgctcgaggcagtgaggagttgacaggaaccgtctgcaagtacgtacctccttttggtactagagtttctgagatagggaggagtggcttcaatgtttccaggtctattggtcgtgaggagaccgtgggtcccagacacatggtcgttacatcgcctttggtccattttaggcactaccatagggcccatgtagatgtgatggctatagggggtgtttggtttctaaggactaatatttagtcccttcattttattccttttaagtttta

SEQ ID NO: 6014 - DNA, 3795 bp, Zea Mays
gcgggttgggccttcttgttcgcttgggtcttgtcttgttagccgaggaattgatttactaaggaatgccgagaaaccctaagactgcgtgtctcctctttgctagatctgtgactcccccgccatcgatgccaagtttgccccgttgccggcgtcacccctcccctcgacggtgaagctcatagcttccctccaccgccggtgtcgcttctcccccgccgaccaagccgtgcctgtcgccggcgtcgcccctcccccactagtgaaactcgcggtctctccaccgcacgcgcctcgtgtagttgtggctgcgtgcaccccctgtagccccggcgataggtcctactgctccatccggtttgcttccggcaacaagatcaacaacaagcgagcgagctgtgatctctggaggtgctcttcctactctttctggtattttgatggtggcttgatggccagtaatatgcagtcttctgggctgcctcagcctccaagacctcccatgatgggttctagcgctcagccacaaaatcttggaccaccaatgcctatgcagtttaggccagtgatgccttcgcagcatcctcctcagttcatgccaccagcagcacagcagttccgtcctgttggtgagcctatggcgggggctaacgttggcatgccagggcaaatgccacattttccacaacctgggcagcacttgcctcactcaaatcaagttccacctgtatcacaaggggttcccatggtatatcagccagctagaccaatgtcatcagcacctatgcaacaacagcaacaaactgcgtatgctgggggccatttgcccaccatgggtgctcctatgcaacccctgacctatacatatcaaccaacatcgatccctcctgtagcgcaaccctggagtacaggcccaggacagagtgtacatcatgtgcctcctctagtgccgtctgggcaccagccggtgtcagctccaacgactttgcctcctgtcaacttgtctgaacctagctcttcagactggcaggaacacactgcagccgagggaaaaaagtactactataataagaagacaaggcaatcaagttgggagaaaccagttgagttgatgacacctttggagagggctgatgcctcaactgaatggaaagaatttactacaccagaaggacggaagtactatttcaacaaagtgaccaagcaatcaaaatggactattcctgacgagttaaaggttgcacgtgaattggcagagaacgcatcaaatcaacaacctgatcgagaatcaggaatagctactagtgctcttgtcagatctgctgcctttgaaccttctactgcacctgctaatcagtcgtcatctgctgttggtataattgcttccagcgcacatgatggatcatcaaactctgttctttctggtcctcccctgccgcacaatgtggagaatacttccagttctattgttggcatgcaaaatggtggttcgagtactgctgttgttcctgttgcagcaagcacagaagttccattagttgcaacagatgcagggtccagcagaaacaacgatgaaaattcatctctgaccactggggctgacgcagaggatggtacatccgctgaagatttggtggagaaaacaagtgaagaagaacctgtagtctatgccactaagatggaagcaaaaaatgcgttcaagtccctgcttgagtcggtaaatgtggagtctgattggacatgggatcagactatgagagtcatcataaatgacaaaagatatggtgctttgaaaactcttggagagagaaagcaagctttcaatgagtacttgaaccagcgcaaaaagtttgaagccgaagaaaaacgtatcaaacagaggaaagcacgtgatgatttccttgcaatgttggaagaaagcaaggagcttacatcatcaacaagatggagcaaagcaatacttatgtttgaagatgatgaaagattcaaagcagttgagcgtccaagggagcgtgaagatttatttgagaactatcttgtggaactgcataagaaggaaaaagccaaggctgctgaagaacacaaaagatatgtagcagagtacagagcttttctagaatcatgtgacttcatcaaggcaagcactcagtggagaaaagttcaggaacgcctggaggacgatgaacgttattcccgacttgagaagtttgatcggttggatatttttcaagagtacattcgacacctagagaaagaagaggaagagcagaagcgggtacaaaaggatcaagtgagaagacaagagaggaaaaaccgtgatgggtttcgtaaaatgttggaagaacatgttgctgatggcacacttaatgcaagaactcggtggcgtgattactgtgcacagataaaagattcacagtcctacttggctgtagcatcaaacacatctggctctacaccgaaagagttatttgatgacgtgatcgaggaacttggcaaacagtatcaagaagacaagatccaaattaaagaagtggtgaaatctggaaagattcctatgacaacttcatggacattagaggaattccaaactgctactctggaggatgatgctcttaaaggaatatcaaccatcaacatcaagcttgtatatgacgatcagcttgaaaggctcaaggaaaaagagcaaaaggacgctaagaagcgccagcgcttgggtgaaaatttttcagatcttttgtattccatcaaggaaatatcagcttcttcaacatgggatgattctaaacagcttttcgaggatagccaagagttcagggccttggacagtgagacttatgctagagagctttttgaagagtgcgttgtccacctgaaagaaaggttaaaagagaaagaacgtttgagggaggaagaaaaggcaaaaagagagaaagagcgtgaggagaaagagaagaagaaagagaaagaaaggaaggagaaagaacgcaaagaaaaagaaagagaccaccgggaggagagagaaaaggagaaagggaaggatcgatcaaggagagatgaaatggagtttgatggtgctgatttgaacacccatggtgcaaaagataagaaaagagataaagataaagaaaagaaacataagagacgtcaccatgacacagatgatgtaagctctgagagggatgataaagacgatgctaagaagtctcggaggcatagcagtgatcgcaagaaatctaggaagcatgcacatggctcagattcagatagtgaaaaccggcacaaaagacataaaaaggaccgagatagtagtagaagaaatggagcacatgagctggaagatggtgaacttggagaggatggggagatctattagtctttctgtttgctaccgagattctacttgtagcactcatctccagtcttgttacacatggatttattgccatctcttgcctgttgagttgcgcacttgggctgaagcctaccagctggatttttgctctgccgcacctgtgatgctactgctggggggcaatggatatagcaataacaccagctactgctggggagcaatggatgtagcaataacaccagcccatgcttgacacctttctttggtccttctggcagctgaccaggctaaattttcatttccttcaaagtccatggtgctgtctgtgctgaggtaacagattgctcagtttgcaacgagtttctttgtgagtgatgtgcttttgggagagtatggagtgtttgatttgtcgctcatgtcatgttaaggcttgttcattatac

SEQ ID NO: 6015 - DNA, 3861 bp, Zea Mays
gcgggttgggccttcttgttcgcttgggtcttgtcttgttagccgaggaattgatttactaaggaatgccgagaaaccctaagactgcgtgtctcctctttgctagatctgtgactcccccgccatcgatgccaagtttgccccgttgccggcgtcacccctcccctcgacggtgaagctcatagcttccctccaccgccggtgtcgcttctcccccgccgaccaagccgtgcctgtcgccggcgtcgcccctcccccactagtgaaactcgcggtctctccaccgcacgcgcctcgtgtagttgtggctgcgtgcaccccctgtagccccggcgataggtcctactgctccatccggtttgcttccggcaacaagatcaacaacaagcgagcgaggtagtgaaaagctgcagctgtgatctctggaggtgctcttcctactctttctggtattttgatggtggcttgatggccagtaatatgcagtcttctgggctgcctcagcctccaagacctcccatgatgggttctagcgctcagccacaaaatcttggaccaccaatgcctatgcaggccagtgatgccttcgcagcatcctcctcagttcatgccaccagcagcacagcagttccgtcctgttggtgagcctatggcgggggctaacgttggcatgccagggcaaatgccacattttccacaacctgggcagcacttgcctcactcaaatcaagttccacctgtatcacaaggggttcccatggtatatcagccagctagaccaatgtcatcagcacctatgcaacaacagcaacaaactgcgtatgctgggggccatttgcccaccatgggtgctcctatgcaacccctgacctatacatatcaaccaacatcgatccctcctgtagcgcaaccctggagtacaggcccaggacagagtgtacatcatgtgcctcctctagtgccgtctgggcaccagccggtgtcagctccaacgactttgcctcctgtcaacttgtctgaacctagctcttcagactggcaggaacacactgcagccgagggaaaaaagtactactataataagaagacaaggcaatcaagttgggagaaaccagttgagttgatgacacctttggagagggctgatgcctcaactgaatggaaagaatttactacaccagaaggacggaagtactatttcaacaaagtgaccaagcaatcaaaatggactattcctgacgagttaaaggttgcacgtgaattggcagagaacgcatcaaatcaacaacctgatcgagaatcaggaatagctactagtgctcttgtcagatctgctgcctttgaaccttctactgcacctgctaatcagtcgtcatctgctgttggtataattgcttccagcgcacatgatggatcatcaaactctgttctttctggtcctcccctgccgcacaatgtggagaatacttccagttctattgttggcatgcaaaatggtggttcgagtactgctgttgttcctgttgcagcaagcacagaagttccattagttgcaacagatgcagggtccagcagaaacaacgatgaaaattcatctctgaccactggggctgacgcagaggatggtacatccgctgaagatttggtggaggccaaaaagaccatgccagttgcagggaagattaatgtcactccagtggaggagaaaacaagtgaagaagaacctgtagtctatgccactaagatggaagcaaaaaatgcgttcaagtccctgcttgagtcggtaaatgtggagtctgattggacatgggatcagactatgagagtcatcataaatgacaaaagatatggtgctttgaaaactcttggagagagaaagcaagctttcaatgagtacttgaaccagcgcaaaaagtttgaagccgaagaaaaacgtatcaaacagaggaaagcacgtgatgatttccttgcaatgttggaagaaagcaaggagcttacatcatcaacaagatggagcaaagcaatacttatgtttgaagatgatgaaagattcaaagcagttgagcgtccaagggagcgtgaagatttatttgagaactatcttgtggaactgcataagaaggaaaaagccaaggctgctgaagaacacaaaagatatgtagcagagtacagagcttttctagaatcatgtgacttcatcaaggcaagcactcagtggagaaaagttcaggaacgcctggaggacgatgaacgttattcccgacttgagaagtttgatcggttggatatttttcaagagtacattcgacacctagagaaagaagaggaagagcagaagcgggtacaaaaggatcaagtgagaagacaagagaggaaaaaccgtgatgggtttcgtaaaatgttggaagaacatgttgctgatggcacacttaatgcaagaactcggtggcgtgattactgtgcacagataaaagattcacagtcctacttggctgtagcatcaaacacatctggctctacaccgaaagagttatttgatgacgtgatcgaggaacttggcaaacagtatcaagaagacaagatccaaattaaagaagtggtgaaatctggaaagattcctatgacaacttcatggacattagaggaattccaaactgctactctggaggatgatgctcttaaaggaatatcaaccatcaacatcaagcttgtatatgacgatcagcttgaaaggctcaaggaaaaagagcaaaaggacgctaagaagcgccagcgcttgggtgaaaatttttcagatcttttgtattccatcaaggaaatatcagcttcttcaacatgggatgattctaaacagcttttcgaggatagccaagagttcagggccttggacagtgagacttatgctagagagctttttgaagagtgcgttgtccacctgaaagaaaggttaaaagagaaagaacgtttgagggaggaagaaaaggcaaaaagagagaaagagcgtgaggagaaagagaagaagaaagagaaagaaaggaaggagaaagaacgcaaagaaaaagaaagagaccaccgggaggagagagaaaaggagaaagggaaggatcgatcaaggagagatgaaatggagtttgatggtgctgatttgaacacccatggtgcaaaagataagaaaagagataaagataaagaaaagaaacataagagacgtcaccatgacacagatgatgtaagctctgagagggatgataaagacgatgctaagaagtctcggaggcatagcagtgatcgcaagaaatctaggaagcatgcacatggctcagattcagatagtgaaaaccggcacaaaagacataaaaaggaccgagatagtagtagaagaaatggagcacatgagctggaagatggtgaacttggagaggatggggagatctattagtctttctgtttgctaccgagattctacttgtagcactcatctccagtcttgttacacatggatttattgccatctcttgcctgttgagttgcgcacttgggctgaagcctaccagctggatttttgctctgccgcacctgtgatgctactgctggggggcaatggatatagcaataacaccagctactgctggggagcaatggatgtagcaataacaccagcccatgcttgacacctttctttggtccttctggcagctgaccaggctaaattttcatttccttcaaagtccatggtgctgtctgtgctgaggtaacagattgctcagtttgcaacgagtttctttgtgagtgatgtgcttttgggagagtatggagtgtttgatttgtcgctcatgtcatgttaaggcttgttcattatac

SEQ ID NO: 6016 - DNA, 1326 bp, Zea Mays
gtcagaacccgacccgctgccaagcctagttctttcctctcctctctttttcagcccccggagccgcctgcgtcaccacatcgtcatcgtgcgtgtaggagtgtcctccagatccagagccggcgcgccgcccctgcctctcctggcctctccgccctccgagcgcgcgccgacgccgcccctagcgccgcccgtagctctagcgtcgacgccctgccgacgcccagaaagcgtcccggccttcactagctggaagtcccgagtctcgagtggaggcggatccaaagccaaagccaaagccaacaaccgccgctgggacgcgagggatcgattcggagatggcgtcaactagctccgccggggacgtgggagactcagatgcaaaatcacgtgtggaggacatttggaagaaaatgaacagtggttttcctaataagatgcccaaacctgcaatgacaaagctcagtacaacagaaaaacaaaagaaaaataaaccaacaaataattggatgactgttctaggcctttcaccaagcaaggcacatagtgtcgatcaaggatccaaaaatgggctacaacagacacaacatgaaatgagcgaggatgctaaaaaacttgcagccaaggcccttgcagctgccaaaaatgctgctgctgtggcatctggacgagggaaagtggagatcactgaggtaagggactttgctgggaaggacatcgaaatcaagaaactggttgatgctaattcaaaggaggcaatcgagaaggccagggcaggtggtgccgccccatcagctgtcgataacatcctagagcaaatacggaagaagcagaagctgagcgtcctggacaagacgaagaaagactggggagagtacaaggaagagaaccggggcttgggggaagagctggacgcctacaagaagagctcgaaccagtaccttgacaagcaatcatttctgcagcgaaccgattaccgcgagtttgagcgcgagcgggatgcccggctgtcaatgatggccaagcggaggacagatacgcgggaggactgaaatgtttccctgtaactccgttgtagacattctttcgagataatggtagacactaaattgtcaatgccttccagccccgttaaatcttcttttttagaattataatgtgctgattataatttacaaagatgcaccgtgcatgtgcgtaaattgcatctggtggttttggcaaacatttctgagctgcataaaatgcagtcatgattggatatttctgaaaccgggaaactttgacgaaccagcagcactaagctctgaaagctcgaaaaactaa

SEQ ID NO: 6017 - DNA, 562 bp, Zea Mays
agatcttctttcgacggtggatttcgacagtaaagtcccgcgggccgcggtgacttgccggtgggcatgtcctcgtcctcttccttccccacctcccgcttccccttcgccgccggcgccagggcccccggcagcagacgcggtgccggtggaggcgggagcagcgtgcggccgtgggggtcgaccggcgggacgtcggtgtcttcatctgggaaacggatacagaaggagctgctggacctcaacgcctccgactgctccgcggggcccaagggcgacaacctgtaccactggctctccaccatcttcgggccccaaggatcgccatatgaacgagggatatttttccttgacatcgtgtttcctcgtgattatcccttcaaacctcccatggtaactttcaaaacaaggatttaccattgcaatattgattccactggtaaagtgcatttggacattctgaaggatggttggagtccagctttcactatttcaaaggtgttattggccatcaaagacatcatcaacaatccagatccatgctaaagttatgatctttgtc

SEQ ID NO: 6018 - DNA, 728 bp, Zea Mays
tatataataagatataaatgatgttttttagaaaaagatagaatcttttagataattttaaagttacggggggagggatgcaacctcagggatgcgaactgaatgtcgaaacgaactttcagcccatttacagcccgacaccgtctccaggactccagccgacaccgtcttcagccaccatcatctccttcgccgcagaagagattggagctgaagagaggaagcagcgcgtcctcgcctaaagccctcgccgccctctttcggctcctcgcctctcgtccacgcgcgacgacgtgtcggcaaacactcagtccatcactccatcccaagactcgcgaggcgatggtggacgcgtggtggcctctgctgggcgcggcgatcccggcgctggtggcgggtcagtttgtccgcatcaagcgccgccgcgacgaggagcagcgcctcaaggcggcgcgcgggcgggagaagagctccgacgaggtattcgtctgcgagcgcgtgtgcacctccaagcgtatgctcaagaaggtaggggccttctccaaggaccccataccggagacctgcgtcaccgtctgcggcgtctctgaactcgacgcctgcgccgacgcttgcgcgcgcaccgtctgcgtcaaccagcaccaggtgcccaattggaacgacgtctgcctcaagagggtggtggtttgatggatgttgcataatgacatgtatttcccttcacagtc

SEQ ID NO: 6019 - DNA, 880 bp, Zea Mays
tgggccgaaccctgttccgcggttcgcgcaagcagacatacgctccattttataaccaaccggcggtccatctgaggaggaccaagaaacatagagagagcggttctacgtccgagtcgtcgcatcaggtcccctcgattcgccggcggcgccaccaaccaagctcatacatctgaattgactagtcaaactcagtgatctctttggggactaatcaaactcaagaactaagtttcatgtctgatctcgacgtccagcttccatctgcttttgatccgtttgcagaggcaaatgctgaggactccagtgctggtgctggatcaaaggactatgtgcacgtgcgtattcagcagcgcaacggaaggaagagtctgacaactgttcagggcttgaagaaagagtacagctacaacaagatcctcaaggatctcaaaaaagagttctgctgcaatggtactgtagtccaggatccagagctaggccaggtcattcaactgcaaggtgatcagcgtaaaaatgtcgctacttttctagtccaggccggaatcgtgaaaaaagatagcatcaagattcacggattttagactgcaaattttgagtgcttgtgtgtgcctatcatatggtaccatatgataccagtatgttttgtaagtgttacctgcatgaaagtatcgtttgtctggggaactgtctactactgatattgaataacaagagagattgctgttcgtgttcgtctatgaattattatgatctttccccagacttgagctttccaatccgtgttcttttatgatcactttgcttctcatgtgctttctgatatgtatttgaccttcacctcaagttgtatcttttatgatccaatccgtgtttgttt

SEQ ID NO: 6020 - DNA, 881 bp, Zea Mays
atgcggagtgctgctggagttggtctaagcatgggatgtcatcttggacttgggatagagataacagagtctgttagagggagaatcacggcgagagcgtgctcgtgggcacccctctccgtcaactggggtgcgcgatcgatcgatcgaaatatcgaactgcagttgccaaaaccccaatccggtcttctatttccgatcgagccgcaaaggaggcaggaagaaggccggcgcaggcgcaggcgcggatggcgatgggagcgacggttcgcgcggcggccgcggacgccgtggtgacgttcctgtgggtgctgtgcgcctccgcgctcggtgcctccacagcagccgtcacgtcgtacctgggggtgcaggagggcgccggccactacgcgctcctcgtcaccacgtccctcctctcggtgctcctcttcaccttcgatctcctctgcggtgcgctcggcggcgccagcttcaaccccaccgacttcgccgcctcctatgccgccggactcgacagcccctccctcttctcggttgcgctccgcttcccggcgcaggccgccggcgctgtgggcggcgccctggccatctcggagctgatgccggcgcagtataagcacacgctcgcgggcccctcactcaaggtggatccccacaccggtgccctagccgaaggggtgctcaccttcgtcatcaccctgaccgtgctctgggtcatcgtcaagggcccccgcaacgtcatcctcaagaccttgctgctctcaacctccatcgtctccgtcatcctcgcaggcgcagagtacacggggccgtctatgaacccagctaatgaaaaaagaggtactagagggcgttagatctgagattgatgacgacgattc

SEQ ID NO: 6021 - DNA, 427 bp, Zea Mays
cctcaaacaacggcatctccgctatttcggcacctactccggtggagtccacctccactcctccagcgagtcaccactgggcactggccaccgccacctcggccccgctcctcacgttgtcatccgtccacactgcacccgctcctctccgtctccccaacagtttcattcctcgagggggatcgcttgtcggcggggaagcaaagcttagttcttgacgcccaacctccccgttgcctattcgcctcaggaatttgggaattatgtctctttgaggggaatcaagggacttgcttttacttgtctgggctccatgtctaagtgggagccagtcacgtttcaggaatctcttagctttgttaagaaagtaaagtctccgtctggagatgagatctcctttgccgattggtggcggaaagtaagtaag

SEQ ID NO: 6022 - DNA, 1864 bp, Zea Mays
cctactccggtggagtccacctccactcctccagcgagtcaccactgggcactggccaccgccacctcggccccgctcctcacgttgtcatccgtccacactgcacccgctcctctccgtctccccaacagtttcattcctcgagggggatcgcttgtcggcggggaagcaaagcttagttcttgacgcccaacctccccgttgcctattcgcctcagtggcaggagctttgcctttcaattagtagaatggtcttgatcaggtttataagggaattaggcccgaaaactgtacaggcacgctgtttgtttgaaggaaaaccaggaaaaaactcaccacgtcaacccagatgacaaaccctggcaactcacatacacataaaggacacccaatggagcccaccaaacgtcatcattgccgagcttaccacaagcagcaataagaagctcttgcttcccactgtgaacatcagccaaggaccctgtcatgccaccgcaaactcacaacaagccttggcctcccaagaagtgatcgtggcatgtcatcattgttgagcttcgttgcaccaaaaatgaagcagctctgactccaccactgcagatcaccctctaggagagccaaagacgcaccacaagcaagcaacaaacccgaaagagctttacttcgtcgcaaattcaaaggcttgcagacaaatcgatgctaggcagacgggccaaaagcatgaggccgctacaggccatcgttgccatgctcaagcgcatcatgaagaacaactccaatttcctacctcgaacaaaaaacactccccctggcagctgcacaaacatcaatagaaaccccaagtcgtcgatgaaggagatttcatcctgtgttatcgttgccaagccatatcccttgacgcaacagctttgacttcacgctacaagaccaatccccacacgtcaagcatgcatggagaagtgaagggcaaccaccaaaggtgacatcaattgatgtctagaaaaattccaatagcaacgccttgaggaaggccatgatagtgccaccatcgctcatccaaaaaatgtatagagttctcacccttggaggacaagggcgaggggctggagaggatgccccccctgacagcagggcaggagaggtgccgcctgagtcgcccaggagagcgactggggccctggggaaagaaaagggtgaatttgggaattatgtctctttgaggggaatcaagggacttgcttttacttgtctgggctccatgtctaagtgggagccagtcacgtttcaggaatctcttagctttgttaagaaagtaaaggcacgtgactacatgctatacatatcattgctcgatgtgctcaaccggaatgatcaaatccctctgcaagcttacagcgagctctcgcttctgtttcagcatcacgaagatctgttagcggagctgtcgaagttcaggcccctcccatgcccaaacaacgtttatacacacggctcgatttggatgatcatattcctcatgccttttctgctcctgagccttgtcctcgccttgagaagccattgaagtgtttcctgctccatagactgttgcgagcctaaatgatttgtcgtagcactaacacctagttgttgtatatagatatatggatggggttctatatcctgtaatttctttatgatctccttgtacgctcgtgcgcacggaaataatcgtacaatattatttcagtcgcggcagtctggcagtatgtaaagcctaaacagagatcgtttgacctcgtccaatcggaaattcagctttgtacagagaatttttggtttttttagtctatatacagtttaaacaggtatgaacgacaaggag

SEQ ID NO: 6023 - DNA, 3207 bp, Zea Mays
tgggattatatttttctctgaacggttttgctggttgctgtttcaattcaagtctgcactgctaaggtgaatttgagtgatgagattgatttggaagattatgtttgcagaccgggtaagatcagtgttgctgatgttgagttggtttcatggcgcagaccaagatttttatgcatttgttgttttctaactattgtattgtcagggtacttttgtcctgccctagccaaagcattctccattcatttccctgacttcccgacgccaccctcgcacaagatcccgatgtggcaatggcgaccagcgacgggcgctcaacgccaccgcgccgcctgcgaacccatggtgagaagtgtggtatcgatctagagccgaaggacttccccaacaccccttcctccatcggcgtgacatcggccagctcatctgcgacgacgaggcatcttcgaccgacttctcgacaccccatcctccatcaatgcggctccagtaccccttcctccatcggcgcagcagcatccaattcatctacgatgacaaggcatcttcgaccaaccacgccctactacaagtggtgtcagtccatctcagataagtggagtaatttgtttgtatctgtatcttctattttatttcttccctaatcctgattaatagcctaatcacgcgacaactaatacatgttgatttctttccttagtcggtgtcgtgcgcatgtgagatctagggagaggaagaggaggaagggttgtggggaccgggggtgcaagatggcggattcacctgcaactacaagaaaagaaagagcgagagatttacagaaaccttcagagccgcggaggaggagaaggagattaggaggatctctacggcgctgacggattagttaaggaacgaaatatcacatcgtgtccggtaaccagattcagatgtgggcaccatgcgtgggtgcagggccaggccgaggtgaaagagattcgacgattgagaatacatcaaagaataaaaatgtggaactcggattttcagatgaagagcgtgaccaagaatttcccgattttccatcatttattccattcttacctcctctgagtgcagctaacctaaaggtctactatgccacacgtttcaccatcatagttgggataatggtgttcggtggttttcttgcaccaatcttaaacttggtctaggggcacatcttatgaagactccatctgcagcgttcatctgtcgacgtagttgagatgaattctctatgcctacttctagagtgatgttcaaagaggttgacgctccttcaccatccccagctttgtggaatgggccacaggtagccatttaggatgacaaagccacaagggtgtccttcatcaaggctatgctagaagcctcagacttgtgtctgaggaaaattcataaaaatggtacacagaagaaagtggaagaggaatttagcacttgccctctgtcagtcctaatgatgagcgttaagaacaacaccaagatactgaaagcaaacatggcttgttcagtcgggcagcggcagcagaggggatggggccaatgacggaggcggagaggagaacccatcgatttggtggcgtaagtgggagctcatcgaggccgccaccggccggtccacctcttcaataatcgtccttcatcgcccttcagttgacctgagatctagaaggacacaacaggcaaggtggatgtattcgtagttgattatatgttaaaagcaaattttggatgacattggtggagattgcttatctctaagacacatctactcattctttgaatggaaatcacatccacgttctagaaagtctatttttacttcaaaagtactccttctgttccaaataaattagtgttagcatctctgcactctattgcccacttcccccctcatcggtgttttttattgttgcatatcaattttgtggctcaaatgcccctttgaaacatatagcaccaaaattatcctaattaattaattggtttctaactggctactctatttgcaacaatggggatatataaccttaccatgtctgtttatcacagtgcatcttagattgcatcgtattgtaattgttttagttccttgacatactgtttgtgcaacaggaactgcttgatgtacttacggttgggtatctgtgtagctgtagctgccaagttgcctaaagaaaagttcccgacctttcacatgctgccacattgccacaataccttaagagcttttctatacttctatgatttgtgttttcgagatctgagttatttaaatgttgtctgctattttgaatttttatatgaagatcaaagttctcaattgataaagtaattaatataacaagcgaacaacacatagacaaactaattaatgtagcatatagacgaataaggaatcctgaaacattgaccgtgaagaaaattattgtgcacatatgcactctttctccaaaatttggcatttaatcttattgcaacatacttgtacagaggggcgagggttgttcagtgctttgacatgtgtgcaactattcaagcacaatggttagatgatatccccattcattttagattattacattgtggtgttcggcttcttcagtcaagcagcaatcatgcaacatgccttactgtagttttttatcactgcacatgttgctggacaaatttatggactggaggattatagaggactaacaagtgctactgggagattctcgagcaccattgaactaagagattccaaatagttctttggagtctattgttgatgttggcggggataatctagcagagatttgtcagattttttgtgcaacacggaggctacatgaggcagcaacgatcccattcttctcgcatgccactttacacaagctaaggatagcttctggtctcactcatggttgtggcagggaaagccgagtcagtagggtttgtcatgtagctggagttatctcagaccacatattagatgcagtgatgatgttaatggaggatgtttacatttaccgtgcaagcaagatgacttatattatgccttaggacaataagtattgttttcactctaatgaaatacttggtaaaaagttgtctctgtagttgtatatttgactgtgaatatttgaacccactgttacaattgttgctaattgaggtcagatttcagaggccaaataa

SEQ ID NO: 6024 - DNA, 3363 bp, Zea Mays
gtttcaggtgctagcataccttctgatatcgtcatcagcaactgctcgagcaagtgatttgactgagaactgggggagcgattccttcccgaacatggcgaactgctcgagcatgacatcacaatggtcatcagttggtgtgcaatcagccaatcaccacatacatatactacggatcaaggttcataaaccataatgcagctccaacaacaccgtttacaagttgcaacagctggaactggcaagaattgcaaagatacgcaggctactacagcctaactatctggattttgtgtatgctgttaactgagagttcttaaaaattaatgaattaacgaatccccaaggcccagccggatgaactgcatgcattgtcatctgcttgcagctgcctctgcaacggcttggagctccacgtgagctcctgcacggcggccgggaagatgaccgtaggtttcctcctgctctcctccaggtacgggaagtcctcggtgaagtgcaggccgcggctctcgcgcctggccagcgcgctcctgacgacgagcttggcgcagcagaagaggttgcgcatctcgcagacctcgacgcccttcagccgccccgttgagcgcacgatgccgacatactcccacatcacctactgcagctccatcctggcctgcctcgtctgccccacgatgtccgacagcgcgccgtcgcccagcgccgaccgtggcagcgtcagccgtgcccacctcgccgccagcgacggtcgtggagaactctcgcgctctggagagattttgcgcccgtggatccgtcgtaagaaacagactgccgtaacaacaaggattactgggctaaaactgactcggatactaaaattccgaatttcaatggattataatactacaattccaattgctctgttcgggataccaatttttagaagcccgaatgttcgggatatcacggttccaaaaagctcctcctcgagcgcgtgcgcagcggctctcctccccacaggcagtcgcgcggcggcctcatccccgccggcgagcctccactcccctccgccggtacgcctctatcgccggtggcctcccctcggcagacagcctcgcctcgcttgcttctattgctgtgctccaccacagagccctaggtggagctacgaaccccgtgatccccgacggtgtggcaccggagctcggcggcgacagcgggcacatccccctcatgccctaggtggagcaacgaaccccctgacttcccgacgccaccctcgcacaagatcccgatgtggcaatggcgaccagcgacgggcgctcaacgccaccgcgccgcctgcgaacccatggtgagaagtgtggtatcgatctagagccgaaggacttccccaacaccccttcctccatcggcgtgacatcggccagctcatctgcgacgacgaggcatcttcgaccgacttctcgacaccccatcctccatcaatgcggctccagtaccccttcctccatcggcgcagcagcatccaattcatctacgatgacaaggcatcttcgaccaaccacgccctactacaagtggtgtcagtccatctcagataagtggagtaatttgtttgtatctgtatcttctattttatttcttccctaatcctgattaatagcctaatcacgcgacaactaatacatgttgatttctttccttagtcggtgtcgtgcgcatgtgagatctagggagaggaagaggaggaagggttgtggggaccgggggtgcaagatggcggattcacctgcaactacaagaaaagaaagagcgagagatttacagaaaccttcagagccgcggaggaggagaaggagattaggaggatctctacggcgctgacggattagttaaggaacgaaatatcacatcgtgtccggtaaccagattcagatgtgggcaccatgcgtgggtgcagggccaggccgaggtgaaagagattcgacgattgagaatacatcaaagaataaaaatgtggaactcggattttcagatgaagagcgtgaccaagaatttcccgattttccatcatttattccattcttacctcctctgagtgcagctaacctaaaggtctactatgccacacgtttcaccatcatagttgggataatggtgttcggtggttttcttgcaccaatcttaaacttggtctaggggcacatcttatgaagactccatctgcagcgttcatctgtcgacgtagttgagatgaattctctatgcctacttctagagtgatgttcaaagaggttgacgctccttcaccatccccagctttgtggaatgggccacaggtagccatttaggatgacaaagccacaagggtgtccttcatcaaggctatgctagaagcctcagacttgtgtctgaggaaaattcataaaaatggtacacagaagaaagtggaagaggaatttagcacttgccctctgtcagtcctaatgatgagcgttaagaacaacaccaagatactgaaagcaaacatggcttgttcagtcgggcagcggcagcagaggggatggggccaatgacggaggcggagaggagaacccatcgatttggtggcgtaagtgggagctcatcgaggccgccaccggccggtccacctcttcaataatcgtccttcatcgcccttcagttaggggcgagggttgttcagtgctttgacatgtgtgcaactattcaagcacaatggttagatgatatccccattcattttagattattacattgtggtgttcggcttcttcagtcaagcagcaatcatgcaacatgccttactgtagttttttatcactgcacatgttgctggacaaatttatggactggaggattatagaggactaacaagtgctactgggagattctcgagcaccattgaactaagagattccaaatagttctttggagtctattgttgatgttggcggggataatctagcagagatttgtcagattttttgtgcaacacggaggctacatgaggcagcaacgatcccattcttctcgcatgccactttacacaagctaaggatagcttctggtctcactcatggttgtggcagggaaagccgagtcagtagggtttgtcatgtagctggagttatctcagaccacatattagatgcagtgatgatgttaatggaggatgtttacatttaccgtgcaagcaagatgacttatattatgccttaggacaataagtattgttttcactctaatgaaatacttggtaaaaagttgtctctgtagttgtatatttgactgtgaatatttgaacccactgttacaattgttgctaattgaggtcagatttcagaggccaaataa

SEQ ID NO: 6025 - DNA, 2712 bp, Zea Mays
ataaaatcacagcggggaaaaataagatactgtccccgtctacttccgcttttgctggcatatttgattccccctcttcatatttccgttcccctgtacccgcgtggtcttcgatcttgccaagtttcaatcggcgcagttttggtcgcaaaggcgtggtcgttctcctcgagcatcgatttagggttcttcggctttctatgatcaggaggagttgctggattattttatcagggaacagaatggtgtgattcgttgattggattacagtctggatctctcttgcatcaaatggttgagcaaggcaaaccacgaagcatcccgacgaaggcgaagaaatcgccgttcgtggaggtagaggttgacgagattggccaggctagtggggtggtgtttgcaagggaatcaccgctggcgcctaagagcgaccaaggatgcagcgttagccatagtcatggcgacgacgaaacacatgaatcggatgggtgcgtgcaaagccaggggctagacgagcatgggtgggtggacttcggtcactcactgcagctggtgctgttctcgcgacagtggagcctcgctgaaagtcttgttgacctagcagatcagcagccgatgctggattatggcctgtcgattgcccttgatgccatatggtttttgcggacgaaacaggatcttgaggggctcaacagtctgatatcgaagattgtggcctcaggggcaaaggattttgcaagagcaatcctcaggacatcgctgctcgcgtcatgtgttgcagcgtgccaaagcaaggctatcactgtgggtaacagcaaggagatcgtcgcagagagattgcatgatcgtctgcgagattgtccaggtgctgagcatctaaaaatagaggcaggtgccaaggtgcagaagttcatggaatgggctttacagtgtattcatatgcatcattgttctgaagatacacatatgtacagatggaactacaatactctccaagaggtacagcttcatgtatcagcatttaggaccttcttggacatagctggtgacaacttaagtggcaagatttttactgaggcatttgatgcggtctgcttcccccttacactcttctcaagtttatttgaacctggatggtcttctgggagttcagcagtctccattaagggccttttatcattgctggtggaaggaggcgctgacaatgtaaatcagtgttttcttgaagcagcgcgctttggaagtactgaacttgtacgcattctgctgaaggtcgcatatcagaatagcttggctgtggacaccgatctggctctggtgtatgcctcacattactgcaagttcaaaacaatggaatgcctagttgatgaagggaacgtgagttctttccttggccctctgataaaagctgcagagcgtgggtgcttgcaggttgtccactggttcgtcagtcgaggcgtctctgacattgagatgtgccttgccctgacgactgctgcctccagcggccatttcgtagtggcgtcgtacatgcttgcacatatccctcagcaaatccttgaagctctcagcacacagatcctcaaagccgcgaggggccagggcagcaggccgcttgatggtgtcaccttccttctgagatccaacttcctaagagacgcagctgcaacatatgaggccgcagacatcattgcaaccgggggcaccaacggtgagctcccggacctggttgccttcctgaaagaacactggtcccaggacgcgtttgctgaaggggtgagcgccggtgaaatgcacttcgtgaatgtcatgagggtcctcaggagaggggcgtccccgatctgcctggaggacctcccgcctgagatggtgctcggcatcacgtacctgccactgtaccgtgagtgcctgagcgcgggtgggcagctgttgccccaaaggctgaggggggagctgctggaggcggtgcaccggctcggtgagcccgttggcccggagagccaggggaaggacctcgtgctggcactagagcgccacatgccgtcgttcttggttggatcctgagatgtttccaggttgtaaaagaagcttgtgcaggctataccttgctttaaaaaattgtatggagcagtgttgattaccaacttctggctgcggtggaatcagcaatagatttggcgcgtcacatgtctcgtgatcgtgtagaaagattttgtttttgttttgtattttgcatgagaaagaagtttctttcttgattgcctattgaaggggcctgttcttgttgccagctgagctcttccaattattttccgggctgcgcacgagacgtacatgtgtgctagtggtgctgttagtctagtttgtgttgtgttgtgttgagtgtatgcgttgtgtgcgcgcgggcgcgtgtggtggtgctaagagtagtttctgcgtatactgggccttcagtggtatgcctggtaatctcaataagtatcgctttcaagacatggattcttcagcaaaagggtatttgatgcatgccttggtgggagtaatgtctaggttccgttccttccaagtcggccgtatacattttgttttttagatttagtttacaacatctgaacccacaatcttaatgtgtcatgggttgtcatatattttataccacatttgtctaaggtcagtttttaaggtcagttttcgacacactctagcatatctaaa

SEQ ID NO: 6026 - DNA, 2273 bp, Zea Mays
caacgcttgacgcgttcgccagcccctcgtgtgtgggttcgagccgaactccgtccacggccgcacaccactggactactcgagtcgacgttgagctcgctcagggttttgcttgcttcgcccggcggtaaagctgagcgcggcgagagccggagaccgaagaagcgccgcgcgcccggtcatggagatcggacagtaccccgcgagcggctgctccaaggagcaccagaagatctaccaggagtggttcgcgctcgcggacgcagatggggatggccgcatcacgggccccgatgcgatcaagttttttggcatgtccaagctctcccgccctgacctcaagcaggtctgggctatcgcggacaccagaaggcaggggtatctgggtttctctgaattcgtcaccgcgatgcagctagtctctctggcacaagcaggcaacgagattactcaagatagccttaagcgagatgatttgagcagtttgaatccacctgtgatggaaggtttggatgccctacttgcgaaatctaagcatttggtgaagcgtgttgatccagaaatggatggatatcctcaggaacaatctcctttaacaaacaaatggtttagctcaaagtcatcaaagaagatacctctgacagccgtcacttctgttatcgatggcttgaaaaaactttacatcgaaaagttgaagcctttggaagttacatacaagttcaatgattttgtttcccctttgctgacaagtagtgattttgatgcaaagccaatggttatgctcttaggtcaatattctactggtaaaacaacttttatcaagcatctgctaagaacaagttatccaggtgcccatatcggaccagagccaacaacagacagatttgtagttgtcatgtcaggatctgatgaaaggactattcctgggaatactattgctgttcaagctgacatgccttttagcggtcttacaacatttgggactgcatttttatccaagtttgagtgctctcagatgcgacatccactgctagagcatatcacatttgttgacacacctggtgttctttctggtgaaaagcaacgcacacagcgcagctatgatttcactggtgtgacatcatggtttgctgcgaagtgtgatcttatccttctcctgtttgatcctcataagctcgatatcagtgatgagttcaaacgtgtcattggatcattacgtggccatgatgacaaaatacgcgtagttttgaacaaggcagaccaagtagacactcaacagcttatgagagtttatggtgcattgatgtggtctctcgggaaagtattgaatacacctgaggtttcacgtgtttatattggatcattcaatgacaaaccagtaaatgaatcagctgttggtccacttggaaaggaactatttgagagagagcaagatgatcttctttctgatctcaaagatatccccaagaaagcctgtgaccgccggatcaatgaatttgttaaacgtgctagagctgccaagatccatgcttatataataggtcatctaaagaaggagatgcctacaatgatgggcaaagcaaaagcccaacaacgactcatagacaatctgcctgatgagtttgcaaaggtgcaacgggaataccatcttccgtcgggagattttccttacgtggagcacttcaaagaggtgttgagcgggtacagctttgacaagtttgagaaggtgaagcccaagatggtacaggccgtggatgatatgcttggatatgacattcctgaacttctcaagaacttcagaaacccatacgagtgaacccatacaggcggttgaaagatgacttcgatctgcaacagaatgagggattgattgtcaggcgatgtgaatcatagtggtcaatgtctcttggggcgttcattgccatccatgcttagccattgttatataactttatgcataagaatcatagagccattgctcaagctttcaccagacatctgattatgtaaaatcgacaaaatagtgatgttagtgttaaagaatatactgtgatgttgtttcttcaaatgagtatttattcgtttggaacagctggagaatgtgggtttgtcaattatcagcccatgaagaatatttggaccaccgtggggtgttgtcctgagcatggctccttgttttgattttataatgtcatgtatgttgtggcgctgcaaaatctgctgtgatatgttgcaaatatatttttgaaagacgaacttttgagaaattaatt

SEQ ID NO: 6027 - DNA, 1329 bp, Zea Mays
cgagctcgtcgccgcctgttgcgttcgcccctccttttaccttctcccattcacgccccgtctctttcgtggccttccttttccggcggccacaagtgggcgagcggcggcgcccttcaccaggtcttcgtcgggcccttcaccggcgacgagcatccaccaggagggaattgcgaagttgttttgtgatgatatatataatatattgggcagaaacgtggagctcagagcattggtgcctctttcctctttcaccaaggattccggtgccttatttcacaagtatgctcataggacttgtgtacaacgatggtgcaatgagaaaggagatgtaacatgtgaaatatgtcatgagccttatgaacatgggtacactgcacctcccagaggccatcctgatgaaactaccattgatataagtggtgggtggacaattaccggtaccgcatttgacttgcgtgatcctaggatacttgcagtggcacaaaaccacatcatggaagctgaatatgatgattattctgccacaaatgcgagcactgctgccttctgccgctctgctgctcttgttttaatggctctcttattgttgagacacgcactgactctaactgatgaagatgacgacgacacttcagcgatgttttcactttttctgttgcgtgctgctggtttcctgcttccgttctacatcatggcttgggcaatcagtatcttgcagcgccgcagacagagacagctgctctagctgcagcggaggtggcattcatcctgcagtcaggccaaggaaggggagtgcatttcaccatcgcaccggactccccggccacaccacagcatgaaccaccacaaccataattacatctatctaggagtggctgtggccgccgccgatcgattatttccatgggttacccaaggatttatggctgtctagtgcagaagcagataatttctgcccaagtttcctgtcattaatgtacttgcgtgttcgtgcgagttggctagtgcattttgcatgtcgtcccgggactaacgggatgtgtatataatatattttgtaacagagacatctgggttctatgatctccacaatgtcaaaaattgaactatcgcctgaattgtcagtcatcaacaacaaaaccttttagtccggaatatattagagttgaattctactcccgaaaggctagcatcgaaagtggaataggttagagttgaaagctactcaaaagggtagcattgaaactcaatagaaaccaaatcaggtttagacacatgattgttttttcatgccctccaagtcagctttaagcacatatatagctg

SEQ ID NO: 6028 - DNA, 1759 bp, Zea Mays
cgagctcgtcgccgcctgttgcgttcgcccctccttttaccttctcccattcacgccccgtctctttcgtggccttccttttccggcggccacaagtgggcgagcggcggcgcccttcaccaggtcttcgtcgggcccttcaccggcgacgagcatccaccaggagggaattgcgaagttgttttgtgatgatatatataatatattgggcagaaacgtggagctcagagcattggtgcctctttcctctttcaccaaggattccggtgccttatttcacaagacaaaaaaagtctcaagggtcttgattcttgtatgaactcaagatttatggtggatcttggagctgtgggatgctaagcctggtctagctactagattatgaactctctgctgatctaatagcatttctacaagaattcttttgctggaaggtttattagttatttgcaacaatgaaggaacatctaatgcttaatattgatgacctaagcattcttgagcctaacgaggtcattgggacagtcaagaataaatcatctggggaaaccattgcacatccaccctccatggctcatgccattttagcagtgggagaaagcatggtttctgaagcggaacctcttctgcaagtggtggagtgtcgcatttgtcaggaggaagatagtatcaaaaatttagagagtccatgtgcttgcactggcagtctaaagtatgctcataggacttgtgtacaacgatggtgcaatgagaaaggagatgtaacatgtgaaatatgtcatgagccttatgaacatgggtacactgcacctcccagaggccatcctgatgaaactaccattgatataagtggtgggtggacaattaccggtaccgcatttgacttgcgtgatcctaggatacttgcagtggcacaaaaccacatcatggaagctgaatatgatgattattctgccacaaatgcgagcactgctgccttctgccgctctgctgctcttgttttaatggctctcttattgttgagacacgcactgactctaactgatgaagatgacgacgacacttcagcgatgttttcactttttctgttgcgtgctgctggtttcctgcttccgttctacatcatggcttgggcaatcagtatcttgcagcgccgcagacagagacagctgctctagctgcagcggaggtggcattcatcctgcagtcaggccaaggaaggggagtgcatttcaccatcgcaccggactccccggccacaccacagcatgaaccaccacaaccataattacatctatctaggagtggctgtggccgccgccgatcgattatttccatgggttacccaaggatttatggctgtctagtgcagaagcagataatttctgcccaagtttcctgtcattaatgtacttgcgtgttcgtgcgagttggctagtgcattttgcatgtcgtcccgggactaacgggatgtgtatataatatattttgtaacagagacatctgggttctatgatctccacaatgtcaaaaattgaactatcgcctgaattgtcagtcatcaacaacaaaaccttttagtccggaatatattagagttgaattctactcccgaaaggctagcatcgaaagtggaataggttagagttgaaagctactcaaaagggtagcattgaaactcaatagaaaccaaatcaggtttagacacatgattgttttttcatgccctccaagtcagctttaagcacatatatagctg

SEQ ID NO: 6029 - DNA, 1464 bp, Zea Mays
ttgttggtgcagttagatgaagctgcaccggtgttgtcagggttgagtgagcctattgttgttgccaaagtcaacgctgataaatacagaaaactcggatcaaaatatggagtggatgggtccctaccctcatgctcctttatccatggggttccaattgaatacactggttcgaggaaagctgaccagcttgtccgcaatctgaagaagttcgtttcgccagatgtttctatccttgagtcagattctgcgataaagaactttgttgagaatgctgggataagctttccgatattccttggttttggggtgaatgactcattgattgctgagtatggaaggaaatacaagaaaagagcctggtttgctgttgctaaagatttctctgaggacatcatggtagcctatgaatttgataaggttcccagcactagttgctatcccatccaaagtataaggaacagagtttgttctatggccccatttgaagaagattttgtacggcaatcccttctccctttggttgtcccaatcaatacagagacactaaaaatgctgaatgatgatcagaggaaagttgttctcacaattttggaggatgattcagatgaaaactctacgcaactggtaaagattttgcgatctgctgctaatgcaaaccgtgatttggtgtttggatatgttggaatcaagcaatgggatgggtttgtggagacttttgatgtttccaagagctcacagctgccaaagctacttgtgtgggatagagatgaggagtatgagctagtggatggttcagagagattagaagaaggtgaccaagcatctcaaataagccaattccttgagggatacagagcaggaagaacaacaaagaagaaaatcaccggcccttctttcatgggtttcctgaactctctggtcagcctgaactcgctgtacatccttatatttgtcatcgcccttctgtttgtcatggtgtactttgctgggcaagatgatactcctcagccaagacgaattcacgaagagtgatgaaagcttgttgggcttcttgcacctaaagatggctaatctaccgggagattagcttttgtattaattgtacaaaagcttcaactgacgcaagtcgtgaagagtggttttggcaatttggccattcatgctgagtttcttcaatctctattggcgacatcaatttctgcatcctgcctatttgtgtttctgctttgtgcccttcaatttgttctttaatttagagcttagaaattagcctctgcctgtgtattctggaacctgccattccagagtccatttctgtgaaaatatatttattattatcatactctgctaccgagcttttgtacaattaatacaggatatatagactgttctggtgctatgttactcgctagttgtgaagttgtcactaaaatgtaaaagaaatcaaatcattttgctgag

SEQ ID NO: 6030 - DNA, 1082 bp, Zea Mays
agcgaggggagcacagtcacggccgccgcgtctgcgggctccacagccacgtcgaggagatgctgttgggctccgtggatgcaagctgggccagcgacggagaacgacattcgtgccgccatcggcgacaactccggcatgagcaaagcgatacgatagctgttgaagcaggagggcgacttgcggcatgcaggcaatggtggtgccctggatccgtatgtttatatgatgggtctttctccgaataaagatcaagacattggattgctttggggtcctgatatcactcagcaatttctgaggacaaataatttgaagcgacgcacaggcgaattgatcatgtggaggcctggaagtgtaatggtggtttaccgagggagcatttacaaaaggcctctaaaatctcaagctctaaatggtgcctcatcatcggttaaaggcgaatttggtgcattgttcatcccaaatgcctcgaatgccgttgagaatgatattcaagggatatatttgtctgcaaaacatgcaactgtgtccctattgaatgtgtagaatattaagcacatgaatgaggaagggttggagttcaattagataatgatgagctaggtcctcattttgtggattggtgggaacggagctgactagccaaagttagtgaggaaccttccatgccattttgctctagggagaaaccagaactatcaagtttagcagcagtaatataataaggagcatgttgtaactgccccagcgttggtgtggacagcagtaatatattgctcatcgattgcaaataattttattctaatttttcatcacatcaccaagaggtatggacacaactttgcctttttctatttcctcttattgttatgaggatagcaatatcaatatataaatataacctcgacaaaacacatctgattactgtctcatgcctgaaaaatcactctataaagtgtaacatctgattactgtctcatgcaacaatgaatgaaattagaaggcttgaaaggtaacaataagttttgactcagagtgaacaaaaatattttatcaatacaattcgccattatatcttc

SEQ ID NO: 6031 - DNA, 1654 bp, Zea Mays
ttttcctctgcccaccaattgatagctcacctcacctccgcgcccgttgtttcgtgcaccgtacttcacctcccaccaacctctccccctcaaaaactatccacccctccacggctccacccctacccgccgacgagcgcgatcgattgattcggttcgagccgggcggaggaggagggagcgccgcggggcggggtgagcccaccagatccgactaccgcagcggctatgatgaagtcgctgctgccgcagagccagctgcggcgctcggcggcggcggccgcgcggtcgtcggcgggcggcgccgcgggggcagacggggctatgtccgacggcggcggcgcggggccgcgggcgcccgcctcctccaccttctggttcctgctccacgcgctctgctgcctcatctcgctcttcctcggcttccgcttctcgcgtctcctcttcttcctgctcttctccaccaccgcgctctaccgctccagcacctcctcctcctcggccgcggtccttcgcgccaccaccacgacaaccaccaccacgaccaccacgacgacgacgaccaacaccttcacgctctccttcgccgccgccaacactcccccttccacccccgctaaccgcaccgcgctggatgtggccgacaagggggcggcgtccgggaacccacagagtcacgtcgtggtggggaggcacgggattcggatccggccgtggccgcacccggaccccgtcgaggtgatgcgggcgcaccggatcatggagcgcgtgcaggaggaacagcgccgctggtacggcgtcaaggagccgaggcaggtgctcgccgtcaccccgacctactcacgcgcgttccaggcgctccacctcaccggcctcctccactcactccgcaacgtgccgtacccgctcacctggatcgtcgtcgaggcaggcggcaccaccaacgccacggcgtcaatgcttgcgcgctctggcctcactttcgttcacatccccttccctgaccgcatgccccacgactgggccgaccgccacgccactgagaaccggatgcgcctccacgccctacgcgtgatccgcgagaggaagatggatggcgtagttgttttcaccgacgacagcaatgttcatagcatggagctgttcgatgaggtgcagaaggtccagtggatgggtgctgtatccgtcggaatccttgcgcatactggcacggcagaccaactacggctcagcgaggaggacaagcagaatatgcctcttccagtccagggccctgcttgcaactcctcagggcatctgattggatggcacacgttcaactcattgcccttctctgggaagacggccacagttgttggtgaagcagcccctgttctgcccaggggtttggagtgggctggttttgtgttgaactcaaggatgctgtggaaggaggctgacggcaagcctgactgggtgaaggatcttgatgctgtgggcgagaatggcgaggagattgagaacccacttactctgttgaatgatccgtcctctgttgagccactgggcaactgtgggaagaaggtcctactgtggtggcttcgtgttgaagcacgggctgatagcaagtttcctgaagggccacaagaaccaacaggattatgaattcccaaca

SEQ ID NO: 6032 - DNA, 2154 bp, Zea Mays
tcacttgtcaccaaatcaaccataaagtattgattaattcctctccatctttttatctctatgtctcatttacattgtatttcaagaagtcatacggagcgaacgttactatagcacacggaggacctttcgagagccacgctgtaaacctatgcacacaaaaaagaagaaaaaaataccacccttgctcttaagcttcgcgtcagccaccctccgctattcgttctatctccttctccactgggccaactccgctctactctccaatcccaggcgaatccctcgtcttcttcgaccgcgtgtcggagcttcatcttctctggtccgcctgccctgatttgccgctccgctctcccccccttccgccggaaaggggggaaattgatggcgaggctagtggctctggcatcgatggtggcagttctggtactcggcctcgcctgtgcagaggcggagccacagtgcacgcggcgccgcccgcccgcgccgccgcggccgcacagcgtgacgatcaccgagttcggggccgttggtgacggcgtcaccctcaacaccgtgtccttccagaacgccgtcttctacctgcgctccttcgccgacaagggcggcgcgcagctgtacattcccaggggccggtggctcaccggcagtttcaatctcaccagccaccttaccctcttcctggagagtggcgctgtcatcgttggcacgcagtggcctgttgtcgaacctttgccatcatatggacgaggaatggaccttccaggttcgaggcatcgaagcttaataaacgggcagaatctagttgatgttgtaattacggggttctacatggtggaactggtttcgttcgaataagttgaactatagtcgccctcatcttgtggagtttgtggactctgagcaaatcgtcatttcgaacataacatttttaaattcccctgcttggagtatacatccagtgtattgcagcaatgtagtggtccatagtgtcacaattcagacttcattggatgctccacttaatcatggaatcgttccagattcatgctcaaatatgtgcatcgaggacagcagtatcagtgttagccacgacgccatatcactaaaaagcgggtgggacaagcaaggcattgctttcgggaggccaacctcagacatccacataagcagactggatctgcagtcctcactgggcgccgctctcgcgttcgggagcgagatgtcgggcgggatctcggacatccatgcggaccgcctcctcatccactcttcgtccagaggcgtcttcttcaagaccgcgccgggacgcggaggctatatcagagacaccgtgatctcagacgtccagatggaagacgtcgacgtcgccatcgcattcaccggtgactggccaagccacccagatgaccagttcgacccggccgcgctcccggtggtcagccacatcaccctgaagaacatgactggaacaagaatctcggtcgctggcgttttgtcaggaatcgccggcgacccgttcaccgacatctgcctctccaacatcaacttctcactggccgattcggccagtcccacctcccactggtcttgctccaacgtctccggatactccgagctggtcttccccgagccttgcctggatctgcagacccaatcctcagacgcttccgtctgctccaccctccctagcttccacgccgccgccattgcagcagcgtaaatgcacagagagtacaaagtgtccatcctttttcctgttcccggtcccctgtacacttcagaggatctctcaagccgccttttcctcccccgacaattctttgaagctataggcgcgcccctgtcgttgaagaaaagaatcgttcaccgtttttctccggccgtcggcttcgagggctcagctgcatcgcctttcttgcgggaggcaagcctggcggcggacggtcgacatcgagctgttaatttgcttgtacagttatgatttcttcattcaatctgtaagaaggaatttttgtggtagtagagggttgagtcgagtccagagagttgcttcatacgattgtcgatttggtgaataaaacacatgatgaattcatgatccagtggctctgtatacatcctgtcatccttgtgggtacatccatccatgat

SEQ ID NO: 6033 - DNA, 2116 bp, Zea Mays
cagcaacgagtcgctctacggatacagttgcactgcctgccttagagataagatattttccgctcaagaaacatcgccatcgccatcgcatcgctgatatataccaaccacccagcaagcagcagtacacgctacgacctcgcttccggcgccatggagacgaagcgggtggccatcatcggcgccggcgtgagcgggctggcggcgtgcaagcacctgctggagcgcggctgccggcccgtggtgttcgaggccggcaccgtcgtgggcggcgtgtgggcgcgcgtgccagacagcacggcgctgcacacgccgcggcccatgtaccagtactccgacttcccgtggccggacaccgtcaccgaggtgttccccgaccaccggcaggtcatgtcctacctggacgcctacgcgcgccacttcggcgtgttggactgcgtccgcttcggccgccgcgtgctcgggatggagtaccacggcgtcgccgaggacgacgtggcggcgtgggaggagtggggcggaaacggccaggcgttcggctgcgccggcgctggcgagtggcgcctcaaggtggccgacgccgagggacgcattgaggtaagatagtgccaccaaacagtcacaactatggggccttcaaccacttcgcgtatctagtgaatcactgttctaacaacgacaagactagactaaaatgataaaggacttgtaagtacatgtatatctttgtgtgttacatattttttaagtcaagaatatttttgaagtttgtaaagtggttagtgcactttgaccttgttgagggcaacggtaaaaaggtataccgcttttggggtcaaatagcggtataactccatcaacaaacctcatcgctaccataccaccaaacagacagcttaaggatcctggtccatatgagcaaccaaaaaaattaccctcttaattgacatctatcgccccttgtccacgttctagcctagcgttgcttgaagcagcaaataggagtttccaggttacgtagaaaaccgcctgaaaatctgattgggacaagtctggcttgactaggatagttgtacgtagtaaggccatctatattagggcttattcggttggctctcaatccatatggattgagtgggatgggtttgcttggtcggtatcgatcatggtgagagtgggctagttggtactgaccaaataatgatgcttactactgagcctctaaaaactagtgcttctaccactaaagcctcttccatcgattctaccactaaagcctcttccatcgatgctctttatctaccatcttttcttatctgtatcctatatacccatgcggatatccatacagtcctcctccgtatagatcgtagggtgctcctcctccttatgttcttctttgtggtccttatccttcgttttctctcctttatggtggtccttttatatatggtgctcatgctcctttttgccctttcctagacaagatagtgccactaagcaaccacatcgaagtggcctccaactagtttgtgtactctggtggattgcagttccaacggcaacgggactagactaagacgaaggatgaaactcttataaatatgtatacctttatgaatttcgcatgtttttaaatcaagaacaattttaagttcttaagtttttaggtacatatgtggttactacactccattaaccccgttgagggcaacagaagaaagtgataagccttttgggccaaatggcggtcacgtacaactctatcatcaaacctcctcactatcgtaccgtcaagcatctcaaggatcggtggttcacgagcatctagaaggtcacccttttcaacgacatctacaaacacttgtctgtggcctagccgagcagattagatgatgctatgccgctcaaagctggagcacaagtggcatgctcttcgtcactagcccaagtggtgtgtgtggcacagtgagtctgactctagcagtgcgagcaaatgagctcatctcaatgtagaggacgattgtagctatgcattgctgcagtgctggaccgacgcatcctattagtcatgatagggaaagacaacactagggtaataaggggccaatagtga

SEQ ID NO: 6034 - DNA, 1748 bp, Zea Mays
agaacacaaccaaagcatctagtttcgtccctgcttcctgcctacagcgtcgtgcgtatgatacttcttcctaatcattcgcgtgcaccgacaaacaagagagcaggtctccaaaactattgcccccagagatcttgtatcaggagagggtaaataaagtttttgggaagcactctacatggatgctcgatcacttcattgccgtcttcaatctcattgccatggctcatctgtcgccttgtcacgtggacgtttcatgtcgtcggtaacaatgagatggtgttaggcgtcaagttgtcttctctacccgatcgtcggcaaggaacaaaccgcaagtacccgatgtacaagatgacgtggccatcatagcaacaatcaaaaggtttcatatgggacaaatgcacatcacactttgctcgagaaccaacaagcaacaatataagaactttatgaagtcatgcaaaaacttctgcaagtcaaacatggaccatagaaaaatagtcgaagaagaagctaacttctaaactcaagccaaaagtggtaacaattacaaccaatccaaaactagcaactttgagtgaaggcctctaccttcgtatcaccaactaaaccaaatagacaatcaactactggcgagagcaaccactaagagagaactcattatagtgaaacaacattcaatagaggagggacaaaccacaaaggacagagaggaggtagaattggtggggggtgaaagggaaatgtgcctttgggccatttctaagtattttggtgatttagtgtccaacacaagtgcctaagtgttgatctatgcaaagtggtggacaaagagcaaatcaagtcaaaaggtatgtttctagacttagtacattgttttatggactgatgtattgtgtctaagtgctggaaacaggagaaatcaaattgaaaaagagatggctttattcagccaaagtcagctctgtctgggtgcaccggactgtccggtggcgcaccggacagtgtccggtgcgccaggctggctcaggcgaacttgctgctctcgggaagtaattaacggcgtacggctaaaattcaccggactgtccggtatgcaccggactgtccggtgagccaacggtcggccgcgcgatccgcgcgagacacgtggccgagccaacggtcagaagggggcaccggactgtccggtgtgcaccggacagtgtccggtgcgccaacggctccaaagtgccaacggtcggcttcgctaaagaaggaaagaaatccgcaccggacagtgtccggtggcgcactggactgtccggtgcgccaggcgacagaaggcaagaattgccttcctggaatgctctcaacggctcctagctgccttggggctataaaagggacccctaggcgcatggaagaaagcaccaagcaacctttgagcattgttgatcattcacacttcactcttgcgcactaattcgacattcttagtgatttgagctctgttctagtgagaaccttgagatattgttttgagctcaagttttgatcgtgtgtgcgcgtatttgctgtggttttgagtgtgttgcttccctcccttactcttgtgcttcatattgattcttattgtaagggcgagagactccaagttgtggagattcctcgcaaacgggaaaagagcaaagtaaaaagaacactgatgaggacatcctccactattacccgttggcaaagacgaaattggcccagttggctcaatt

SEQ ID NO: 6035 - DNA, 3413 bp, Zea Mays
acggccacaccacacccacctagctttgctttcctcgtccgcttccggcttgccctgcctctctccgccccgcgtcgcctcatcgccaacaaccgacgagatccggcgcgggaaaacgagccctagatccggcggcaccctcatgcgaccttgttgagtccgggccttcctcctcccgccgctggtgtcgccatggcggggagcgacctcgagccgctgcgcgcgagcgcggcggcgctgccgtcctcgtcggacccggactcgcccgccgtgaccccgcgccggagccgcgtgcgggacctgctgcgcaacctggaccgccggctctccaaccgaagccgcggcggcgcggacgcggggcacggcggcggcgaggccggggcgtcaccgaggaggcccgaggaggatagcgacgagctcggcgacggcgcgccgcccgagtgggcgctgctgctcgtaggatgccttcttgggctcgccaccggcatctgcgtcgctgtgttcaatcgcggggtacatgtcatacatgaatgggcatgggcaggcactcccactgagggtgctgcttggcttcgtctgcagaggcttgctgatacctggcataggatattgttaattccagtgactggtggagtagttgtgggcatgatgcatggattattggagatttttgagcagataaagcaatccttatcatctcaaagggagggtattgatttcatggctgcgatttttcccacaatcaaagctatccaagccgcaattactttagggacagggtgttcactggggccagaaggacccagtgttgatattggtaaatcatgcgcaaatgggtgtgcggaaatgatggagaacaatagggaacgaagaattgctcttgttgctgccggatcagctgctggaatcgcctcaggtttcaatgctgcagttgctgggtgcttttttgctatcgaaacagtattacggccacttcgagcagaaaattctccaccatttactactgctatgattatattagcatcagttatatcatcaactgtttccaatgttctgctaggggaaaaggcagcatttattgtgccgacgtatgaactaaaatctgctgctgagctgccactctaccttattctgggcatgctttgcggtgttgtaagtgtggcattcaggcagttggttgtttggttcactaagacttttgacttgataaagaagaagtttggccttcctgctgtagtatgtcctgctctaggtggtcttggagcaggcttaatagctctaaggtatcctggaatattatattggggtttcaccaatgtggatgagattctacatacgggcaaaagtgcttcagcccctggaatctggctcttggctcaattagctgctgcgaaagttgtagcaacggcactttgcaaaggttctggtcttgttggtggcctttatgctccaagtttgatgattggcgctgctgttggtgctgtttttggaggctcagcagcagaattaataaactctgcgattccgggtaacactgctgttgcacatcctcaagcttatgcactggtgggaatggctgctacgctggcttcagtgtgttctgttccactgacatctgtgctgctactctttgaattgaccaaggattacagaattctacttcctctaatgggagctgttggtttagcaatatgggtcccatctgttgtaaatcaatctggtagcaaagatacattcgaggcaacatcaccccgtcatggctattcgtcattgttacctcccacagataggaatgagacagattggaggcgacaagatggagacgatgtggaactcacaattctagacgttgatccctaccactatggtagtaacaatgaggagatgcttcttgatgacttgaaggtatcacaagcaatgacaaagcattatgtgaaggtcacacctacattcaccatcgaggagacaacaaggcttatgcaagagaagcagcaaagctgtgttgttgttgtagataatgaagattttcttgagggaattgtaacattaggtgaccttcgtcgtaaaggatttgtgccaagtgaaaactctgatagtacccaggcaaattcatcaaccgtggatgcaaattcttctcttgtgtcatcatgccttactcgaggttttcagttccatggcaatgaaagaggactggtgacctgctttccagatacagacctgagtaccgccaaggttctcatggaagttaaaggtattaaacagcttccagtggtcaaacgtggtgctggccgtagaaatgatgggaggcgtaaggtccttggccttcttcattatgattcaataggatggtgcttaagggaagagcttgagcggtggaaggcaatataccagagagagaatttccagcagactgcagttaatgggcactgaatatgcaaaattgaaggcttgtttacctcgtagcgaagaagataagatacgaaatatataaagtgacattccgataaaactagggttaacttaggaacactgctgttaaagagtctcctcatcaaagtgtaaattcttgagttttgccaagatatgcattctgtatcaaacatatacgatgaggtttaagaggtgatcgatatataagagatgtgtcatgtgcggtgtgctgttgtcagatttcgttgtggagtgctgaagttcggacacgaaatatgtacagtaacatgctttgttcctttttgggttcagttttgtgggtacattttttatgtcctatgctcttggactcgtaccgattttcatgtttttagcatttttatgagctatatagttcatgggttttagatgttttagggtcccggaactatcgggcaccagacgttcttaatgaaacattaaggagagcagtatgtaccttggtcgagactatttttctaggtagtctttgcgatgagttctttatgttttgtaggctcgctaccactcatgattattttttgcatcaaatttgggataggattccaaggattttggttgtcgtgcacatcaaatttgtctatctaggcaactacatgtagttttaagaatccaacgtgagttcatgttctgtagactcaccaccactcaaatgattattttttgcatcaaatttgggataggattcaaaggattttggttatcttgtacattaaatttgtctatctagtcactcaactacatgcagttttaagaatccagcgctcttagaccgactttgatagttttcaatatttttttgagctatagttcatgaaattcatgtgttttggggtgtcctagaatggtcaagccctatacactctaagggcatagttaaagccaacaggatgtatctacggtgagaacattttttgagctagctttacctcttgaaacaataa

SEQ ID NO: 6036 - DNA, 2412 bp, Zea Mays
  misc_feature (2411)..(2412): n is a, c, g, or t
gttcctggctgtcctgaaaaccccaaaccaatcaggcaatcgtgcccagttccgcttcccctcgccatttcgccccgcctcccgcccctactccctacaccttcaccgctgtcgggggaggcggctcgccgtgacatcgacctcaccccacccccagcgtagcatcccgccactccatcgcactgtccatggaggatgacgagtacgaggaggggatggagatgggctacggcgggcatcaccagcacggcggcggccacgcggggtacggcgcggaggaggacgacgaggtggggtacggcggcgggggcggggaagagatggatgaggatgcggacggggacgctgagcagcaggaggatatcactcaggacgacgcctgggccgtcatatccgcctacttcgaggagaagggcctcgtgcgccagcagctcgattccttcgacgagttcatccagaacaccatgcaggagattgttgatgagtccgccgacatcgagatccgccccgagtcgcagcacaaccctggccgccaggccgaatttgccgagactctgcacaggatcagctttggtcaaatctatctcagcaagccaatgatgactgaagccgatggagagacagctactttatttccaaaatcagcaaggctcaggaacttgacatactctgcaccactgtatgttgatgtgtcatacagagtaatgaagaaaggacatgactgtgaggaagttacagagactgcagagtatccaaaagtgtttattgggaaggttccaatcatgttgcgctctagttactgcacactgtatcaacaatctgagaaggatctcactgaacttggggagtgtccttatgaccaaggtggttatttcattatcaatggaagcgaaaaggttcttattgcccaggagaagatgagcactaaccatgtctatgtttttaagaagaggcagcctaataaatttgcatatgtggctgaagtccgttccatggctgagaaccagaacagaccagccagtggcatgtttgtacggatgctttcacgagcaggagcaaaagggggatcatctggtcaatatatccgtgctactctaccttatattcgtgcggacattcccattatcattgtatttcgagcattaggatttgttgctgacaaggatatactggagcatatatgttatgacttttctgatacacaaatgatggaattgctacgcccatccctggaggaagcttttgtcattcaaaatcaacagatatgcaaaagaaatacttcaaaaggaaatgttgcctcatgttggtgttggggaattctgtgaaactaagaaggcatactattttgggtatattattcaccgcctactgatgtgtgctcttagtcgaagagctgaggatgaccgagatcattatggaaacaaaagactagatcttgctggtccactgcttggagggctgtttagaatgcttttcaggaagttaacaagggatgtgagatcttacgtgcaaaagtgtgtagataatggaaaggaagttaatttgcaatttgctatcaaagcaaaaactgttaccagtggcttgaagtactcacttgctactggaaactggggacaggctaaccaagctggaaccagagcaggggtttctcaggtgcttaatcgcctgacctatgcttctaccctttcacatctccggaggctgaactctcccattgggcgtgaaggaaaattggcaaaaccccgccagttgcataattcacattggggaatgatgtgtcctgctgaaacaccagaaggacaagcttgtggcttggtgaaaaatcttgccttgatggtatatatcacggttggttctgctgcaaatccaattttggagtttttggaggagtggggcacagaaaattttgaggagatatcaccagctgtcattccacaagctgctaaaatttttgtcaatggttgttgggttggaattcatagaaaccctgacctgttggttaagactcttaggcgtttaagaagacagattgatgtcaacactgaagttggtgtggttcgtgatatccgtcttaaagaacttcgactttacacggattatggacgctgcagtcgtccattatttattgttgagggccagaggctgctcatcaagaaggcgcacatccgagccttgcaacaaagggagactcctgatgaaggctggcatgaattggtctcaaaaggatatatagagtatatagatactgaagaagaggagactaccatgatctccatgaccataaatgaccttcaaaatgcaaggcacaacccagaagaggcttactctgaaacttacacacattgtgagattcatccttcattgatacttggtgtttgtgcgtcgattattccgtttcctgaccacaaccnn

SEQ ID NO: 6037 - DNA, 2439 bp, Zea Mays
  misc_feature (2438)..(2439): n is a, c, g, or t
gaaaaccccaaaccaatcaggcaatcgtgcccagttccgcttcccctcgccatttcgccccgcctcccgcccctactccctacaccttcaccgctgtcgggggaggcggctcgccgtgacatcgacctcaccccacccccagcgtagcatcccgccactccatcgcactgtccatggaggatgacgagtacgaggaggggatggagatgggctacggcgggcatcaccagcacggcggcggccacgcggggtacggcgcggaggaggacgacgaggtggggtacggcggcgggggcggggaagagatggatgaggatgcggacggggacgctgagcagcaggaggatatcactcaggacgacgcctgggccgtcatatccgcctacttcgaggagaagggcctcgtgcgccagcagctcgattccttcgacgagttcatccagaacaccatgcaggagattgttgatgagtccgccgacatcgagatccgccccgagtcgcagcacaaccctggccgccaggccgaatttgccgagactctgcacaggatcagctttggtcaaatctatctcagcaagccaatgatgactgaagccgatggagagacagctactttatttccaaaatcagcaaggctcaggaacttgacatactctgcaccactgtatgttgatgtgtcatacagagtaatgaagaaaggacatgactgtgaggaagttacagagactgcagagtatccaaaagtgtttattgggaagttactgcacactgtatcaacaatctgagaaggatctcactgaacttggggagtgtccttatgaccaaggtggttatttcattatcaatggaagcgaaaaggttcttattgcccaggagaagatgagcactaaccatgtctatgtttttaagaagaggcagcctaataaatttgcatatgtggctgaagtccgttccatggctgagaaccagaacagaccagccagtggcatgtttgtacggatgctttcacgagcaggagcaaaagggggatcatctggtcaatatatccgtgctactctaccttatattcgtgcggacattcccattatcattgtatttcgagcattaggatttgttgctgacaaggatatactggagcatatatgttatgacttttctgatacacaaatgatggaattgctacgcccatccctggaggaagcttttgtcattcaaaatcaacaggttgctctagactacattggaaaacgtggcgcaacagttggtgtcactcgagaaaagagaattaaatatgcaaaagaaatacttcaaaaggaaatgttgcctcatgttggtgttggggaattctgtgaaactaagaaggcatactattttgggtatattattcaccgcctactgatgtgtgctcttagtcgaagagctgaggatgaccgagatcattatggaaacaaaagactagatcttgctggtccactgcttggagggctgtttagaatgcttttcaggaagttaacaagggatgtgagatcttacgtgcaaaagtgtgtagataatggaaaggaagttaatttgcaatttgctatcaaagcaaaaactgttaccagtggcttgaagtactcacttgctactggaaactggggacaggctaaccaagctggaaccagagcaggggtttctcaggtgcttaatcgcctgacctatgcttctaccctttcacatctccggaggctgaactctcccattgggcgtgaaggaaaattggcaaaaccccgccagttgcataattcacattggggaatgatgtgtcctgctgaaacaccagaaggacaagcttgtggcttggtgaaaaatcttgccttgatggtatatatcacggttggttctgctgcaaatccaattttggagtttttggaggagtggggcacagaaaattttgaggagatatcaccagctgtcattccacaagctgctaaaatttttgtcaatggttgttgggttggaattcatagaaaccctgacctgttggttaagactcttaggcgtttaagaagacagattgatgtcaacactgaagttggtgtggttcgtgatatccgtcttaaagaacttcgactttacacggattatggacgctgcagtcgtccattatttattgttgagggccagaggctgctcatcaagaaggcgcacatccgagccttgcaacaaagggagactcctgatgaaggctggcatgaattggtctcaaaaggatatatagagtatatagatactgaagaagaggagactaccatgatctccatgaccataaatgaccttcaaaatgcaaggcacaacccagaagaggcttactctgaaacttacacacattgtgagattcatccttcattgatacttggtgtttgtgcgtcgattattccgtttcctgaccacaaccnn

SEQ ID NO: 6038 - DNA, 2581 bp, Zea Mays
gggagagggaagcgaaatgcgaaaggcagccgaggccgcgagccgacgcacgcggctcgttgcttcctccatcccctttcctcacgccgacgccaaagtataccaacgaattcctcctcgggctcccacctaatcgtgttcgccgcctgcctctcccaaaccctagcaacccacgatcgaacccaaatccgctcctcccacccgaggaattatgcgaaattccccgagatcctagcccagcactagcagatcgatccatcgcttgcccacctgccggccaccaacccttgtagtctcagtcaatctgtagattgagactacgatgagcctgtcaccgctcgactcctcctccccgccggccgcggctgcggctgctgctacggaggtgcccctcgccccgggcttccgcttccaccccaccgacgaggagctcgtctcctactacctccgccgccgcgtcctcggccgccgcctccgcgtcgacgccatcgccgagatcgacctctaccgcctcgagccctgggacctcccctccctctcccgcatccgcagccgcgacgcccagtggtacttcttcgcccgtctcgaccgcaaggtcgccggcgctggcgccgggggccggggcggtcccggcaacaggaccaaccgcgctacgccgagggggtactggaagaccacgggcaaggaccgcgaggtgcaccaccgcggcaagcccgtcgggatgaagaagacgctcgtcttccacgccgggagggcgcctaagggcgagaggaccaactgggtcatgcacgagtaccgcctcctcgatgcagacggacctcaggatctgcatgtggtttgtagaatcttccagaagcatgggtctggaccacagaacggtgcgcagtatggtgcaccatacatggaagaggaatgggaagaggatgatgatgctattgagaatggttctacccacgatgcatctggtcaaattgctgcaaccacctgtgctgtagatgaggagtcaaatgaggacgatgagaatgcatattgtgaaacaaacagacctgctcgagtagaaccatctcatctgccttcggtccatgaaatgctcaatccaccagagatggctcctctccaaggtcaagattctaaagagacaagcgatggaagttgttctgatgttgctatttctctggaagagattttgcaggaacctttgtcaaatattagtgtggagaatatgcatagacttgaagggcagaatgccactgatgataacatcagtgttgataacttgttatcagcatatcccacgaaagataatggctacgtaggccagtataacactatgaatgggagtgctccagcagatgaagctcacgcacgctggcctttgagaacatatagtaatcagaattatgtcaatggccctcttgctgatgagttctttgacacagggaatgataccaatggggttgcatattccaggcagcagcaagctgatggcttcccagcacctcgccaagttgatgaaaagaatgatttcaagtatgacattttgggctctggtcagggtttggattatccacttgcagacatgccgttgaactttgcccaaaagagtgacaaggaagacaagtttacattcgaagggatctctgaggttccggaagcaaatcctcagtacggtgcatcctcatctggttcacatgaagatctgtatactgatactgaatttctaggtgtaccaacagatgacactgctgataaaacttacggaaatcgcctggccagcatgttaggctctatcccagctccacctgcaatggcctcagaattcccgccgtcaacagggaaatctgctgggatgctttcggctgtcagctcgagctcaattcgttttactgctggtatcatccaacttgatggcctcactttcagcagcggctccggtcagtggcccttgcagaagaatggagacttgagtttgcttgtctcttttgctgtggagggcgacgtggcatccaagctccctgttggtcttgggcgtgctactcggattagcaccgttcccatggtgctgcgcagtggtttttaccttttctttatgtcggccatgattctcttgtttagctacaaagtagggtcgtgtatctacagcaggtaagttgaagttgatggcgcctcttgtccggccagacctgtgggctgtttattttagttcaacacgtggatcattccctcagtgatgggggtatagcagtcgttcgacaccttttttacacatttaccattttgacctgtcaaaacatacagcaataaactttcgaactggtggtggtgatcatgccgggaccatgttctcgtcagggaaagcagtgcactgtgaatttggtgctctgctcttattattgtaaccaaaattaactgcaatatgttatattctgtcctgtagaggaaaagctattttatctggttattgtaaccaagattataccttggtgggttgctgtcaaagaaacaatggaaatatgattattatcaggccgtgttatttgctccaggccagataattaccatttgatcaacataaacctca

SEQ ID NO: 6039 - DNA, 2613 bp, Zea Mays
cgacaccgtctctggccggttccccgtccaggttcttcctccggatcgtcgcattaccccgatcctgtattcccatcgaccacacctcatggctcacgcgaataccacaccacacctcacggcgtccattcgttcccgtctcgtcttccgctgcttgcctccgactcccccacgcgtcgtctcgtgcttcccaatccccatagagccggttgatccccaaaggcccatggttttctccgacgccgcgtcgcctctcgtagccactgccgctgactctgcttcctcctgcgtcgcccacctccgctgctgctgtcgcgttagttgttgctgttgttgttgaagacgcgttgctcgctagggttcgtgatttctcgccgatcgattcgggaactggtaagctatggatctctcgcggcccgcatcgtcagacctctcgctcgggctgcactcgcatgcccacgcccacgctcgcgtgcacgcggcagccgcgccgctgcgcctgttcgacgacgcgaagccggagcgcctcgtggccggtgaggccgacgcggagagggacgacggggacgggggcgaccagcacttctccctcctcgggcactccctctgcgtcaagcgcccgcgccgcgccgtcaacggcggtgggggtgggggcggagagacgtcatcctgctcgtccacgtccccggcgctgcgccccgccaagcggcaggcggcgggggaagatagcggcgcggatctggagacccgccgcgccgcggtccgctcctggggcaaccagtcgctggcggaggccgacccggatgtgcactcgctgatggagcaggagctggcccgccaggtgcggggcatcgagctcatagcgtcggagaacttcgtctgccgcgcggtgctcgatgcgctcggcagccacctcaccaacaagtactctgagggggccccgggtgctcgctactacggcgggaatcagcacatcgatgccatcgagcggctctgccatgagcgcgccctcactgccttcggtctcgaccctgcctgctggggcgtcaacgtgcagccgtactcgtgcacgtctgccaatttggctgtctacactggtcttcttcaacccaaggaccgcatcatggggctggagccaccgtcgggcggccatgttagccatggttactacacgcccagtggcaagaaggtgtcaggtgcctctattttcttcgagagcatgtcgtacaaggtgaacccacagactgggtatattgattacgacaagctcgaggagagagcaatggatttccacccgaaaattctcatatgtggtgggagctcttaccccagagagtgggactttgctcggatgagattggttgctgataagtgtggtgcagtgcttctttgcgatatggcacatatcagtgggcttgttgcagcaaaggaatgtcgtagccctttcgactactgtgatgttgttacgtcaactactcacaagaatcttaggggccctagaggtggtataatattcttcaggaaagggaaaaatttaaggaaacgagctggatctttttctcaaggagatgagaatgaatacgacttcgaggataggataaattttggtgtttttccttcaatgcaagggggaccccataataatcatattgctgccttggctattactctgaagcaagtcgcaactcctgagtataaagcgtacattcaacaagtcaagaaaaatgctcaggctctggcatcagcgttgctcagaagaaaatgcagattggttactggtggcacagataatcacttaatactttgggatctcagaactcttggcttgactgatctttgagaaggtctgtgaggcatgccacatatctatcaacaagacaccaatttatggggataatggctcaatatcccctggtggtgtgcggatcggaacacctgcaatgactactagaggttgcctagaagaggacttcgagtcgattgcagacttcctcataaggtctactcagattgctagcaatgttctgaaagaacatggcaaagtgcaaaaggagtttctaagaggcctaatgaacaataaggatgttatggaactccgaaatcaggttgaggcatttgcgtcacagtttgctatgccaggttttgatgtatgaatgtgcatatatactgtagtcagcaattatccagattcacagcaacattgtcatccgctcagttcctcgaatactagcaagtcttgctctcgactgcacaacgattaggagagtttttattaggttgtagagggtcttgactcttgattttgattcaaacaggaaagttgtgatgagttatgtatgtcaaccttggtatcacgagttactatagtctataggagacctgttgtggccttcggagacctgttgctgccgagactgaataagcttaccatatgatttctggctaactattaggcgaagggatgaggttaattgtactggggcgtaccgtcagtttcgtatgtttgcaaacacatcaagaatcaggtgctcatggcttgttgcatcaactgtttagatttattaggcgaagtgatgctgcactgtttagatttatttttctgctttattgttg

SEQ ID NO: 6040 - DNA, 4373 bp, Zea Mays
aaccctgtaggcctctcccttcttctgctctccctcccttctcaaggcttcctcctgcagtccagctcaccaggaccaggaggaacaaagaagttgcatcgaacacagctgagttcctccctcttccctgaaatgcgcccggcagctagaaaggagcagctagcgggcgggctgcccatacgtcgttgagatagatacctaagcgggccgcttccgctgcacagccacaggcatggggtgcggggcgtcgagccacaaggacgccggggcgcgccggagacggcctgggagcgtcggcgacgtggtcgttttcctcccgggcctccgggtgccgagggccgtcgacttcgcccaggcgctcggcggctgcctggccagggctatagtcgagcggctgtcggctctgaggtcgcgggtcgtcgagatggcaatgcaagaatcggcggcggcgctcaagcccaggcggaaggcggctgcacggcacgggtctagtacagccaatcttctacaggccctcgaagactacttgccagttctgctgggactagcacaacaaggtagcgtcttgagacacaaagtgcagttcacctggagtaaccaagaggataatgctgaggagacagccatttcagatgtctggtacgaggtgctgtccgtgctgcacttgatggccatggtctgcttgctgcaggccaacaccctgcttctcccaaggtcatacggcgatggctacgccccaagagtttctgaagagagtagacgggccactgttgatgtcttcttgaaggcagctggatacctagactgcgcaattcgtcatgtacttccgaagatgccactggaactaaggagacaacttccagtcgacctggctgaaggaaatctcaaagctctaagcctgcaagcctttgggtcagggggttgacatgcagctcggcttggctattgatagtccaaaggccactttagcagtcaaaaggcgcttagcctgtgagatggtcaaatattggcaacaagttcaagagagcattccagagcttccagtctctgatggatggggaaaaaagcaccggctatttgtaaagtggaagtatgttgaagccaaggctgcagcatactatttccacggtttgattcttgacgagggaaataccgagaaatcccatggaatggcaatagctgcactacaagcttcagaagaatttctgaaagaaagcaaaatggtttcggaagccttccatgcaactcctccaacatcgaggagtccgaatgcattcggaacagcaaaatatctgtttgacaagatcccaagagatgcttccagcaaggtccgaatcaaacaggacctgtatactcaagaaaaggtcattggagcaccacccccattaccagattttgcattggcgctaacacctgaagattatgatcttcctccactagatccactttggaacaaagaagatacacaccattaagtgtctatacagcagattggttgcttctggcaaaaaattggctctggagagaaaggaggaccaagatctaccatgtcaaaggtcgaacatggtaacaaatgaagtgtacaaaatattttcaaacaaaattacatgtcaacaaaattaagcaaggcttgaagataatctgaagagctctgtacaggcaattttcttctgacaagggaaatgatatgtcaaagggttcattgatcattgtcgatcctgattcctgatgcttttattttttcaacaacagattttcagcattcgaaatggaactggaatcagcctctgatcgaagtggaaacctttttttagtcgtaaacatttacattggcaccttaaaatatactctggaacaatcagtctcagctgaacagtttataatacatgaactagctaaagtacagacatgcccaaaccttaggcaccacagtacattctgaatgacttttggcagtatcaaatgtacgtgaagccagtaagccaccgccgccacccctgcgaagcctgcagcaacactagaggcaaaaggggatatagggcctgcttcttctagattactcaaaactggcaaaagattaggataaactaaaaaaatgttacttcacaaagttaccgtgctgtccctatcattacttcaaatcaatttcgctagcatcattccatacctaggttcagggctcatattaactgccttccaggtgaacatcgctgtgcgtaggaattgccaaatagaaaaaaaaaacatagcaccaaatacagtctcgagctatctgatctgagccctctccaaagagcaccccatccttcaagcaatatcactctagaaggtagatgcacatcagacggcaatgggggtttcccagagccagtaagcatccatgggtgctgtttcagagcacccaacatgtcgggatgcttggagaaagatcagataaaaggcccgccgtgttgttccacaccgttatatcaagaacatacccagcaacagttgaaaaccactggaaatgatccttaacaacatttgcagggcccatagcttttgaaggaatcacaaaactaactagctttcgaagtttgaaaagttcaaatggtgtgcagaaaacagtctctacagcaccagcaactatgccagccaacatagcctcagaataatagacatagttgtcctcccttccatctgccaagacatctgttaacagttcataggtcacaaaatgtgctcccaacccaggaagtttacccattatggaccatccaatgccactgtaaaaacctaaaaggccagaagcggcctgagccggtccaccaactgccggagcccagctgcagatgcaaggaaacaccgcgcagataccaaaattagaccttgagaaagcaacagtacagcaacacaaggaggtgaggtgggtgagtgcgctcgcctggaagctggaggagtgcttaaccgtgtcgagggggtgcacggcgacggcggaggcgctgatcgctgccgcaccgaaagccgcgtggcccgcgtgacgctgtcctccatcggtttgccgcctcccacggtcccaccatctcggcggcctgcaaggcaggaactggaacacacgctccccgagaaatagcgaaaagcggcgagcgacgtttaggggaagacaagaagagagaagccgcgggagaatttggggcccattgagaaacctgcccacctcgggtattggtgttcggcccacagagttccgtggccaagcgaagatcggatggctggcacctggcactggcaggcaggctgggagccggggacgcgccggaccgccggtgctagtcgaactcgggtcgaagtttccttccgaggttggtcgctgcctcgactccagcgttgagccaactccgccgccctgtcgttttcgcctctccctagcatttaccggaagaaacgagcgtgaccgccgccttctcccgctcccgctcccgctctgcatctctccatgggccagatcgagagccaggtcactcctccagcggaggagccttctccacccaccgtggagccgtcgccgtcgtctcctgccccgcctccgtcttcccttgaggcgattgctgcagaagccatgtcatttgatgaggatgacactgaggagtcaatcgatgtgaaggtacagaaagctctggactgtccatgtgttgctgatttgaaaaatggtccttgtggaggtcaattcgtcgatgcattttcctgctttctcaggagcagagaagaagagaagggatcagattgcgtgaaacccttcatcacattgcaggactgcatcaaagcaaatccagaggcattctctaaggagattctggaggaagaggaaaatgatgaggaggcagataagtccaacctgaaagttagagctccatcatggtccagagaatccaaacctaaggtttgagattgcttggtattaactgatagtgatattcatccagtgtgcagactcaccttattcaactataagggcttgttcgctttcctctcaatccatgtgatctcaatccatgtggattgggtgggattggatgagtttaaatcctgaacaagtcaaaatccttcatattttttctaatctcatccaatccacatgggacaggaataaccgaacaagccctaagtttgccagtagtagactgatttcagagagcgaggtatcataaattgattaacagaaatacccatattttgtgtataagaaatgcttcatggtatccacaattttagaatgtacatgtcatttcaagtatcaatcgagaactgatgaacttgtaattcgattcctagatacagggcatatttgatcaccactgtattattatactatgaaatatacatatgattatcat

SEQ ID NO: 6041 - DNA, 1136 bp, Zea Mays
aaatccttgaggtcaactaggcctagtacatcaggcgcggatgtcttctggcccggcaatgagaaggaagcgccgccgtccgcatcgtttgacggggacggaatcgcagaagcgcgtgcccgctacgcgatgccatctctgcatcacaaccgctcgtgtttgcgcaaatggctcagatgtgttctcaccgcattatcgagaaacttctattttcgtcacaaggctattccgttccgagagccaaaaactccactgctttcatcaactccggcgacttggagaagacgaagttccagaatccgatcggaagtttggtgctcgcgccttgacggattgatttcggtgcgccgatggggcaggcgttccgcaagctgttcgattccttcttcggcaccagcgagatgagggttgtgatgcttggtctggatgctgccggtaaaaccaccatattgtacaagctgcatatcggggaggttttgtcgactgttcccacgattggtttcaacgtcgagaaagttcaatacaagaatgtgatgtttactgtgtgggatgttggtggccaagaaaagttgaggcccttgtggaggcactacttcaacaatactgatggcttgatctacgtagttgattcgttggatcgggagagaattggaaaagccaaagctgaatttcaggcaataatcaaagatcctttgatgcttaacagtgtaatactggtacttgccaataagcaagatatgtttttattgaagaatactatgaagataaatctgcatctcactgcattgcaaccagtttctgttctcccagtgttcggttaaccttgtactcccagtgttcggtcagaatggttcagtcagaccttgtactgtattgatttaactcccagtgtttattttattttatgtctggacgtgattgtgcttctccggcatccccaatttagggtgagtgatgcatgagaaaagcattctctgcccttaaacatatcatttctggctgcaagctgtgcttcatttgttgatctgttgttaaggacaatatgtgaacaatatgtctatcttgatcagatatgttcttatgcatctgctacataaagcaccctctgcacttcatgatacacctatgttagttgc

SEQ ID NO: 6042 - DNA, 786 bp, Zea Mays
ggaaaaaaaatatttgtttggtgagccacgctcccgtccggatccgcgggggaggacggcgatttcgtccccagcctcacgaggtcgggaaggggttcccgcacccacatttgtgaacctcgccgccgcccgtcccctgccttcacgaacccgtcgccgcccgtcccctactcttcctcgtgcacccaccgtcgctcgtcccctcgtcttccttgcgctctcgccgtcgccgcctcctcaccctcacgcacttgaggccagctgcggaacgaggtcggacggcggagacgaggtcgaggtctgtgacctcctcaacttgcgcaagactgccgagactgcagggacaagctctttgctgcctcgtcagctgcttctcgatactaacaaatgggttctataattgagttgataaggaaacatttgaagcaggtgatacacaagggattttcatcaacaagtggccgccagaagaactgaaacatcaagatggcgtttgcttttaggtcatgccattcaggagtacactgagactgttttattatgagactatgttttattatgatgcactgagactatgtttgtgtacactgagactatgttttattatgatgcactgagactgttttattaagcagtgtggagttctcagctgctgttctcatttttaatgcaagtgtgttcaatgagcagtgttcaatgacaaacagtgttctcagctgctgctcatttttatgcaaacatttgtgtcatagttctcaggttgacaaacatttttatgcaagtgtg

SEQ ID NO: 6043 - DNA, 1187 bp, Zea Mays
ggaaaaaaaatatttgtttggtgagccacgctcccgtccggatccgcgggggaggacggcgatttcgtccccagcctcacgaggtcgggaaggggttcccgcacccacatttgtgaacctcgccgccgcccgtcccctgccttcacgaacccgtcgccgcccgtcccctactcttcctcgtgcacccaccgtcgctcgtcccctcgtcttccttgcgctctcgccgtcgccgcctcctcaccctcacgcacttgaggccagctgcggaacgaggtcggacggcggagacgaggtcgaggtctgtgacctcctcaacttgcgcaagactgccgagactgcagggacaagctctttgctgcctcgtcagctgcttctcgtgagtactccttttttctttcattcttgccttcgcatccaccacccgcgccttgctgtagcttagtcgtacggcatagtttgctgtatgaacaccagaagaagaaggtcgtgaacagcaacacgtacaccttcacggccaccatcttccatatatgctggtttgagtggaaaggatgattaatttggacggttgctatgctagcttgggactgagagatgaatgtcgaatgcttgctactgatggaattaactagtttgatatttgtagcaaggccgaggagctagcaatgtaagtagggtagaacgttgagctacctgtgaagttctagtctgaatctcaagaacttcttttgcctttgtttgcaggcttgtagtatgtgaatatcttatttgacaaaggatactaacaaatgggttctataattgagttgataaggaaacatttgaagcaggtgatacacaagggattttcatcaacaagtggccgccagaagaactgaaacatcaagatggcgtttgcttttaggtcatgccattcaggagtacactgagactgttttattatgagactatgttttattatgatgcactgagactatgtttgtgtacactgagactatgttttattatgatgcactgagactgttttattaagcagtgtggagttctcagctgctgttctcatttttaatgcaagtgtgttcaatgagcagtgttcaatgacaaacagtgttctcagctgctgctcatttttatgcaaacatttgtgtcatagttctcaggttgacaaacatttttatgcaagtgtg

SEQ ID NO: 6044 - DNA, 1566 bp, Zea Mays
cgaatccacgcgaccacgctcggcgcccatcgaaaaaccctctcctctcccggacaggcggacagcggcaagctggccaccgcgtcaccgcctctacagccccaggctccactgctaaacgccggtaatggcccaggctccggcgcgcgccgcttccgccgtacgtctcttcgacgcgcactgccacctgcaagacccccgcatcgcggccgtcgcccctgcccttatacgagccgccggcgcatccggcgtcgcacgcttcgctgtcaacggcacctccgagaaggactggcacctggtgaagcagatggccgaggatcacccagccgtcgtcccctgcttcggcctgcacccttggtgggtacccgagaggtcgccggattggatgaatttgctccggcggttcttcgccgaaaccccggaggcggctgttggggagattggtctggacaaaggttcacatggaaaaaccatcaacttcggagaacaggttgaagtgttccagcgacagctcgaactagctaaggaattggagagacctgtttctgttcattgtgtgcgggcatttggtgatcttctggaagtattgaagcaaactggacctttcccagcaggcgtgttgttacattcttatatgggatctgcagaaatggtgtctgcccttgcaaatttaggctgttacttttcactatctggcttcttgacaggcatgaaatccactaaagctaagcacatgctgaagtcggattcttttagagacagatgcacctgatgcattaccaagattggacaatgtttctgtatcaccagtccatgttcacagttcagatgcagatactgaaaagcgtcacatggattcagagtcacaggctgctaatgcatcaaatgagtccttgaaccatccagaaaatatccatattgttttggagtatgtcgcatcactccttgaaatgacagagtcagaattggcggagttgagttacaagaatgctaccaagctgttttcttatcctggctccaaagttcaacatgaacctgaagacatctaaatcgggttcaacactaccttactcactgggtcctcccagacacaatgtttgagaaactgaaatggctgtacatcactgttaatattggtgaaataaaacagataccgaatcaaagtagtgcaactggtttccttaaaaaaaaagtctctgattttttgtttgacgagaagtacagcactagttagcaacaagacatccaaatcagtggtatccattgttttcatgttgccattgaatgatgaaccgtagagaaaacagccagcgttcctttttcctactggggcagtagtttttggccctgaaggttacgagagagagagacgctgattttgccttaaaaatagtaacctgaaaacagtctgcgtaatgaggatttagttgatagtacctctagttttttatttgacgctggttagttcaattttgtactaaaaatcgtcaaataaaatcagatggagtactacattgtaggtttcagtggcaacgtctgagttctgacttgataacctgttagcag

SEQ ID NO: 6045 - DNA, 6465 bp, Zea Mays
cgcaactgccatcgtcctctgctcgtcgcgtcgttctcctctcgaccgcatcgcgcccgtggcggggaacgagccatcgacgccgcgtcgcgtgcctttcttcttcgtcccccccctgcctgcctagctgtctcaggctgccgcccgcccagccccaaaacattcggcagccgagtcaaccgagaacacgagccatccacccaccctgtcccttccccggctttcccccgtcctcggctccaccaattgctctcgcgtcagtggaaggaaaaaccaagggcgagggagggaggagcgcatctccgccccgcccgcgttcccgtaccccgatccgccacatgatctgacaccgcattgccgccgaggtgacccctcccgcccccagaatggaggcgctcaacgagctctgcgacctggtggccgcgcacccggatctcctcctcgccgacaagcttgcatggctctcctcccgctgcgccgccgccccgggtgccgccgccccgcagcgtgcgtcgagggcgcaccttcattcgctcctcgcgttggcgcgcctcctcccggcgggtggcgccggtgccggtgccgaaggcgatgcggcgcccccggccccactcctattcttcctcgcgtcccacgccttcctctcgccggccttctggccccagtctttcgccccggcgccgtttctcgctaggctcctcccgctcctcgccgcggccccatcctcccccgccctttcttccgcgctctccgccgccctcctcgcggcgctcgacgtcgccgacccgacctccgcgccgctcgcccgcgcgtttctctccgccgccgctgccgcggcgcccctgccgctcctccccgcggatgccgcgcccatcgctgcccggctgctcctcgagtttcttggctccgaggaggagccgatcagggccaaggggaagggagaggacaccttgggcgaggaaaacggtggggcaaaggaggtagtgcggaggttcgaggaggaggaggtcgatgagctggagcggaaggaagtcgcattcagactgaccgtgcatatgcttgggggcgagggtgggctagagaccgagcagattgggaaggtcaggaatgctgctgcgcgacaggtccgatcactcacggattttctcaagattagaaagcgggactggagggagcagggtacacagctcagggcaaggataaacaccaaattgatgtgttgtcaagctgcagtgggggtgctggtgcgaagcgtttccaccatggatactgatatcaaatcttcgaaggatatgctccagcagactctagcttggttcatcgaggccaccaagtcgtgcatcctgtcatcctggcggaaactgaagatatgcgaggagctattttgcacactgctcaatgggatcagccagataactgtctcacgtgggggccaacttctgccggtgcttttgattcccttaaaaccgcttgttgtgagcacatgttcgcaggctgacatggcaggcagtagtcctggggctctatttgaagcagttgtgaagttgagctgtgagatcatagagtttggctggacaaaggatagggcccttgttgacacatttgttatgcgtctagctgcttatgttcgtgagcggaatgattacgaggaggaggatggcaaaggaaaagaggcagttccagttattcgacttaatgtcatacgccttttggctgagttatgtgtttgcttgaaaaaatgggaagttgtggacatgattttaccccttttcattgaacatctagaagagggtgatgcttcatctccaagttcattgcgtttacgattattagatgcaatatctcgtgttgcgtgcttgggttttgaaaaatcatatcgtgagagtattgtcttgatgacaagaagctatcttgacaaagttaaagctctaggggcttcagaaaacaatacagttccatcagaagcaacaactgagcgaacagaaactcttcctgcaggctttctgcttgttgcttccaaccttacaagcacaaaactcaggtctgattatcgtcataggttactgtctctgtgctcagatgtggggctagttgctgaatctaaaagtgggaggagtggtgctgatttgatgggtccgttacttcctgcagttgctgatatatgttctgattttgatccagtgtccactgttgagccatcattattgaaactattccgaaacctttggttctacgttgtattgtttgggctagctccacccatacagaataatgaggcacctacaaaaccggtttccacttcattaggtacagcagaaagcagcagtgctatagcccttcaagctgtagctggaccatacatgtggaacagccaatggtctgtagcagtgcaacgtattgcgcaaggaacacctcctctggttgttagttctgtaaaatggcttgaagatgagctagagttaaacactctacacaacccaggtagtcgtggtggtaatggtaatgaaaattctgctgttgggcagagagctgcactttctgctgctttgggaggtcgagttgaggtagcagcaatgaacactatttcaggggtaaaagctacgtacctacttgcagttgctttcctggagatactacgttttagttgcaatggtggcatactctcggctacatctacattgaatagatcaaacagtgctttcagttgtgtatttgaatacctgctcactccaaatttgacaccagcagtaactcagtgtttgacggcagttgcacatagagcttttgaaacagtgctgtcgtggctggatgatcgcatatctgacataggtgaaggagctgatgttagagaatcggttctttctgttcatgcttgctttctgataaaaagcatgtcccagagagacgagcatgttcgtgatgtgagtgttaagcttttaacgcagctgaaggaaaagttcccacaggtcctctggaactcttcatgcttggatttacttcttatttctgttcacaatgagttgacttctggtccagtcagtgatcctgcttgggttgcaactgtacgctcactgtatcaaaagatcgctagggaatggttaacaagtgctctttcatatgctccatgtaccacacaaggccttatacaggaaaatttttgcaagccaagtggagtacaaagaacacaacatacagcagatgttgtttcacttttatctgagatacgtatttgtagtggaaagaatgattggaacggtattaggacggccaatgttcctgcagttatggactcagcagcagcagcatcgggagccaaaaaagaagcacctgacttcactttggaagtactctctactgcagtagtgagtgcaactgtgaagtgcaatcatgctggtgagattgctggtatgagaaggctgtttagtactatgggaggcataaacatgggcatgtctcctcctgggacacaatctttgcacccccatcagtcatttgatgaagtttttgtctccaagtttgtcagtcttcttcagaactttgttgttgcagctgagaaacaaccaatagataattcacaatttcgtgaaacatgttctcaagctacagcattacttcttgatcatatggtgtctgattctagagcaaacctggaagggttttctcagcttatacggcttctatgttggtgtcctgcttatatttctacccctgatgcaatggaaactggaatctacatctggacatggctagtatcggctgcgccttctttaggtcctcttgtgcttgcggaacttgttgatgcatggctgtggaccatagatacaaagcgtggattgtttgcatcagatatgaattactgtggcccagatgcaaaattgaggccgcatcttatcgctggtgagcctgaggcaccaccagaaaaggacccagtagaagcaataatagcccatagactctggcttggcttcttcattgatcggtttgaggtggttcggcatgacagcattgaacaacttctacttctaggtcgaatgttacaaggaacaatgaagtctccagctcatttttctcaccatcctgctgctactggcactttctttactgcgatgctccttggattgaagttttgctcatgccagtctcaatctaacttgcagaagtgtaatatggggcttcagttgttagaggacagggtataccgtgctgctttgggatggttttcttatgcgcctgagtggtatgaatctccaaacaaaacttatgctcagagagaagctcaatctgtgtcagtatttgttcattttctacaaaatgagcgcaccagtggtcctgtcgattcggtttcaaagttacagggacgtgaaggtgaacctagcatgatcacattcatcctgtttggggctgtgttgacaactacacaaatgcaagggaaaagcgtaaacagttacttctgacactttctcagaatgaggcagacagacttgaagtctgggcacaaccaatacatacaaaagatacaacgacttttcgcggtaaaatcagctcggataaatggattgatcatgtcagaactgcttttgctgttgatcctcgaattgctctttctatgcctttgaggtttccaacgaatgctacaatgcaatctgagattactcagttggtacagacacgattactggagcttcgtacaattcctgaagcattaccctttttcattactccaaaagcagtagatgaaaattcagtgctgttacagcaactaccacactgggctccatgttctgttacacaggcattggagtttcttactcctccttataaaggacatccacgtgttatggcctatgtccttcgtgtcttggagacttacccccctgagactgttaccttttttatgccacaattggtacaatctctcagatatgatgaagggaaactggttgaagggtacttgcttggagctactcgaagaagtaatatatttgctcatatcttgatatggcatctgcagggagaatatgttgatgaatctgagaaagatgcagctgctctgaagggcagtgcattccagtccttgctcccagctgttaaggacaaaattatagagagttttactccagaggctcgtgacatgtttgaaagagaatttgatttctttgacaaagtcacatctatttctggtgttcttttccctctccccaaggacgagcggagagcgggtataagaagggaactggagaagatttctattccaggtgatgacctctacctacctactgcaacaaacaagctagtacggggtatacagttggacagcggtattcctctccagtctgctgcaaaagttccaataatgattacttttaacgttgttgaccgtgacggggacccaaatgatgtaaaaccacaggcttgtatttttaaggttggtgatgactgtagacaagatgtgctggcgctgcaagtgattgctctattaagggatgtatttcaagctgtcggattaaacctgtatctttttccatatggtgttttgcctactggaccaggccgaggcataattgaggtggtcccagatactcgaagtagaaatcaaatgggtgaaacaactgatggtggtttattagagatatttcagcaagattatggtcctgtaggttcaccttcttttgaaactgctcgagaaatgtttatgatcagtagtgctggatatgctgttgctagcttactccttcaaccgaaggatcggcataatggcaatcttctctttgatagccatgggagattagttcacattgattttggttttattttggagatttcacctggaggtaacatggggtttgagagtgcacatttcaagctaagccacgagatgactcaattgctggatccatctggaactatgaagagtgatacatggaaccaatttctcaggttgtgtgtcaaaggatacctagcagcaaggaggcatatgaatgggattttaagtacagtcaacctaatggtggacagtggccttccttgctttagcaggggagatcctatcaataatcttcggaagcggtttcatccagagatgaatgaacgtgaggccgctaacttcatggtacgaacatgtgctgatgcttacaacaagtggactaccgcagggtatgacttgattcagtacttgcagcagggtattgagaaatagtttgtttctcgttttttaagtggcgttcgtgtacatcaattgtatgtagccactatctttttatgtagaatttattttttgagttgtatcatcgggcaaggatggaattcatgtgattaacgtaggatgcttggtgcaaagaggcaattctttttttttcttgcactgtaaaactgccaagaaagtagctagtaagttgatcaagattctgtattgctgtcgcagaatgcattttcgtttactagacatgtatgattcgcatttttatc

SEQ ID NO: 6046 - DNA, 2451 bp, Zea Mays
caggctgcactgcaggccaaggaggctggagacggacggctgcagctgccgcagtcgagctgctgctcctggttccggtcgcaaactcatcaggcgcgtcgtcgatccggaaggcgcccgccaccgggagcggaggcctgagcgggagcaggagcggggccggcgaatctggagcccgggggacctgcattgcctcgggaccgccgcgcgtagccagatctcccccgtcccctgccgcggcaccggcacggcatggtggctgccgcggcggcggccaccgcgccagatccggaccaatcctcgcgcccgccgctcacgccggcgctcgacaagcccaactccgccgccgcgcggaggaactcgcgctccaacaagcccgtctcctcgaggtacctgtccgccgccgcatccccggcctcctccacttcgtcctccacgtcgtcgtcgtcttcctcgtcctcctcccgccgctccctctccgcgcagcgcacccggacgtccactccgccgccgcagcactccacgtcgtccacaaccaccgcgtcggcagcggcagcatccgccaccgcgaccacgatgcggagcctctccgtgtcgttccagggggagtccttcttctacaagacgtcgcgcgcgccgcgggcttcgtcgccgtcctcaccggcagcgcgccgcgggcccacgccggagcgccggaagagcgtctcctccgtgccggaggccgagaacgcgcggccgtcgggacgatggccggcggcgaagcccaaggcgtcggacccgctagcgcggagccttgaatgcagcctcgaccgcaaggactccatcctcgccgccgttcacctcctccgccgttctatggccttcgactcctccacgtcactctcgccgtccgaccgggcagctgcagccgctccagacctctccgcgtcctccgacaccgacagtgcctcgtctggtagcaactccggcgccggggatcccccgcgccgcggcatcagcgtgccggcgagattctggcaggaaaccaacagccgcctgcgccgacttccagagcctggactgccgctaccgtcgtctggccggaggtcgttttcagacagcccaatgtcacccagactgccaggtcggtccccgtctccatgccgtggaagccggggcgctccgagtccatcaagagggcgcagtggggaggcatcgccaaatggacatacggtgcaggctccagcaaatgcgccatctatcatcagttttgcggcagaggtgagaagggcgaaaaagggggagaagagaatcgaggaggcacacagattgcggctgctggacaatcggcatttgcagtggcgatgcatcaatgctcggacagatgcgacgcttctggtgcagagcttcactgctgagaaaactcttcacagtgcatggaaagaaatatcaagattgcgtgacaatgtcagtaacaaaaggagcagactccagcttcaaaagcaaaaactcaagctgtttgctattcttaggggacagatgtcatatctagaggcctggtctcatatcgaaaaacatcattcaagtgctttatcagcagcaatcaaagctctgaaggctagtactcttcgtcttccagttgttgatggcgcaaaggctgatgctcaagccgtgaaggaagcagttaactcagcagtggatgtgatgcacacaatgacatcctcgatttgtaatttgctatctaaggtcgagggaacaagctctgtggtgtctgagcttgccaaagttgcaacgcaagaacaaatgttgttggaccaatcaaaggatctcttgtccacggttgcagcaatacatgtatggacatctcctacgatcattcttacccaatctccataattcaactgtatttagctcggtgttgactatctgtttggggaaaaaaaaacaggtcaaaaattgcagcctgcaaactcatatgctacaacgtaaccaaaagcagagcccgacacaattgtagaccagtttgcctcgccacgttggtggtcactaacatcacacggcctcatgttttctcaccggagactgtggtacaggtaataaaagctgtaaccatttgctgggtgtgaagcgtttcctaatctgctcgatcgacctcactgagtgtagcagattcatgtaattttttgagtgcatatcaaccataggagcggcccttcttacctgcagtcgctgcagttggtgtatacagaaatccctagccctgacccaaagataagcttcctgtagatatgaaaagagcttgtcgtttgcgtgcttagtcttgtgtggagtgctcgagtggtgatgagtgtttgtattgtgaaagggagacggttgttggcttgatacaggtgttttcttgtctaaatccacacgaaagttgttcatcctgatttgctcatggagtcatggtatctgctttgagagtgtctc

SEQ ID NO: 6047 - DNA, 822 bp, Zea Mays
tgacataaattctcccgtcttatcacatcatttttttaaaatccgcatgctgacatctagcagtaatgctaatggaggcgcatcacgcagggacgtctccctatcttaagaagaggagctgcaggaagccaaaggaaacgaagcatagccgtagaagcatttcacaagtcttgaagggattgtgcttgctgcttgcatagtggtaggagatggagcgtccatctgtgctgattttgctgatatttgcatttgctggaggaaatctgctcgtgggcatcgcctctaacgcaagaagcatcaagaacacaggaacgatatacttttaccatccgaaagacaaggggcctggaaaatgtcaggacggacgactaccaacccgttgacccgagcccaagctccaaagccacgatcaggccaggtccaattgagcatggagctccgcttcttccttatgtaccgcggtacccgccgccgccgcctgcctcctgttgaatcccctggatcccctttcaggctttcacttggatacatctggtcgtcaaaatctgctgtcatacttttattaaggtcactagtgtgaccatatatgtatcaaatataagtgtgttactgttaccaataccatattgcttgagtgctgcatgttttactatgtttcgcgaagtggtgaatggttgtcaagggcccaaagagtttgaagaactcatccttgatggcctcaactatcatgcttgggcatcatttgccaaatttaaaagaaagtgctcatgaaagctaagatatgaattgtacttcaaccttcaatctaacatgataccggtg

SEQ ID NO: 6048 - DNA, 1208 bp, Zea Mays
taccccgggtccccaccacacgcacgcgagcccgcggccaccacctcgatgccactgacgggctggaatccgctggcgcccgtcctccagaccgtcgccgctttctcccgccacatcctcatcgcccccgacgccgggctcgacgaccaccgcctccgcccccttctagcgctctccctctccccgccttcgccggcaccaccgcaaccggaggtccggaaggagaagaaggatgccaaggaggcgccactgacgaaggaggaggtcggccgggccacgtggatgctgcttcacaccatcgcagcttccctgacgaacctacgaggcaacaaagacgggatgcaaaggagttgatgcatataatctcgagactatatccttgcaaagaatgtgctgatcacttcaaggaagttttgaaagcaaatcctgtgcaggcaggatctcaggctgatttctcccagtggttatgttatgtccataacgtggttaatcgaagaatcataggaaaagtaaggtctcagggccaaaaagaggaaaactgaggcacacccttttactcctacaataagggccttgggaagccaatatttccctgccaaagagtaactgcacgttggggtaaactggattgtcctgagcgctcgtgtgatctagaaggcagcatcgacatcatgccaaaccgatgacatggccaagaaatcgcttgaactttctacccgtagatgatttcatttcaataccactcattgatgagcacttgagcaataccagggagataagaaagagaattcaggactccgtgctgacatagcagggcgtccatatgcttctgtatctttggcgttggaccgttgtagtaaaagatatgaatgtctcgtgatatttgtacttgtctatgcctagtctgatgtctgacgactcttccataacccataccagtccgtgcagattttcatttttgtgcaaccgtcttatgtctgagcagtttttttataatatcacaggagtcagaagtgtactcccctttcgagggtaggaagatgtgtcgtcctttctaatacttaaatttctgtatcacaggagtcagaagtgtactcctttctatatagaattctggaaaacaagatgctgatgacacttctactaggatggatccatatacttattaggatgttaaatatctgatcttttttcaattgcgaataaat

SEQ ID NO: 6049 - DNA, 499 bp, Zea Mays
ctcaagttctagctaaaggagtatggattccttgtgctactgctgatgtaaccctcttctctgtcccaagatcgagttgctccagagcctggcacaccatcaccagtgtggtgaccaagtccacccgaatgctcatctcaccttggccagggttgcatgcccaggcgacacttgttatgtggtctctagtgatgggcgccacagacagcttcaccgccgaccgggtgactcacgctttctccggccgattcctcgcgagcaccgaagtttaggtgatcaggagtattcttggtgtccctgtggctagaagatgcttctagttttgaaggatgattagttaggtgtgtttgtgagccttggaagggttctgccttcctggttttgtaattaagttatgcatttcaagttctatcaggacttgtaataattctttctatgtaataaaacttgagctttggaaatgtgaagaatgtttgtaaagtcttccgctctatctccg

SEQ ID NO: 6050 - DNA, 1694 bp, Zea Mays
cctgtctaccctcaagttctagctaaaggagtatggattccttgtgctactgctgatgtaaccctcttctctgtcccaagatcgagttgctccagagcctggcacaccatcaccagtgtggtgaccaagtccacccgaatgctcatctcaccttggccagggttgcatgcccaggcgacacttgttatgtggtctctagtgatgggcgccacagacagcttcaccgccgaccgggtgactcacgctttctccggccgattcctcgcgagcaccgaagtttagaagttgtgttggaaggaggagtctactccagtgtatgctaatcaagtggaggagccatctaactgggtatttgataaagggatctagaacctcttcactgcaataaggcaagcccggtgaatttgcccattccttgtatttttaaaatacttttatacactttaagtctagtgaaatgtgcactaagtttataggagtttcttggaaactatttgatgcatagactaccttgatatccattccttttataaatacttctttagaagtatcaaatattgtttacaaaattgcttagccctgtctagaggtaaatcttgtagatagagtttgtcctttgcactaatgcctagctcaggatttatcctgaggaaggatggctctacctacaagaatattttcacctagatcatggggagatgtaatacaaggttccatgtgatgttttcatcatcctaaggtacacaaataagtccgaaggatgaaagtacttaaatcgagacttgggctaggaacaggtgatgttttgcccaagttgattaaagaatacagggaatgtaggcttgctgatcgaggcatatattaactggccacctgccctggtatgggacagggtaagcctaatctccgctggaccaatatcagaacagctcgcccgcactgggcatgggagatggtgagagtagtgtctaccctccgtggcaagaggccggacggtggagtaactatgctctcgggtagcgggaacccattctagtcttgagaaacacaggtgcaggttggcgtatacaagggttaagtgttacatatgtcgtgtggttagaggtccctagctgggtaaatcgattcaaatcaccattatatcctcaaacaatagagacttgatcactgccctgcaatctaagtcatggatggaatcacaatgagtaaaaataatgttgtgttgatgagatgatgagattagactagatacaaacaaggtctattaatactcaatctagcattaaaatgttgaaagtaaggactccttttagtaagcttttctgcaaactattaaagttgattcttgctaaaagcctttccttgattcccaaatccagcatatccttgagagtctttttccttagtcaggtaagacttgcgaaagtacactccgtactcagggtttccgaacccatgatgttgcaggtgatcaggagtattcttggtgtccctgtggctagaagatgcttctagttttgaaggatgattagttaggtgtgtttgtgagccttggaagggttctgccttcctggttttgtaattaagttatgcatttcaagttctatcaggacttgtaataattctttctatgtaataaaacttgagctttggaaatgtgaagaatgtttgtaaagtcttccgctctatctccg

SEQ ID NO: 6051 - DNA, 1230 bp, Zea Mays
actaccctattccgatctcgaggacgccacgccacttttaacccccccacccccccttctgtcgtggtgcctcggcccaagtgctaacgcccaactgccaaggcggggaggggggatccggtgcgcgcgcgcgcggaaatgaacaccggctgattagtaggtgggagatcgaggtcgcgcccttgccccacacgccactaaaggccgcgccgacgggctcatcaggcgctctggacgggctcgcttctgccgctccgcgcttgtgcggtgggtgaagtgctgctgctggtgcgggaagcgtcgccaaacgtgcagaccttggtgggggagcgaggagtcgaaacaaggatcaggagaatacggtgctactgcttatgtgacattcaaggagcgctttgccttggaaactgcggtattgctcagtggggctactattgtggatcagccggtatgcataacttattggggacaacctgaggagacttttaatttctgggacaggccaacttgggaggttgaagaggaaattgaatacacgagttatcaatcatgccagtacaacactactccgcaggaagctcttacagtggctcaagatatcgtgaagacgatgctagcaaaggggtacgtgctcagcaaggacgctttggctaaggctagagcctttgatgagtcccgcggattaacagctgcagctgcagccaaggctgcagagctgagcaagagaattggtttaactgacagggtcagtgctggtgtcggtgcaatgcgatcggtcgatgagacatatcgcgtaacggagacgaccaagacggtagctactgccactggaagaactgcagctaaggtggtaaatggtatcgtcaccagcagctacttctctgcaggagccatgatgttgtctgatgctcttactagggctgccaaggccgcggctgatctggccgctcatggcagacagagttaagtgaaaaacaaaacatacaatccatcctttttcagttactaaacatgaggacgaacaccttaataggatgcttgaagtgttgttgttcgatgtatatttataacagacaacattgttgatttgttgtataaattaaaaggagacgtacactgcgtttgcactaataagtttgattattgcaaatggagtcgagtgatcgtgcagtcatgtttctgactttctgctcatttcatattctcgcatcgctgttgggtgctgccttc

SEQ ID NO: 6052 - DNA, 1235 bp, Zea Mays
actaccctattccgatctcgaggacgccacgccacttttaacccccccacccccccttctgtcgtggtgcctcggcccaagtgctaacgcccaactgccaaggcggggaggggggatccggtgcgcgcgcgcgcggaaatgaacaccggctgattagtaggtgggagatcgaggtcgcgcccttgccccacacgccactaaaggccgcgccgacgggctcatcaggcgctctggacgggctcgcttctgccgctccgcgcttgtgcggtgggtgaagtgctgctgctggtgcgggaagcgtcgccaaacgtgcagaccttggtgggggagcgaggagtcgaaacaagggtaagatcaggagaatacggtgctactgcttatgtgacattcaaggagcgctttgccttggaaactgcggtattgctcagtggggctactattgtggatcagccggtatgcataacttattggggacaacctgaggagacttttaatttctgggacaggccaacttgggaggttgaagaggaaattgaatacacgagttatcaatcatgccagtacaacactactccgcaggaagctcttacagtggctcaagatatcgtgaagacgatgctagcaaaggggtacgtgctcagcaaggacgctttggctaaggctagagcctttgatgagtcccgcggattaacagctgcagctgcagccaaggctgcagagctgagcaagagaattggtttaactgacagggtcagtgctggtgtcggtgcaatgcgatcggtcgatgagacatatcgcgtaacggagacgaccaagacggtagctactgccactggaagaactgcagctaaggtggtaaatggtatcgtcaccagcagctacttctctgcaggagccatgatgttgtctgatgctcttactagggctgccaaggccgcggctgatctggccgctcatggcagacagagttaagtgaaaaacaaaacatacaatccatcctttttcagttactaaacatgaggacgaacaccttaataggatgcttgaagtgttgttgttcgatgtatatttataacagacaacattgttgatttgttgtataaattaaaaggagacgtacactgcgtttgcactaataagtttgattattgcaaatggagtcgagtgatcgtgcagtcatgtttctgactttctgctcatttcatattctcgcatcgctgttgggtgctgccttc

SEQ ID NO: 6053 - DNA, 1235 bp, Zea Mays
actaccctattccgatctcgaggacgccacgccacttttaacccccccacccccccttctgtcgtggtgcctcggcccaagtgctaacgcccaactgccaaggcggggaggggggatccggtgcgcgcgcgcgcggaaatgaacaccggctgattagtaggtgggagatcgaggtcgcgcccttgccccacacgccactaaaggccgcgccgacgggctcatcaggcgctctggacgggctcgcttctgccgctccgcgcttgtgcggtgggtgaagtgctgctgctggtgcgggaagcgtcgccaaacgtgcagaccttggtgggggagcgaggagtcgaaacaagggtaagaaccatgagtgaaacagggcacactgtacaagtcactaacctctcgagcagagtatctgaaagtgatctttatgagttcttttcgttctctggccctattgaacatgttgaacttatcagatcaggagaatacggtgctactgcttatgtgacattcaaggagcgctttgccttggaaactgcggtattgctcagtggggctactattgtggatcagccggtatgcataacttattggggacaacctgaggagacttttaatttctgggacaggccaacttgggaggttgaagaggaaattgaatacacgagttatcaatcatgccagtacaacactactccgcaggaagctcttacagtggctcaagatatcgtgaagacgatgctagcaaagggggtcagtgctggtgtcggtgcaatgcgatcggtcgatgagacatatcgcgtaacggagacgaccaagacggtagctactgccactggaagaactgcagctaaggtggtaaatggtatcgtcaccagcagctacttctctgcaggagccatgatgttgtctgatgctcttactagggctgccaaggccgcggctgatctggccgctcatggcagacagagttaagtgaaaaacaaaacatacaatccatcctttttcagttactaaacatgaggacgaacaccttaataggatgcttgaagtgttgttgttcgatgtatatttataacagacaacattgttgatttgttgtataaattaaaaggagacgtacactgcgtttgcactaataagtttgattattgcaaatggagtcgagtgatcgtgcagtcatgtttctgactttctgctcatttcatattctcgcatcgctgttgggtgctgccttc

SEQ ID NO: 6054 - DNA, 1428 bp, Zea Mays
actaccctattccgatctcgaggacgccacgccacttttaacccccccacccccccttctgtcgtggtgcctcggcccaagtgctaacgcccaactgccaaggcggggaggggggatccggtgcgcgcgcgcgcggaaatgaacaccggctgattagtaggtgggagatcgaggtcgcgcccttgccccacacgccactaaaggccgcgccgacgggctcatcaggcgctctggacgggctcgcttctgccgctccgcgcttgtgcggtgggtgaagtgctgctgctggtgcgggaagcgtcgccaaacgtgcagaccttggtgggggagcgaggagtcgaaacaagggatgcttaatttagttgctgaggatatggatatgaagcctgctggatgaatggttaaggctttgtgaagaaatatatgaaccatgagtgaaacagggcacactgtacaagtcactaacctctcgagcagagtatctgaaagtgatctttatgagttcttttcgttctctggccctattgaacatgttgaacttatcagatcaggagaatacggtgctactgcttatgtgacattcaaggagcgctttgccttggaaactgcggtattgctcagtggggctactattgtggatcagccggtatgcataacttattggggacaacctgaggagacttttaatttctgggacaggccaacttgggaggttgaagaggaaattgaatacacgagttatcaatcatgccagtacaacactactccgcaggaagctcttacagtggctcaagatatcgtgaagacgatgctagcaaaggggtacgtgctcagcaaggacgctttggctaaggctagagcctttgatgagtcccgcggattaacagctgcagctgcagccaaggctgcagagctgagcaagagaattggtttaactgacagggtcagtgctggtgtcggtgcaatgcgatcggtcgatgagacatatcgcgtaacggagacgaccaagacggtagctactgccactggaagaactgcagctaaggtggtaaatggtatcgtcaccagcagctacttctctgcaggagccatgatgttgtctgatgctcttactagggctgccaaggccgcggctgatctggccgctcatggcagacagagttaagtgaaaaacaaaacatacaatccatcctttttcagttactaaacatgaggacgaacaccttaataggatgcttgaagtgttgttgttcgatgtatatttataacagacaacattgttgatttgttgtataaattaaaaggagacgtacactgcgtttgcactaataagtttgattattgcaaatggagtcgagtgatcgtgcagtcatgtttctgactttctgctcatttcatattctcgcatcgctgttgggtgctgccttc

SEQ ID NO: 6055 - DNA, 3363 bp, Zea Mays
accattagccaagccagtaccatcgcaagcacgcacctttgcctcccttccgctccccgcctcccccctcactcactgcccactgccactccactccccgctccccaaaccctaccccaacggcccaaccccccggagcggagcggagcgattcgctggtcccgccagcgccgcgcccgggcatgccgccgccattgggtggcgcgaccgacgacgcccactgagccgtgcgccggggagccgccgctgttccttcctcggtgtccagtggattggagtggagatcccgccggaagcggaggcaggaaccgcccctgctgtcgcgagttctgcggtgctgacatcggtgaaagatgaggaggatcaggcttgcctgtttgcttgttatctttgtgcaagtgcaatgggcggcccttggaacgcatgatgtgtacatcgtgaccatggaaggggatccggtcgttagctacagaggcggtgtccaaggatttccagcaaccgctgtggattcggacgaggaaattgatctaaccagcgaggctgtcaaatcgtatgccctccacctccgaggacaccatgacaagctgctagactcgcttttagtagaaggaacttacgagaagctttatagctaccatcatctcatcaatggcttcgcagttcacatgtcgccactgcaggctgagttcttgaagaaagccccaggagttaagcatgttgagagagacatgaaggtacagaaattgactacacacacacctcagtttcttggattgccaactggggtatggtcaacaggaggtgggcttgatagagctggtgaagatgttgtgatcggtttcgtggattctggaatttaccctgaacatccgagcttcgctgcgcacaagactgatccatatggacctgcccctcgttataaagggaaatgtgagatggatccagtaacacaaagaagtttctgtaatgggaagatagttggggctcagcattttgcaaaagctgcaatggctgctggcgcgtttaatcccgatgttgaatttgcatctccattagatggtgatggtcatggaagtcacacagctgcaattgctgctggaaacaatggggtcccagtgcgaatgcatggtcacgaatttggcaaggcaagtggtatggccccacgtgctagctgtctacaaggttctttacaggctttttggtggttacatagctgatgttgtggcagctattgatcaggctgttcaggatggtgttgacattctcaacctttctgttgggcccaatagcccaccaacagctacacggactacttttttgaatccttttgacgctgcacttctttctgctgtgaaagctggggtatttgttgcccaagctgcaggaaatggtggaccatttccaaaaacactggtgtctttcagcccatggataactactgttgctgctggagttgatgaccgcagatacaagaatcatttaacactaggaaatggaaaacttctctctgggcttggagtatcacctgcaacacatgggaatatgtcgttcagcttgatttctgcagctgatgctctattgggttcatctgcaaccaagtacagtgcattagattgccagaggcctgaactattgaataagaggaaagttcaggggagaattcttttgtgtggctattcgttcaattacatttctgggacagcttcaataaagaaagtgtctcagacggccaggaatcttggagcagctggctttgttgttgctgtggagaataattacccaggaacaaaatttgaccctgtaccattcagcatccctggaattctcatcacagatgtcagcaaaacggaggatcttatagactactacaattcttccaccataagagattgggctggaagggctacagccttcaaagcaacagcaggtattgcagatggtttggcaccaacactatacaattctgccccccaggttgcactgttctcttctcgaggacccgatgttaaagattttagctttcaagatgctgatgtccttaaaccagacatacttgctcctggcaatctcatatgggctgcatgggcgcctaatggaacggatgaatcaaactatgctggtgaaggatttgcaatggtttctggaactagcatggccgcaccgcatatcgctggcattgcggcactgataaagcagaagaacccaaagtggagcccctcagcaataaaatctgccatgatgacaacggccaatacactggacaaagggagccgtcctctcagagcgcagcagtacactgcatcggaaatgatgacactttctcgggccacaccgtttgattgtggtagtggcgctgttaacccaaaagctgcccttgatcctggtcttgttctagatgcaacccacgaagagtacatcgcatttttgtgctcgatccctgacgtcaaccagagcgaagtgtcaaacatcgccggttcagcttgcaactccagctccaaggggcgtcaacgccccttcgacctcaacctcccctcgatcgccatctctcagcttcgaggcaccgtgacggtgacgcggaccgtcacaagcgtgtccgaggagaccgagacctacaccatcatgacgagaatgccgccggaggttgccctggaggtgacgcctccggcggtgacggtgctgcccggagcatcgagagagctagctgtgaccctgacggcgaggtccgtgaccggcacctacagtttcggagagatcgccatgaaaggcgaccgcggccacctcgtcagaatcccagtggtagctatgggattcaagtagatagaagacgaccgcgaccggcgctagagagagtaagtacgaggagcgagttgtgcctctgagatccgaggtcttgagctgcagaggaatgctgtaatttttccatagtttgtagagaataagagttagggtctgtttggttgggctgtggctgtgaaaaaagttgctgtgggctgtgagctgtggaaaaagctgctgtaggctgcaagctgttaaaaagctaaaaactgtttggtggaaaccactaaaagtcgttaaaaattcttcgatatatgttttcacagtttcatctaaaaagccactaaaagcaggtccaggggtgctttcagatttgcactgcgagaaagtcggcttttagaaaaagctgcttcctggatctagccttttggttgacttttggcttttaggggggcaaaagccaaagccaaaagtcaaaccaaacacacccttagaatgccctcctggttgtaaaaatatgtatttgggtgtttaaatttaagcctatgttcagccttgctcttaaggcaaagtatcatgtgcacatca

SEQ ID NO: 6056 - DNA, 584 bp, Zea Mays
gttacgatccgggctcacagtataaaatacttggaactccttgccatctaatcataccaccagggagtaaaggttaggatgttgttgtggtgcttgaacctggaagcatgctccaccgggacctgggttcggtcgagcaacaactagtccgctaatgacgccagtcgccggctgctgttcggaggctagcaaaagggcgagagggtttgctagtacgtacagagcgtgcgcgagtaagtggctgggagcccgccgttgtcaagagagaagttgcgaggggcagaggatcatggcgctagaacttgtcgatgcgcagggagttcgccgaagggcgttaaagagcaccgaagccttggcgagtttcctccatactccgaaatttgtcgtcgtgccgttacagcgtgggtcgacgtcactgcggtctcgttgccggtcaagaacaggtaccgcaggatgaggcgcatggaggatgctgtggcgagttcgcgagaggtctaggtcgtcgtctcccagtcaactttgggttgctggaccgttgtctctgaaagggaaatgtgcccttgggccatttctaagtattttgg

SEQ ID NO: 6057 - DNA, 1802 bp, Zea Mays
gagaaagcggcccagtagcgccgccggaggggcaaagctgtaaacttgagctggaagcactgcgcccctgtcttcacaccagtttgctgtttctttttcaccccgagcgcgagaactagggcgaccgcagcactacgcccctgctgcccatgtcttcgtcggggcctttgccggcgaccggaacccaccacggcagtcaaagggcagagtgtaaatcccagggttccacttctgcacgcaaggtacaaaaggctgatcgtgagaagatgcgaagagataaattaaacgagcagttccaggacttgggaaatgcacttgatccagaccgtcccaggaacgataaggcaactatacttggtgacacaatccagatgctgaaagatttgactactcaggtgaacaagctgaaagctgaatacacgtcactttctgaagaagcgtgtgagttaacacaagaaaagaatgagcttagagatgagaaagcttcactgaaatctgaggttgataatttgaataatcagtatcagcaacgaatgcgggtgctatacccatgggttggaatggagccttctgttgtcatggggccacctcctgcatatccctacccagtcccagttccaataccctctggtgctgtacccatgcatccgcagttgcaaacataccacttcttccacagtcaagcttctggaaccatccaaaacacatgcatcccttacatggcatatacacaaccctgccatcctcccactgatcagccgtctaaccaacttaatactccagttgcccattcaagtagtcataggtctaactctccagctcaagactgtagaagcaagtcatctacattgcagcaaccaagctgtggagtgagaagcagtgatgctggtgatattgctactgatctggaattgaagactcctggttcttcatgtcaatcacatgcagagattgcttacaacgattcctcttcggatttgaaaacaaagaagcattgcataaagcagattaatgattgcactctcactgaaagcagtagttcaagcagatgctcttccaatggtcccccagatgtttctaatagtgctattgatgaataagctgcttgacgaccgattaacatacaaaccgttgactggtatagattgagaaaagatctcgtttaaccacccataaataatctcatgattgttagtggtaaaagtttggtggaagggaaaaaaggagagaacaaaatcatagacagcagcatctatggtggttcggtagggactccaggactaggtatggtgagcattgtcagtgttcggcatggcaggtagatattcataataactggattctagtaccattgcatagttcgtcctagactggcattttacataaatttctgtgtcaaatatgtaaataactcgagggcggataactggatatatagtgtctatgttggcctattcaacttgctgggtaacgccttgtttgggagcaagtgtattggatgggattgaggggtctaacatcccttactattaggggtgtttcggtagtgatcaattgcatctgaaactgctgcagcttcaagcttgttgtgttggtgtctagtgtctgcatgagtttgttccttggctacggtagctacagcatgctttactgaacaagcccttgaagtttgtacattgagctttggtatatatttgcattggactatagttcttggtgtagtcctattattctcacattacgtttaatggtaaattcgctcacttgtttgagttcgaaggtagatattgtgctttgaggca

SEQ ID NO: 6058 - DNA, 6510 bp, Zea Mays
gtcgacagactaacctttcatttgctgttatatataatgcccttgctcagccaaacaagcgactgcgttcattgtctgagcacgttcctcatggttatcgtaggaaatcactttttgaaggtctcattcgatataatgttccattactaagagcaacatggtttattaaagttacatacctgaatcaggcccgaccggcacctaacagtacttcagtagttgcttctgataatcaacgatctaatcaatggacaaaggatgttgttgaatatttacaacagattttggacgaagtttgttctaaagagggtgccattgtacctccatcttttaaagagcagtcatcaccaggacttgctgctggaaccaatcaaataaaaatgaaaacggaatcatctccagctggagacagtgaagaacccttggtgcacttcaaatggcggtatatggttcgcctcatccaatggcatctcacagaagaattgcttgttccctcagtacttatcgaatggttatctaaccaacttcaggagagggattcagatgatgttttagagcttcttttgcctattatacttggtctggttgacaccattactctctcacaaacatatgtgcgcatgttcgtggagctactagtgagacgtctcaatgtcgatcgtccaaaaaggttttcagtttcttctgttatagcagagttactgcgatacatggtacttgcagtgccagatacatttgtttctttggattgctttcctttcccatcatttgtggttcctgatgtatatggtagaggtgctttgttgaagataaccagtggtggtggaattttatgttctaagaggcgtgatgcttatcggtatttgtcctgtggttatgctgtttcttccattcagaaacgtgcacatgatcttgcagcagttgctaaccctagccttcaagcacgtggtgcagccaaagtggtacaggctttggacaaagctcttgtcacaggaaatttgtcagtggcatatttttcactctttaatgatttatctgatgcgttaatggaagaaagatggattaaagaagtgaatccctgtttgcagtcttctctgatgtggattgggactgttgagctatcccttatctgttctatatttttcctttgtgaatgggcgacatgtgattaccgtgattgccgagcatctccctctcagaatgtgaaatttacaggaagaagagatttgtctcagatacacatggcagtgtctatcttgaagaataaaatggatgagatgaataacttgtctcgtcctaagagtagtactcgcatcacccttaataaagttgccaaaggttctttgaatgatgcttgtttgacagcagctgctgtggatgattcttctggactgagaagtaatgcaaaaaatgttgatgagaagaaggatacaaatgatatctttgaaagccctggtccactgcatgatattattgtgtgttggttggatcagcatgaagttagcaacgttgcaggttttacccgggtggatgttcttatcgcggagcttatccgcaatggtatatttttccctcaggtttatgtcaggcagctaattattagtggaattactgataagaacgatacaatgctggatgttgaaagaaaaaggaggcatcacagaactttgaagcagcttcctgggtcttctttatttgatgttcttgaggaaactaggactgcagaagagcaacagctatatgagatgatgtcaacatactctagtgagcgacgccttgttctctcagaactttcatgtggtcattcattttatgcaagtggcagaggtgagtacacttcaagttcctgcattcggaagcagagtgatcttccagttgcatcagaaggtgataagcatggaagagtgctagaacaagtagaagatgttaaagctcttttgtcaagtctgttgggttttacatatcctcccctagtggaatcaaaactttgtgaaatcaaaacaagctttcaagaatcagtaacgtcaacgctcacacaagttgagactggggaagccaaaagtggatgcgaggattgtatgaggtccaaggggcagaaattggatgacagcgccactcctttccaagggtttccattgattcaatcaggcgaggaggatatttggtgggtgaagaaagggacaaagttacaagaatctttcaacgttgaacctgtacagaagtctgttaagcaaacttctagaggtagggcaaaagttgttcgtaaaacacaaagtcttgcacagcttgcagctgctagaatcgaaggtagccagggggcatctactagtcatgtttgtgaaagcaagatgagctgtccccaccatgaacctaataacgatggtgacaacgtcaaagattttgatcacacaagggcagcaaacgtgactgcaatagggaagtcactaaaaagacttagattgctcgaaagacgatctgtctcttcatggttgttgaaatcaataagacagcttgttgatggaaacggaatgacagcttctaaagctaccaattctataagcatccttcctttgcagcctgatgataaaactgcatccaaatggaggctaggtgatgaagaactgctgtcagttctctatgtactggatacatgctgtgattcagtctctggagtgaagttcctcatatggttactagtgaaaattcgtggagtgggctcctcaggtcaacctgggaggacttatatgcttatgaggaacagagatcaccaagtttgtcaggtcaacgaggcacttgtgttctcatctctgcttaggtatgagaacatacttcttgcgaccgacatcttgcctgatgttctaagtgctttagtgaacagaaattctatgtcagcaactaccaggcatcctggttcaacagcttttgcttatgttcgatattttttgaagaaatatagagatgtggctagtgtggccaagtgggagaaaaactttcggaccacttgtgatcaacgcctgttagctgagcttgataatgggcggtccattgatggtgatttggtatcttcttcgggtattttagcaggcgaggagattgatgagcaggtccgccaaaagttgaatggaaggagttcaagactcgtgcagaatatgaaagagatagtgcaacggcaagctgatggaattcagcgcagtttaaaggaaaagaaagttcttgcaggcgcagcacccaggaatccactcacttttgagaaagaagatagttatcaaattgcacatgacattgttttgggcttagtagaatgcatcaggcaaaatgggggtgcaaatccagatggagacctttcaatagttgcttctgctgtttctgcaatcgttgtgaatgctgggcatatgatagcaaaacatttggattttgcaggaggaaactatcaaggtgttaattctgtggctacttcgctaaattttgttcggcacactttacttattcacataaattctctttgcttactaaaagaaactcttggagatcgcttcagccgtgcctttgaaatagctctggcggttgaaacttctgcagctgttacagcagcttttgctcctccaaagatgcaccgcaatcagtttcaaccatctcctgaggcccatgatgcatatggaaatcatacaagtgagctcagcaactcagggaaaggttttgttgggagaactgcaaaagtatctgctgctatttctgctcttgttgtgggggctgttgttcatggagctgttagccttgagcggatggttgctactctaaaaataaaagatggtctggatattatgcagcttttgagaggtttgaaatcaaatacgaatggtgtatcccatcctactggaggttttaggattgaaaattccacggaagtttcggtacattggtttaggattttattggggaactgcagaactgtctatgatgggcttattgcagatattcttggagatccatacattattgcactctcaaggttgcagcggatgcttcctctaactgtaatttttcctccagcctactcaatttttgccatggttctttggagacgatatatttttaactgtgaagatccacaactttatcagtctttttcaaatgcaataaacgatattaccagacatcagccttttcgagagatctacttccgtaatacacatcggctgtataatcttctggcttctgatgttggtgattcgaagtttgcagcaatgcttgaaagtcatagtccggaccggaattcaaaaatattgccatttatacctctccgtgcacgcctttttctggacgctattattgattgcaacacaccaactattcagggggatggtgcttcagagccttgtgatcccaaagataatgaactaaagctttcagagaggcttatgcaacttcttgatactcttcaacctgcaaaatttcactggcaatgggttgagatgaggcttcttttagatgaacaggctcttatggaaaaagttgcagcaggcaagacaacacttgaatcacttcggtcattatcccctaaagctgagggttttgccctttctgatagtgagaaaggatttactgaagtcattctatcaaggctacttgctagacctgacgctgctcctctgtattcagaacttgtccaccttcttggaaagcttcaagagtcacttgttatggatgtaaaatggattctacaagggcaagatgctattcttgggcgcaggtcaacaagacaacagcttgttcatattgcccaacgaaaaggtctttcaacaaaggcacaggtttggaaaccatggggttggtccagcttgcttagcgatgccattcctaataaaactgcaaaaaggaagttggaagtcacatcaattgaggaaggagaagttgtggatgacactgttgatgctaaaaggactaccaagactccccctcatagtgttgatagaagctttgaagggattagatcgataaataaatatttaactgagaaagcccttgctgaattagtattgccttgcatcgacagaagttctgctgatatccgtgtttcttcaggaaatgaagtgccatcgaacaaatcaagtggccgtagaggaattcgaggtggaagcccaaacattggtagaagagctccggttggtaatgacccaagtcctccttcggcttctgctctgcgggcagcgttgtggttacgcctccagttcatcattaggttgcttccagtaatcatggcagataggagcatgagacatacgcttgcttctgcaattctaggcctgcttgcaacgcgcatgatttatgaagatgcagatttgccccttcctcctaccaacgcaactgctttaaggcgggatgtggattccttgctggaacctcccctggatgtcctgcttgaccggcctggcgaaagcctttttgagaagcttttatgcgttctccatgcactgcttggtagctacaaaccaagttggctgaagtcaaggtcagcctctaggtcgtcaattaaaagccaacgagatttctcagcatttgataacgaagcagccgagggcttacagtccgcgttggaccacatggaattgcctgaaacaatcaggcggaggatccaagcagccatgcctcttcttccaccatccaggcgcccttgtatgcaatgccaacctccgcagttgtcgttggctgcattatcaccactccagagcagtacctctggtgtaggtcctcaacagaaaagttcttgtgtgagttgggtgcccactaacgtatcagtcagaagcaaggcagcattgccttctcatgaccctgaaacggaggtagatccatggagcttgctggaagatggcacaaactgccccccctccacagcatctggaagcaatggctcgagtggagtgacgggagaccatgctaatctgaaagcttccagctggcttaagggtgccgtgagggtgaggaggacagaactgacctacattgggtctgtagatgacgacagctgatacgtgtatgattatcttggtgaattggaggcaaagaatttggtctcacttgttggcatttgtgtcgtgtgcaagttaaaagcaccaactgcatcgaattctttgagagctctgtaccacaaggtggaatggaaaccatatggcttttggttggttgttgtagtgttagaatacatcgctgcccccgatttgttttagttagggcctgtgggggcggctgtatatagttggaatccatttctggattcaatgggggagcttatttgagaatcaggcaggaagccatgtagtagatttctagccaagagccctgtacttgttttttttttgggtctgagatgtaattgtcatgtcacatatattcttttgatctaaggctgacggaagttgcattgcctatttgctttagctattactagtgcagcctagacatcatgagtttggatcgttctatgactaaaccgtcctactggtttgctgtttg

SEQ ID NO: 6059 - DNA, 2084 bp, Zea Mays
cacgacatggctctcgtcccagcaggggacagggctgctcgcttggacccacctgtcaagcttgggctggagggtgggggctgatccgctcctccgcggctccgccacacactgacccacccatccaaccacttccacgaatggccctcgctctgtgaactcgtcgggttccatggcggcgccgtcgcctaaacccccgacaccacgcgggcgctgccaccacccgcccaacgccacccgccgcctccacgtggccacccgctgcttccccgacccaccaccaccacctgcctccatgccgccgatcccgagtccgaaccctgtgctgtcccttctctccgcggtgcccgactgggccgacgccatccaggagcgccgcgtccgcgaccgccgcccgctctacgaccacgccacctggcggcaccaccgcagctcccgccgccacctgcgccacctcctcacctcgctgtcctcccgcgccatcctctccctggcgcccccggtgtccgccttcaccgccttcgccgccgccatcgccacctacaacacgctcctaccggcctacgcgctcaccgcatcctcgctcccctacgagctcactgcgcccgcgctcgcgctcctcctcgtcttccgcaccgaggcttcctacgcgcgcttcgacgagggacgcaaggcgtggatgcgcgtgctcgccagcgcagccgacctcgccgggatgctcatgcgtcatccttttcctaacaatctgcatacgggtggcgctcccaatccgggaccgggaggacgacaggctgacgacgagccgctcaggcgcgcgctcgtcaactacgtcctcgccttccccgtcgcgctcaaggtgcttggattggattggattggactgctctgctctactctactctgtggggaccttgagggcttgcttggcgaagatgacctgagcgttgttctagcatcgaaacatcggccacgctgtattatcgagttcatcgcacagagtctccaaatgctagatctcgacgagcagaagaggagcatcatggaatcggcgtttgcgagcagctcatggggatccctatccctctcgcatacactagacttacttcaaggttccttgttctgtggcatcttacactcccaatcatactctgggaagaatgtaaatggattgttgttccagctacctttatcagtgctgcatcgctattctgcattgaggaagtgggtgttctaatcgaagagccgttccccatgctagctcttgatgccctgtgcaagcagctccacgacggtattaaggatgtgatggagatgcagaactcggttcactcgcgactagttgccaagactgctacggaccacaggggcagtaggcgcgagaacaatggttggcctagctccaaaagagaaggagccaagattgattgagcacgcaaggtcggtcgggtcgttgtgaatttatttgaagatagcattgcaagcaatctgtggcaaccagatatccatgaacgaactggagaacttgtggaccccatttcctcctgcaatggtatgtacctgtcctatgtaaaatgcactcgctactgcttggatagctactaaagccgggagcgagcctgggattgggattgggattggtgtagggaggagttgcatcagcacgttggtgtacatgtggcgatgagtagagcagatttattatgtgttgtaaataataaagaagaaagagacacaaagctagcttatgttgttgtacgtagctgtgtgtgtctatagatagagataaattagatagtagatcgtagtcgatggaaacatacgtaacggtgtgatattttgtcgcccctgcaactgcaagattgcttgcccacttgcccctgtccatggtgatggttgctgccggtcctgaggatgtgtggcggacctaatgatggaggatgatgcatgcaatgcaatgcagccagcacttgggtcgcccaggttgctttgccggaatcatcattattagcaaagtgtcatgaggtgtcgccccttcgcgtccaaaaagaaaatttcaaattgaactatatctacttttaaaatac

SEQ ID NO: 6060 - DNA, 2301 bp, Zea Mays
tctgcgatagcgttatgccacagtgcgatcgcctccctgtgtcagcgctagtgtgtccgtgtgtggagctagcctagcacgcagcgatctgactggccatggtctccccttcgtcagctctccccaaggtcgccgacgaggccacccctcgccgcgccaagtggtggtacgtgacgttccacaacgtcaccgcgatggtcggcgccggcgtgctcagcctgccgtacgccatggctcacctgggatggggccccgggatggtggcgctgctggcgtcgtgggggatcacgctgtacacgctgcgtctgctgatcgagctgcacgagtgcgtgcccggcgtgcggttcgaccggctccgcgacctcggcgcgcacgcgctgggcccgcgcctggggccctgggtggtggtgccgcagcagctcatcgtgcagctcggctgcgacatggtgtacatggtgacggggggcaagtgcctgcagaagttcgccgagtccgcgtgcccgcgctgcgcgccgctgcaccggtcctactggatctgcatcttcggctcctcccaattcctgctgtcgcagctgcccaacctcgacgccatcaccgccgtgtccttcgccgccgcggccatgtcgctctgctactcgaccatctcgtgggccgcgtgcgtggcgcgcggtccggtgcccggggtgagctacgacgcgtacaaggccggcaccggcaccggcacggcggcggactcggcgttccgggtgttcagcgcgctggggcaggtggcgttcgcgtacgcggggcacggcgtggtgctggaaatccaggccaccatcccgtccacgcccaccaagccgtcccgggcgcccatgtggaagggcaccgtcgccgcgtacctcgtcaccgccgcgtgctacttccccgtggcggtcgccgggtactgggccttcgggcgcgacgtcggcgacaacgtcctcgtggcgctgcaacgcccgccctggctcgtcgccgccgccaacatgatggtcgtcatccatgtcgtcggaagctatcaggtatatgcgatgccgatgttcgaaagcatcgagacgattatggccacaaggttcaggctgccgcgagggttgctcctccgtctagtggcccgatcggcctacgttgcattcacactgttcgtggcggtgaccttcccgttcttcggcgacctcctaggcttcttcggagggtttgggttcacgccgacctcctacttcctcccctgcgttctgtggctgaagatcaagaagccgccgaggttcagcgcgtcgtggtgtgccaactggggctgcatcatcgtcggagtgctgctgatgcttgtgtccaccatcggcggcttacggagcatcgtccaagacgcatcgacgttccagttctactcctgaagccctcacacttgcatgtacctctacactcacatggttccagcaagtcgtcaccctcgctcgtccacgcagctctacctctacattttgttgcaagcttgagggtgtccgggtgtggctgcagcctgccgaaatgcagaggacgatgcagcaaactgtacactcgctaagacgtacggttgtgtgttctacggatggggggggggggggggggggggctttcctgtgcgcgcccagctcaatctgcaaggtgtggttgcaacaggcagatcagacgaatcgtttagccgtagtgaaaaatataaaatcactatctttaatgcgatcatctgatatgtgaacagactttctctatcaaagcatgttaggtttcagaaagaacataaggcgacacataatataatacatatataagcgaaaaaaactgtttacgaatttcagaataagaagggatttcgataacacatcatctatccattaaagagtgcacagagaacccataattcttttaacaggtttctagcaccaaaaacaaatattacataatgcaaattattgcaaatcaataaattaactttaacaactttactctctaatataaggccctagttaattacttacaacataagagttaataccatggaagtaaaacacaaataacctaggattattatttaacaaatttctatcaccaaaaacgaatatttacatttccacaaatcctacacgtacgacattagtacaaaccgtacattgaaatagcataaaataaaataaaaaatagctataccatactttactctctaatataggggcccgattagttacttatgatataagaattgataccatgaatgtaaaaacataacaaaaacaagctcactgttcatgccga

SEQ ID NO: 6061 - DNA, 3009 bp, Zea Mays
cgggtctcctggcacggatacaccgcggcctccccgatcgccatcgacggtcccgtataaacccgcctccctgcgcttgggcagcttccctcccctcccctcccctccccacctaacgttaccggccggtcagcctctagtccacccgagcgcggccggccgcgtggacgcccgccgacgagcgagcagcgacgacgacgagcgagcaccggcggcggaggcggatggggaagtacgagatggggcggacgctcggggagggccacttcgggaaggtgaggctggcgcgggacgcgggcacgggccggtccttcgccatcaagatcctcgaccggcagcgcatcctcgccatgaagatcgacgagcagatcaagagggagatcgcgacgctgaagctgctcaagcaccccaacgtcgtccgcctgtacgaggtttcagctagcaagaccaagatatacatggtcctcgagtacgtgaacggaggagagctatttgacaaaatcgcactcaagggtaagctgacggagaaggaagggaggaaactgttccagcagctgatagacgccgtgggatactgccacgagaagggggtttgtcacagggacctcaagcctgagaatgtcctcgttgatgcaaagggaaacataaaggtttctgattttggactaagcgcccttccgcaaaaccaacgaaaagatggtttgttgcataccacatgtggcagccctaactacatagccccggaggtccttctgaacaaaggttacgatggctcggtatctgacgtgtggtcctgtggtgttattctatatgtaatgcttacagggagtcttccatttgacgaccaaaatatggttgtcctctatcagaagattctgaaagggaatgctcacattccaaagtggctctctcaaggtgcccaagatctactgcgaaagatcctggatcctaacccgatcacgcgcgtagatgtggatgggataagggcacacgattggttcaagcaaggctacgctccttctgcgccgtttaatgatgacgaagaagatatcaacgtggatgaagaagacagcctaaatatgactgagaatggcattcaagacaagatagcaatcaaccaaatcaatgctttccagctcattgggatgtcctcctgccttgatctatccggattttttgagaaagaggatgcttctgaaaggaaaatcagattcgcatcaaattatcccccagcttacttgtttgagaagatcgagagcattgtcagaaaaatgggtttccaggtacacaagagcaacggcaaggtgtttgagattaatgaatccctttacgttgtcgagctaaaaaagtcatctggagactgctccctgtacagaaagttgtgtgagacgctctcggaggacttgggcacatgcaaaagccagcaatttttaaagcaggattctatcagacaagagataggtagacataacagtagcttttaactaagagcccccttgttaaataggctatagacacaaactaacacaaacaatatactgaatttaaaacagtatattgggcatgcacctattacagatgtgctctctcatgccttttgtcatgaaaccttaagagacttagactatgaaaaattggcaactgacaatgtatcgaactccaaagggataatatgatgatgtaaacaagtaaaatacgcatataagtgattcagagctacctggtctctatgtttctcttatatattgattgatattggaacgtaagattgtttgcttttgaagcccctggctgacttccatggctccagaaagaaagtgcgatgtgttgttcgtaaaaagaagccctttcagatgcatgttcaactaaacgattgcctgtgaagaccatggatataggagaacggctcggtacaagtttgaaagtttgccaatcaccagtacagtccttgcatgagcattgtccttcactgaaatggtggaaacggttgcagtctctagtgatcaacttgtgctcgtgcaacaaggaaataagctaaacagttgtcttcacaggctctgaggttctttgttattcggagagctgagcctgcttctcactattttcaaccgatgcaccttcccttaggcactgttcggtttccagacattggagctccggaatgattcctagctggattatttctctaatttatataattttgatgagctggaacgaatcccggttcattcctgtacaagcgaacgggcccttagattgctcatcaatgtgttgttgcaagatcttccaacattttgtagatctccttggaccttgggtgcgatcaatcgccagaatcgagcttcttccaggaattaatcatctggatgctctccctccaaagcgacctcctcatttctgcaacaccttccgtttgtgcattttgctttggaaaaagctactgcaatgcaagttgcaagcagcaaggtattcactgtggtgtggtgtgcgctgatgagtcgtgtctcgtccatcctttgcttgcagagttgcaggaagaagatgagggagtaggatggaagttcatgttgtgcgttctggtgttccgactggccacggaagatcgaataaacattggtgaaagccccatttctactcataatgtttgcggctgtttcttttggtgcatgtgcatcagggtaacctgcacttataactttccattttctttcaattatttttagtaagtcctttttttcatagtcaatgggatcattctggatttgcatgtcgacggcaaaaaggagttgcgttcctcccagaaccccttcctattatgatagaagacattgggctccgtccataatcatccattggcgacaaagtttcttgtacattgtacacatgtaaaacaatcacaccaccatgaaccagccgccatcagtgttttctgatttcattgtttcagacttcaaagcattgtaaaatcagtttgtgatggtttgctgactttgtctgccttgttgctac

SEQ ID NO: 6062 - DNA, 3227 bp, Zea Mays
ccccaattgctcgcgttgcttgcgtcccttggcgaccaagttacatgtataaagccatgcatgaccagagaagaacacacaactgtcctggcctgtccacggtccacacacgccttccttatatcggcgctcacggttctataaaaaaaacacagtacgagcagagcaaggcggccgtgagctgagctgagggaaggacgacgtacggcacagttgctagcccggccgccggagctctccgtgatctgggccgccagcaacagcatgggtgccgcgctcttggcttcttggccatgggacaacctcggcttctacaagtacgtcctgtacgggccgctggtgggcaaggcggtggcgtcacgggcgtgggaggcggcgagccccgaccgctggatcctcctcctgctcctcctcttcggcctccgcgcgctcacctaccagctctggagctccttcagcaacatgctcttcgccacacgccggcgccgcgtcgtccgcgacggcgtcgacttcgaccagatcgacaaggagtgggactgggacaacttcctgatcctgcacgccctgatggcggccgcggcgctgtgcgcgttcccgtcgctgcggcatctcccggcgtgggacggccgggggttcgccgtcgcgctcgtcgcccacgcggcggccaccgagcccctctcctacctggcgcacagggcgctccacggcagcagcggccgcctctacgcgcgctaccactcgctgcaccactccagcagggtgccgcagccgttcacggcggggctggccacgccgctggagcacgtggcgctgggcgcgctcatgtcgctgcccctcgcggccgcgcgcgccgccgggtgcgcctccgtcgcgctcgccttcgcctacgtgctcgccttcgactccctccgcgccatgggccactgcaacgtcgaggtcgtcccggcctcgctcttccgggccatcccggccctcagatacgttctctacaccccgacgtacgtacgtgcgttaatcctctccctctggcctctgcctgcccgcttcttctctccgacgtccctcttttcaccccgattttatataaaaccatgcatctaaccgaactgatgtgcactctttctatcaccatcttctacagactctcgactattttagctagcagtgccaagtgaattatcctatgtctatttgttgctgcaacatttcgagctctgactggaaagcatacacagttactacgtactccatggcacatccacagttgtcagccaagaatacgtagaaatacatacatatggctctgcttgaaacatgaagcggtgctctgctaagctgcttccatctcgctttatggcttgtcgcgcaccagcttcgcttctaaccacctttaatttgcccacataatcacatatataatagtacgtacgtactacccgttgtcgttgcttgcttcgtactcctcctacctacgactacgacgtcgtagtatatatatatgtgcaatcacgtgctgaatcatgcatgcctggatgcctacgtacgtgacactactgattctgcatatgcatgcgtgatacagtgatactgttgtgtatcactctcatgcatggctggcctctccggcctctctgaccgcttcgtacgtgccgcaggtaccacgcgattcaccacaccaagaaggaggccaacttctgtctcttcatgccgctgttcgatctgctgggtggcacaatcgaccgacgctcgtgggacatgcagaggaagatgagcgcaggtgtggacgaggtgccggacttcgtgttcctggcgcacgtggtggacgtgatgcagtcgctgcacgtgcccttcgtcatgcggaccttcgcctccacgcccttctccgtgcagctcttcctgctgcccatgtggcccttcgccttcctcgtcatgctcgccatgtgggtctggtccaagaccttcgtcatctcctgctacaacctccgcggacggctgcaccagatctgggccgtccccagatacggcttccagtacttcttgccgtttgccaaggacggcatcaacagacagatcgaactggccatcctcagggccgacaagatgggcgtcaaggtcctcagccttgcagccctgaacaagaacgaggcgctcaacggcggcggcacgttgttcgtgaacaagcaccctgacctgcgcgtgcgcgtcgtccacggcaacacgctgacggcggcggtgatcctgaacgagatccccaagggcacggcggaggtgttcctgacgggcgccacgtccaagctcggcagggccatcgcgctgtacctgtgcaagaagagggtccgcgtcatgatgatgacgctgtcgacggagcggttccagaagatccagaaggaggcgccggcggagttccagcagtacctggtgcaggtgaccaagtaccggtccgcgcagcactgcaggacgtggatcgtcggcaagtggctgtcgccgcgggagcagcggtgggcgccgccgggcacgcacttccaccagttcgtcgtgccgcccatcatcggcttccgccgggactgcacctacggcaagctcgccgccatgcggctgcccaaggacgtgcggggcctcggcgcctgcgagtactcgctggagcgcggggtggtgcacgcgtgccacgccggcggggtcgtccacttcctcgagggctacacgcaccacgaggtgggcgccatcgacgtcgaccgcatcgacgtcgtctgggaggccgcgctcaagcacggcctccgccccgcgtgatccgattgctggccccccgccggctcgaacgcctctgttgtaccaaccaggccgaaacgaacgggcctggctttgttactttccctttgttttccaagttcgtcgagtgtgaattggtggttcctggagattcaattttcttttcctgcttcctccacaatatgtatactgtaaactatataatctgtatactatatacaagagacaaaaggatgtaatgagagaaaatacaaggacaaaaaatatcaatatctataacatcaaagcaaattctttcatcatttctatattctctccgtcatagggctgcttattggcatcgagtttttttaggcacaagaataatgttggacgtgttcaacaagttaaaatattggtcactcgtgctgtacatgtaattggtcatttagatgaacgaagaagagacccatgaagtcgtg

SEQ ID NO: 6063 - DNA, 2440 bp, Zea Mays
caaatacacatcaggagctgctgttgaaggagtactatactcaggagagagagagggagagagagagatatgctgtggcaggggccgggttaggttttggaagaacttgtcaaatcacagcatttgatgctagcagatccgggagagttggaagcaagggatgcagcatgatatatacctgctgctgcttgacacagaggcacatgcatgtcccttttagtgggcaatgatggtgtgcaggtggaggtgatgatagtttgcctcatctgggcggccgggggagggactgagacattccatccgaggccatgccgcctcacattcacagctacgcaccccctgccctgcaatattccgtttgtttgctaatgtgttgtatcgagatgctttcgatatgaggatgtcctgtcacggaagctgcagctgcgaggccagtcgtcccaaccccagccccagatgctgctgccggacgtcgtgcgcccctattaaacccgccaggagatgagatgcacgtccttccactcgcgctccaccccctcatgctcctcgcctgccatcaccgccgactccggccgccgccgccgctgaagaagaagaagctcggcctgcgccgtccaacgaccgacgaagctatgctcagctcactccaccaccactcctcgtcctcctccgacaccgacaacaacaatggcaacaacaagaacggcagcagcaacaacagcgacgtcctcgcggcggcggcggtgccgtccgcgcgggacctcgtgctcgcgtgcgccgacctgctgcagcgcggggacctccaggccgcgcgccgcgccgtgggggtcctcctgtccgcggcgtccccgcgcgcggacgccgccgatcggctcgcctaccacttcgcgcgcgcgctcgctctccgggcggacgccagggccgccgccacgggcttggtggccgccgccgccgcgcggccggcgtcgtccgccgcctacctcgcgttcaaccagatcgcgcccttcctgcgcttcgcgcacctgacggcgaaccaggccatcctcgacgccgtcgagggcgcgcgccggatccacatcctcgacctggacgccgcgcacggggtgcagtggccgccactgctgcaggcgatcgccgagcgcgccgacccggccgcgggaccgccggaggtgcgcatcaccggcgccggcgccgaccgcgacaccctcctccgcaccggcagccgcctccgcgccttcgcccgctccatccagctccccttccacttcacgccgctcctgctctcctgcgccgctacccatcagcagcaggtcgtcaccagcgcgagcaccacgaccaacaccaccacttcgagcgcggccacgacgagccagctggagctgcacccggacgagacgctagccgtcaactgcgtcatgtttttgcacaagctaggcgggcacgacgagcttgccgccttcttgaagtgggtcaaggccatggcccccgccgtggtgaccatcgcggagagggagacaatcggcgggggtttcgaccgcatcgacgacctgccccagcggtccgcggtagccatggatcactactcggccgtgttcgaggcgctcgaggcgactgtgccgccggggagccgggagcggctggcggtggagcacgaggtgctcggcagggagatcgacgccgcgctgggtccctccggtgggaggtggtggcgcggactcgagcggtggggagccgcggcgcgcggcgccggatttgcggcgcggcctctcagcgctttcgccgtgtcgcaggcgcggctgctgctgcggctgcactacccgtcggagggctacctcgtgcaggaggcgcgcggcgcgtgctttctcgggtggcagacgcggccgctgctgtccgtgtcgtcgtggcagtagcccgccgccgccgccactgaggacgagccttctctacctgctgcgtgcatgcattcatgccggcggcgccgacggacggactagggtttgcctcgctcatcactagtcatcagtaccgcatatatagagctagcgtatatatgagcattgcattttgtagcaataatattggttgttacttgcgctacgtacgtacttagcaagatctcattgtgattttggaggatgggtttgttgggtcaattggaaggaggaaaccctaaccctagcttgctgtggtttaattgctgttgatcttggcagcttggatggatggatggttagttggttggttgattagcactcttgttaatttgaggagtttaagtccatatgtagccttgcatgcatggaatggcggcattggaacaagtgaagaggtcggccttcaggctttgttcggctagcaatttcttcaacgtactaaaatcggctttgctattatattttcatacttgtatctatctatctatcttttatttatatatttg

SEQ ID NO: 6064 - DNA, 1177 bp, Zea Mays
aagtcccaacgaaccttgcggccggggaatatcatttatcgcccgagtctgcaggggtggggacgtggtgtacatcattgctggtcatgccccaacaatcccccctgtgttcgttggtgtcgcgggtgttgttgttccgagatggaggaaaacgaggaaacaaaaaatggatatagaggagtgcaggacgaggttgcaggataaggtccgcctacttcatccaaagaatgccgaagggatcgttgactacatgattgcaaacacaccacttgagaatatcagatcatatttgttgactgccacagataatgtactaatgaacctatttgagggtgcaaaccgcctgcaaaatatcctgaatttgtccgaggaaaatgagcccctatttggtctattcaccccctttgatcagattggaccacagaagcagcaccagttttcttcaagaaaccattctcaggtccttcaggctccattgtaccccattggcccaagtggagcttttcagaatccatactcgaaactcactggcttcagggatcatttccagtctttgagcattctggatggtgacacgccgagtcactacaaatgtgctagtataaatgttggtggctatcccagtaatggcaaggtccaaacaaagacttgtcgtttttacttgtccattagaaagtgtaagtatggtgagaattgtcacttttcccttgtgtgcggttacccagagattaatgacatgaggcaagttgaccaccttggttcattgcaaatgttggagatggagatcgatctcctgttgctgcagccatcatcacaagtcccggtagatcatcttgaaaaaaaattccttgagatttatacaaagcttctggaaattgatggattccatacagaggaccagaggaataggaagactggttacggcctcacagatctgttcatgcaacttaacgccaccagagagactgagagacgaggacggtattatgttgtcctggtgaaagatgctcctaagtacgtcactcatggtttccaaccggcggtgcctcttgctggcagtgattttaacaagatttgtgttaccttcaaatctgaaagcatattcactcacacagatgttcagaactacttcagattgatcaagaggctccttctaattaatgaatggcatcctaag

SEQ ID NO: 6065 - DNA, 1757 bp, Zea Mays
ttcgtctctactcccaaacccaaacctgattaatgcctcgcctccattccgtactctcctgctgaagcttttttctctgaaactagtatatcccccatctgtttggtcccgacgattttccgctttgggagcaccaccaagctcttccagcttgcagggctggagtctttgccagggacagcaatggtgccgacgcatggcgatacagccggaccgagctccagccaggatgacccggcagccagcgtgaagaagcgcaacagcaacaggcctcagtcttccagcttgcaagcctatacttgcgcctcagacggtcatccctgtactcctgtttgtgggcgtagtttttatcgtgattggccttggctgcattgcagcctcaaacagggtggttgaagtggtctatgagtatgagacttcatgcataccaagacacatgcttggcaacaaagtcgcctatatccaaaacccatctatagataagacatgcacatggattctcaaggttcctagggatatgaagcacccaatctacgtatattaccagcttgacaagttctaccagaaccacaggaggtacgtgaagagccgcagcgacaagcagctgagagatcccaaggaggccaacagcacgcagcagtactgcaagcccgaagctaccaccgagcacgggagcgccgtcgtcccctgcgggctcgtggcctggagcctgttcaacgacacctacagcttcgcccggggcaacaacagggcgctgagggtccacaagcgaggcatctcgtggaggagcgagagggaacacatcttcgggaagcaggtgttcccgaggaatttccagaaaggagctctgatcggaggaggcacgcttgatccaagaatacctctgagtgagcaagaagacctgatcgtgtggatgcggaccgcggctctgccgacgttccggaagctgtacggcaggatcgaggcggacctccgcgccggcgagctggtcacggtgacgacgcagaataactacaacacctacagcttcggcgggaagaaggcgctggtgctgtccacggccggcgtgctgggaggcaggaacggcttcctcggccgcgggtacgccgtcgtcggcctggcctgcctgctgctggcgctgctcctcaccatgctctgcctcgtcttcccactgaaagaggaacaccttgcgctgcagtaccctttgctccggcctgccacggtgaccatgcatgcctagctagatcagtagacggtgtacagattgaaacagtttcttctttttcatttttgatgtatactcagattgaaacagtttgttctttttcttcttggatgtatacttggggtctgatcggtgatttcttgcgcacaggaacagctataggtcgagctgcgacatgtaaatagacactcaaagatttgagttgtacttgtacatttctactagggtctaggggttacagagtttaaaattggaatatgacagtggatacgagggtaacccccaatgtaatcgccaagtgatttggtagtagagcaccgcagtgtgtctaaaaatgaggattgaagtttctctgtcgatactgagcaccgttaccagccagccactacgcagctctgtttggatatcagttatattatttaggtgtcactgaattgtagtttagaattgtacggtctattttcacataatacagaggagtgagctctctattgagagagagagtttctagttataattcactgaacgttcg

SEQ ID NO: 6066 - DNA, 2598 bp, Zea Mays
aaccccttccttttgctctcccgttgcgcgcttctcctcctcctcctcacacccctctctttctgtcggcggcgactgggcggccgtcgctgccgtcctacgccagctgcccaggtcttcctcgcgcccttcgccggcggcaaccaccgccagggtaagccagccatcagccatggctttgaaggcgagctccagcgacaaccggaccaggagcacggtatccctgtgcatagtgattggcatgtgctgcttcttctacatcctcggggcgtggcagaagagcgggttcggcaagggggacagcatcgcgctggaggtcaccaagcgcaccgactgcaccgtcgtgccgaaccttagcttcgacacccaccattctaaagccagtggcaactctagcagcctggtttctccgtcgaagaagttcaagccgtgccctgatctctacacggactacaccccctgccaagaccagaacagggcgatgaagttccctagggagaacatgaattacagagagcggcattgcccggcgcagaaggagaagctgcactgtttggttccacccccaaaaggctatgtggctccgttcccgtggccgaagagccgggactatgtccctttcgcgaattgcccatataagagcttgacagtcgagaaagccatccagaactgggtccaatatgagggtaatgtattcagattccctggtggagggacgcaattcccgcagggagcagacaagtatattgatcagcttgcatcagtcgttccgatcgccaatggaactgtcaggactgcacttgacactgggtgcggggtggctagctggggagcttatttgttgaagaggaatgtcttggccatgtcgtttgccccgagagattcacacgaggcacaagtgcagtttgctctggagagaggtgtccctgctgttattggcgtccttggtacaataaaacttccctatccatcgagggcctttgacatggcccattgttccaggtgcttgattccatggggagcaaatgatggaatgtacatgatggaagttgatagggttctaaggcctggtggctactgggtgctgtctggccctccaattaactggaaggtgaactacaagggctggcaacgcacaaagaaggatcttgaggcagagcagaacagaatagaggaaattgctgaccttctatgctgggaaaaagtctcagagaagggcgagatggcgatatggaggaaaagggtgaataccgagtcttgcccttctaggcaagaagaatcagctgtgcagatgtgtgaatcaacaaacccagatgatgtctggtacaagaagatgaaggcctgtgtgacaccccttccagatgtaaaagatgaaaacgacgtagctggaggtgcaatcaaacccttcccagccaggctcaacgcagttcctccaagaatcgctaatggtttggtcccaggcgtttcatcccaggccttccagaaagacaataaaatgtggaagaagcatgtgaagtcttacagcagtgtgaacaagtatctgcttactggtagatacaggaacattatggacatgaatgcacagtacgggggattcgccgcagcaatagagtccccgaaatcttgggtgatgaatgttgtgccgaccatcgcgaagatgcccaccctgggggctgtgtatgagcgaggattgatcggcatatatcatgactggtgtgaggctttctctacttatccaaggacgtatgatcttatccacgctagcggtcttttcaccttgtgcagcatggaagatgttctcctggagatggaccgcatcttgaggcccgaaggcgccgtcataatacgggacgacgtagacgtcctgaccaaggtgaacagcctcgctctgggtatgaggtgggacacgaagatggttgatcacgaggatggccccctcgtgcgcgagaagatcttgtatgccgtgaagcaatactgggttggtggtaagcagacggctgtagcttgaagcaagcacgtttcatgaggctctaacatgaggaattctgcaaccaaaccttacccgacaaacaaggattagcttaaatgatcaacccttgtagggcttgttcggttacaacaattcagaagcggattggaggggattaaatccttttctagttaaaaatgactagaagaggatttaaacctcaccaatccccttatggattggtgtaaccgaatatgcccgtagggggtagcactgaagcagccaggataccgtgctcgctggtgatcactgcaaccacataatcttctttggtcgtgtactcttttcaaaaagcttgtatctttggaaatttctttacggtcctcgtacagattcgggtgtaacgtattaagtagactagctttatgtaagcgagaaatacatgttttctttggacaaccccaggtctatttgtgtactcccgaatgatcctgaagaaaagggctccttacggctccactgttgcaacttgaaatatgctggcgccaggcacaacttcgaagccagaatttatttgggtgtccgtgtacctttctgtaagcaagaaaagaagtacagataaaaaaaaa

SEQ ID NO: 6067 - DNA, 1861 bp, Zea Mays
aaatattaggtcggggctcgggcggggccgccggcctcgccctcgtcgccgagtcaccactcaccacacaccaaacaaagcaggggccaggggagcccacttcgaggccgcggcgttggctgtctcggtgtcatcgtctcctctcgtctcgttctcttctcctcacctccttcgtttcgcggagcagagcgagcagccgggaccggacctccagggagcgcaccgcggaggctagcgaagatgcccgggctcacggcaccgtccgactacgcggaggagccgccgcgtcacccggccctcaagatcaactccaaggagccattcaatgctgagcctcaccgatcagagctagtcgcatcttacatcaccccagtggatttcttctacaagaggaatcatggacccatccctaaagtcgaggacctctcaagatacactgtttccatttctggtctcgtcaacaagtccattcagctatcgatggctgacatttggtctcttccaaagtacaatgtcacagcaactttacagtgtgcaggaaacaggaggactgcgatgagtaacgtacggaaagtgagaggtgttgggtgggacatatctgctcttggaactgcaacttggggaggtgccaaactatctgatgtccttgagctagttggaataccaaaactcagttcagtcacgtctctaggagggaaacacgttgagtttgttagcgttgacaagtgtaaagtactcaaccgagaccacggatacccgctccgggttgttgtacctggagttattggtgcacgctctgtaaaatggctggacagtatcaacgtaaaagaggaggaatgccaggggttttttatgcaaaaagattacaaaatgtttccgccaaccgtggactgggacaacattaactggtcaactagaaggccacagatggatttccctgtgcagtctgctatctgtacactggaagatgtagatgttatcaaggaaggacaggctaggattgctggatatgcactttcaggtggtggccgtggcattgagagagtggatgtatcagctgatgggggtaagacctgggtcgaggctcgtagataccagaaagacaatgtggcgtatgtgtcagatggacctcaaagtgataagtgggcttgggttctctttgaggccacattagacgtaccagcgaatcctgagatcgtagttaaggcggtggactcagctgcaaacgttcagcccgagaaggtagaagacatatggaatctgaggggaatcctcaacacgtcttggcatcggatcaaaatccagagatcttcgtgcgttgaaagatctaagctgtgaaattaagtacgcagctgaccacttggagaaagcacactcactttaccattgtccctgaataataattagtcacttcaactttatgcgtctgtggagtaaggttgtacgagtgttgtggctgtgtcattatgggatttgagctcacttggtttctgtgtaaatgtcagctgctgcggtttttttttggttggtcaggtttgatatcgagaaatatccattgcattctgcgtttgaaaatactatcgcagcatagaactgttctttgggcaaatggcagctctgggaagaggtgcgcttcatatcgcagctgagaaataccaataaaagagaaagaaagatgtgaacatatatatccccttcagccgtgggaatggcaatttcagtaggcaatgatatactacctcggttcaaatatttgtagctctctagttcatttttgaatgaactaaaccgcaacaaataaaaataaactaaaccacgataaataaaaaagaacggaggaagtagttagcattaacattct

SEQ ID NO: 6068 - DNA, 1890 bp, Zea Mays
cgcccagctcacccccctcccgcatactccaacgcgcgggtgtttttcatcgcccaaaccctagcggcgacaatgaccgaggtggctggcgacagggacaaggaggtccccactagagcggacgagcaccatggtgtgtgacgccggctgcttgacggggtcgctagccctcctactcgccgcggcgggcaccgacatcctagcctctgtcgtcttggcgtccatggtgtcggaggcgcaacggtagttggtgctgacggtggcgtgaagccatcctccgtgcctcgatcctcctcctggtggcattgtcctttgtcgtggctgctgctccagatctacggcaatagaatccagacgtaccaactaaaatgttagggacataggttaaaatgattctaaatcagagctcaaataagagtacgaccaacacttcttgcacctgctcaagatgttttccacctcatagtgtcgttacgaaatgtgtgaacaggagattaataaaaatatcccctcttgcatgtgagcctgcaaccaataaaaaaggtgccctgttatatctctgttgttttatatctggtcaatatagatgattctgcctatttattctaataggattgcatctgcatgtcctagattgtttgttagaatacttaattgatactgaaatataaaaagtttctagatcagtacttttttactaatatctcctttctccttttctttgtgttcccttctattgattgtctttttttgttcttttgcttcccttttctttttatgctctattcctagctataggtcctcccttttttattgatgaatgcaaaaggacagattgcattttatgctttttgtcgcctcttcagaatgtacctaatatattatttgcttagctctaatgtgctcttttttatttcatattttggtgcatgatttatgtcagtgtctatttactggacatatgttcatgttcacgcggcgcttcataaaatctgcataggatacatcgcacttctatctgacctactcaggtctggtgttcagcggttgccacacctaggatatcaaatggattacatctccaaaacggaacctttctatgtctgcatgaactcaagttccttggctgatccatatagaacgatgctacctactaccacaacattaccatctaagcaaattgtgttatttgttcatctacgtcgaaaagcacatttgaccattttgggtgctcacacaagattctaaatgaaattcttggagatagagagcgtatccaatctctgtattctgagattcctgggagaaccacaagcaatgccagtacctccagaagaacttctaatttcagtgtggacgcaactggagatgaaagcctttctgttgaagcacacaattgtatactcgacaatactgcgtctattttatccatgaggagctgcgctgacaagctgtggaagagaagaaaaggttcaaaactttaaaatcagaagataaaccagaggaagcaatgcaggctttcaagtatggtaaagaacttgcaaatcaagctgcaacgctggaattacaactgaagagtagtagtagaatggctacacaagcgtctaatgtctcttctgttgttggtacttcgacgacggctggttctgatgaggctagaataaaaaggacttcaactgcgaaaaagaattaagaaagaaaagaatgatcttgcatgggcttagagatataggttggtcatatgcaggcactgttttgctattttatattggcacaaatgtgtaatttggaaaacacatgtcctatgttgtgcttccttgcgtcctctaaaacaatgttatagacttttatgtcttttctgtaatattttttatctaaatcttttttgta

SEQ ID NO: 6069 - DNA, 2240 bp, Zea Mays
gtaggaataatcttctgtgatacaacaaccatgtagccaccgatcctaatgagtcatgcataatagcagacacaggcaacagtgccccgtgagcacatgcaggatcagcagtacgacctccgactccgagctactgctcaccctctcgggctctcggcccgcccgtatgccagtctgtctctggtacactccttcatttcatcgcctagctagctactatatagtacgacctgcctgccttgctcttgccctgtgagcagcggcgtgcgatcgatcgaggcagtcgtagtaataagccaacaaacaaaccggccggaacgccatgctggaggagtacaaaccgtgtgcggccatggtggtgacgcagtgcatctacgccgctctagcgctcttgtccaaggcggcgttcaccggcggcatgagccccctggtgttcgtcgtctacaggcaggccgtcgccaccattgtactcgtccccgtcgtcatcgcggccaacaggaagaagatgaaggagatgacgacgggccttggactgacgggcttctcgctggtcttcgtcgcctcccttgtcggggcaacggtgaaccagtgcatgtactaccaaggggtgaatctgggctcgtcgtcgatggcaacggccatgaccaacttgatccccgccatcaccttcgtcatggcggcatcagtcgggtgagtgtctactactagtttgacagagaagagacggtcgacccgtttcatcagcgccgcgagcaaaatttagttgagcaccgtgcgttttctctgctgctccaccgtacgccgtctaatatgggcgagttggagatggggtgtcctggaccaacgctgccacctcacctcacctcacccacctgcgcgccttaattcacaagtatctggtgtagaccggaaatcaaacatttacttcagttaacgaagaccaaactcccatgaacaccgaacagattggctatcacatctcggttgctgcaaaatgcagttttaagcaatggcaaaaatgcctagagagggtggaggccaggaggccgaggagcctggccaagatcttcggcacggccgtctgcgtgagcggcgccatggccatggctttcttcaagggcccgaagctgctcggcgacggcccgaacgctctccagctcctcctccacgcgggcggcggcggcaggtgggtggccggcgcgctcttcctcgtgggcagcagctcctgctggtcgctctggctcatcctgcaggtgcccatctgcaagtcgtacgtggagccgctggctctgtcggcgtggatgtgcgtcctgtccacgctccagtccgcgctgctcgtctccttcctcctgccggaccccagcgcctggaggatccactcgctcttcgagctctcctgctgcgtcttctcgggcgtgttcgggtccggcgtcacgttctacctgcagtcgtggtgcatctccgtgaggggcccgctctactccgccatgttcaacccgctctgcaccgtgatcaccaccgtgttcgccgccgccgtcctccgcgaagagctgcacgtcggcagcttgctgggcgcgatcgccgtcatcgcggggctgtacgtggtgctgtggggcaaagcgggcgacgccaacaagggcggggtggagccagagcaccactcggacgatctggagaagacgtcatcagcgcggtcggatcccaattcgacggccggcgtcggcagtggcatcgccgagcccctcctggcgggcggcgatccaacggagaagtagatgggattttgctgctcttcaagtgttctgtgcgtgcgcgcgcggtgttttcagggtcggtatgctagtgctactgtaacagtgccgtcccagttttgtcatgtacactagtggcagcttcaaatgactccgtgctgccgatgtgtattatccgcacaattttgttaagcaacgcggcgtccccgtccaaagtcgtcgtcgccaactccgggccgctccgctccgctcgccgtcgtctccaactctctcttgcttgtggggtggtcaggtcttggcctgctgcgactatatggcccatatgccgccgcatcgggtcaggtccaagcaggaagcactttgttccagtagaatcagatgacataaccagacccatgtattagacatttagacccaactcggaaaccaggccccgttcttattttaacttattatattttatctctttaaaatatattaacaccacct

SEQ ID NO: 6070 - DNA, 2667 bp, Zea Mays
gcgccgggagatgggttacaacaaggcgacgccgcgccggaacgtgctatcggctctcaacaacgccgaggccaacggggggacgccgtccgtgccggcggatggcggcggcggcggcggcgcggcggaggcggcgcccgtgatcgagttcagtgggagggaggatgtggagcgcttgctcgccgagaaaatgaagggcaaaagcaagaacgatttcaaggggagagtcgatcagatgagcgactacatcaagaagctcagggcgtgcatccggtggtacatggagctggaggatggctatttggctgagcaggagaagctcctaggtgctatggattctgagaacacccgtcataccgagttggaggcccagctcagcactgctattgaagagctgaaagccactaacttggacttgacaaggcgttgtgagtctctagaggagagcttcaacaaggagaagtctgaaaaactgatcgctgtggagtcctacgagaaagaaaagcaggaaagggaatccgctgagagttcacgagatgtactaactgtggacctagaaagggtcactcatgatgctaagcggtttagcgagcagctaaaaatggtccaagacactaataaaaggcttcaagaatacaacaccagcctgcaacaatacaacagtaaccttcaggctgatgcctcgaagagtggtgagaccatctcaaaacttcagaaagagaagagtgccatgatggaaactatggctactctgagagagtgtaacagctcaatgggcaatcagcttgaatcttctagagtttctcaacaagaagctattagagtgaaggaagagctcaggaaagaagtggagtgccttagagttgagttgaagcaagttagagatgatcgtgatcattcagctattcaactgaacagtttgaacattgaacttggtaattacaaggaacagattggtaaaacttcaaaagaatgtgaaagattccgcaccaaagtatctgaacttgaggaaacatgcagtacacaacaagaacagattcggacatttcaaaagcagcttgcagttgcgactgagaagttgaagcttgctgatgtaactgcgatagaggcgatgactggttatgaagaacagaaggagaaaataaaataccttgaggagcgtttagcacaggcagagtctcaaattgttgaaggcgacgagttacggaaaaaactgcacaacactatattggaactgaaaggaaacattagggttttttgtagagttcgaccacttcttcgatttgagggtgattccaatggtccggaaggtgcctctatctcttttccaacatctgtagagtctactggacgtagcattgatttgataaaccaagggcaaaagctctccttctcatatgacaaggtttttgaccatggtgcgtcacaggaagatgtgtttgtggaaatatcgcaactagtccaaagtgcccttgatgggtacaaggtatgcatatttgcatatggtcaaactggatctggtaaaacttatacaatgatgggtaaaccaggaaatgatcaaaaagggataatacctcgttctttggagcaaattttcaagaccagtcggtttctagaatctcaaggatggaattattccatgcaagcatcaatgttggaaatatacaatgagaccattcgtgatttgttagcacctggtcggtctaacagttttgagtctagtaaacaatgcactataaagcatgaccctcatgggaatattgtgtcggaccttacaattattgatgtctttggtattgctgatgtgactagtctactagagaaagcatcccagagtagaacacaggccaaaatgtccaaggagtccttaacttgattgatttagctgggagtgagcgtcttgctaaaagtggctccacaggtgatcgcttgaaggaaactcagtcaatcaataaaagcttgtcggctttgagcgatgtaatcttcgcgatcgcaaaaggagatgaccacgttccgttcagaaattcaaaacttacatacctattgcagccttgccttggaggtgactcgaaagctctcatgtttgtcaacatttcaccggaggcatcctccgttggtgagacgatatgctcgttgaggtttgcttcaagggtgaatgcttgtgagattggaataccaagacgtcacacataagcccgtcccttcgttctaggctgaattatgggtgaaggtagctgtagggatcatggtaatgtgatatataatgtgttggtttgtgccgcatttggccacaaaggtgatgcccaacagaattcttgtaacttgtacagtgtaggtgatggtgttttgctgagagcagcatatgtacgagtgctgacatcttgtcatgctttccttactttttggtgtagcagacttgggtcatgttaattgtgatcgtgggttcgaatgtgaaactaccttttctctctctctctctgccaactagaattcatctgctggtttatggcaacaatgcaccaaattagttttgtactttgcaggttgtaacttaaatgttagtatgtgtagccacggaagcttgcattgagttgtgcagcctctgaaatgtttgtatttcttcatctctactccttagcacttatttgggccatgactggctgttct

SEQ ID NO: 6071 - DNA, 2745 bp, Zea Mays
gcgccgggagatgggttacaacaaggcgacgccgcgccggaacgtgctatcggctctcaacaacgccgaggccaacggggggacgccgtccgtgccggcggatggcggcggcggcggcggcgcggcggaggcggcgcccgtgatcgagttcagtgggagggaggatgtggagcgcttgctcgccgagaaaatgaagggcaaaagcaagaacgatttcaaggggagagtcgatcagatgagcgactacatcaagaagctcagggcgtgcatccggtggtacatggagctggaggatggctatttggctgagcaggagaagctcctaggtgctatggattctgagaacacccgtcataccgagttggaggcccagctcagcactgctattgaagagctgaaagccactaacttggacttgacaaggcgttgtgagtctctagaggagagcttcaacaaggagaagtctgaaaaactgatcgctgtggagtcctacgagaaagaaaagcaggaaagggaatccgctgagagttcacgagatgtactaactgtggacctagaaagggtcactcatgatgctaagcggtttagcgagcagctaaaaatggtccaagacactaataaaaggcttcaagaatacaacaccagcctgcaacaatacaacagtaaccttcaggctgatgcctcgaagagtggtgagaccatctcaaaacttcagaaagagaagagtgccatgatggaaactatggctactctgagagagtgtaacagctcaatgggcaatcagcttgaatcttctagagtttctcaacaagaagctattagagtgaaggaagagctcaggaaagaagtggagtgccttagagttgagttgaagcaagttagagatgatcgtgatcattcagctattcaactgaacagtttgaacattgaacttggtaattacaaggaacagattggtaaaacttcaaaagaatgtgaaagattccgcaccaaagtatctgaacttgaggaaacatgcagtacacaacaagaacagattcggacatttcaaaagcagcttgcagttgcgactgagaagttgaagcttgctgatgtaactgcgatagaggcgatgactggttatgaagaacagaaggagaaaataaaataccttgaggagcgtttagcacaggcagagtctcaaattgttgaaggcgacgagttacggaaaaaactgcacaacactatattggaactgaaaggaaacattagggttttttgtagagttcgaccacttcttcgatttgagggtgattccaatggtccggaaggtgcctctatctcttttccaacatctgtagagtctactggacgtagcattgatttgataaaccaagggcaaaagctctccttctcatatgacaaggtttttgaccatggtgcgtcacaggaagatgtgtttgtggaaatatcgcaactagtccaaagtgcccttgatgggtacaaggtatgcatatttgcatatggtcaaactggatctggtaaaacttatacaatgatgggtaaaccaggaaatgatcaaaaagggataatacctcgttctttggagcaaattttcaagaccagtcggtttctagaatctcaaggatggaattattccatgcaagcatcaatgttggaaatatacaatgagaccattcgtgatttgttagcacctggtcggtctaacagttttgagtctagtaaacaatgcactataaagcatgaccctcatgggaatattgtgtcggaccttacaattattgatgtctttggtattgctgatgtgactagtctactagagaaagcatcccagagtctgtgggtaagactcagatgaatgaacagtcgtccagaagtcattttgtattcacattaaagatatctggatctaacgagaacacaggccaaaatgtccaaggagtccttaacttgattgatttagctgggagtgagcgtcttgctaaaagtggctccacaggtgatcgcttgaaggaaactcagtcaatcaataaaagcttgtcggctttgagcgatgtaatcttcgcgatcgcaaaaggagatgaccacgttccgttcagaaattcaaaacttacatacctattgcagccttgccttggaggtgactcgaaagctctcatgtttgtcaacatttcaccggaggcatcctccgttggtgagacgatatgctcgttgaggtttgcttcaagggtgaatgcttgtgagattggaataccaagacgtcacacataagcccgtcccttcgttctaggctgaattatgggtgaaggtagctgtagggatcatggtaatgtgatatataatgtgttggtttgtgccgcatttggccacaaaggtgatgcccaacagaattcttgtaacttgtacagtgtaggtgatggtgttttgctgagagcagcatatgtacgagtgctgacatcttgtcatgctttccttactttttggtgtagcagacttgggtcatgttaattgtgatcgtgggttcgaatgtgaaactaccttttctctctctctctctgccaactagaattcatctgctggtttatggcaacaatgcaccaaattagttttgtactttgcaggttgtaacttaaatgttagtatgtgtagccacggaagcttgcattgagttgtgcagcctctgaaatgtttgtatttcttcatctctactccttagcacttatttgggccatgactggctgttct

SEQ ID NO: 6072 - DNA, 961 bp, Zea Mays
cgaccaccaggggtccagtcgtccagggcaccacgcacggaggcaccaggcgtctaggcaccaggccagccgccagcccgccagacggagtgacggaccatccagaattctagattccaggcgtccaaggctccaagccatcctccggtcctcccatccaccaccggtccaccgccactccgccagccgaccactaggtcaccaggccgcaccgctgcagctcgcaatcggcggtcggaggtcggccagtcgccctcgcccaggtctccactctcccgcacccagtgacccaggtctcccgtctcccaggtatgctgtcgctgctgatgtcttcgtcggtatcggctacgtcgagcccacagtccatagagaacggtgaccatgacccaagctctaggccagcagcctcgtcccctcctctgcagattcaggcaggggacttatcatcctctccggagacgaccagctcagacaacgcaagctatccattccaattagcacagttgcctcagagtccgcttttagcacaagtggttgtgttcttagcgagcaccgcagccgacttactccagagatcttggaggcgcttatgtgctcacaagattggatgcgacgcaagtatctagatgcatctaatgctgaccaacctgaaacattttggacttgccttcaagagatgtaggaagggatgcagaagcttttactctgagcaacaagactggaattggaagagaagggtgcccttaagctccaacagcttagaagtcttatatattcaaatattaagtattgtgtattgaacaattagatttgaaggcatgattttgtccacagttttgtagaatcaatgctatgttttgtgtgatttgaaggcatgatattgccatttaatgttgaatattgttgaacatgtgataaaattatgttgggttcgatacatttgttatgttggtacttaatt

SEQ ID NO: 6073 - DNA, 664 bp, Zea Mays
gagggaatagtttctccaccaaaaaaaagtgcggcaacgtagcagaggaggagcagggggaggaggaggctagggttgctcggcgatggcgtcggcggcgaagacccttgcacgggttggatcatccctcttcggccgcattctcgcgtctccgtcctcgtccataccccgcgccgggctgccgctagccaggctgcagccacacgtcccgccgccggcaccggcgggggtggacgcttacgaggcggagaccatcgccaggctgagctcgctccccggcgagatatccttcccctgcggacttccctcgctccgcttcttcatcgacgacgtaaatcgaccaagggtgggcgcaaggtgattgcccggagaatcgccaaaggcaggcacagaatctcagtttagctagatctcgctcgtagcagccctggatgttttctgtaacacagattcgtatcgtgttctttctatggttagcactctgctgaaggtgagcccccgcgcaagcagcagtccatgtatggatttttattgtgaaacttttttttgggtggtttcagtcctggccatccgtaggatatgccttcttccattttattttgcctttgctctccctggtcggtgcggtgcagccgtacgcatcagtggcggatgcagaacaaaa

SEQ ID NO: 6074 - DNA, 1009 bp, Zea Mays
atatcggatccgttgcttagcaagtcctcacgtgcgattagcctcttggtcgcggggtttcccccctgtgtgagggattttatccgattctagcggcctagattcgtttgcctcggaccgggatgaatcctggcgtttcaatagagtatatataaaactctattattgacagaatggtccggaaaccggtaccatccgccgccgcagccatccgcttcttctcttcggttcagctctcgaggatgaaggtaatagctgcctacctgcttgctgttctgggtggaaacacttccccgactgctgatgatgttaagagcattctggaatcagttggtgctgaagctgatgaagaaaaactagagttcctgctcacagaactcaaagacaaggacataacagaagtgattgcagctggaagggaaaggttatcctctgtgccttcaggtggtggtgcaattgacatgggagctccagcagctgtagctggcggtggcgcagcacctgctgaagaggcaaagaaggaagaaaaggttgaagagaaggaagagtctgatgaagtaagtgtctctcacctaaaacagatatgggtttcagcttgttcgattaaaacaccactgccagtttacagtttctctcgcgaatggtctcacaatattcgctggtttccacaaaataagattgtcaatagctactacgtacttatgctattctgcatgtgatgtacgagtgtgcatcttcaagaatctttaagttgaatggtcccataataatattgataacaatgtaaattgtatgtcctgtacgtactttggtatcgcgacatctcagtgtgcatcttcaaggatcataagttgaatgttatcattaaggtcagtttggttcagataaatttaattgttagttatagctaaacattgccttggtgtcgcaacaactgagttgaatattgtgactgttcgaataaatggtgggggatattgatgatttttttattaaaataggattacat

SEQ ID NO: 6075 - DNA, 2883 bp, Zea Mays
tctctctctcctcccccgcggccgcggccgccccacgctcttcctcctcctcctcgctcgtcgacggtgacccccgcggagccgcgtggatacctcgccggggagatctgcctgccgtctctacgggcagtcagatgttggagcttaggtagtagccaacgatggaagcaatggaggccgaagaaggtccttttctggctaatgatgccaagttgcacgcaggaatttgtagagcatttcatccttctgtatctaagctttccgccattttcccctttatcgaagcatcaagacccagaagcaagcctggtatacaagcattgtgttcactacatgtagctcttgataaagccaaagggcttcttcaacattgtgcagactgcagcagactctacttggccatcacttcggaaactgtgcttttaaagtttgagaagtctagaagccagcttcaggagagtctaaggcgcactgaaagcatagtaactgaagatattggctgtaagattgtggagattgttggtgagctggaggaaattgtttttacattagatagatcagagaaggaagctggtgatgagctgatcaaattgctccagagaaataataaaacaaatggttccagtgacagtggggagcttgaggtattccatatgtctgctcttaaattgggaattacatcttctagggcagcactcaccgagagaagagcccttaagaagctaattgagaaggcccgttctgatgaagacaagcggaaggagcttgttgtgtcatacttgtacaatctcatgaggaagtactcaaagttcttcagaagtgagactggtgatgatacagattctcagggatcgtctccatgctcgccaacagtattaggcatggatgatatgtatgggccgtacaacaatggtcgggcatttagtagacagctttcgagcattcagtctttcaattcaaggtttggatctttcaattctaggcttggatcattcaattgcagacgtggtggtggtccaaggtctgagaatatgtcaatccctcctgaagaacttaggtgccctatttccttacaactcatgtatgatccagtcatcatttcatccgggcagacttatgagcgtatttgcattgagaaatggttcaacgatggtcacagcacatgtcctaaaactcagcagcaacttgcccacctgtcattgactccaaactactgtgttaaggccctcattgcgagctggtgtgagcagaacgattttccagttcctgatggtccaccagggacttttgatgtaaactggagacttgctttgtctgacactgaggccgcaggctgtgtgtcagttgaaagttttgattgtgctaatgcaaagagtgtcaaggttgtcccaatggagaacgttagaaaggaggagccagcaaacagtgaatcgggaactctggatgacggctcctgtaacgatttcgatttgaacgaaggctatgggaacttgctgctcctgctccatgaaagaagtaacatgaacaagcagtgcaggttggtggagcagataaggtatcttttgaaagacgacgaggaagcaaggatccagctgggctcaaatggctttgccgaggcactggttgagttcttgaggaatgctgtgaatgatggaaatgagaaggcacaagaagttggtgcaatggctcttttcaatcttgcagtcaacaacaacagaaacaaggggctcctgttatctgctggagtcaccgatctacttgagcagatgatatcgaatccacggctatctggtcctgccacagcactctacctgaatatttcctgccttcctgacgcgaaggccgtcatcggttcgagccaggccgtgccgttcctagtcgaccgtctgtacagccaagacggcagcgacacgagaggaagctcctgcaagcacgacgccctgtacacgctgtacaacctctcgagccaccaggccagcgtgccggcgcttctagccgcgggcatcgtggacgctctccactgcctcgtcacggagtctccagggtcggaggaggggcttggctggacagagaaggctctggcggtgctcatcagcctcgcggccacccaagctggccgaaaggagatcatgtccacccctggcttggtcagcacgctggcgatgctgctggacacgggcgagtcgacggagcaggagcaggcagtgtcgtgcctcctggtgatgtgcggcgccgacgacaagtgcatcgcgccggtgctccaggaaggggtggtcccgtccctcgtctccatctcggcggccgggactgggaggggcagggagaaggcccagaagctcctgaagctgttcagggagcagaggcagcgggacacgccgccgccacagcagcagcagcagcagctgctgcagagccagctggcggagggcgggaacggtggtggtggagctatcgtgtgccaccgggaatcgaagccgctgtgcaagtccaagtccaggaagctgggcaggacgctgagctcgctgtggaagaacaggggcttctcgctgtaccagtgctaggagatgcatgctagagtagtgttttgagttgatcagtgggtctgcgtctgtacatcatcttctgccttgtttttctcaactggtcctttcttccccccttcttctctgggggtgttgttttatttgagatcaggcgcttcttcccattcaattcaaaacccaacacggcttgcagcttgcaaggaactgattgttcccattcttgtcctgccttgaagaagactcattgcgcattacattgtgaggtcaaggtgtagactgtagactcacggctcttttatcagcagcctgagcatgacgcaaaaacctaaccagagccgag

SEQ ID NO: 6076 - DNA, 3258 bp, Zea Mays
ggccgccccacgctcttcctcctcctcctcgctcgtcgacggtgacccccgcggagccgcgtggatacctcgccggggagatctgcctgccgtctctacgggcaggtaccagagttggagcgtggttactggcaggctgtggctgcattcggcctcccgctcctcctacacgcgcgcgcccggcctccttcaaggttggctctgaagacaaagcccaagctccctgcgctgctgcgcaagcggccgaccttcctgccggcggtactccctgtgctggatcctctgtctagtgttgcagctgccagcgcttctcatcctcactctaccggagtggagatccgtccgggcgtgggttgattccttcttttcgggatgttggagcttaggtagtagccaacgatggaagcaatggaggccgaagaaggtccttttctggctaatgatgccaagttgcacgcaggaatttgtagagcatttcatccttctgtatctaagctttccgccattttcccctttatcgaagcatcaagacccagaagcaagcctggtatacaagcattgtgttcactacatgtagctcttgataaagccaaagggcttcttcaacattgtgcagactgcagcagactctacttggccatcacttcggaaactgtgcttttaaagtttgagaagtctagaagccagcttcaggagagtctaaggcgcactgaaagcatagtaactgaagatattggctgtaagattgtggagattgttggtgagctggaggaaattgtttttacattagatagatcagagaaggaagctggtgatgagctgatcaaattgctccagagaaataataaaacaaatggttccagtgacagtggggagcttgaggtattccatatgtctgctcttaaattgggaattacatcttctagggcagcactcaccgagagaagagcccttaagaagctaattgagaaggcccgttctgatgaagacaagcggaaggagcttgttgtgtcatacttgtacaatctcatgaggaagtactcaaagttcttcagaagtgagactggtgatgatacagattctcagggatcgtctccatgctcgccaacagtattaggcatggatgatatgtatgggccgtacaacaatggtcgggcatttagtagacagctttcgagcattcagtctttcaattcaaggtttggatctttcaattctaggcttggatcattcaattgcagacgtggtggtggtccaaggtctgagaatatgtcaatccctcctgaagaacttaggtgccctatttccttacaactcatgtatgatccagtcatcatttcatccgggcagacttatgagcgtatttgcattgagaaatggttcaacgatggtcacagcacatgtcctaaaactcagcagcaacttgcccacctgtcattgactccaaactactgtgttaaggccctcattgcgagctggtgtgagcagaacgattttccagttcctgatggtccaccagggacttttgatgtaaactggagacttgctttgtctgacactgaggccgcaggctgtgtgtcagttgaaagttttgattgtgctaatgcaaagagtgtcaaggttgtcccaatggagaacgttagaaaggaggagccagcaaacagtgaatcgggaactctggatgacggctcctgtaacgatttcgatttgaacgaaggctatgggaacttgctgctcctgctccatgaaagaagtaacatgaacaagcagtgcaggttggtggagcagataaggtatcttttgaaagacgacgaggaagcaaggatccagctgggctcaaatggctttgccgaggcactggttgagttcttgaggaatgctgtgaatgatggaaatgagaaggcacaagaagttggtgcaatggctcttttcaatcttgcagtcaacaacaacagaaacaaggggctcctgttatctgctggagtcaccgatctacttgagcagatgatatcgaatccacggctatctggtcctgccacagcactctacctgaatatttcctgccttcctgacgcgaaggccgtcatcggttcgagccaggccgtgccgttcctagtcgaccgtctgtacagccaagacggcagcgacacgagaggaagctcctgcaagcacgacgccctgtacacgctgtacaacctctcgagccaccaggccagcgtgccggcgcttctagccgcgggcatcgtggacgctctccactgcctcgtcacggagtctccagggtcggaggaggggcttggctggacagagaaggctctggcggtgctcatcagcctcgcggccacccaagctggccgaaaggagatcatgtccacccctggcttggtcagcacgctggcgatgctgctggacacgggcgagtcgacggagcaggagcaggcagtgtcgtgcctcctggtgatgtgcggcgccgacgacaagtgcatcgcgccggtgctccaggaaggggtggtcccgtccctcgtctccatctcggcggccgggactgggaggggcagggagaaggcccagaagctcctgaagctgttcagggagcagaggcagcgggacacgccgccgccacagcagcagcagcagcagctgctgcagagccagctggcggagggcgggaacggtggtggtggagctatcgtgtgccaccgggaatcgaagccgctgtgcaagtccaagtccaggaagctgggcaggacgctgagctcgctgtggaagaacaggggcttctcgctgtaccagtgctaggagatgcatgctagagtagtgttttgagttgatcagtgggtctgcgtctgtacatcatcttctgccttgtttttctcaactggtcctttcttccccccttcttctctgggggtgttgttttatttgaggtaaaaaaaacttgatgttcttccccccctcctcggttgggtgatgtagggcattttcttccatctcggccatgacaggtcatttgtacagttgctgctgcttcagtctatctgatactcagtctcccccttttcagatcaggcgcttcttcccattcaattcaaaacccaacacggcttgcagcttgcaaggaactgattgttcccattcttgtcctgccttgaagaagactcattgcgcattacattgtgaggtcaaggtgtagactgtagactcacggctcttttatcagcagcctgagcatgacgcaaaaacctaaccagagccgag

SEQ ID NO: 6077 - DNA, 2488 bp, Zea Mays
gagatacggccgtgcaaccgtgacgtcagcgcacaatgacagccgttcaatacacttgtacttccgatccgacggctactactatcgaagcatcagccagccatcagtgtgtgacctttttcttcctccggaaggaggcacgacgccatcgaaccgcctctccccgagtcccgtaccgtactcttgcggtcttgccgctccaacatttcagcccccacccctcatcaatttttcctcatccgccttcgtcccgcacgcttgccgtccaaccgctcccacaggtcgaggcggggagggggaggaggaggagttgctggtgggtgtggattcgccgtcgattcgagtctgcgatggcggcggcgaagctgacaggcaacgccgtggcggcggcgatggcgggggacaccaacctcaagccggtggtgcaggtcgtcgacctccggagcatcgcggtcaccggggccccgggctccgggcccaggttccgcgccatcatctccgatggcgtcgccacggggcacgcgctcttcgcctcgcagctctgcgacctcgcgcgctccggcgtcgtccgccgcggctcggtcgtgcagctcctcgactacatcgttaacaacgtcggccccacccggaacagaaaggcaattgttattctgaacatggaggttcttgttgcagagtgtgagattattggaaatccagcactacctcctgaatctggagattctagttcaaattccctgagagcagaccagtttaatggagcacctccaaatggttcaatggcagggagtactttgaacaaagtgataaagccctctgacaatgctccagtaatccagagatcgatgacagggccgctgggctatcaaggctcgagtaactgccaaaggagagatccgccggtaccataatgcaaaaggtgatggcaaagtgttctcttttgacctgcttgatactgatggtggtgagattcgggctacatgtttcaatgctcttgttgatcgcttctatgaagttgtggaagttggtaaggtctatgtggtatctagaggaaacttgaaacccgcaaagaaggactacaaccatctgaataatgagtgggagattttcttggaacctcagtcaactattgaactttgtcttgatgagaacagctctattcctgcccagcggtttagcttctcatcgattgataaaattgaaaattcagagaacaatgcaattgttgatgtcattggtgttgttacatctgtcaaccctagtactacaatacagaggaaaaatggtatggaagctcagaaaaggaccatcaccctgaatgatatgtctggtcgaagtgttgagcttaccatgtggggtgacttctgcaacagagaaggctcgcagctgcaagaaatggttgaatgtggggcgtttcctgtgctcgctgtcaaagctggaaaagtcaatgattacagtgggaagtctgttggcacaatttcttcatctcaactccacataaaccctgatcttgctgaggctcattctctcaggcagtggtttgattgtggaggaagagatgcttctactcagtctatatccagggattttactccttcagcatcatggaatgaggtccgaaagacagtagcacagataaaggatgatggtcttggaatgggggacaaacccgattgggtcacggtgaaggctgctatttcgttcatcaaaaccgattccttctgctacacagcttgccccaatgtgattggagacaggcaatgtggtaaaaaggtgacaaagtctgattcaggcaactggctatgtgacaagtgcaatcaagagtttccagagtgtgattacaggtatctcctacagttgaacattcaagaccacacgggaacaacttctgtgacagcatttcaagatcgtggacaggagatacttggttgctcagctcgagagctcaacatttttaaagagaacaaagatcctcgctacacagatgtcttgatcaattgcttgtatcagaactatttgttcaggctaaaagtgaaagaagaacaatatggcgatgtacgacaagtgaaaaacactgtggccaaggtggagagggtggatcctttggctgagagtaaatttctgcttgattccatttcaaggtttataccatgagagttttgttcttacatctatcagctgctggtaagtgtgctgcccgcttagaagtggtaattaatatgtagctttccctattcacacgcccggaggtttctttgtcggatagaattctatcattcagcagtagagttttctccacttttggtctgccagatacctgcagcttgaagctatgtgttctttcataattaactgaacgcttgtaagtgtgattatgagagttctgtttagctcagctactttgtggttactactattttggtttagtttggtatagtcggacattcctactgctccaatagtgggcatgaatcaaccattaatgcga

SEQ ID NO: 6078 - DNA, 1304 bp, Zea Mays
tctttctcttcaagaaaacgtcaaaaaaacgtcagcaccaggctcctccctctaataaatagcggcgggcctctgtcagctcacagctcagtcctcttcaaccccgtttcgccgcccctagcccaaatcccccacctactcgccgccggcgccgtctcagcctcatccttctccgctagccatggccgccgcgggtcccgggctctactccgagatcgggaagaaggccagagatctcctatataaggactaccacacggaccagaagttcacgctcaccacctacgccgccaacggagctgccattactgctgcaagcacgaggaaagatgaagctatctttaatgaaatccagagccagctgaagcacaacaatgtgactgtggatgtgaaagcaacttcagaatcaaatgtgataactacaatcacagttcatgagctgggcacaccaggcttgaaggcaattttatgtgttcctttcccgtaccagaaatctgcaaagtatttgcaccaccatgctggtgttgctgcaagtgttggcctaaatgcaaaccctgttgttaacctttctggtgtattcggaactaaagctattgctgttggcgctgatgctgcatttgatacttcttctggggacttaaccaaatacaatgctggactgagctacacgacgcctgactttgttgctgcagcgactttgaacaacaaaggagacaacattgccgcttcctactaccactcggtgagtccaaccacagccgtcggaggagaactgagccacagcttctcgaccaacgggaacaccatcacctttgggacgcagcatgccctggaccctctgaccactgtgaaggcacgcttcaacaactacggcatggcaagtgcactgatccaacacgagtggaggcccaagtcactggtcaccatctccacggaggtggacaccaaggccatcgagaagagctctaaggttgggctctccctggtcctcaagccctgaggtcaccagcttctgcttttgggatgttaggtttatttttatttttatcagcagctgaagtccagtaaacaagcttggactaaacttgtcaactttggtgcccatcccataaactcaattcgttgtctgttaccatatcctaaactacctgagaggtttatgttacaatttacgtcgtgcttctgattcttttcgctgtctaatattgggtgttgtttggctcaccccttaaatttggagaaacttcggtatggttcaccattacccagattttaactatttgatcgatcgcatctttatattc

SEQ ID NO: 6079 - DNA, 2080 bp, Zea Mays
  misc_feature (2079)..(2080): n is a, c, g, or t
gcaacgcgcgccaaatgttctagtcctactaatcgcaactcgtttcccacaacacaacgcccatctctttcgtctccgctcccttctgctcacccgcacgatggcgccggaggcgcgaggtgaggcggcgccggtgtacagggacgcattgacgccggtggaggaaagggtgcgagacctgctgggccgcatgacgctgcgtgagaaggcggcgcagatggcccagatcgagcgcaccgtcgcgacgccgcgcgccctcacggagctcggggccggcagcgttctcaacgccgggggaagcatgccctgcgagcaagcctcccccgccgactgggccgccatggttgacggcttccagcgccttgcgatctcctcccgcctcggcgtccccatcctctacggcaccgacgccgtccacggccacaacaacgtctacggcgccaccgtgttcccccacaatgtcggtctcggggcctgcagggacggagagctcgcgcgtaggatcggcgaggcgacggcgcttgaggttcgcgccactggcatccactggaccttcgcgccatgcgtcgccgtctgtcgggatcctaggtggggtagatgctacgaaagctacagcgaggacccagaaatcgtgcgctcgttgaccaccattgtcagcggtttgcaggggcagccgtcagcggaccatcctcatggttaccccttcctcgcttcgcctagggagaatgtacttgcttgcgctaagcatttcgcaggggatggcggcacggacaagggggtcactgaggggaacgccatttgctcctatgaggatttggaagcaatccatatgagaccttacccggattgtatggctcaaggggtggcaacagtaatgacgtcctactctaaatggaatggggagccattgcattcgagtcgctacttgttaacagatgttctgaagggcaagttaggctttaagggttttctcatttcagattgggagggcattgacaggatctgtgagcctcgagggtctgattatcgctattgcattgcacaatcagtaaatgcaggaatggacatggtttgagaaatttttggatgatattgtgttcttggtggaggcgggggagataccaatgtctcgtattgatgacgctgttgaacgaattctgagggtcaagtttatttctggagtgtttgagcatccattttcagaccaatctctactggacatagttggttgtaaggaacatcgattactagcgcgtgaagctgttcgcaagtctttggtacttctgaaaaatggcaaggatcagaaggagccatttcttccattggccagagatgcaaaaagaatactggttgcaggaacacatgctgacgatattggatatcaatgtggtggctggacgatagcgtggcctggagacagtggaaaagtaactcttggtacaagcatattggaggccatacaagaattagtgggagtgcaaactgaagttgtgcatgagaaatacccaaccaaagctatgattgaaactgggggtttttcctatgcggtggtggttgttggagaggttccatatgctgaatggataggagatagaactgaccttagtatcccgtttaatggctctgaccttatcatccgtgttgcaagtaaaatccctatcctagtgattgttatttctggaaggccattgattattgagtcacaagttttggaaaagatagatgctctagtcgctgcctggctgcctggaagtgaaggcatgggaattaccgattgcctctttggagatcatgattttgtgggcacattgcctgtgacatggtataagtctgttgatcaattgcctataaatgctggagactctaactatgacccgttattccctgttggatatgggctgaaaatgtttcgaagtgatgatgattcaacataactttattattgattgggtacatttggatctctgtgatattaaatactctttatttactagctattggtacttaaaaccaaataatatattgttgtagtatgcattatactgtattggaaacattatattcttaccttagattttnn

SEQ ID NO: 6080 - DNA, 1154 bp, Zea Mays
cccgccgccattgtcttcgcgtcgacgagaagctgctcctcaccgtgcgccgcaagacgcgcctcagcctcgtggagcattgggtcatctaggacgcaacatcaacgacggctaggcccacgccgctctggttttgggggacggattaccacatgcaggcgctagcgagaatctgagtgagatgttcaacatggtggggaagaagttcaacgaggccgtgtgcaagaatgagggcatcgccgatgacgtttagcagcatcatatgaaggcctaacattattgacaagaattgttgggggcactcatgacttctaggagatcacaatttaaagcttctgcgccaggactgctacataagtcatcagaagaaggtgccttatgagtttgacaattgcttgtaggaacccatctttttacctgataagtggtcacgtagacactctttatatcttgcagttcatcaaccatcttgtcaatcaacttgctgctcacctatttctgaagatagcctgccagctcgaagaacagataaaaatatcgagtgcctactcatttctgaaagctgtagaattggaattgcagggctacttctcagcttttgatggccgcctgggccggtacaatttgattgatcaagcagcatctaaaatgtttgaagagggatcagttgacgacagcgattcttatcttcatgctgtgagggatatccacatgtgcttgggatattcttttgactaccaagctggagtaatccattcaggttttcaatttttttgtaggttcccaagcaacgtcactagaatatgtgtcatcatatggtttgatcgggcagataacagagctgcacgatgagctccagtaccttcagcatgagaccgaaaatgtccttccacgtgagcgaggaagatgcaccgacgaactataaagacataattcaaatttgaggggctatttctctactcctttaagaagcgagcaaggatagctaatgcccgagtcatcgtcggcgactatcgtgcgtggggccagcaggagcagaaagactaggggaagaggtgctagaagcaaggatcagagtgcttgaagtgtgtgaaaaaatgattattcgcatgcgtgctagccgttggcgtaacatcacccagctgatggagaga

SEQ ID NO: 6081 - DNA, 1634 bp, Zea Mays
tcaattggacctggcaacactatcccctttcgccggcgccgctcccgctccgtcccacccgcgctctccagtctccacggatcgatcgaagcttccgtcttccggcgcgatgttcccgtgccgccccttggctccgccgcacctgccgcgtgccccttccctcgcgcggcttccactgtcgtcgctgcggccgccgtcgtcgtcgctgcgcgtggtgcggtgcatggcgaaggagcggcgggtacggatggtggcgaagcagatccagcgggagctcgccgacatgctcacccgcgaccccgtgctgcagcgcgccgtgctccccgaagccgcgctcggcgctgaccgctacctgtcgtcgctcaccaccatcgccgacgtcgagctctccaacgacctccaggtgtgcaaagtgtacgtgtccgtgtttggggacgagagggggaagaaggtggccatcgaggggctcaaggccaagaccaagtacgtcaggagccagataggcaggaggatgaagcttcgcctcacgccggagataaggttcatcgaggatgagtctatggagcgtggaagcaggatccttgctatacttgacaaactaaaggaggaaagggagcaacaagaaggaaaagatggagaggaagatgatgattcatatatatcagaagaagatgatggtgactgggatgcagatgagccagatgaggaggacatcatttacgtaaaatagcccattgtcttctaggaacttggccatcattcatccagaacacagcagagtttaattctgtgaagttcactgctcgcctgcttgtcgaagcactccaaagtatatcagcacttgaagaggtctacactctacagagacatctcttttgccaattgaagcaggacatatcacacccttgctgccatttagaagctggtcatgtccttttttatggcttttcaatgcgggggatatttcaaagaggaatttggaagtctttttttttcctgtccactgaattatgatatctgaccattgacgcaagacagtttgggctgatgctcattcctctgttatgttaactagcacttgtttaatttgtacttgcctagttatcttgctgtatttcagtctccatttcttctatggttttggtacagtatttcctctttctataagccattatgtaatagagtagcatcagtatgattttaatgataatttatcactctctcatctgatctaacaaaaacgatctggacaaagttacataaggcaaatcagtccttgagttcctaaggcaaattgtgtgccctaattgatttgatctgctgtggttgtgctgctatggttattcaggtgaccatcaggagaagcatggcttgccatttttcagctcttaattttattcactccgacaattcttttaggtttcaacttttcccagggaacatttcaatgagctaggagagaattgtgaaagcttatgagcacttttgtgatccagactgctgcatgctcctacttgtttttgacagatgttacgaacactggacaaactatttgctatcgtgtgattttgcaatggttgtttaagggctcatctgtcttgagcaatcagtacacatctaaagaggatgaggtt

SEQ ID NO: 6082 - DNA, 685 bp, Zea Mays
taagtatccgttttcatccctaatgcgttttgagcaggcaatccaatcctatgcaattcatgtactttccttgacataccagaaagttccaaggcatattcttgcagaggcaatcaacattgaaggtctcgctttggacaagtttcttgagtaccatgctgcgaactcaggttgggtaattgagaagggtgggcagtctcaagtgattgttcttccacgcaatgagttcaatcacccccagctcaagaagaacacagctgataccgttccatttgagcacctaacacgcatattccctgttcttagctgattcaggcgtagtgagagatatacaatagaactcagagcgagtgaagcttctctaagcaattgtatcatctcctttgtggtataccgtattttaagatctcggtatacctgttcttttttatggctgaattggtacctgcaacttggtttttactataacgaaatgaccagttatgagattggtcggccctaaatcctaatgcttgcaatgctgctgaactactgatatttctgagaagactcatcttttaaaagcggaagatccattgttgtgttgggaatagggtgacatgacaatgggctctaaattttacactataaaatttaaggcttagattaggattaggctctttctatttatttttgaactaaaaat

SEQ ID NO: 6083 - DNA, 1954 bp, Zea Mays
gcggggccacttgtgcgccactgccgttgccttctatccggcgccatctccaccgtccactgccccatccgcagttccacaccacactacgccgccgcagccaggcagacagaggcagccccctcatggctgcccacgccgtcaccccgctcaccatctgctgcctccgccgcggcgttcccctcaaccacagccgccgcctcctcgccgtagccgccgcagcgccagaatcgcccgcgcctacccccgcgccatcccagttgccgcttcccccggttcctcctcgcaagggctacttcccgaagcgtggcgagacagtcgagctcacctgcgaggcgctcgcctttaagggcaagggcgtctgcaaggtcgcgggctccacgttcgtcctgctctgcgatggtgcgctccctggcgagcgcctcatcgcccgcgtccgccgcctccgccgtggcgcctttgccgaggccgccaagctcaggaccctcgagccacaccacgacgccatcgaggcgccctgccccctcgccgctgactgcggcggctgcaagacccagtctctcgcgtacgccgcgcagatccgccacaagcatcaccaggttcgcgacttgctcgtgaactttggcaagtttgatcccaagcgcctggagagctcggagccggatgatatcctcaaacccaccgtgcagtgtgacgagatattccggtacaggaacaaaatggagttctcgtttgggacgaagagatgggtgcaaaaagagttgaaggacaagggtgaggaggtggaggtgaagcaggaaacgaatgaaactgatggatatgcgcttggactgcacgcaccagggttcttcgacaaggtgctacatgtgcagaaatgttttctgcagagtgagccagcagataaggttcttgcagttgttcaagaaacctggatggatcctgccataggcctcacaccttatgatgtccataagcatgttgggtttctcaagcatctgatgataagaactggaagaaacatcagcactggaactccagaagtaatggtcaattttgtgacgtcatgttataagccagatgtattgatgcctcttgttgataaaatcacaaaaatacctgaagtggctgatgttctttacaagcttattgaagattctgctgggcttaaaggagatggctctgaaattgttcttgatctgttttgtggaactggaaccattggtttgacctttgcccgaagggcaaagcacatttatggatatgaagttgtccctgaagccattgaagatgcgcgaaagaatgccaagttgaacggtatcaacaatgcaacatttgttcaaggggacctcaataaaatcaatgaatcattcgggaaggaatttccaaagcctgacataatcatctcagatcctaatcgccctgggatgcacatgaagttaatcaagtggctgttagaagttaaagctcctcgaatagtgtatgtctcatgtaatccagctacttgtgctcgggatttggactacctatgtcatggcgtggaggagaaagatttgagaggattctatgaactgaagagtgtaattcctgtggatatgtttcctcatactcctcatattgagtgtgtatgcttattggagctgcgttgattttcagttttggtcaggtaaacccactggagccttgtttgggtgacgagtattcacctcaatccatataaggcattgttcggcactctagtatttaatacatattgggatccaatacatggtgggattgagtgaatccatcccatgtcacttaaaccatgtgtgtttcaattacagctgagatttaatacatggctaattttccattgtttagttacaccacatggatacattaatttgttgcatgtatttaaaaacatcagtgtccatcatattaggtctctgaagcggatgaaatttgaagcatc

SEQ ID NO: 6084 - DNA, 1991 bp, Zea Mays
gcggggccacttgtgcgccactgccgttgccttctatccggcgccatctccaccgtccactgccccatccgcagttccacaccacactacgccgccgcagccaggcagacagaggcagccccctcatggctgcccacgccgtcaccccgctcaccatctgctgcctccgccgcggcgttcccctcaaccacagccgccgcctcctcgccgtagccgccgcagcgccagaatcgcccgcgcctacccccgcgccatcccagttgccgcttcccccggttcctcctcgcaagggctacttcccgaagcgtggcgagacagtcgagctcacctgcgaggcgctcgcctttaagggcaagggcgtctgcaaggtcgcgggctccacgttcgtcctgctctgcgatggtgcgctccctggcgagcgcctcatcgcccgcgtccgccgcctccgccgtggcgcctttgccgaggccgccaagctcaggaccctcgagccacaccacgacgccatcgaggcgccctgccccctcgccgctgactgcggcggctgcaagacccagtctctcgcgtacgccgcgcagatccgccacaagcatcaccaggttcgcgacttgctcgtgaactttggcaagtttgatcccaagcgcctggagagctcggagccggatgatatcctcaaacccaccgtgcagtgtgacgagatattccggtacaggaacaaaatggagttctcgtttgggacgaagagatgggtgcaaaaagagttgaaggacaagggtgaggaggtggaggtgaagcaggaaacgaatgaaactgatggatatgcgcttggactgcacgcaccagggttcttcgacaaggtgctacatgtgcagaaatgttttctgcagagtgagccagcagataagttgttcaagaaacctggatggatcctgccataggcctcacaccttatgatgtccataagcatgttgggtttctcaagcatctgatgataagaactggaaggttagtgtcataaataatgtgaactcgtctgttggtaattcatctgtgggtgaacaagaatatactttgtacgggaagccaaacattacagaaatgttgagaggacttgcgttccagatatctgccaactccttttttcagactaatacaaaacaggctgatgttctttacaagcttattgaagattctgctgggcttaaaggagatggctctgaaattgttcttgatctgttttgtggaactggaaccattggtttgacctttgcccgaagggcaaagcacatttatggatatgaagttgtccctgaagccattgaagatgcgcgaaagaatgccaagttgaacggtatcaacaatgcaacatttgttcaaggggacctcaataaaatcaatgaatcattcgggaaggaatttccaaagcctgacataatcatctcagatcctaatcgccctgggatgcacatgaagttaatcaagtggctgttagaagttaaagctcctcgaatagtgtatgtctcatgtaatccagctacttgtgctcgggatttggactacctatgtcatggcgtggaggagaaagatttgagaggattctatgaactgaagagtgtaattcctgtggatatgtttcctcatactcctcatattgagtgtgtatgcttattggagctgcgttgattttcagttttggtcaggtaaacccactggagccttgtttgggtgacgagtattcacctcaatccatataaggcattgttcggcactctagtatttaatacatattgggatccaatacatggtgggattgagtgaatccatcccatgtcacttaaaccatgtgtgtttcaattacagctgagatttaatacatggctaattttccattgtttagttacaccacatggatacattaatttgttgcatgtatttaaaaacatcagtgtccatcatattaggtctctgaagcggatgaaatttgaagcatc

SEQ ID NO: 6085 - DNA, 2162 bp, Zea Mays
gccccgtctccctctccggcttcctttctccgtttctcgctcgcctcttctctctcccggcgtccgcgcccgccgaaacactctcgaaaggaaaccgatctgtcacccaaaccgcgcctccccgcggtgatctcgactcgagcgcgtttaaagcaccgcatcaaaaggaaaagagaagcgcgcgagcgagcgaggatccgggagcgtgaagcgcgaaaaaaaagcaggggagggagcgagcgaggaagcaacgcggaaacgggaaagcgagcgagacaagcgcccgatttggtcccccgcccgcttcgtttcctccgccgcacgtcttctcccccactaccactaggccactaccccacctcccctccagtcccctcgccttcccgccacgccacccgccgcgtcgccggagccctgtagctttcaccgcgcgcgcgtccgtccgtccgtcggcccgcccgcccgccccgagatcggggaggggcgcggtgtcatctctcctgagcaagcggcgcggcgatggcaggggggcaggcgcccgaggcgtcgcccgggcggtaccagcggcggcgcgacgagatcgacgacgacgactgcgccgacgtgctgggcatcgacgtgcgtgggcccgacgctgacccattcgacatccccgccaagcgcgcccccgtcgagcggctgcggcgctggaggcaagctgcacttgtcctgaatgcttctcgacgattcagatacacccttgacctaaaaaaggaggaggagaaggaacaaataagaaggaagataagggcccatgcccaagtcatacgggccgctttacttttcaaagaggctggggaaaagcagactcatgaaacagagttaccagaaattctcccacgagattttggaattggagaggagcagctgacagtgatgactagggatcataattattctgctctgcaagaatatggaggggtcatagggctcgcaaatttactgaaaaccaacctagagaagggaattcatggcgatgaggcagatttgtcatgcagggcaaatgcttttgggcctaacagatatcctcgcaagaaaggaaggagcttttgggtttttctttgggaggcctgccaggatatgacgctagttatccttatcatagctgcagtaatttctttagtactgggcattgcaactgagggcacaaaagaaggctggtatgatggcactagtattgcatttgcagtctttcttgtgatagtcgttactgctgttagtgactacaagcagtcgctgcagttccaacacctcaatgaggagaagcaaaacatacaagtggaggttattaggggtggtagaaggatacaagtatcaatatttgatattgtagtcggtgatatcgtggctttaaaaattggtgatcaggtctcagctgatggtgttgtaatcagtggtcattctcttgccattgatgagtctagtatgactggggaaagcaagattgttatgaaagatcagaagtcaccctttttaatggctggatcaaaagttgctgatggttatggcaccatgttggtgagtgattgtattctgcctccttactccttgcttgttttttgttttgttctggaaactacatgttttttgaagaaaaagaagctaggctcagtttatattgtataagtgtatgtttacccactcctgagaatatttctagtgggttacttgtgttaagaactaacaccattgactattataccttaacaacttgcaattataaagggtatcctattgttagagtggacgcactaaccagttcaacccaaaagcttaagctgttgggagaaggtagacaattcacttatacacttcaacaccctactcacgtgcatccagagagaaaggcgcaaacgtggaaacatagttgttaaggcagtaaggtgaggtaagctggccgatccccttttacctttttagcggtaaggagtaaagcgaggcgacgccttactaatatataaatatgtagggataatagtaccaaataggagtacaagtttaacataaaccaacataatagacttaaaatccaacgtaactaatagacagtagaagattaggaaaaaataaatacataactaatagatttactggtttaatagagacgtaaaaagaaaaataaa

SEQ ID NO: 6086 - DNA, 2471 bp, Zea Mays
acagctcatcccccggctgctcgctttttatcacttctcccttctcgaaacacagacgaacacctttcttttattactctcctgtccccctccctctctcatcaaccatcacctccgtcccgtccgcctcccattcgctcaaaccggaaggaggaggagggcgaattaaagcctcgcctcccgcccccgcccccgcccccgccccccaccgcgtcgccggcgccgatggccgacggcggggccggcgcgtaccgggagttcaaggcgctggcggaggcggcggaccgcaagttcgcgcgcgcgcgggacctgccgctctacggcggcggggaccaccacagccggaaggcgttcaaggcctacacgcggctctggcgcctgcagcaggagcgccgccgggagctcgtcgccgccggcctccgccgctgggagatcggcgaggtggcctcccggatcggccagctctactacgcgcgctacctccgcgccgccgagccgcgctcgctcgtcggcgcctacgtcttctacgaggccatatacagccgcggctacttcggcgcggccgcggcagcggtggggacggacggcggcggcggcggcgtcagccgccaccaggcgctcctgatccggtacaaggagcttcggttcatcgcgcggttcctcgtcgtggccatgctgatgcggcgggccgaggcggtggaccacctcgccgcacgcctacgtgcgctcgtcgaggagaccaaggctgcgtaccccaaaacaaacttcaaggaatggaagcaagtacttcaagaacttggcagatttttgaaggctgatggagcatataaaggatctagatcactaagatatgacaacttatttgattcttatccatcgaaccttgtatctattgcacgattccattcaaaaagggtgctcaaactgaaggaagctgtgctaacaagctaccgcagaaatgagatcaagttcacagaactaactttggatacattcagaatgctacagtgtttagagtgggaacccactgggtcttatcagattgctgctaaagaacttacagaaaatggcactgtaagtgatcagagtggaccctctggtctgattgatattcaactgtcaacagaaatatctgatggaagtcttccttcaaatcctcaaaaggcaatcatatatcatcctacagccgctcatcttttagcagttctagcaacaatttgtgaagagctctctcaagatagcattttactcatctatatatcagcgtcagagttttgctagtcaaaagtttggctctagctcatctcgtgcgagggctgcctctgccttccccactgataagccaaactcgcataacagttctgataatcatctatggcttggcccccgtggaagtggaggtccaaacaatctttatccagatgatctaattccatttacaagatatccactgttccttgtaattgatagtgaaaatagccatgcattcaaggtcatacataattcagagaagggagaaccagctgctttattactttctcccaggacatcatcagccatgcctggagtagaatccacggctcacggaagccagtttacatacttcctcactgctccaatgcaagccttctgccaactagcgggaataacttctgacatagacactgatacatacgcaaatgcagagaacatacttttctctgctttggaagaatatgaaggaatactctgcacttctgttggattaaacaatgtctgggggcaaattttaccagacccatttctcagacggctgattctcaggtttattttctgccgggcagtgcttttctatttccactcagatgagcacgaatatctaccgacctgcttacctagtcttccagagtcagtctccccgcatgcagaggccataagaactcctatcctttcgcttgcagaaaaccttgtcgtcagcgaccggtttgacttccgagactccacacgcaacaagaaatgatgaccagcagcaataaccataactcatgccttctgtagatacctctgtggtaaatatagtccagcgatttgttgattgttttgcatttatacagccaacggagcaattagtcagcaccaattagcagcggcatccgcgcctggatggtgtgaattgaatggcgatatgaagaattttgacctgtctccgttgagcgtctgtacaagtttgtttaggtgttctctaatttgctctaggcactgtaggcatgtagccttgtcgtcgattttttttctattttgttgtcttggagaggacggtttgtaagctggaagaggcgtttttaaagtactctagaaggcagattgttttgtagagtttggttaactcaccatatttgacggcagtttacggttttccaattttcgtagcgctacgtttgcctcgtgctcctgttggattaatgtgggcttggcccaaattaatactcaat

SEQ ID NO: 6087 - DNA, 2475 bp, Zea Mays
acagctcatcccccggctgctcgctttttatcacttctcccttctcgaaacacagacgaacacctttcttttattactctcctgtccccctccctctctcatcaaccatcacctccgtcccgtccgcctcccattcgctcaaaccggaaggaggaggagggcgaattaaagcctcgcctcccgcccccgcccccgcccccgccccccaccgcgtcgccggcgccgatggccgacggcggggccggcgcgtaccgggagttcaaggcgctggcggaggcggcggaccgcaagttcgcgcgcgcgcgggacctgccgctctacggcggcggggaccaccacagccggaaggcgttcaaggcctacacgcggctctggcgcctgcagcaggagcgccgccgggagctcgtcgccgccggcctccgccgctgggagatcggcgaggtggcctcccggatcggccagctctactacgcgcgctacctccgcgccgccgagccgcgctcgctcgtcggcgcctacgtcttctacgaggccatatacagccgcggctacttcggcgcggccgcggcagcggtggggacggacggcggcggcggcggcgtcagccgccaccaggcgctcctgatccggtacaaggagcttcggttcatcgcgcggttcctcgtcgtggccatgctgatgcggcgggccgaggcggtggaccacctcgccgcacgcctacgtgcgctcgtcgaggagaccaaggctgcgtaccccaaaacaaacttcaaggaatggaagcaagtacttcaagaacttggcagatttttgaaggctgatggagcatataaaggatctagatcactaagatatgacaacttatttgattcttatccatcgaaccttgtatctattgcacgattccattcaaaaagggtgctcaaactgaaggaagctgtgctaacaagctaccgcagaaatgagatcaagttcacagaactaactttggatacattcagaatgctacagtgtttagagtgggaacccactgggtcttatcagattgctgctaaagaacttacagaaaatggcactgtaagtgatcagagtggaccctctggtctgattgatattcaactgtcaacagaaatatctgatggaagtcttccttcaaatcctcaaaaggcaatcatatatcatcctacagccgctcatcttttagcagttctagcaacaatttgtgaagagctctctcaagatagcattttactcatctatatatcagcgtcagagttttgctagtcaaaagtttggctctagctcatctcgtgcgagggctgcctctgccttccccactgataagccaaactcgcataacagttctgataatcatctatggcttggcccccgtggaagtggaggtccaaacaatctttatccagatgatctaattccatttacaagatatccactgttccttgtaattgatagtgaaaatagccatgcattcaaggcaggtcatacataattcagagaagggagaaccagctgctttattactttctcccaggacatcatcagccatgcctggagtagaatccacggctcacggaagccagtttacatacttcctcactgctccaatgcaagccttctgccaactagcgggaataacttctgacatagacactgatacatacgcaaatgcagagaacatacttttctctgctttggaagaatatgaaggaatactctgcacttctgttggattaaacaatgtctgggggcaaattttaccagacccatttctcagacggctgattctcaggtttattttctgccgggcagtgcttttctatttccactcagatgagcacgaatatctaccgacctgcttacctagtcttccagagtcagtctccccgcatgcagaggccataagaactcctatcctttcgcttgcagaaaaccttgtcgtcagcgaccggtttgacttccgagactccacacgcaacaagaaatgatgaccagcagcaataaccataactcatgccttctgtagatacctctgtggtaaatatagtccagcgatttgttgattgttttgcatttatacagccaacggagcaattagtcagcaccaattagcagcggcatccgcgcctggatggtgtgaattgaatggcgatatgaagaattttgacctgtctccgttgagcgtctgtacaagtttgtttaggtgttctctaatttgctctaggcactgtaggcatgtagccttgtcgtcgattttttttctattttgttgtcttggagaggacggtttgtaagctggaagaggcgtttttaaagtactctagaaggcagattgttttgtagagtttggttaactcaccatatttgacggcagtttacggttttccaattttcgtagcgctacgtttgcctcgtgctcctgttggattaatgtgggcttggcccaaattaatactcaat

SEQ ID NO: 6088 - DNA, 1756 bp, Zea Mays
tctttccccctcccatcgctcgggaaggcgaagggtcaaggcgtctggcacttcagcttgtcccttttgcagcttgctcctggagtcctggttgctccgtcttatccggtcgggctcttgtccgacgaacgtgtggttgtggcactcgaggaagtacactgagcagggcattccatggagctcgaggcgatcggaaagcgactccgtataagcagcggcagcagcagcttggccggcgacaggctgacctccctgccggattgtctcatccaccacatcatgtccttcttgaaggcccgtcaggtggtgcagacctgcgtgctgtccaccaggtggaggcacctctggcgctctgtgccatgccttgacattgaccaggacgagttcaaggccgccggctcgaaccgcatcacagagaaggaacaggaagacttcgaggactttaccgaccacctgcttatacctaataatatttccattgcgctcctggatacacttcgtctgcatgttagcgatgatgaatattatcatcgtggagcatcagttagatggatccgtcatggcataaagtacagtgcccagaatcctggcattatgcacaaggaatcgaacttagccttttggcgcctcaaaaaactacacctctccggtgtatatctggatggcagtttcatgaagcatgtcagttcagggtgcccgtatttggaggttctcgagctcaaagattgcccgtgcacatttgaagaggtcacatcccacacactgaagaacttgattctggaaaattgcggatgcaatgagctttctgggattacatcacccacgctgaagagtttaacaattattgctagtggatattaccacataaataggctggttttgaaggcccctgctgttgcttatctgctcctggatgtgaatgcttattttgttaaacgcgatgtttcatttgatgagatgtcatctcttgccaaggcttcaatttatctaagggacagtgtaggaagtggactcagcaaggaccaattcaagcttctttgtagtgtgtctaatgtgacaactttggtgttgtcaggtttccagacaatgcattcacctgatttggagaagctcactttgggccgttgcaagttctcaaaagatcccaagaaaaagaaaggaaaagccagattgagcaaggggtgtctgaaccagtttaacgtccggtgcaagaacctcaagcttactgaaattatctatgaagacgacgatgcgaaaaaggtggtggaacttttgtggagcatgtcaggggacctgcccaagaattacataaaactcaccaaggttgacccggatcatccttagtccaggtcatctggcacttggtcacacagtggcttctatgaactttgcttgcatgcctcccctgtgtttagacgtccttagttgaactgctgggcgtgttcttttggactcatttctagataatttagttctacgagctatggtacttgttttgtgtggtctgcagctcgagactctagtccttatggtgtaagcttgcatgcttcaaagggaacagaaaattgcatgtttgcttcgtttccttgtatatccggtttcaagtttggtggatgcaggctgtttcgaaatgaatcttcgagttcatttcgtatttttgttgagcttgcatgcgttcactaatctacaaagctaattcccaatctgttatgcttaaacttcgcactgattcgatggacttctggttggaccttgc

SEQ ID NO: 6089 - DNA, 1526 bp, Zea Mays
acccgcagcggcaccagcaatcagcttctgccgctccgcagcgccccgagcgtgaggagagagacggtgatacagtggcagcgagcttgcagccgagcagcgagtgtccagtccagtgtgccagcgcgtgccagagccggagaaaaatgctggcacgattgtaggagcacgggcgatgcactaggcgcgggcagcgtagggataagacagcagcacagcagccgggccgatggctggacgtggccggcgcgcatgaccagcaagcagcacgccggggagcaccagccgttgccgcattccagcagcgacaggcaccgagccgaaaaccgccaggcgccagcccacgccgccaggcctagtgctccctcataaaagcgtcgcattcctctcacggtcacggcactcgccgcgccagcagccagcctatgagcagcgcttgcggcggcggcggttgtagggaatggaggcagcagccgtgggcgacggcgcgccagcgggccgctcccatcagggcgcctgtcggcgcccaccgccatccagttctacgacctgcaggaccgcctcggcttcgaccagcccagcaaggccatcgaatggctcatcaacgccgccgcctccgccatcgagaagctcccggagctcgacccggccgccttcgccgcccttcccgcgccgggcggcgcggatgccgccggcaatgataagcagcagcagcaggggagcaagtccgcgggcagcagcacgtcggagacgagcaaggggtccgagctctcgctctcgcgctccgacggccgtgggggcgccgccgcgcaggacagggtggtcaccgtggccagcacctcggcgcaggccgcgtccttcaccgagctgctcaccggggtggcgtcggccggcgccattagcgccggcgaacataggcagtcgtggcatcagcagcccaacgtctccgccggcgccggcgccgaccgcgtcggcattgcgcacaacgggaaaggcgcgcacgggctgtcgacggcgacgcacgccttttctggccccgccgccgccaagtttggcaatgcgcctccgttcggcctggtgccggcacagcctttcgacttcaccatccccatcgagatgcctcacttctcgctcggtcaggacacttcggcggcgtcctcgtctggcgccggggactacagcctcagtttttccatgtcctcgggtttcttgggtgccaatagggggacccttcagtccaattcgcagtcgaacttctcaggccatcatcaccagcagctccagaggctggacggcccgctcttgtttggccacgcccacgccgcggcggcgatgcatcccgcatccgagaaccagctgaccgcatcggcggcgttacagctctgggacggactccggcactccggcatgaaggagaagggcaggagctgattgcatattcttcaatattgacctgacgggtgtcagtacttcaggcgtcatttgctcttcattggagaggattttgcatgatcacatggcttctg

SEQ ID NO: 6090 - DNA, 1722 bp, Zea Mays
cagctaccgcgccgcccgtgagggcgagccaaaagataaagccaagtcccctttcccaagtcccagcgcgtagctagcgagtggccggccggccggccattgggacttttcctcctctcaatgatgccctacccatctcatcgctgttccccttcttgtatttcatgataagggacctgaacgtcgctgaaagaaccgaagacatcggcttctacgccggcttcgtaggtgcctcgttcatgtttggtagatgcttgacttcaaccgcctggggaatagcggcggaccgtatcgggaggaaacctgtcgtcgtgttcggcatctcctctgtggtcgtgttcaacacgctgtttggcctgagcgtcaactactggatggcaatcgccacacggttcctgcttggtgctttgaacggcttgcttggaccaataaaggcttatgccatcgaagtctgccggcctgaacatgaagctctagcgctatcacttgtcagcacggcatgggggataggcctcatcatcggcccagctcttggaggctaccttgcactgcctgcagagaacttcccggctatcttttcacctgactcggtatttggaaggttcccgtatttcctaccatgcctttgcacgtcggtcttcgctgctgctgttctagtgagctgcatatggatgccggagactctgcacaggcacaaagttcacgagagtacgagccaggacgttgaaaaggttcaagaaagcggcattaggaagaagaagagcttattcaggaactggccgttgatgtcgtcgataattgtctactgcatcttctcgttccatgacatggcttacacagaggtgttctctctatgggctgaaagtgacaagaagtatggtggactgagcttatcatctgaggacgttggtcaagttcttgcagtcactggtgccagtcttcttgtttatcaactctttctataccctagaatcaataaggttctcgggccgatcaaatcttctcgaattgcagctatcctgtgcatacctatcctctttgcctacccctacatgacatacatctcagaaccaggactgtcaatcattttgaacattgcgtcagcgataaagaataatcttgctgttacgatcattacaggcactttcatccttcaaaacaatgcagtgcctcaggatcaacgaggagctgcgaacggactgtccatgacagggatgtccttcttcaaggcacttgctccggcaggagcgggcattgtgttctcgtgggcgcagaaacgccagcatgcctttttcttcccaggtgatcagatggtgttcttcctgctgaacgtcgttgagctggtcgggctcatcctcacattcaaaccctttctggcagtgccagagcgatgcgatagtagatagctgttctttggaggatgaactatagaagttttggaatgattcaaaatttcatcgtgtatggcagcaataccagtgagacccaggaagaagcaagagctgtgtactggtaaccgtaagcggtgtatgcagtatcgctgcattagcatttgtgcttacgaaatgcacatgtatgtaggtgataaatgactaaatgtggccagtggatcgagttgttgctgcactgtgagtagtggtagtgtaagattcagcgactcgaaattgtgtgttggaaataaaattggtaggtgttagacgcgcggtatgagcgccaatcatt

SEQ ID NO: 6091 - DNA, 1084 bp, Zea Mays
gggacgacaagaattgttccgctttgcacgtgctgccagtctgcctgtgctaccagatttcaacctcgacatcgacgcacatcaccaatttgctgcgcctgattgcaagtttgcgttttgtcgatggagaagacattgatgatgacctatatgcattggcatgcgaacctgatttgcgagttcgaattttttctgcatgtcttgttgatggtgtccggtaccacaccattgaccgtgagagaaatagaagaacccaaaatagtggagtcatggttgaaggcactcataataatgaatgcattgatttttatggctgcttaaagaaatatcgagttgcagtataactcagatttgatggagcatcggacaattgttcttttccggtgtgattggtttgacactcatagcaagaaagttagtatgaaatatgatggatatttagaagtataaaccatagtagttgttggtacaaaaatgatacttttattttagcagcacaagcaactaaggtattttatttgcaagacatcaagaattctggaaactggaagattgttcaaaaatttacacataggcacttgtggagtgtggctgaaaatgacattgatgaaagacctagttcctcaggactatcataccaagatgatacatgtgttggttctgaagtgcaagttaatgaaggagatatggagatacctggacatcaggatgctgacgaatctgttaatgtcaatgcaagtgtggttgatgaatttcgggtgcaacgagaagaggaagtggaagagtatgagacaagcgacaatgaagatgaaactggatggcaatatgctagtgacaacgaagaatcaataactattgtcaatgacgatgatgatttcagtgataacgagtagcatgttttttgtttgatctgagagaagtgaactctatgctgtattttgtttgatttttaagaagtgaactagctactgttatttgagaaaagtgaactgtatgctgtaatttgtttgatttttaagaagtgaactcgctacggttatttgagaggagtgaactttatgcaataatttgttcgagctttgag

SEQ ID NO: 6092 - DNA, 2496 bp, Zea Mays
tgtggcaaatatttattataccatacaactttcctccatgggaatgtatggaacaatccaacttcattatgggcctactcattcctggcccagaatgcccaggaaaggattttgatgtctttatggaacaactcattgaagagttattggagctttggaaaggtgtcactacttgggatgcattgagtggaaacaattttgaactacatgctgcagttatatggtgcattcacgactatccagctttgagcacattgtcaggtcgggtcacaaaaggctattacgcttgtgtgcattgtgacaaaaatccttgctccaaaagaataaggaacaagatatgctatgtttatcatcgacgtttccttccaaaagatcatctatggaggagaaataaaacttttgatggtcatagtgaacaacgtgagaagccagaggaatttaccatagatgagttgatgcaacaattggagagggtaaaagatgtaagaccaggaaaacatactaaaagcaaaaagagaaagagggaagtagaaggtcaatgttggaaacgaagatcatgtctatgggatttgccatattggtcaagtttgaagttgcgccacaatcttgatgtaatgcacattgaaaaaaatatatgtgagtactttcttggtacatttcttggcattgttggaaagacaaaggacaccattaatgctaggcttgatttggaggacatgggcataaggagacatttacacttaaagcataatggtgactcatacaattttcctcatgcaccatacacaatgaataaaacacagaaggttgctttttgtgactttttgagaagtgtgaaattccccgatggctatgtttctaacttagcaacatgttttagtactgatggatgcaacctccaagcattgaaaactcatgattgtcatttccttcttcaaagaattttacctgctgctattagaggaatcatgagtaaggacatatatgaagcacttgctgaattaggtattttctttcagcacatatgtgctaagacattgaagttggatgttttacaaagaatgaaagttgaaatcccaatcattttgtgcaagcttgagaaaatatttcctcctttctttgatgtgatgctgcacttggctattcatttacctgacgaggcaatcctaagaggaccagtgcaatatgggtggatgtatccaattgaaagaaggttgtatacattgaaacgttttgtaagaaatatggctagacctgaaggatccattgcagaagcatatgttgctaatgagtgcttgacagcttgctcgaggtacttcgatgatgttgacacacgacacaatcgagagggtaggaacaaagagcgtgttgatttgagcagaggcaaattttatgtttttcagcatggagttgaacttcttggagtgccaagaattacatacctctaagattattatgataagatggtttggtatgtcctaaacaattgttcggaggtcgagccatatataaaattgcaagtttgcgttttgtcgatggagaagacattgatgatgacctatatgcattggcatgcgaacctgatttgcgagttcgaattttttctgcatgtcttgttgatggtgtccggtaccacaccattgaccgtgagagaaatagaagaacccaaaatagtggagtcatggttgaaggcactcataataatgaatgcattgatttttatggctgcttaaagaaatatcgagttgcagtataactcagatttgatggagcatcggacaattgttcttttccggtgtgattggtttgacactcatagcaagaaagttagtatgaaatatgatggatatttagaagtataaaccatagtagttgttggtacaaaaatgatacttttattttagcagcacaagcaactaaggtattttatttgcaagacatcaagaattctggaaactggaagattgttcaaaaatttacacataggcacttgtggagtgtggctgaaaatgacattgatgaaagacctagttcctcaggactatcataccaagatgatacatgtgttggttctgaagtgcaagttaatgaaggagatatggagatacctggacatcaggatgctgacgaatctgttaatgtcaatgcaagtgtggttgatgaatttcgggtgcaacgagaagaggaagtggaagagtatgagacaagcgacaatgaagatgaaactggatggcaatatgctagtgacaacgaagaatcaataactattgtcaatgacgatgatgatttcagtgataacgagtagcatgttttttgtttgatctgagagaagtgaactctatgctgtattttgtttgatttttaagaagtgaactagctactgttatttgagaaaagtgaactgtatgctgtaatttgtttgatttttaagaagtgaactcgctacggttatttgagaggagtgaactttatgcaataatttgttcgagctttgag

SEQ ID NO: 6093 - DNA, 2497 bp, Zea Mays
cagcatgtggcaaatatttattataccatacaactttcctccatgggaatgtatggaacaatccaacttcattatgggcctactcattcctggcccagaatgcccaggaaaggattttgatgtctttatggaacaactcattgaagagttattggagctttggaaaggtgtcactacttgggatgcattgagtggaaacaattttgaactacatgctgcagttatatggtgcattcacgactatccagctttgagcacattgtcaggtcgggtcacaaaaggctattacgcttgtgtgcattgtgacaaaaatccttgctccaaaagaataaggaacaagatatgctatgtttatcatcgacgtttccttccaaaagatcatctatggaggagaaataaaacttttgatggtcatagtgaacaacgtgagaagccagaggaatttaccatagatgagttgatgcaacaattggagagggtaaaagatgtaagaccaggaaaacatactaaaagcaaaaagagaaagagggaagtagaaggtcaatgttggaaacgaagatcatgtctatgggatttgccatattggtcaagtttgaagttgcgccacaatcttgatgtaatgcacattgaaaaaaatatatgtgagtactttcttggtacatttcttggcattgttggaaagacaaaggacaccattaatgctaggcttgatttggaggacatgggcataaggagacatttacacttaaagcataatggtgactcatacaattttcctcatgcaccatacacaatgaataaaacacagaaggttgctttttgtgactttttgagaagtgtgaaattccccgatggctatgtttctaacttagcaacatgttttagtactgatggatgcaacctccaagcattgaaaactcatgattgtcatttccttcttcaaagaattttacctgctgctattagaggaatcatgagtaaggacatatatgaagcacttgctgaattaggtattttctttcagcacatatgtgctaagacattgaagttggatgttttacaaagaatgaaagttgaaatcccaatcattttgtgcaagcttgagaaaatatttcctcctttctttgatgtgatgctgcacttggctattcatttacctgacgaggcaatcctaagaggaccagtgcaatatgggtggatgtatccaattgaaagaaggttgtatacattgaaacgttttgtaagaaatatggctagacctgaaggatccattgcagaagcatatgttgctaatgagtgcttgacagcttgctcgaggtacttcgatgatgttgacacacgacacaatcgagagggtaggaacaaagagcgtgttgatttgagcagaggcaaattttatgtttttcagcatggagttgaacttcttggagtgccaagaattacatacctctaagattattatgataagatggtttggtatgtcctaaacaattgttcggaggtcgagccatatataaaagttagagaatgaagggattgttaatgtggaaaaaactattgagaagcacttttcctcctggtttaagaagcatattgcaagtttgcgttttgtcgatggagaagacattgatgatgacctatatgcattggcatgcgaacctgatttgcgagttcgaattttttctgcatgtcttgttgatggtgtccggtaccacaccattgaccgtgagagaaatagaagaacccaaaatagtggagtcatggttgaaggcactcataataatgaatgcattgatttttatggctgcttaaagaaatatcgagttgcagtataactcagatttgatggagcatcggacaattgttcttttccggtgtgattggtttgacactcatagcaagaaacagcacaagcaactaaggtattttatttgcaagacatcaagaattctggaaactggaagattgttcaaaaatttacacataggcacttgtggagtgtggctgaaaatgacattgatgaaagacctagttcctcaggactatcataccaagatgatacatgtgttggttctgaagtgcaagttaatgaaggagatatggagatacctggacatcaggatgctgacgaatctgttaatgtcaatgcaagtgtggttgatgaatttcgggtgcaacgagaagaggaagtggaagagtatgagacaagcgacaatgaagatgaaactggatggcaatatgctagtgacaacgaagaatcaataactattgtcaatgacgatgatgatttcagtgataacgagtagcatgttttttgtttgatctgagagaagtgaactctatgctgtattttgtttgatttttaagaagtgaactagctactgttatttgagaaaagtgaactgtatgctgtaatttgtttgatttttaagaagtgaactcgctacggttatttgagaggagtgaactttatgcaataatttgttcgagctttgag

SEQ ID NO: 6094 - DNA, 4285 bp, Zea Mays
aaaaatacaagacacagactcttcgttgcattgatgatccagtgtttcaaggttgtactatgcaatctcttagaatagatggttaaggcttactccaacggagcagctatccaggcaggcaaaggtaaaatgactggccgctgagcattgtagctcaaaattgagccttccaacagaacagctatacacgccagccaaaataccaggaggagagagaaaacggcattctgcctgctcttcgagcgccaggcattctcttcccctgtctctgacaagctgtcccctcaatcatttgccttgcttcattctttcttttttcctctgctgttggatgcacgtcgcggatagctgggcaggcattcgggaggggccagccaaagagcaaaatagctgccagatttggctggcacctgttggagtgagtctaagaaactgcaacatacaaccctgtgctcatacaaccctaagctctaaaacattaatgcagttaagagataatgtgcatagaaagccgtgaagagacagactttttgcgaagagtctgtttctcgattttttttgtacttaacatcctatagacttctcaattaatagggttgtacatgctcttagtcgactgttatacttggaaaccaaactggggttgccgtagggcttaacatccggttttttaaacttcggttcgggttttcggttttctagacattagaaactaattggttttcgtgaaaatgaaaaaccatggtttcagtttttattttggtttctcggtaaaatctaaataccaaacttataatcaagacaacacatacaccaaatttatataataaattacaaataatttttaaaagtaaaaattatataggtataaatatgtagagatatatcatacatcacatataaatatgtgagtagtaatttaattgcttcacatgtttagtttacataatggaatagttaaatttttgaatcgataaagattggtaatttgttttttttgtattatatcgaaaaacaaacttctgagataaaaaaaccgaacgttcggttcggtttccgagttaccttccctcgcgcggttctgtctgcctttatttattcgcgttccctgcctgtttcgagcctccagccttaataacccggcattctctccgccgctcgcccgctccgcgtccggcggcccgcgtcgcctccactcccaattagcctatcgtgttcgacgcgagcgaactcgctcagatcagagtgttccctgatccggtcccaatcttttattggattttgtgttttggtaggggatctagggtttgtcgtcgaattccgcctcgaattttagggtttgcttcggatcgattccgttccgtgggattcttgcttgcagcactccatggctgcggcgcggcacgggggttataggagcttcgacgtggccaggaggcgggagttcgacctggagcgttctaggaggagcaaggagtaccgccactcgagccgccaccgcgactcggatcgccaccgtgatggcagcaggggccgtgaagtgcccaacgggtacatccgccaccgctcgccgtatgcgccaccgaagagccgaccttcaaaaaggaaggacgataaggagcctggtgaggtctcaagcgatagcggctcggagtctggtgggcgcccaccagtgctgagggaggatgggggtcttggggtctgcagggatggaggtgcgttgccagcaagcaagaagaggaagcactcacctggattccacgatacgaatgtttcaaagctgcgggcaagagatgaggtgtggagcaggagaggacctgatgccatagctgcggagctccctcttccttcgccgccccctatgtctgcggttggtgggtgctcaccaatggatccagaagttttggtagttccaaatgatgctgaaaggatggacgcgattactgagggggaagaggattgtgcaacgagaaacatttttacttcaaggtgggcggatgctgctgaagaggaggaagtggtgattgtgcctaagaagaagaaaagtgtgccacctgctcatttgcctgaacagaaatccacaaagaaaatcatgggctcagagctgggagaagcgatgggcagtaaaacatcaagaagttcctcaagttcgtctaactcaatgggtagtgaaaactggaatatcgaggtagacgagggtgatggcattgattcttctgttggttgttcgctggatactcattccaggagcaatatgcgtaggtctggatcacctgaggttgtgcgaacaccacgtaggtgctttaacatgcttcagggctgtaggagtattgatgactttgagaggatcaacacaatcaatgagggtacatatggagtcgtatttagggtgagagacaagaaaactggtgagatagttgctttgaagaaggtcaaggtagataaggaaaatggacgggaagggtttccattgacttctctcagagaaatcaatatccttctatcctttgaccatccttcaattgtggatgtcaaggaagtagttgttggtggtcatgacgatgatacttttatggtgatggaatacatggagcatgaccttaagggtgtcatggaggcgatgaagcaaccatatagccaaagtgaggtcaaatgtttgatgcttcagctgctagagggcgtgaagtatcttcatgacaattgggtacttcacagggatctcaagacatcaaatctcctcttgaataaccgcggtgagttgaaaatatgtgactttggactctctcgtcaatatggcagcctgctaaagccttacacccaaccagttgtgactttgtggtacagggctccggaactactattaggagcaaaggagtattcgactgctatcgatatgtggtcattaggttgcataatggcagaactcttgtcaaaagagccactcttcactgggaagtctgagatagatcaacttgataagatatttagaatactcggcacacccaatgaggagcggtggcatggttgttccaaattgcctggcttcaaaggcaacttcgtaaagcgaccgtacaatagattaagggacaaatttccagctgtatccttcacgggaggcttgaccttgtcagaagctgggtttgacctgctaaataggttgctggcatatgaccctgagaagcgcatatctgctgctgatgccttgaaccatgagtggttccgtgaagttcctctgcccaagatgaaggaattcatgccaacttttcctgctctgaatgaacaggacaggaggatcaagagatacatgaagagccctgaccccctggtggagcaacagatgaaagaacaagggagcataggagatcatggcctttttgactgatctgaaagcagacaagtcttgctgcaaatgacagtttttgagtgagtaaacatgttgcaaggctaagagatcaaaggggaacataaattttacttaagttccatgcagctagtgttcaaatggcagggttagctctctacgagaactgtcatattctaacctatcatcattataagttgcagatgtaatgcagttcgtctaaaagagttgaatgaagtgaaggaaccggtgcatttttattttcgcaaggaaatcgatactctcttaatgggaattgtaagcttgatgaccgagctatcgatgtggtgatggctaataagaaagtgataggagttgtgctcggctttctttccttctttgccaaggatattcttatgaacttatctgaaaaatgaaaaaaaacaaagctttgcatcatctttaccatagttgttaaggcgtccttgaagcgtcgcttaggcgacgcttaggcggtaaggtgtgcagcagtggcaaggcgtccctctcgccttagaccgtagactaagacatcatggcgccttgagcccttgaagcttgctaagacatcgatttgaagacgccttgaaggtctgcagggatgggtaaagggcctgctgcaacctgacccgagcacaaagcgagtgggatctgtagcgttgtcgttggtctgcggcggatctacagctgtgggggtgttggtctcttggcgccggcggcgcccctcccctccgtgagctctccaggcagaatagaggaaggagggaagaggaggggggcacgcccatagcagatttggtggcggcgactgggtgctggcagtggcagtgagttgagcgttggcggcggctgcgggaagagcatgctgccatagggagggaatgggaggggaggggaataagtggc

SEQ ID NO: 6095 - DNA, 5918 bp, Zea Mays
aaaaatacaagacacagactcttcgttgcattgatgatccagtgtttcaaggttgtactatgcaatctcttagaatagatggttaaggcttactccaacggagcagctatccaggcaggcaaaggtaaaatgactggccgctgagcattgtagctcaaaattgagccttccaacagaacagctatacacgccagccaaaataccaggaggagagagaaaacggcattctgcctgctcttcgagcgccaggcattctcttcccctgtctctgacaagctgtcccctcaatcatttgccttgcttcattctttcttttttcctctgctgttggatgcacgtcgcggatagctgggcaggcattcgggaggggccagccaaagagcaaaatagctgccagatttggctggcacctgttggagtgagtctaagaaactgcaacatacaaccctgtgctcatacaaccctaagctctaaaacattaatgcagttaagagataatgtgcatagaaagccgtgaagagacagactttttgcgaagagtctgtttctcgattttttttgtacttaacatcctatagacttctcaattaatagggttgtacatgctcttagtcgactgttatacttggaaaccaaactggggttgccgtagggcttaacatccggttttttaaacttcggttcgggttttcggttttctagacattagaaactaattggttttcgtgaaaatgaaaaaccatggtttcagtttttattttggtttctcggtaaaatctaaataccaaacttataatcaagacaacacatacaccaaatttatataataaattacaaataatttttaaaagtaaaaattatataggtataaatatgtagagatatatcatacatcacatataaatatgtgagtagtaatttaattgcttcacatgtttagtttacataatggaatagttaaatttttgaatcgataaagattggtaatttgttttttttgtattatatcgaaaaacaaacttctgagataaaaaaaccgaacgttcggttcggtttccgagttaccttccctcgcgcggttctgtctgcctttatttattcgcgttccctgcctgtttcgagcctccagccttaataacccggcattctctccgccgctcgcccgctccgcgtccggcggcccgcgtcgcctccactcccaattagcctatcgtgttcgacgcgagcgaactcgctcagatcagagtgttccctgatccggtcccaatcttttattggattttgtgttttggtaggggatctagggtttgtcgtcgaattccgcctcgaattttagggtttgcttcggatcgattccgttccgtgggattcttgcttgcagcactccatggctgcggcgcggcacgggggttataggagcttcgacgtggccaggaggcgggagttcgacctggagcgttctaggaggagcaaggagtaccgccactcgagccgccaccgcgactcggatcgccaccgtgatggcagcaggggccgtgaagtgcccaacgggtacatccgccaccgctcgccgtatgcgccaccgaagagccgaccttcaaaaaggaaggacgataaggagcctggtgaggtctcaagcgatagcggctcggagtctggtgggcgcccaccagtgctgagggaggatgggggtcttggggtctgcagggatggaggtgcgttgccagcaagcaagaagaggaagcactcacctggattccacgatacgaatgtttcaaagctgcgggcaagagatgaggtgtggagcaggagaggacctgatgccatagctgcggagctccctcttccttcgccgccccctatgtctgcggttggtgggtgctcaccaatggatccagaagttttggtagttccaaatgatgctgaaaggatggacgcgattactgagggggaagaggattgtgcaacgagaaacatttttacttcaaggtgggcggatgctgctgaagaggaggaagtggtgattgtgcctaagaagaagaaaagtgtgccacctgctcatttgcctgaacagaaatccacaaagaaaatcatgggctcagagctgggagaagcgatgggcagtaaaacatcaagaagttcctcaagttcgtctaactcaatgggtagtgaaaactggaatatcgaggtagacgagggtgatggcattgattcttctgttggttgttcgctggatactcattccaggagcaatatgcgtaggtctggatcacctgaggttgtgcgaacaccacgtaggtgctttaacatgcttcagggctgtaggagtattgatgactttgagaggatcaacacaatcaatgagggtacatatggagtcgtatttagggtgagagacaagaaaactggtgagatagttgctttgaagaaggtcaaggtagataaggaaaatggacgggaagggtttccattgacttctctcagagaaatcaatatccttctatcctttgaccatccttcaattgtggatgtcaaggaagtagttgttggtggtcatgacgatgatacttttatggtgatggaatacatggagcatgaccttaagggtgtcatggaggcgatgaagcaaccatatagccaaagtgaggtcaaatgtttgatgcttcagctgctagagggcgtgaagtatcttcatgacaattgggtacttcacagggatctcaagacatcaaatctcctcttgaataaccgcggtgagttgaaaatatgtgactttggactctctcgtcaatatggcagcctgctaaagccttacacccaaccagttgtgactttgtggtacagggctccggaactactattaggagcaaaggagtattcgactgctatcgatatgtggtcattaggttgcataatggcagaactcttgtcaaaagagccactcttcactgggaagtctgagatagatcaacttgataagatatttagaatactcggcacacccaatgaggagcggtggcatggttgttccaaattgcctggcttcaaaggcaacttcgtaaagcgaccgtacaatagattaagggacaaatttccagctgtatccttcacgggaggcttgaccttgtcagaagctgggtttgacctgctaaataggttgctggcatatgaccctgagaagcgcatatctgctgctgatgccttgaaccatgagtggttccgtgaagttcctctgcccaagatgaaggaattcatgccaacttttcctgctctgaatgaacaggacaggaggatcaagagatacatgaagagccctgaccccctggtggagcaacagatgaaagaacaagggagcataggagatcatggcctttttgactgatctgaaagcagacaagtcttgctgcaaatgacagtttttgagtgagtaaacatgttgcaaggctaagagatcaaaggggaacataaattttacttaagttccatgcagctagtgttcaaatggcagggttagctctctacgagaactgtcatattctaacctatcatcattataagttgcagatgtaatgcagttcgtctaaaagagttgaatgaagtgaaggaaccggtgcatttttattttcgcaaggaaatcgatactctcttaatgggaattgtaagcttaaagctgtggctgtatcaagagatgaagggttcacggatgccagattacatacctaactgactttttttgtggtcggtcctccaaaggtctcatctgtaattgtgaatccaagtgagttgagctcagctcttttgaatactttggtaatccctgccctcttcatcttcccactccagttctgtttcatcagctcatcatgatttatttatcattcctgtgattcattgcacgatcattatcaatttgtttctttatttgcatggacattaactgttacaaaatgccgccttcgccctcctgtgcccaccatagttgccacgtgttctgggatctatgcttattatttcttggatagttattgaggcaggtaaaagaataaggttaagaatatgttaaattactccttgtgctttggttagatgatattaccaaaaatatatgttgaggtgtaagacaattctgggtttaagtgtttattctcaaacggttgatcaatcatggttttccacttccaagcttgatcctaaccaatccttatgtgatttaattgtcatattttgccactccttcctatcataaaaacatgccgtttaggacaagatttgatcaaaccttaaaacttaaaagctacaaacatttataacttctaatttatttagtttatgattgctgtgtcttgctttgtcagctaccatttttttcatgccataaaatggtggaattgcctgtagagttacataaatgctttctactaacctaagttgagatgtgtgccaatgtatcactgtatcaggtcccaattccacttgttataccatcttttttcttcactggggattgtttttgaataatctgctgataataccgctccgttcttttgagcttttataatctgccagaggtatagcacttctaattactcctgtgagatggctaatatttccgtgttttttattgggttgatgtgttcatatgattttgttaagaacaacagtaaaatacaatgaatcctggaaagcaagttgtgctaagttatataattttagtaaaacgtattcatgtctttgatactgatgtaattctgaatttctgatgtgagattccaacttaagtacctaactgctttcccagttgcctgaacttgtagggtatttaccattcttatgtcacttctctgaacttgcatgatattcaccattcgtatgtcattataatagcatcttactgtcccttgcatttgtagttgcttggaattatgacgtctttagcacgatctgaagtagggagtatatgtaccacagaacgtctaggaattttgttgtagcagttcatctgagtatatccacttactcttaccatgtgcgattaaagtgcacttgagtttgtttacagcttgaaatgtccgcactggtagcagacatggcagattgttagggcacctatggagacgacgtcaaacacatttgaagttaggtgaacttgaatatcgacggagggcagctgataatttatgttggtcagtgaattgaataactatcttgacttatacctccgaactaggaaagcgcaattctagttctcctgagtgaaaccatctaaaggtagatcaaattcatggaaaaaatatcaatatttatgacatgtaacaggttctttatcttcagaatccagacatcaatcatcccttggtccggcgttctttggggtagggaatcttaaaagaatgtataaacagcctctcgaggtagtgcttgggacaggaaattgcgagttacctccatgacctcttcaatgcaccattgactgcattattgagaaggcagaagacatcattgatcggttggcacgtgcgaacttgcaatcgctttgacctaaaacaatatgccatcattattgagaattcgctatgcgccattcaaaaacaatatgtatatcattatatgccatcaaaatgtttgctgcggcttctatactggtttttctctctcctggtaccacacccgtcaaatggttaactcttatcagaaaagtattaggcgaagaaaattttgaaagctggtatagaaggtagtggcaccactggcatagatgcagaataaatacatccacaatgttttcatatgtgtcagatgacaaaatttatatgttacctatagagattgacatggcctaaaacgtttacttggttacttttcatttatttaagaactttagggcatgtataatactattaattaagaagtctcttgag

SEQ ID NO: 6096 - DNA, 1201 bp, Zea Mays
gcgggggacatccgtcctggcaactttccccacatccaatccaaaatgtcctccctcctcttcctcgatcgcgttgcgggccgctcgctctcagccaccgccatccacaccacagaccccagctaccgctaccgctaccaccaccaccaccaccactactggaacccccctccctttcaatacaaaacaaaaaagcgcacgcaggcagagctgctgcacgcggcgcacgcactcccactcctcccgttccgtccgctccaagcaaggcacccccatccagatggcggcctgggcggttccggcgctcgcggccgctgcgtgggcgctgcgggcggcggtgtgggcgtgcctcgcggcgtcggcgatgctcgtcgccgaggccgcgtacatgggcctcgccagcctcgcctccgccgccgcgatgctgtggcgccgcccggacgcgaggtaccgctgggagcccatgcccggaggctgcgacgtcgaggcggccactggggcggacttccccatggtgctcgtgcagatcccgatgtacaacgagcgggaggtgtacaagctatccattgacgctgcgtgtgccctcacatggccaccagaccgtattgtaatacaagtcttggatgactccactgatccgattattaaggaactagtggagcttgagtgccaggattgggccaccaaaaaaattaacatcaagtatgaggttagaaataatagaaagggatacaaagcaggtgcgctgaagaagggcatggaacatatatacgccaagcaatgtgaatttgttgctatctttgatgcggatttccaacctgaacctgacttccttttaaaaaccataccatttcttgtgcataacccaaagattgcacttgtacaagcacgttgggagtttggatgttcctgacctggcctttgccgggtgattttgcagtgaactacgatgtttgcctgatgacaaggatacagaagatgtctctagactatcatttcaaagttgagcaggaatcaggatcatttgtatattcattttttggctttaatggtacagctggtgtgtggcgtgtatctgctattaaccagtctggaggatggaaagatcgcacaactgtagaagatatggacttggctgtacgggctagcctcaagggatgggaattcttgtatgttggtgatattaggcattacaattatt

SEQ ID NO: 6097 - DNA, 1854 bp, Zea Mays
ccgccatccacaccacagaccccagctaccgctaccgctaccaccaccaccaccaccactactggaacccccctccctttcaatacaaaacaaaaaagcgcacgcaggcagagctgctgcacgcggcgcacgcactcccactcctcccgttccgtccgctccaagcaaggcacccccatccagatggcggcctgggcggttccggcgctcgcggccgctgcgtgggcgctgcgggcggcggtgtgggcgtgcctcgcggcgtcggcgatgctcgtcgccgaggccgcgtacatgggcctcgccagcctcgcctccgccgccgcgatgctgtggcgccgcccggacgcgaggtaccgctgggagcccatgcccggaggctgcgacgtcgaggcggccactggggcggacttccccatggtgctcgtgcagatcccgatgtacaacgagcgggaggtgtacaagctatccattgacgctgcgtgtgccctcacatggccaccagaccgtattgtaatacaagtcttggatgactccactgatccgattattaaggaactagtggagcttgagtgccaggattgggccaccaaaaaaattaacatcaagtatgaggttagaaataatagaaagggatacaaagcaggtgcgctgaagaagggcatggaacatatatacgccaagcaatgtgaatttgttgctatctttgatgcggatttccaacctgaacctgacttccttttaaaaaccataccatttcttgtgcataacccaaagattgcacttgtacaagcacgttgggagtttgtgaactacgatgtttgcctgatgacaaggatacagaagatgtctctagactatcatttcaaagttgagcaggaatcaggatcatttgtatattcattttttggctttaatggtacagctggtgtgtggcgtgtatctgctattaaccagtctggaggatggaaagatcgcacaactgtagaagatatggacttggctgtacgggctagcctcaagggatgggaattcttgtatgttggtgatattagggttaagagtgaactaccaagtaccttcaaagcctaccgtcatcaacaacataggtggacttgtggtgccgccaatctcttcaggaaaatggcatgggaaatcattacgaacaaggaggtgtcaatatggaagaaacatcatctgttatacagctttttctttgtccgaagggttattgctccccttgtgacattcttgttttattgtgttgtcatccctttgtctgccatggttcctggtgtcagcattcctgtatgggggctggtctatattcccactgcaatcacatgtatgaacgccatcagaaatccttggtctctccatttgatgcccttctggattctcttcgagaatgttatgtccatgcaccgcatgcgtgctgctgtaaccggtttacttgagactgcacgggcaaatgattgggtagtcactgagaaggtaggagatcttgtgaaggatgacctagatgttccactccttgaaccagtgaagccaacagaatgcgttgagaggatttactttcctgagctcttgcttgcactccacctcctaatatgtgcttcatatgacttcgtacttggaagccacaaatactatctttacatatacctccaggcctttgcatatgttgtaatgggttttggtttcgttggaacgaaaactccatgttcatagctgccaatatgatgttactattccccatttcacaattggcaccaggaaggaatgtatggcataatgagaagacaatgaaatatgaaattaattcttgtattgtgacatagcaataggcattgtctt

SEQ ID NO: 6098 - DNA, 1539 bp, Zea Mays
gtgaaacaagccgactgaccgaaccgttgaattgcaatttccgctagaaagccgacgagacaatttcttccgttcgtttcagatcgggcggtggtcctgaccaaggcgctgccggccactggcctctcgcaaccggcgaccgcatctcgaagtagagggtgctggccgccgctctcggaagcgctctggaaggacacggccatggcgatgcgggccgctgcgcgtcaagccatactctctccaccgcttgggccccgcagtcctcgccccttcctctgtggttgttccttgtctatcgctcctcggttggagccgtgccgagcggcgagctccaccaccgcgccggccgccggaaagcatctccctccattgttcagcgtcgcgccgatgatggactggacggacaaccactatcggacgctcgcgcggcttatctcgcggcatgcctggctttatactgagatggtcgtcgccgagaccatcgtgcatcagaaggataacctggataggtttctagcatttccggaggaacaacatcctattgtgctgcagattggtggaagtaaccttgaaaatttagcaaaagcaacagaactggcaaatgattattcatatgatgagatcaacctaaactgtggctgtccaagcggcaaagttgctggtcatggttgctttggtgctcgcttaatgtttgatccagagtttgtaggagatgccatgtcaactatcgcagctaattgtgatgtcccagttagtgttaaatgcagaattggtgttgacgatcgtgattcttatgaagaactatgtgaatttgtagataaagttatctcaaaatctccaaccaggcatttcattattcatgctcggaaggcattgcttagtggtctcagtcccgcagagaatcggaagattcctccattgaaatatgagtactattttgctttgttgcgggacttcccagaaataaaatttactctaaatggtggcataaccaatgttagtgcatccatgagacaaggtgcacacggagttatggttggccgggctgcttataacaatccatggaacatgctaggacatgtggatggggaaatctatggcaagcaaacaagatacatttctcgtcgccagatacttgagaactaccaagcttatggtgattcaataattgaccagtatggccccagcaggccaaatgtgagacaacttgtcaagaacctggcaacagcctatggaaacgcaaagctgactctgcattgcgtcattgcaaggagtgctacacatcctttctgtaagaaaaaaaactcggccggggagggaaagaccaccatctcggtattatattaagaaaagaccgaaacaatggtcccggccgagaaaatccccgaaccctgacccatcactaacgggccggcatcaactgtccactctacaacagcccaaccggcaggacatcgtaacccgagagtagatgggacacagcgagaagattttttgaaccaagcctggaaatacgctctcgagggaaatcaaacctag

SEQ ID NO: 6099 - DNA, 1674 bp, Zea Mays
cacgcttagttgtaccgtaaaatgaaatgctgcattgtttaggatttttttactcatcgttttatcattctagataacgtgacaattttgaaaacgctccagtgaaacaagccgactgaccgaaccgttgaattgcaatttccgctagaaagccgacgagacaatttcttccgttcgtttcagatcgggcggtggtcctgaccaaggcgctgccggccactggcctctcgcaaccggcgaccgcatctcgaagtagagggtgctggccgccgctctcggaagcgctctggaaggacacggccatggcgatgcgggccgctgcgcgtcaagccatactctctccaccgcttgggccccgcagtcctcgccccttcctctgtggttgttccttgtctatcgctcctcggttggagccgtgccgagcggcgagctccaccaccgcgccggccgccggaaagcatctccctccattgttcagcgtcgcgccgatgatggactggacggacaaccactatcggacgctcgcgcggcttatctcgcggcatgcctggctttatactgagatggtcgtcgccgagaccatcgtgcatcagaaggataacctggataggtttctagcatttccggaggaacaacatcctattgtgctgcagattggtggaagtaaccttgaaaatttagcaaaagcaacagaactggcaaatgattattcatatgatgagatcaacctaaactgtggctgtccaagcggcaaagttgctggtcatggttgctttggtgctcgcttaatgtttgatccagagtttgtaggagatgccatgtcaactatcgcagctaattgtgatgtcccagttagtgttaaatgcagaattggtgttgacgatcgtgattcttatgaagaactatgtgaatttgtagataaagttatctcaaaatctccaaccaggcatttcattattcatgctcggaaggcattgcttagtggtctcagtcccgcagagaatcggaagattcctccattgaaatatgagtactattttgctttgttgcgggacttcccagaaataaaatttactctaaatggtggcataaccaatgttagtcaagttagtgcatccatgagacaaggtgcacacggagttatggttggccgggctgcttataacaatccatggaacatgctaggacatgtggatggggaaatctatggcaagcaaacaagatacatttctcgtcgccagatacttgagaactaccaagcttatggtgattcaataattgaccagtatggccccagcaggccaaatgtgagacaacttgtcaagccactgttaaacttattccactcagaacctggcaacagcctatggaaacgcaaagctgactctgcattgcgtcattgcaaggagtgctacacatcctttctgtaagaaaaaaaactcggccggggagggaaagaccaccatctcggtattatattaagaaaagaccgaaacaatggtcccggccgagaaaatccccgaaccctgacccatcactaacgggccggcatcaactgtccactctacaacagcccaaccggcaggacatcgtaacccgagagtagatgggacacagcgagaagattttttgaaccaagcctggaaatacgctctcgagggaaatcaaacctag

SEQ ID NO: 6100 - DNA, 5310 bp, Zea Mays
gtggcaaatgatgacatagttatcatggaagaaacaaaggacacacttgaatataataatgagtctagtagtaaagttcaagaaatttgtcaggttaatgctgcaagagaagagttctcttcaggtccattgcttgtaacagtagctcctagtgacgaaatttgcacagtgcagagtgtagctgtggtgatacctgggtcagaatctggtgacgatgcaaatcaaagttctgataagagtaagcaacctcaggaacattctgtcactcaaactgttgatgaccatttatctgaaacaagaagtgggaaattagatcaatcaacatgcatcacaggattagtctctgacaattgtgttgtctcagaggacaaaacattgatgagtgaaggtgagggagactttgttggtccaaaatcaccaaatggtttatcaattagtttcattgtcgcagaccgtgaagagcaaagccctgtgtccggagaacagagagttagcttggaagcaaatgccaatgagcctgaggaaaagaacctagctaacgtcacatcaactgatctccacaccaaaagtctgcagcatgatattgacagaatagctaaagagactgataaagatgttttgtctttggttttccctattgaagagcatgaagaaaaatatggagtgagccctatagctgttgaaaagtgcgtctgtcgtgaagcaagtgcatgtgaatctgcacgaaaacccctaaccgttatcttttctaacaatctccacaccaaacatctgcaacatgattgtgatgtgctaattaaggagactggtgaagaagttttagctcaggagaattgtaatgaccagcctgttcctgcccagactgaccaagaaattaagttaaacgatgaacttgctgatccggatgttttagctcaggagaattgtaatgaccagcccgttcctgcccagactgacctagaaattaagttacacgatgaacttgctgatccggaccatgaagagcaaagccctgtatccggagaacggagagttagcttggaagcaaatgccaacgagcctgaggaaaagaacctagctaacgtcatatcaattgatctccacaccaaaagtctgcagcatgataatggcagaatagctgaagagactgataaagatgttttgtcttttgttttccctattgaagagcatgaagaaaaatatgcagttagccctatagccgttgaaaagagcttccgtcaggaagcaagtgcaattgaatctgcaggaaaacccctaactgtcatcttttctaacgatctccacaccaaacatctgcaacatgattgtgatgtgctaattaaggagactggtgaagaagttttagctcaggagaattgtaatgaccagcctgttcctgcccagaccgacctagaaattaagttaaatgatgaacttgctgatccggatgttttagctcaggagaattgtaatgaccagcctgttcctgccaacgagcctgaggaaaagaacctagctaacgtcatatcaactgatctccacaccaaaactctgcagcatgataatgacagaatagctgaagagactgataaagatgtttcgtctttggttttccctattgaagagcatgaagaaaaatatgcagtgagccctatagctgttgaaaagagcgtcagtcgggaagccagtgcatgtgaatctgcaggaaaacccctaactgtcatcttttctaacgatctccacaccaaacatctgcaacatgattgtgatgtgctaattaaggagactggtgaagttttagctcaggagaattgtaatgaccagcctgttcttgctcagactgacctagaaactaagttaaacgatgaacttgctgatctggctatggaatcaggttgtagcattactgaaaggaatgaagggcttgttgctcataatcttgatcaagaaggtttccttgaagcaacaccagagtgcaaacaggaatgtggtttgcctgaggagacagtaatttcctcaaaagaaacaggatctctgctgtgtgcagatcaatcaccaattggtctggaatctttattttcgcaagaaagcatagttgaatcagtggggcattgtgcacttgcttcagcaacaactcataccgaaaatggctttgatgattcaaaagattgccataacaagtctgcacttgaaaatgttcatgtgccagaaccttgttcacacaatgatactaaaggaggcatttttaaaaatgttgattgtatgcatacatcccagcgagatgatagaatggaaggagtaccagaggctaacactgatgaagaacatgttctgtcagcctttttgctggatgcaaatcacctaaacgtagtcattaattctgaagaagtggtttgtgagggtgaagatagtaaggagcttctccattcggaagactgtaaagcttcatccgagaaaacagatgtgaatgatggcaatgtatatggtattagtgatgctgtagtgagatgtgcactgcatgctccagccgatgataattatgagatttttttgggtcccaatactgatgtaccacgtcaggtttataatgacggatgcagtgatgtcaaagaagatcgatttgcttccaaaccctggacaattgatattattgaggatgcctctgtcaaagaaagatcaaatttaaaagattggcaacttgattccaagttggagggcacagaaatagtggaatctggcctttacttcaataaggatattggtaacattttacatagtggatctattggtgaaataactccatctggttctggtttatcaaaagattcatctgtggactatagaggggaggttttagatggcttctcaatggaagcatctcttgaaaggtcttctacacgtggggaacaaaatggttgtagactagatgctattgagaatccttcaattactttagcaacttctggttataagcatgaaggtgctttatctgaggaagcagtgtacacaaagaagaattacgctggaacatgcttgtcaaatcccagggaattaatcatggagctgcaatcccatttctcaaaggaaaacataaatgaatctgatcctcatgacagccttgtattcccaactgctgaaaattcagcagatgaacagctggttaaagtacaccatggttctaatctgtctcagttaggattaactgatctgttggatggaccaattgggtgttccaataccgacgtgttgtgccagtgtgacaatcataaaaatcaatccaatgaggacaaggtagaggaagttgaggcggtgtctgctgctaaatacatagaaagtgaagttgtgctgctcccatctcaagagagatcaaatttgaataatgagcagcttaacaccaagttggaaagcccaaacattatgggatcttgccttaactgtgataacgatgtttgtaatacttcggacaatggatctgtttttgtcattggtaaaagaactccatctgcttctggcttaccagaagattatcctaaggatagtgacttgcaacaaccggttttagatagcttctcagtggtttcatcttttcaagacaatatatctgggaagaaaactgtttctggtgtagcaggcagtgagattctttctttaagtttagcaactcctgattataaacatgaagatggtttctctgaggaagcagtatgcagaacaaagaattatactggaacttcctcggtagatccgaggcatttagacatggaggggcactctatttactctgagggaggtactgaaaaatctaatctgcaagataatcttgcatttctaagcgctgagagtggaaaagatgaacctattatttgccatgttgagaaactggttgacgcacatgcttcttcagatacataccaaggtccttgtcaagatctaggcagacatgaagaacaagagagctgcatgtctattcctatgcaagccaaagaaagtggaggggttttgaggtctagccacacgaaagggtcagttacagcagcccaaattgatttggcaggtgatgcccatcttattgtgagtgataatgctgctgccaagcaagtgtttagtgaggagaaagaggaaacaaaatctatctcttcttcagatattgatatccttcatgaaaaatcatactccagtggacacgatgaccatgctgcttgtgctgccgaaactcagttctaccatccacagaaagcatctatatctgatggactacatttgggtcctagttctttgcaagtagaatcactggatgctttggatagcgatatactgtatgttaacacaggagttctcgagcagcatcataaagagggttactatgaacccagtgtctaccaaatcacttcaggcatttgcacaatgtctgaagctgaaccattcgaagttttagaaactggaaaagatgtaaaaacgccatctaagctagatgagcaacttaatcctgggttggacggagatgaagctgagaaacacagcttagactgtggtacagacaccagtcctgtgatgagcaagagaaccctttcttcaccaggatcaggaccatgccagcagtatgtaaatgaaagcaccaccagtacacagtcgactgataatcacccaaacgacctacccgctccgagatctcctgaacaatccgcgtgttttcagaatgacaacgattcgggttcagcatttgtcaaagcagcaggcgaagaggtatagatgaactttgcggtaagctgcagagtttcaaagtttccagcgccgtaaaaggaagctacgtagctatgggtgcacctcgtccgaagcctggggacagcacgagccgatctgcagccgcgctgctcaggaacatagagaacacaactgctgttaaagctggccgtcctcctgtcaagccaaacgccgatggtaaggactcgtctaggcgagccctgcagcccataagcggaaggcctgacagtaggtagttcggcggttccttaataagtgtgtcgtgtttgtgttcaaccctttgttgaaagccaggtccgtgtatttgtgcagcttgttgtcatgaagctgctgtgtgcgtgtcatttaacataagcgtgcgtgaagttgtgttatggaagtggctaaatatgtgttcgttaggaggtcaattggcttgaactgaccctgctgttccgtgatttctgtctaaatatacttgtgtggctgtgtcactttgattggccttatcgatcacatgcaatgggatcacatctagcgtgctctagggtcctcgtttggtaatcgctg

SEQ ID NO: 6101 - DNA, 6772 bp, Zea Mays
aaaacgctgtctcggcttcgccgtccagcggaacagtgtacgggagcagttcgtcgcgtgtgtcgcgtcgcgttgcgttgcgccacccactaattcgaacggacgggactgggattcgaaatttcgaacacgcgccgcctgagagagagagagagagtgagagaaagagagagagagagcaggagagatggtcaggcctttgtgatctcccgcggggctggaggtgtgcggggatggatctcgcggggatgaagcggcgggagctccaggcgctctgcaagcggcacggcctccccgccgggggcaccaacgccgacctcgtcggacgtctcgacgccgtgctttcggggcccgctgttgtggaggaggaggttgccggagtgccggcgaggaaggggtgtctgaagcaaacgggcggaggtgccaccgaggccaagaaggttacttttggggcggaggtagggaaggccaggagactgaggtctcgggtcatatggtcgccggtcgttgccaagacaagggggaagtctgctcgagccggtactgattctgctgctgaagacggtatttctgcagatgtgggcgctgatgtcccagtgaggcggtccaggaggaattcgttcaatcctgccgaggctgaggaagcaggagaggctgttgctgttgacaggaagcccaagcgcaagaatcaggagaatgacgagggcgttgctgttatcgctcaggctagagttacgagaaggtcaaatttggagtggtctgctactgtattgcctcctgctgttgagaagaagagagggaggcagaatgcagctgagtctgatgtgcagaagtccgctctggtggaagtaacagctaggactacaaggtctcgctcaatcgtacctgttgtggtgccacccactgtggttgagaacaagaggaggaagactggagatccacaaacaactgtagagttgactatgctttcagatgtgcccagaagtgattttcctgccaccaggtctttaaggaacaaaattgtccacgttaacaacagcgtcgtggacgaaactcacactaccaggcagttggaaaacaagatgcgtccgtctactcgtaggcatcaacaggttgcatcttctccggaggataaaggtcaaaaaattcctgctaccagtaagtcccctctactgaggtggtcacggagaaactattctgaggccaatagtgcaaattcagtaaacatcaaattggccaaagactcgagcacagctcagccattggcacaccataattctcattctgaagatttggagaaacaaccagcagttaaagaaccaattaaacggtcaacacgtaaatctattgctttggctgcacttgagaaagagaaggatgtaattgaaggaaagaaccctgaagcacatgttaggcgatcaacgaggaaatcagttgtgcaggttaaagataccaaaagtattgttgaagagactcaatatgctaacagtgaagatgtggcgaagcaaccagcaactaaaggacctgctagggggctgagacgtaaatctgttatcacagaattgcatgagaaagagaagagtctcattgccgaaaagaacatggaaacagatgaagcgatattaacgcggaagcctgtaatcccagttaaaaatattaaagctgttggtgaaggaattcaaattggtaagggcaaagatgtggataaacaatttgttgtgaagcaacctactaggcgatcatcgcgcaaatctgtgctgcctgatatgcttgagaataatagtggacttctagcacccaaaatgaatgctgagatgaatgttaggagatcaacacggaagtctgttcttcctgacatgcataatgagaagcaagatcaccataaaatggctagaaatgagaacttgcaaagtggtaaatatcaagatggtgagaagcaacagaaagtaaaagattctattaggcaatcaaggagatctatcgctacagtgctacttgagggacaaaataatgatgaaggaaaaaagttcaaaaatcctacgaggaggacaacacacaaatctcatgcccttaatgcagttgaagaggtcagcatggatcacattgaagttggtgaagaaggcttgaaattgaggaagcgcagtaggtttttgctggaaatatcatcttcagctaatgtttcctggaagcatcagaatgcacagatctctaatgaaaaagataacacagaaggatcgcagcaggcatcaaattgcacaacttcaaagagaaggtcttcaaagaagagacgaacaactgctccagaagaagtgatgcctttcaaggtggcaaatgatgacatagttatcatggaagaaacaaaggacacacttgaatataataatgagtctagtagtaaagttcaagaaatttgtcaggttaatgctgcaagagaagagttctcttcaggtccattgcttgtaacagtagctcctagtgacgaaatttgcacagtgcagagtgtagctgtggtgatacctgggtcagaatctggtgacgatgcaaatcaaagttctgataagagtaagcaacctcaggaacattctgtcactcaaactgttgatgaccatttatctgaaacaagaagtgggaaattagatcaatcaacatgcatcacaggattagtctctgacaattgtgttgtctcagaggacaaaacattgatgagtgaagaccgtgaagagcaaagccctgtgtccggagaacagagagttagcttggaagcaaatgccaatgagcctgaggaaaagaacctagctaacgtcacatcaactgatctccacaccaaaagtctgcagcatgatattgacagaatagctaaagagactgataaagaacctagctaacgtcatatcaactgatctccacaccaaaactctgcagcatgataatgacagaatagctgaagagactgataaagatgtttcgtctttggttttccctattgaagagcatgaagaaaaatatgcagtgagccctatagctgttgaaaagagcgtcagtcgggaagccagtgcatgtgaatctgcaggaaaacccctaactgtcatcttttctaacgatctccacaccaaacatctgcaacatgattgtgatgtgctaattaaggagactggtgaagatgttttagctcaggagaattgtaatgaccagcctgttccggcccagactgacctagaaatgaagttaaacgatgaacttgctgatccggaagttttagctcaggagaattgtaatgaccagcctgttcttgctcagactgacctagaaactaagttaaacgatgaacttgctgatctggctatggaatcaggttgtagcattactgaaaggaatgaagggcttgttgctcataatcttgatcaagaaggtttccttgaagcaacaccagagtgcaaacaggaatgtggtttgcctgaggagacagtaatttcctcaaaagaaacaggatctctgctgtgtgcagatcaatcaccaattggtctggaatctttattttcgcaagaaagcatagttgaatcagtggggcattgtgcacttgcttcagcaacaactcataccgaaaatggctttgatgattcaaaagattgccataacaagtctgcacttgaaaatgttcatgtgccagaaccttgttcacacaatgatactaaaggaggcatttttaaaaatgttgattgtatgcatacatcccagcgagatgatagaatggaaggagtaccagaggctaacactgatgaagaacatgttctgtcagcctttttgctggatgcaaatcacctaaacgtagtcattaattctgaagaagtggtttgtgagggtgaagatagtaaggagcttctccattcggaagactgtaaagcttcatccgagaaaacagatgtgaatgatggcaatgtatatggtattagtgatgctgtagtgagatgtgcactgcatgctccagccgatgataattatgagatttttttgggtcccaatactgatgtaccacgtcaggtttataatgacggatgcagtgatgtcaaagaagatcgatttgcttccaaaccctggacaattgatattattgaggatgcctctgtcaaagaaagatcaaatttaaaagattggcaacttgattccaagttggagggcacagaaatagtggaatctggcctttacttcaataaggatattggtaacattttacatagtggatctattggtgaaataactccatctggttctggtttatcaaaagattcatctgtggactatagaggggaggttttagatggcttctcaatggaagcatctcttgaaaggtcttctacacgtggggaacaaaatggttgtagactagatgctattgagaatccttcaattactttagcaacttctggttataagcatgaaggtgctttatctgaggaagcagtgtacacaaagaagaattacgctggaacatgcttgtcaaatcccagggaattaatcatggagctgcaatcccatttctcaaaggaaaacataaatgaatctgatcctcatgacagccttgtattcccaactgctgaaaattcagcagatgaacagctggttaaagtacaccatggttctaatctgtctcagttaggattaactgatctgttggatggaccaattgggtgttccaataccgacgtgttgtgccagtgtgacaatcataaaaatcaatccaatgaggacaaggtagaggaagttgaggcggtgtctgctgctaaatacatagaaagtgaagttgtgctgctcccatctcaagagagatcaaatttgaataatgagcagcttaacaccaagttggaaagcccaaacattatgggatcttgccttaactgtgataacgatgtttgtaatacttcggacaatggatctgtttttgtcattggtaaaagaactccatctgcttctggcttaccagaagattatcctaaggatagtgacttgcaacaaccggttttagatagcttctcagtggtttcatcttttcaagacaatatatctgggaagaaaactgtttctggtgtagcaggcagtgagattctttctttaagtttagcaactcctgattataaacatgaagatggtttctctgaggaagcagtatgcagaacaaagaattatactggaacttcctcggtagatccgaggcatttagacatggaggggcactctatttactctgagggaggtactgaaaaatctaatctgcaagataatcttgcatttctaagcgctgagagtggaaaagatgaacctattatttgccatgttgagaaactggttgacgcacatgcttcttcagatacataccaaggtccttgtcaagatctaggcagacatgaagaacaagagagctgcatgtctattcctatgcaagccaaagaaagtggaggggttttgaggtctagccacacgaaagggtcagttacagcagcccaaattgatttggcaggtgatgcccatcttattgtgagtgataatgctgctgccaagcaagtgtttagtgaggagaaagaggaaacaaaatctatctcttcttcagatattgatatccttcatgaaaaatcatactccagtggacacgatgaccatgctgcttgtgctgccgaaactcagttctaccatccacagaaagcatctatatctgatggactacatttgggtcctagttctttgcaagtagaatcactggatgctttggatagcgatatactgtatgttaacacaggagttctcgagcagcatcataaagagggttactatgaacccagtgtctaccaaatcacttcaggcatttgcacaatgtctgaagctgaaccattcgaagttttagaaactggaaaagatgtaaaaacgccatctaagctagatgagcaacttaatcctgggttggacggagatgaagctgagaaacacagcttagactgtggtacagacaccagtcctgtgatgagcaagagaaccctttcttcaccaggatcaggaccatgccagcagtatgtaaatgaaagcaccaccagtacacagtcgactgataatcacccaaacgacctacccgctccgagatctcctgaacaatccgcgtgttttcagaatgacaacgattcgggttcagtaggcatttgtcaaagcagcaggcgaagaggtatagatgaactttgcggtaagctgcagagtttcaaagtttccagcgccgtaaaaggaagctacgtagctatgggtgcacctcgtccgaagcctggggacagcacgagccgatctgcagccgcgctgctcaggaacatagagaacacaactgctgttaaagctggccgtcctcctgtcaagccaaacgccgatggtaaggactcgtctaggcgagccctgcagcccataagcggaaggcctgacagtaggtagttcggcggttccttaataagtgtgtcgtgtttgtgttcaaccctttgttgaaagccaggtccgtgtatttgtgcagcttgttgtcatgaagctgctgtgtgcgtgtcatttaacataagcgtgcgtgaagttgtgttatggaagtggctaaatatgtgttcgttaggaggtcaattggcttgaactgaccctgctgttccgtgatttctgtctaaatatacttgtgtggctgtgtcactttgattggccttatcgatcacatgcaatgggatcacatctagcgtgctctagggtcctcgtttggtaatcgctg

SEQ ID NO: 6102 - DNA, 7583 bp, Zea Mays
acaaaacgctgtctcggcttcgccgtccagcggaacagtgtacgggagcagttcgtcgcgtgtgtcgcgtcgcgttgcgttgcgccacccactaattcgaacggacgggactgggattcgaaatttcgaacacgcgccgcctgagagagagagagagagtgagagaaagagagagagagagcaggagagatggtcaggcctttgtgatctcccgcggggctggaggtgtgcggggatggatctcgcggggatgaagcggcgggagctccaggcgctctgcaagcggcacggcctccccgccgggggcaccaacgccgacctcgtcggacgtctcgacgccgtgctttcggggcccgctgttgtggaggaggaggttgccggagtgccggcgaggaaggggtgtctgaagcaaacgggcggaggtgccaccgaggccaagaaggttacttttggggcggaggtagggaaggccaggagactgaggtctcgggtcatatggtcgccggtcgttgccaagacaagggggaagtctgctcgagccgatgtgggcgctgatgtcccagtgaggcggtccaggaggaattcgttcaatcctgccgaggctgaggaagcaggagaggctgttgctgttgacaggaagcccaagcgcaagaatcaggagaatgacgagggcgttgctgttatcgctcaggctagagttacgagaaggtcaaatttggagtggtctgctactgtattgcctcctgctgttgagaagaagagagggaggcagaatgcagctgagtctgatgtgcagaagtccgctctggtggaagtaacagctaggactacaaggtctcgctcaatcgtacctgttgtggtgccacccactgtggttgagaacaagaggaggaagactggagatccacaaacaactgtagagttgactatgctttcagatgtgcccagaagtgattttcctgccaccaggtctttaaggaacaaaattgtccacgttaacaacagcgtcgtggacgaaactcacactaccaggcagttggaaaacaagatgcgtccgtctactcgtaggcatcaacaggttgcatcttctccggaggataaaggtcaaaaaattcctgctaccagtaagtcccctctactgaggtggtcacggagaaactattctgaggccaatagtgcaaattcagtaaacatcaaattggccaaagactcgagcacagctcagccattggcacaccataattctcattctgaagatttggagaaacaaccagcagttaaagaaccaattaaacggtcaacacgtaaatctattgctttggctgcacttgagaaagagaaggatgtaattgaaggaaagaaccctgaagcacatgttaggcgatcaacgaggaaatcagttgtgcaggttaaagataccaaaagtattgttgaagagactcaatatgctaacagtgaagatgtggcgaagcaaccagcaactaaaggacctgctagggggctgagacgtaaatctgttatcacagaattgcatgagaaagagaagagtctcattgccgaaaagaacatggaaacagatgaagcgatattaacgcggaagcctgtaatcccagttaaaaatattaaagctgttggtgaaggaattcaaattggtaagggcaaagatgtggataaacaatttgttgtgaagcaacctactaggcgatcatcgcgcaaatctgtgctgcctgatatgcttgagaataatagtggacttctagcacccaaaatgaatgctgagatgaatgttaggagatcaacacggaagtctgttcttcctgacatgcataatgagaagcaagatcaccataaaatggctagaaatgagaacttgcaaagtggtaaatatcaagatggtgagaagcaacagaaagtaaaagattctattaggcaatcaaggagatctatcgctacagtgctacttgagggacaaaataatgatgaaggaaaaaagttcaaaaatcctacgaggaggacaacacacaaatctcatgcccttaatgcagttgaagaggtcagcatggatcacattgaagttggtgaagaaggcttgaaattgaggaagcgcagtaggtttttgctggaaatatcatcttcagctaatgtttcctggaagcatcagaatgcacagatctctaatgaaaaagataacacagaaggatcgcagcaggcatcaaattgcacaacttcaaagagaaggtcttcaaagaagagacgaacaactgctccagaagaagtgatgcctttcaaggtggcaaatgatgacatagttatcatggaagaaacaaaggacacacttgaatataataatgagtctagtagtaaagttcaagaaatttgtcaggttaatgctgcaagagaagagttctcttcaggtccattgcttgtaacagtagctcctagtgacgaaatttgcacagtgcagagtgtagctgtggtgatacctgggtcagaatctggtgacgatgcaaatcaaagttctgataagagtaagcaacctcaggaacattctgtcactcaaactgttgatgaccatttatctgaaacaagaagtgggaaattagatcaatcaacatgcatcacaggattagtctctgacaattgtgttgtctcagaggacaaaacattgatgagtgaaggtgagggagactttgttggtccaaaatcaccaaatggtttatcaattagtttcattgtcgcagaccgtgaagagcaaagccctgtgtccggagaacagagagttagcttggaagcaaatgccaatgagcctgaggaaaagaacctagctaacgtcacatcaactgatctccacaccaaaagtctgcagcatgatattgacagaatagctaaagagactgataaagatgttttgtctttggttttccctattgaagagcatgaagaaaaatatggagtgagccctatagctgttgaaaagtgcgtctgtcgtgaagcaagtgcatgtgaatctgcacgaaaacccctaaccgttatcttttctaacaatctccacaccaaacatctgcaacatgattgtgatgtgctaattaaggagactggtgaagaagttttagctcaggagaattgtaatgaccagcctgttcctgcccagactgaccaagaaattaagttaaacgatgaacttgctgatccggatgttttagctcaggagaattgtaatgaccagcccgttcctgcccagactgacctagaaattaagttacacgatgaacttgctgatccggaccatgaagagcaaagccctgtatccggagaacggagagttagcttggaagcaaatgccaacgagcctgaggaaaagaacctagctaacgtcatatcaattgatctccacaccaaaagtctgcagcatgataatggcagaatagctgaagagactgataaagatgttttgtcttttgttttccctattgaagagcatgaagaaaaatatgcagttagccctatagccgttgaaaagagcttccgtcaggaagcaagtgcaattgaatctgcaggaaaacccctaactgtcatcttttctaacgatctccacaccaaacatctgcaacatgattgtgatgtgctaattaaggagactggtgaagaagttttagctcaggagaattgtaatgaccagcctgttcctgcccagaccgacctagaaattaagttaaatgatgaacttgctgatccggatgttttagctcaggagaattgtaatgaccagcctgttcctgccaacgagcctgaggaaaagaacctagctaacgtcatatcaactgatctccacaccaaaactctgcagcatgataatgacagaatagctgaagagactgataaagatgtttcgtctttggttttccctattgaagagcatgaagaaaaatatgcagtgagccctatagctgttgaaaagagcgtcagtcgggaagccagtgcatgtgaatctgcaggaaaacccctaactgtcatcttttctaacgatctccacaccaaacatctgcaacatgattgtgatgtgctaattaaggagactggtgaagatgttttagctcaggagaattgtaatgaccagcctgttccggcccagactgacctagaaatgaagttaaacgatgaacttgctgatccggaagttttagctcaggagaattgtaatgaccagcctgttcttgctcagactgacctagaaactaagttaaacgatgaacttgctgatctggctatggaatcaggttgtagcattactgaaaggaatgaagggcttgttgctcataatcttgatcaagaaggtttccttgaagcaacaccagagtgcaaacaggaatgtggtttgcctgaggagacagtaatttcctcaaaagaaacaggatctctgctgtgtgcagatcaatcaccaattggtctggaatctttattttcgcaagaaagcatagttgaatcagtggggcattgtgcacttgcttcagcaacaactcataccgaaaatggctttgatgattcaaaagattgccataacaagtctgcacttgaaaatgttcatgtgccagaaccttgttcacacaatgatactaaaggaggcatttttaaaaatgttgattgtatgcatacatcccagcgagatgatagaatggaaggagtaccagaggctaacactgatgaagaacatgttctgtcagcctttttgctggatgcaaatcacctaaacgtagtcattaattctgaagaagtggtttgtgagggtgaagatagtaaggagcttctccattcggaagactgtaaagcttcatccgagaaaacagatgtgaatgatggcaatgtatatggtattagtgatgctgtagtgagatgtgcactgcatgctccagccgatgataattatgagatttttttgggtcccaatactgatgtaccacgtcaggtttataatgacggatgcagtgatgtcaaagaagatcgatttgcttccaaaccctggacaattgatattattgaggatgcctctgtcaaagaaagatcaaatttaaaagattggcaacttgattccaagttggagggcacagaaatagtggaatctggcctttacttcaataaggatattggtaacattttacatagtggatctattggtgaaataactccatctggttctggtttatcaaaagattcatctgtggactatagaggggaggttttagatggcttctcaatggaagcatctcttgaaaggtcttctacacgtggggaacaaaatggttgtagactagatgctattgagaatccttcaattactttagcaacttctggttataagcatgaaggtgctttatctgaggaagcagtgtacacaaagaagaattacgctggaacatgcttgtcaaatcccagggaattaatcatggagctgcaatcccatttctcaaaggaaaacataaatgaatctgatcctcatgacagccttgtattcccaactgctgaaaattcagcagatgaacagctggttaaagtacaccatggttctaatctgtctcagttaggattaactgatctgttggatggaccaattgggtgttccaataccgacgtgttgtgccagtgtgacaatcataaaaatcaatccaatgaggacaaggtagaggaagttgaggcggtgtctgctgctaaatacatagaaagtgaagttgtgctgctcccatctcaagagagatcaaatttgaataatgagcagcttaacaccaagttggaaagcccaaacattatgggatcttgccttaactgtgataacgatgtttgtaatacttcggacaatggatctgtttttgtcattggtaaaagaactccatctgcttctggcttaccagaagattatcctaaggatagtgacttgcaacaaccggttttagatagcttctcagtggtttcatcttttcaagacaatatatctgggaagaaaactgtttctggtgtagcaggcagtgagattctttctttaagtttagcaactcctgattataaacatgaagatggtttctctgaggaagcagtatgcagaacaaagaattatactggaacttcctcggtagatccgaggcatttagacatggaggggcactctatttactctgagggagatacataccaaggtccttgtcaagatctaggcagacatgaagaacaagagagctgcatgtctattcctatgcaagccaaagaaagtggaggggttttgaggtctagccacacgaaagggtcagttacagcagcccaaattgatttggcaggtgatgcccatcttattgtgagtgataatgctgctgccaagcaagtgtttagtgaggagaaagaggaaacaaaatctatctcttcttcagatattgatatccttcatgaaaaatcatactccagtggacacgatgaccatgctgcttgtgctgccgaaactcagttctaccatccacagaaagcatctatatctgatggactacatttgggtcctagttctttgcaagtagaatcactggatgctttggatagcgatatactgtatgttaacacaggagttctcgagcagcatcataaagagggttactatgaacccagtgtctaccaaatcacttcaggcatttgcacaatgtctgaagctgaaccattcgaagttttagaaactggaaaagatgtaaaaacgccatctaagctagatgagcaacttaatcctgggttggacggagatgaagctgagaaacacagcttagactgtggtacagacaccagtcctgtgatgagcaagagaaccctttcttcaccaggatcaggaccatgccagcagtatgtaaatgaaagcaccaccagtacacagtcgactgataatcacccaaacgacctacccgctccgagatctcctgaacaatccgcgtgttttcagaatgacaacgattcgggttcagtaggcatttgtcaaagcagcaggcgaagaggtatagatgaactttgcggtaagctgcagagtttcaaagtttccagcgccgtaaaaggaagctacgtagctatgggtgcacctcgtccgaagcctggggacagcacgagccgatctgcagccgcgctgctcaggaacatagagaacacaactgctgttaaagctggccgtcctcctgtcaagccaaacgccgatggtaaggactcgtctaggcgagccctgcagcccataagcggaaggcctgacagtaggtagttcggcggttccttaataagtgtgtcgtgtttgtgttcaaccctttgttgaaagccaggtccgtgtatttgtgcagcttgttgtcatgaagctgctgtgtgcgtgtcatttaacataagcgtgcgtgaagttgtgttatggaagtggctaaatatgtgttcgttaggaggtcaattggcttgaactgaccctgctgttccgtgatttctgtctaaatatacttgtgtggctgtgtcactttgattggccttatcgatcacatgcaatgggatcacatctagcgtgctctagggtcctcgtttggtaatcgctg

SEQ ID NO: 6103 - DNA, 7681 bp, Zea Mays
atggatctcgcggggatgaagcggcgggagctccaggcgctctgcaagcggcacggcctccccgccgggggcaccaacgccgacctcgtcggacgtctcgacgccgtgctttcggggcccgctgttgtggaggaggaggttgccggagtgccggcgaggaaggggtgtctgaagcaaacgggcggaggtgccaccgaggccaagaaggttacttttggggcggaggtagggaaggccaggagactgaggtctcgggtcatatggtcgccggtcgttgccaagacaagggggaagtctgctcgagccgatgtgggcgctgatgtcccagtgaggcggtccaggaggaattcgttcaatcctgccgaggctgaggaagcaggagaggctgttgctgttgacaggaagcccaagcgcaagaatcaggagaatgacgagggcgttgctgttatcgctcaggctagagttacgagaaggtcaaatttggagtggtctgctactgtattgcctcctgctgttgagaagaagagagggaggcagaatgcagctgagtctgatgtgcagaagtccgctctggtggaagtaacagctaggactacaaggtctcgctcaatcgtacctgttgtggtgccacccactgtggttgagaacaagaggaggaagactggagatccacaaacaactgtagagttgactatgctttcagatgtgcccagaagtgattttcctgccaccaggtctttaaggaacaaaattgtccacgttaacaacagcgtcgtggacgaaactcacactaccaggcagttggaaaacaagatgcgtccgtctactcgtaggcatcaacaggttgcatcttctccggaggataaaggtcaaaaaattcctgctaccagtaagtcccctctactgaggtggtcacggagaaactattctgaggccaatagtgcaaattcagtaaacatcaaattggccaaagactcgagcacagctcagccattggcacaccataattctcattctgaagatttggagaaacaaccagcagttaaagaaccaattaaacggtcaacacgtaaatctattgctttggctgcacttgagaaagagaaggatgtaattgaaggaaagaaccctgaagcacatgttaggcgatcaacgaggaaatcagttgtgcaggttaaagataccaaaagtattgttgaagagactcaatatgctaacagtgaagatgtggcgaagcaaccagcaactaaaggacctgctagggggctgagacgtaaatctgttatcacagaattgcatgagaaagagaagagtctcattgccgaaaagaacatggaaacagatgaagcgatattaacgcggaagcctgtaatcccagttaaaaatattaaagctgttggtgaaggaattcaaattggtaagggcaaagatgtggataaacaatttgttgtgaagcaacctactaggcgatcatcgcgcaaatctgtgctgcctgatatgcttgagaataatagtggacttctagcacccaaaatgaatgctgagatgaatgttaggagatcaacacggaagtctgttcttcctgacatgcataatgagaagcaagatcaccataaaatggctagaaatgagaacttgcaaagtggtaaatatcaagatggtgagaagcaacagaaagtaaaagattctattaggcaatcaaggagatctatcgctacagtgctacttgagggacaaaataatgatgaaggaaaaaagttcaaaaatcctacgaggaggacaacacacaaatctcatgcccttaatgcagttgaagaggtcagcatggatcacattgaagttggtgaagaaggcttgaaattgaggaagcgcagtaggtttttgctggaaatatcatcttcagctaatgtttcctggaagcatcagaatgcacagatctctaatgaaaaagataacacagaaggatcgcagcaggcatcaaattgcacaacttcaaagagaaggtcttcaaagaagagacgaacaactgctccagaagaagtgatgcctttcaaggtggcaaatgatgacatagttatcatggaagaaacaaaggacacacttgaatataataatgagtctagtagtaaagttcaagaaatttgtcaggttaatgctgcaagagaagagttctcttcaggtccattgcttgtaacagtagctcctagtgacgaaatttgcacagtgcagagtgtagctgtggtgatacctgggtcagaatctggtgacgatgcaaatcaaagttctgataagagtaagcaacctcaggaacattctgtcactcaaactgttgatgaccatttatctgaaacaagaagtgggaaattagatcaatcaacatgcatcacaggattagtctctgacaattgtgttgtctcagaggacaaaacattgatgagtgaaggtgaggtcaacatttggtggtaatggcatactagttgttaatttattctctgcatagccaaatctataggctttaattatgtttaagttatatggcatcacaattgtattattattttttgatcttctttggatgctggaaagctggcatattaataccctattgattttgtgatgttgtaattagctttgtccattattgtcatgttatatactcaaagggagactttgttggtccaaaatcaccaaatggtttatcaattagtttcattgtcgcagaccgtgaagagcaaagccctgtgtccggagaacagagagttagcttggaagcaaatgccaatgagcctgaggaaaagaacctagctaacgtcacatcaactgatctccacaccaaaagtctgcagcatgatattgacagaatagctaaagagactgataaagatgttttgtctttggttttccctattgaagagcatgaagaaaaatatggagtgagccctatagctgttgaaaagtgcgtctgtcgtgaagcaagtgcatgtgaatctgcacgaaaacccctaaccgttatcttttctaacaatctccacaccaaacatctgcaacatgattgtgatgtgctaattaaggagactggtgaagaagttttagctcaggagaattgtaatgaccagcctgttcctgcccagactgaccaagaaattaagttaaacgatgaacttgctgatccggatgttttagctcaggagaattgtaatgaccagcccgttcctgcccagactgacctagaaattaagttacacgatgaacttgctgatccggaccatgaagagcaaagccctgtatccggagaacggagagttagcttggaagcaaatgccaacgagcctgaggaaaagaacctagctaacgtcatatcaattgatctccacaccaaaagtctgcagcatgataatggcagaatagctgaagagactgataaagatgttttgtcttttgttttccctattgaagagcatgaagaaaaatatgcagttagccctatagccgttgaaaagagcttccgtcaggaagcaagtgcaattgaatctgcaggaaaacccctaactgtcatcttttctaacgatctccacaccaaacatctgcaacatgattgtgatgtgctaattaaggagactggtgaaggtaatattgcattaatacttgttccacaacttgttactgatctgcggagatggtgatgaaaacttgtgctgtttgcactgtgttgacattttttaaatgtattctttccctttctcagaagttttagctcaggagaattgtaatgaccagcctgttcctgcccagaccgacctagaaattaagttaaatgatgaacttgctgatccggatgttttagctcaggagaattgtaatgaccagcctgttcctgccaacgagcctgaggaaaagaacctagctaacgtcatatcaactgatctccacaccaaaactctgcagcatgataatgacagaatagctgaagagactgataaagatgtttcgtctttggttttccctattgaagagcatgaagaaaaatatgcagtgagccctatagctgttgaaaagagcgtcagtcgggaagccagtgcatgtgaatctgcaggaaaacccctaactgtcatcttttctaacgatctccacaccaaacatctgcaacatgattgtgatgtgctaattaaggagactggtgaagatgttttagctcaggagaattgtaatgaccagcctgttccggcccagactgacctagaaatgaagttaaacgatgaacttgctgatccggaagttttagctcaggagaattgtaatgaccagcctgttcttgctcagactgacctagaaactaagttaaacgatgaacttgctgatctggctatggaatcaggttgtagcattactgaaaggaatgaagggcttgttgctcataatcttgatcaagaaggtttccttgaagcaacaccagagtgcaaacaggaatgtggtttgcctgaggagacagtaatttcctcaaaagaaacaggatctctgctgtgtgcagatcaatcaccaattggtctggaatctttattttcgcaagaaagcatagttgaatcagtggggcattgtgcacttgcttcagcaacaactcataccgaaaatggctttgatgattcaaaagattgccataacaagtctgcacttgaaaatgttcatgtgccagaaccttgttcacacaatgatactaaaggaggcatttttaaaaatgttgattgtatgcatacatcccagcgagatgatagaatggaaggagtaccagaggctaacactgatgaagaacatgttctgtcagcctttttgctggatgcaaatcacctaaacgtagtcattaattctgaagaagtggtttgtgagggtgaagatagtaaggagcttctccattcggaagactgtaaagcttcatccgagaaaacagatgtgaatgatggcaatgtatatggtattagtgatgctgtagtgagatgtgcactgcatgctccagccgatgataattatgagatttttttgggtcccaatactgatgtaccacgtcaggtttataatgacggatgcagtgatgtcaaagaagatcgatttgcttccaaaccctggacaattgatattattgaggatgcctctgtcaaagaaagatcaaatttaaaagattggcaacttgattccaagttggagggcacagaaatagtggaatctggcctttacttcaataaggatattggtaacattttacatagtggatctattggtgaaataactccatctggttctggtttatcaaaagattcatctgtggactatagaggggaggttttagatggcttctcaatggaagcatctcttgaaaggtcttctacacgtggggaacaaaatggttgtagactagatgctattgagaatccttcaattactttagcaacttctggttataagcatgaaggtgctttatctgaggaagcagtgtacacaaagaagaattacgctggaacatgcttgtcaaatcccagggaattaatcatggagctgcaatcccatttctcaaaggaaaacataaatgaatctgatcctcatgacagccttgtattcccaactgctgaaaattcagcagatgaacagctggttaaagtacaccatggttctaatctgtctcagttaggattaactgatctgttggatggaccaattgggtgttccaataccgacgtgttgtgccagtgtgacaatcataaaaatcaatccaatgaggacaaggtagaggaagttgaggcggtgtctgctgctaaatacatagaaagtgaagttgtgctgctcccatctcaagagagatcaaatttgaataatgagcagcttaacaccaagttggaaagcccaaacattatgggatcttgccttaactgtgataacgatgtttgtaatacttcggacaatggatctgtttttgtcattggtaaaagaactccatctgcttctggcttaccagaagattatcctaaggatagtgacttgcaacaaccggttttagatagcttctcagtggtttcatcttttcaagacaatatatctgggaagaaaactgtttctggtgtagcaggcagtgagattctttctttaagtttagcaactcctgattataaacatgaagatggtttctctgaggaagcagtatgcagaacaaagaattatactggaacttcctcggtagatccgaggcatttagacatggaggggcactctatttactctgagggagatacataccaaggtccttgtcaagatctaggcagacatgaagaacaagagagctgcatgtctattcctatgcaagccaaagaaagtggaggggttttgaggtctagccacacgaaagggtcagttacagcagcccaaattgatttggcaggtgatgcccatcttattgtgagtgataatgctgctgccaagcaagtgtttagtgaggagaaagaggaaacaaaatctatctcttcttcagatattgatatccttcatgaaaaatcatactccagtggacacgatgaccatgctgcttgtgctgccgaaactcagttctaccatccacagaaagcatctatatctgatggactacatttgggtcctagttctttgcaagtagaatcactggatgctttggatagcgatatactgtatgttaacacaggagttctcgagcagcatcataaagagggttactatgaacccagtgtctaccaaatcacttcaggcatttgcacaatgtctgaagctgaaccattcgaagttttagaaactggaaaagatgtaaaaacgccatctaagctagatgagcaacttaatcctgggttggacggagatgaagctgagaaacacagcttagactgtggtacagacaccagtcctgtgatgagcaagagaaccctttcttcaccaggatcaggaccatgccagcagtatgtaaatgaaagcaccaccagtacacagtcgactgataatcacccaaacgacctacccgctccgagatctcctgaacaatccgcgtgttttcagaatgacaacgattcgggttcagtaggcatttgtcaaagcagcaggcgaagaggtatagatgaactttgcggtaagctgcagagtttcaaagtttccagcgccgtaaaaggaagctacgtagctatgggtgcacctcgtccgaagcctggggacagcacgagccgatctgcagccgcgctgctcaggaacatagagaacacaactgctgttaaagctggccgtcctcctgtcaagccaaacgccgatggtaaggactcgtctaggcgagccctgcagcccataagcggaaggcctgacagtaggtagttcggcggttccttaataagtgtgtcgtgtttgtgttcaaccctttgttgaaagccaggtccgtgtatttgtgcagcttgttgtcatgaagctgctgtgtgcgtgtcatttaacataagcgtgcgtgaagttgtgttatggaagtggctaaatatgtgttcgttaggaggtcaattggcttgaactgaccctgctgttccgtgatttctgtctaaatatacttgtgtggctgtgtcactttgattggccttatcgatcacatgcaatgggatcacatctagcgtgctctagggtcctcgtttggtaatcgctg

SEQ ID NO: 6104 - DNA, 1154 bp, Zea Mays
caaacacccccttagtgttggaggttgttaggcataacacatgcagaaaatgatgatgaccaacaggccattgcagcaatgatgcgtgcgttggaagctaatccgacaaaccttgaagttcttcttgctcttggtgttagtcacacaaatgaattggagcagggagaagcattaaggtatctttataggtggcttcagaatcatccaaaatatggtggccttgtccctccgcagtcaactgattcaccttatggtcctgatgttgttagattgtttaatgacgctgctcagatgtcacctgaagatgcagatgttcatgtagttctgggagtcttatacaacctatcaagagagtatgataaagctataacttcatttaagacagcagtacagctcaaaccacaggactactcactctggaacaagcttggtgcaacccaagcaaacagcatccagagtgctgatgcaatattggcgtatcagcaggcactagacttgaaacccaactacgtgcgtgcatgggcgaacatgggaatcagctatgccaaccagggtctgtatgaggattccattcgatactatgtaagggcagttacaatgaacccaaaagctgacaacgcttggcagtacttgaggatttctcttggcaacgcttcaagagctgacatgattgccgcatgcgacgcccgcaacctcgacgctcttcagaaagagtttcctctctgagtcctccctagctttctccagcagcgatctccatggaaatggaattggaggccagtaacatttttgtatttgcctgttgattcttctgtttttattttgcttaagtgttgttgggtaaatgtataggaactaggaagtgagggggaacaacatcccgtcgatgtgtgaagtatcattgcaagaaggcaatagtggcaaagggggaattatacatctgtaagtacacaggaataaaggaatggttgagtaataaattgtttttagggcgaaccactgcttgttttataaagttaatataaaaaatgcaatgcgggtgcttcttggtggtggtgccagatcgagtttaactgagacgatccaaattaaattccatggtccacgccacgggtcctgctgggccgttaatatacgggacaacctccgctggt

SEQ ID NO: 6105 - DNA, 2720 bp, Zea Mays
accgccgcagtgccgcacggcgactccgactctgtctcctgcgcggctccagctcaccctctcctcacatcgaggcggaccggcccacgtcgccggcaaccgaaacgtcggccgtagcctcgcacctccggcatcggcgagcgcgcgcgcccgtccggcggcggagatggcgctgcggcacctggtcacgggccagaacaactgcgcgccggacggcgcctcgtcgtccaaccccctcaacgccctcgccaacgccttccttggccagtcctccaaggcgcagtcaataaaggaacttcctggttctgttagtgttccatctacatctggcttcagcgcgcctgctcccttgtcaaacatccctggttcagaaaatgagttcaaacaagaccagcgaccttttgtgcagggctctgactttattcatggtggtcctgctaatgattggattaagtcttttcggcctccgggggttcctgaacttggtggaatagaagcacactttccagattttgagcaaatttataacaatgcaggaacaacctttcagccgccattggatggtccaccacaaagagtgttgtctggtgtcttgcattcctttctcacaagtggcccagctggtgtgccatttcaacctcttccagtaccagctgctcttggtttatctgaaagtgacaaacagtgcatacgtgatcgtagctgcataatggcacggcatattttttctgaccaaccggaagaatatatacaggctcaggtcaatactttgctgcattcgcttgatatagacaaccgtatgagaggacctatgcatggacaatacccagaactacaggagtactggaaccagtcccaaagttctatgggtcctgccctgatgcataataccgctgataaatggattactgagtttggcaaacaaaataataatccggaaaattgggcaaagtctttcgaacaacaatatggccccaatgggtgggcctctgagtttgaacagtctcagatggccatgggccagatgggaggagtgaacatggccaacctggctgctatggagcaatcccgaatgcttgcacaaactttagcaagtaataatgatcccaagtttcagaattctaagttcttccagtttgtttcaaagatgagccggggtgaacttattatagaagataatcaggtaaaagaaggtttagcatcccaatccagtggctgggctgatgaatttcaaacacagtacaaagctaatgcaaactcatgggcggatcagtttgcacgtgaagagctttcacaaggggcggataagtgggttagtgagttctctagtcaacataatcaaggtgcgctaaatgagagctgggttgatgagttctcgaaattaaatgtcactgatgaatgggcagaggaattcagtggaggtggttttggcgaaagctctgctgatccgtgggtagatgagttccaagaacacttgtcatctttcaaacaaagttcaggcgcctctcgaggggtttatgtttattctgagaacaacccgtatgttggtcaccctaatccaatgcaagaaggacaggagctcttccgcaagggcctcttaagtgaagctgttcttgctttagaggctgaagttttgaagaatcctgataatgctgaaggttggaggttgttaggcataacacatgcagaaaatgatgatgaccaacaggccattgcagcaatgatgcgtgcgttggaagctaatccgacaaaccttgaagttcttcttgctcttggtgttagtcacacaaatgaattggagcagggagaagcattaaggtatctttataggtggcttcagaatcatccaaaatatggtggccttgtccctccgcagtcaactgattcaccttatggtcctgatgttgttagattgtttaatgacgctgctcagatgtcacctgaagatgcagatgttcatgtagttctgggagtcttatacaacctatcaagagagtatgataaagctataacttcatttaagacagcagtacagctcaaaccacaggactactcactctggaacaagcttggtgcaacccaagcaaacagcatccagagtgctgatgcaatattggcgtatcagcaggcactagacttgaaacccaactacgtgcgtgcatgggcgaacatgggaatcagctatgccaaccagggtctgtatgaggattccattcgatactatgtaagggcagttacaatgaacccaaaagctgacaacgcttggcagtacttgaggatttctcttggcaacgcttcaagagctgacatgattgccgcatgcgacgcccgcaacctcgacgctcttcagaaagagtttcctctctgagtcctccctagctttctccagcagcgatctccatggaaatggaattggaggaactaggaagtgagggggaacaacatcccgtcgatgtgtgaagtatcattgcaagaaggcaatagtggcaaagggggaattatacatctgtaagtacacaggaataaaggaatggttgagtaataaattgtttttagggcgaaccactgcttgttttataaagttaatataaaaaatgcaatgcgggtgcttcttggtggtggtgccagatcgagtttaactgagacgatccaaattaaattccatggtccacgccacgggtcctgctgggccgttaatatacgggacaacctccgctggt

SEQ ID NO: 6106 - DNA, 2724 bp, Zea Mays
atcggctcagggtcacacccgcaaagctaccgccgcagtgccgcacggcgactccgactctgtctcctgcgcggctccagctcaccctctcctcacatcgaggcggaccggcccacgtcgccggcaaccgaaacgtcggccgtagcctcgcacctccggcatcggcgagcgcgcgcgcccgtccggcggcggagatggcgctgcggcacctggtcacgggccagaacaactgcgcgccggacggcgcctcgtcgtccaaccccctcaacgccctcgccaacgccttccttggccagtcctccaaggcgcagtcaataaaggaacttcctggttctgttagtgttccatctacatctggcttcagcgcgcctgctcccttgtcaaacatccctggttcagaaaatgagttcaaacaagaccagcgaccttttgtgcagggctctgactttattcatggtggtcctgctaatgattggattaagtcttttcggcctccgggggttcctgaacttggtggaatagaagcacactttccagattttgagcaaatttataacaatgcaggaacaacctttcagccgccattggatggtccaccacaaagagtgttgtctggtgtcttgcattcctttctcacaagtggcccagctggtgtgccatttcaacctcttccagtaccagctgctcttggtttatctgaaagtgacaaacagtgcatacgtgatcgtagctgcataatggcacggcatattttttctgaccaaccggaagaatatatacaggctcaggtcaatactttgctgcattcgcttgatatagacaaccgtatgagaggacctatgcatggacaatacccagaactacaggagtactggaaccagtcccaaagttctatgggtcctgccctgatgcataataccgctgataaatggattactgagtttggcaaacaaaataataatccggaaaattgggcaaagtctttcgaacaacaatatggccccaatgggtgggcctctgagtttgaacagcatcagtctcagatggccatgggccagatgggaggagtgaacatggccaacctggctgctatggagcaatcccgaatgcttgcacaaactttagcaagtaataatgatcccaagtttcagatgagccggggtgaacttattatagaagataatcaggtaaaagaaggtttagcatcccaatccagtggctgggctgatgaatttcaaacacagtacaaagctaatgcaaactcatgggcggatcagtttgcacgtgaagagctttcacaaggggcggataagtgggttagtgagttctctagtcaacataatcaaggtgcgctaaatgagagctgggttgatgagttctcgaaattaaatgtcactgatgaatgggcagaggaattcagtggaggtggttttggcgaaagctctgctgatccgtgggtagatgagttccaagaacacttgtcatctttcaaacaaagttcaggcgcctctcgaggggtttatgtttattctgagaacaacccgtatgttggtcaccctaatccaatgcaagaaggacaggagctcttccgcaagggcctcttaagtgaagctgttcttgctttagaggctgaagttttgaagaatcctgataatgctgaaggttggaggttgttaggcataacacatgcagaaaatgatgatgaccaacaggccattgcagcaatgatgcgtgcgttggaagctaatccgacaaaccttgaagttcttcttgctcttggtgttagtcacacaaatgaattggagcagggagaagcattaaggtatctttataggtggcttcagaatcatccaaaatatggtggccttgtccctccgcagtcaactgattcaccttatggtcctgatgttgttagattgtttaatgacgctgctcagatgtcacctgaagatgcagatgttcatgtagttctgggagtcttatacaacctatcaagagagtatgataaagctataacttcatttaagacagcagtacagctcaaaccacaggactactcactctggaacaagcttggtgcaacccaagcaaacagcatccagagtgctgatgcaatattggcgtatcagcaggcactagacttgaaacccaactacgtgcgtgcatgggcgaacatgggaatcagctatgccaaccagggtctgtatgaggattccattcgatactatgtaagggcagttacaatgaacccaaaagctgacaacgcttggcagtacttgaggatttctcttggcaacgcttcaagagctgacatgattgccgcatgcgacgcccgcaacctcgacgctcttcagaaagagtttcctctctgagtcctccctagctttctccagcagcgatctccatggaaatggaattggaggaactaggaagtgagggggaacaacatcccgtcgatgtgtgaagtatcattgcaagaaggcaatagtggcaaagggggaattatacatctgtaagtacacaggaataaaggaatggttgagtaataaattgtttttagggcgaaccactgcttgttttataaagttaatataaaaaatgcaatgcgggtgcttcttggtggtggtgccagatcgagtttaactgagacgatccaaattaaattccatggtccacgccacgggtcctgctgggccgttaatatacgggacaacctccgctggt

SEQ ID NO: 6107 - DNA, 1356 bp, Zea Mays
cgacggcagctccacgcgctggcatagccgtctgttctcagcaaacccacccgtctgttctcgtcgtggcggccgccctgtccccattccccaatccctgtcgccgtgtccctaatccggctccgacaatcccacgcccagcagtccagctccagcaccaccagcgccgccctgccccacgcggccacacccaggacccagcggccagcactactgccaggctggcagcgcgcggaggtccagcgccagccgccagcaccaggcttccaggtctctagtgactcgatctcaagacctagatcggcttttcccccttgttcagcaaaggcgtttcgggatgtttatcatggatcgatcgatcatggcggatggggagacatcggcggaggaaaagaggaggtggacggggccaccagaggcgcaggagttggaggagacaaagaggaggcggacggggccaccagaggcgcaggagttggaggagcgcctggactctctcagggacaaaattgcggccgcaagtcttgtcgctggcagccgattcggcgaggagcagcgacggtccttgttgcaggagtggttgcgcctcgcatctgccaagttggatctggatctctcaggcataagcgagtttgacctatcagcagaggcgttgccttggttgatgccgccggaggaggcagacaagaggacgacgcacacgcggcaagaggcgcaggagttggaggagcgcatgacctgtctgcggttgctattcgaggacgcagcagatgacagaattctcgccagaagggagcttggagcagcagccgacgagttcctgctccgcttgacgacgcgtcaacaggccttgacgcgcgagtactcgcgcctcgccaacctgaagaggcctctggatctctccggcatgactgaggccgaccgggcggcggaggcagagaggctgagggaggagaagctgcagaaggcgcgtcaactccaggaccagggggacatgagcggcgcccgcgagtgtgaaggtctggcacgcatcatcgacttcgatgtcaagcagggcggcgaatacctcaacagtatctgctgtgtcggcaacatctacaccttcgaccacacagaggagtcgcccgttggtccgatgagatttaccaacagaccctggcaagacaagatgtgtgtgaattgtgcgtcgataaacatcctatctgtcaagattgcatgctcggatatcgacttccccatccaagtctatggcaccgttgttgccagggactgcatcgactacaagtgtgtttacctcttccgccgagataatgaccattgccaactcatcagctctaatgtacgtatctacaactt

SEQ ID NO: 6108 - DNA, 818 bp, Zea Mays
tgccacactaccatttacttgcattgctaattaaacaacaattcaagcctttgagcttctgaaagtttatgtatttgccaagacctacaaaagagaccaggaaaagaaaaatgctcagactactgccgctgcagcattgtcatccccagcaagtacatctgccaaggctccagatcctgctcctgcacctgcgcccgaatcggttctcccacctctatccgaagatgagcagtggaatctgtacaaatggattctggaagaggagcggaagatcaaaccacgcaacgccactgagaagaagaagatcgacgaggagaaagctcttctcaaggagataattcgggacaaatctctccctcgtttgtgatggttacatcggctgtccttctgatcttgattttttttcttctctctccacctgcagtccattgaggacaacatctgaaactatgtgccctgttagttagcaaaaccgttagcatttctttgcactatcacatctcttcatttgacaataagaaggtcgagttgttttgctctgatgagaacttattgtgttcggggatgcttgggagatgttttggaagaagcttattgccttgtgaaacgttctaattgacctgctgataatgggcccagctagctatgctctgctattcttatgtaagatgtgaattgagctattcaactgctagtgtttttacatattccttgccccttttcatatggatcatccagaccctgccaatgctcctcgccttgctctgttagggcatgttcggtttgatctggagtgagggagattagagggattaaat

SEQ ID NO: 6109 - DNA, 819 bp, Zea Mays
cacaatcacaaatgatttgcgcttgtggtagttttacccaatgattgtgcgattagatcacatcagtttatgtatttgccaagacctacaaaagagaccaggaaaagaaaaatgctcagactactgccgctgcagcattgtcatccccagcaagtacatctgccaaggctccagatcctgctcctgcacctgcgcccgaatcggttctcccacctctatccgaagatgagcagtggaatctgtacaaatggattctggaagaggagcggaagatcaaaccacgcaacgccactgagaagaagaagatcgacgaggagaaagctcttctcaaggagataattcgggacaaatctctccctcgtttgtgatggttacatcggctgtccttctgatcttgattttttttcttctctctccacctgcagtccattgaggacaacatctgaaactatgtgccctgttagttagcaaaaccgttagcatttctttgcactatcacatctcttcatttgacaataagaaggtcgagttgttttgctctgatgagaacttattgtgttcggggatgcttgggagatgttttggaagaagcttattgccttgtgaaacgttctaattgacctgctgataatgggcccagctagctatgctctgctattcttatgtaagatgtgaattgagctattcaactgctagtgtttttacatattccttgccccttttcatatggatcatccagaccctgccaatgctcctcgccttgctctgttagggcatgttcggtttgatctggagtgagggagattagagggattaaat

SEQ ID NO: 6110 - DNA, 1438 bp, Zea Mays
ctccctcagtagtcaaccccagcgtcccgcgctcgcccggaagcacatcaacaccagacagcactacagtctacagcagcagggcaccaccaccacagcaatgcagcagaacgccgcccgcctgctggccgccgccgtggcctgcctggcgctggcgctggcgccatcctcggacgcgcaggggacggcggtgccgtcgtgcgcggcgaagctggtgccgtgcacggggtacctcaactccacgtccacggcggcgcccgcggcggcctgctgcgggccgctcagggaggcggccgccaacgagacggcgtgcctctgcgccatgctgctcaacagggccgcgctgcgggcgttcggcgtggcgcccgagcagggcctggtcctcgcccggcggtgcaacgtcaccaccgacgcctccgcctgtgccgccgccggaggtataaagctagctagatcgcgtgtcgtcttccttcataccgctgccgccgctgctgctgctaagtactcattcgatcacaactggctaccacaatgagatccaaacctctccaagatctggatctcattaattgggctgctactagcagaatcatgacctgtcatcgtgtgccacatctccgcagcagctcatcttgtgatcacgtctcagatgataagctcggatcgctagttaactacgtacagttgtaggagcacacactgtgatgatgctgaacctgaaatcctgaatgatctcgatctcatttcgcttgcaggctcagccactgacggcagtactgctgcatcttcagcttccaccggcagcgcttcctccacctcctcctcctcttcttcagtggccaaaccaacagccaacggaggcggcgtggcgcgtcgcctgagcatgactggcgcgtcctcattgctaggcttcagtttcatctggtggtgggcggtcatggcgtaggagtatctgccgtggcaccggcgattttcctggctggatccagaattccagacttatatgtactactgttgtgttgagtagcaggtttcattgcttctttttatatatagtatgccctgttgtaccactaccattgctgccgtgagcagaacaagagaaaaaaatgtcaagaacgatgcaaacaaccagacggaaagaacgtactctcattttaaataattaatagattcattatgtttttatatgtgtctagctagattcaacatcatctacacataaaaccaagagctaaaataaatattattttgagacggagggagtacatgtttcgacatcctgagcaactcaccctgatgtcaaaaacctgataagatcgtggcaatgcttctccaacatcagatgagcaagtctattcgcttgactttaatctgtaccggcttctactacttttactttatgaatcacagctagctgtaatagattaaacagtcg

SEQ ID NO: 6111 - DNA, 2883 bp, Zea Mays
caacgcaaacccacaagaaagtttcaaaaaaacattcgcactccctccctctaccgccactagccaccctcccctaccccaatcccctctccccagatcgagcgccgcgtggctagggtttgcgcgaccgccggcagcgatgcccgcgtcctccgtctcggggggtagcggccccggaggcgtctccccggatgccatcatcgagtggctgcaggacgagatggggtacccctcggcccctcctgcaccggatcagctccgcaagatctgccggggcaacatgatccccgtctggtccttcctgctccgccgcgtccgctccgagcgaaccgtcgccaccgcgcgccgcaatatcctcgtccacggcgtcgcggcccggcgggcgcgggagggcggagcgatgggggcgggcgcgggtgacgctgcggccagggaggccgaggcgagggagcgggacctcgccgctgaggaggccgagcggttgcgtgggatcgtgaggaggcagcgcaaggagcttcgcgcgcgcatcgcggaggtcgccagggaggaggcggagcgcaagcgcgtcctcggtgagcgctccaatgccaggcacaagcaagttatgctccaagcatatgaacagcaatgcgatgaagcgcacaaaatatttgctgaataccagcgccggctacatcagttcgttaaccaagcaagggacgtgcgaagatcaagtataggcgtggctggagctacaggtgctcttgtggatatgcaattgcagagtgatagagatgatctttacccatcgactatcaaaagcaatagattgccagaggatcttttagaaactgcaggtgaaaggagcattcggaaggcatgtgaaactcttgctgcggatatgattgaaacaattcgaagttcattcccggcatttgaagggtgtggcattaattcaagttgccaattagatgcagaaaagctgggtattgacttggttggtgaaataccaacatatgttaaacttgttgcattggattccctaaagaatccattcatgcttctgcagtcaatcattacctacacatcacgcatgaaaacacttatacatagagaaactgacaagattgacatacgcgctgatgcagaactactgaggtataaatatgaaaatgagcaggttattgatgctgcttcaactgatgcaagctcacccttaccatatcaggtgtatggaaatgggaagactggatcacaattgtcaactcgaggaacatatgatcagctactagaaagacagaaagagcatgtacaacagtttttggcaacagaagatgctttgaacaaagctgcagaagctaaagcactaagtcagaagctattgcaacgcttgtatggcactgctgacatggcaggaaataagaagctgcccactgggaacaccacacagaatgtgaccaacagtaggcatttagagttggacgtttgggccaaggaaagagaagttgcaggactaaaggcgagcttgagtacacttacatctgaggtacaacgtttgtataagttatgcgctgagtggaaggaagcagaagattcactgaagaagaagtggaagaaaatcgaagaatttgacgcccgtcgatcagagctggagttcatttacagtgctcttcagcgggccaatatggattcatcagcattttgggagcaacagccattatcagctagaggatatgcatcaactacaattatccctgcgtgccatgctgtggtagacatgtctacgaactcaagggacctcatagagcgagagttagctgcatttagccagagcttggataatagcttgtgcaggttgccagcaacccctcagtttcaccaggtacagaaggcacagattctggcttggcttcagtattaaattcactggagttctgcctaaaaccatgtgggtctgaagctagcatattagaggatttatcaaaatctatcaacttggtgcacacacggagaaatcttgttgagaatgaccgtgttttgctgaaccgtgcacatcgtgctcaacaagaatatgaaagagtggccaactattgtcttaaattagctggcgaacaagaaaaggtggtgagtgaaagatggcttccggaactgagaaatgcagttcaagaagctcgaaggtgttttgatgactgccagcgtgttaggggtctggttgatgagtggtacgagcagccagccgccacaattgtggattgggtaacgatagatggacagagcgttggtgcctggatcaacctcgtgaagcaactccacatggagatctccagacggacgttggccatgtcatcggtaggagacgactgaagcaaccagccgtgacctgcggctttggaagttcggaggctcctttatgggttcggtttggcgccaagatatcttctatctactcgatagccttttcccattgtagtttatacgtctctctctctggtttggtctgtaattagttcctaacatgttccttttgtatgttgtcaattgtcatgtgctggttgtcacttggctcaaacgatcagtgttggtgttgtgcctttgctgatttgggttgtttgtatgttgtcaatggtcatgtgcgtgttgtcatttggctcaaacgatcagggttggtgttgtggctttgatgatttgcgcacatgtgtgttcaatcagtccgggaattgtttcagttataacgttcatgtaacttagggtatgtttggcaccaaaatatgtttggcccattttgttatggcttgcttgttaaccttgatggttatcatcttgtcatttttttctttgaggagatagggtgtggtagccttcttgttcaactaggtgtgtgactgtacgttgtcacatgagtta

SEQ ID NO: 6112 - DNA, 2047 bp, Zea Mays
tgttcccatatgaagatcttgtcaagttttttcagtatgaagcccggggtatttcccctagaggtcttttcaattgtggaaacagctgctatgctaatgctgttcttcaatgtctcatgtgcacaaagccactgatgatctaccttcttctgagattgcattctaaagattgttcttcaaaaaaatggtgccttatgtgtgaacttgagcaatatgcttcaactttacgtgaaagtggtgggcccttatctccaagtagaattctttctaatctgaggaatattggatgtcgcttgggtggtggaactcaggaagatgctcatgagtttttaagcttgcttggatgggctgggtggtgagaagcatgttgagccaagtttgcaggaaacaacactgatacaacagatgtttggtggccgtcttaaatccaaggttaagtgcctcagatgttatcacgagtctgaacgatatgagaatataatggatcttactttggagattcacggctgggtagagtccttgcaggatgctttgacacagttcactgcccctgaagatttagatggtgataatatgtataaatgtggaagttgtgctgcctatgttaaagccaggaagcaactgagcgtgcatgaggtgccaaacatattaacagttgttcttaaaagatttcagtcaggaaaatatggcaagatcaacaaatgtgttactttccctgatatgttggacatggttccttttgtgactgggtctggtgacaatccccctctttatttcttgtatgccgtggttgtacatgtggatacagaaaatgcatcattctctgggcactatatatcatatgtcaaagatatgcagggtacatggttgagaattgatgattcagaggtccaggttgtatcagtgaatcaagttatgtcagaaggtgcatatatgcttttctacatgaggtctttcccccgaccaccaagaatatacatcgagaaggggccgactgttccatccgcgaagcgccacacatcaaagtattccaagggctctaaacacgagcgcgagcagacagagttactcctctcggcgaacgatccagcatacggtgtttatgactttagacctgatggcgagggctacacgcaagatcagcaagcagagttgagatccagggatttccatcgcgccgacgatgccttcgcagactcggtcagcgcggacttctcggaggccacgtcaagcgaatggtcgctgtttaccagctccgacgagtcctcattcaccaccgagagcacaagggactcgttcagcgttgtggactacggcgacaacgctggcctggacccaatctcctcgatatttgggccaagctatgctccggagcatcatcccggtccacctggcagtttcgccgcgtgcacgaggctctcgccttccaacccacagacaaggtacttctcggagagcacagggttcgtctcggactactcttccagcggcattgtacatagaggaagggatccaggtgaggcgtattaaattttggctgcatgtcattcctaggctagctcgattcaatgtagcgagagagagaggaacaaatttagattgtgtctatatgcaggtgaaattttagagcgcggtggagctgctccggttgaagccatcccccgaggcccgaaccagtaaattacgccgaatccggcagtcgtatggccctgcacaccagtgctttgtgaaaagcttgcagattcatcaattgacgtgcacttgccttttatatggacgctgacgtatggaggtgcacactctccacctccgtatatctcgccacctactctgtttatattagaaggttgattgctgacacacaacacctgctcgtacttttttgtcgaaatcatgacggacaacaacgctaaacatatagtacaatcttcttgtcttgctgatctgctatgcccctttgtgaaatctgccggtgacatcagcgatggcgtcttgctgatctcgtggtatacctgatgtttcctcggtctcagcttttatcacgcag

SEQ ID NO: 6113 - DNA, 2411 bp, Zea Mays
tgaagatcttgtcaagttttttcagtatgaagcccggggtatttcccctagaggtcttttcaattgtggaaacagctgctatgctaatgctgttcttcaatgtctcatgtgcacaaagccactgatgatctaccttcttctgagattgcattctaaagattgtaatactataatctcaaaaagctaccccacccccctcatcgaaatattgatgtgtaccttgtgtttctttttttgacttcagctactatttttttaggttcttcaaaaaaatggtgccttatgtgtgaacttgagcaatatgcttcaactttacgtgaaagtggtgggcccttatctccaagtagaattctttctaatctgaggaatattggatgtcgcttgggtggtggaactcaggaagatgctcatgagtttttaaggcatcttgtgatgtctatgcaagcagcttgcttggatgggctgggtggtgagaagcatgttgagccaagtttgcaggaaacaacactgatacaacagatgtttggtggccgtcttaaatccaaggttaagtgcctcagatgttatcacgagtctgaacgatatgagaatataatggatcttactttggagattcacggctgggtagagtccttgcaggatgctttgacacagttcactgcccctgaagatttagatggtgataatatgtataaatgtggaagttgtgctgcctatgttaaagccaggaagcaactgagcgtgcatgaggtgccaaacatattaacagttgttcttaaaagatttcagtcaggaaaatatggcaagatcaacaaatgtgttactttccctgatatgttggacatggttccttttgtgactgggtctggtgacaatccccctctttatttcttgtatgccgtggttgtacatgtggatacagaaaatgcatcattctctgggcactatatatcatatgtcaaagatatgcagggtacatggttgagaattgatgattcagaggtacgttttacaacaaggcctactccagtccaggttgtatcagtgaatcaagttatgtcagaaggtgcatatatgcttttctacatgaggtctttcccccgaccaccaagaatatacatcgagaaggggccgactgttccatccgcgaagcgccacacatcaaagtattccaagggctctaaacacgagcgcgagcagacagagttactcctctcggcgaacgatccagcatacggtgtttatgactttagacctgatggcgagggctacacgcaagatcagcaagcagagttgagatccagggatttccatcgcgccgacgatgccttcgcagactcggtcagcgcggacttctcggaggccacgtcaagcgaatggtcgctgtttaccagctccgacgagtcctcattcaccaccgagagcacaagggactcgttcagcgttgtggactacggcgacaacgctggcctggacccaatctcctcgatatttgggccaagctatgctccggagcatcatcccggtccacctggcagtttcgccgcgtgcacgaggctctcgccttccaacccacagacaaggtacttctcggagagcacagggttcgtctcggactactcttccagcggcattgtacatagaggaagggatccaggtagggcatacacctgttcagcggaaccgctcgcttcggctgcggcggcgcaccagcaccagcggtacgcccttagcggccgagacggtttggtccagacatctgggttctgccaaatgtaaccggctttacgatttcgtagctatagctgtagctggtgctcgggcagctgcggtttagcactgccactgatgctgctgcctctatgttctttttatttcaggtgaggcgtattaaattttggctgcatgtcattcctaggctagctcgattcaatgtagcgagagagagaggaacaaatttagattgtgtctatatgcaggtgaaattttagagcgcggtggagctgctccggttgaagccatcccccgaggcccgaaccagtaaattacgccgaatccggcagtcgtatggccctgcacaccagtgctttgtgaaaagcttgcagattcatcaattgacgtgcacttgccttttatatggacgctgacgtatggaggtgcacactctccacctccgtatatctcgccacctactctgtttatattagaaggttgattgctgacacacaacacctgctcgtacttttttgtcgaaatcatgacggacaacaacgctaaacatatagtacaatcttcttgtcttgctgatctgctatgcccctttgtgaaatctgccggtgacatcagcgatggcgtcttgctgatctcgtggtatacctgatgtttcctcggtctcagcttttatcacgcag

SEQ ID NO: 6114 - DNA, 3789 bp, Zea Mays
gaaaattcctaaaatgaagactggagacccagcaggtacgcggagcgtagcaaattcttcacgacaccccgatcgagactctggagcgcagagacggcagagagcacagtagccaagcgactggagactcatcactggagactggagagcatccggagccagtgctcgcaccaccgctcccgattcccaatcgccttcccgccgccgaaggggcgccgcactgtcccccggcctcgatctctctcgggccagccgtcggccgtggccctgcgcctcctgcgttatctggctggagatccggccggagtgccattcctactctcggtcaataagtattctggaatgtttttccgagctgaaatagatagcttctggagctggatctcagtattctgttagggacatgctccaaccgagggaagctgatttgcctgcactctttcttgtcttcattgtacttcctgtggtagcttattttcttctcgggagatggcatgatgctgcaagtaagaaggcaagggtaagtgtgcttgctcagcgagctgcagaagaagcctatagagaggaaacaatggcgtgcccagacattattctgccagggtcttccttgagaactatgccctatttcagacctatgcctgcattaagacaggaataccatgaatgtgcaacttgccatgcccctgcaaagactcgttgctccagatgcaaggctgttagatattgctctgggaagtgtcaaatagtacactggaggcaaggacataaggaaacatgccaaaagtggcttggtagtggttctagcagctttggtggatctagcactgaggctactgaacagatgccgttcttgactaacttaaattcacctcttccgggtggtgacattcacttgcgtgacttgaacttcgatactttatcagaaccatcctttcccacaactgatggttataatctagatactgatccatttttggcagacagaagcaacatgaataaatcaaatcaaggtattcatatgagcgaaaatggtgctgttggtgtatcttttgaaaagaataattataatgctgatgatgaaatccactcaccggaaaatttatctagaaacaaggtgtcaaacaactattttggttcagatgcaataagtggtaatggggatgcaatttatcctgccaaaagtaatgcacagcagcctagcagctgtgctcctgacatgagaaaacagccaaaagcaagcatcacagtttatcagcctgacataggtgtctatttaacttctgacatggtcagttcttgtgaggggtcatatgcttctgccagtgagccactgcaaaggagcttgtcatctggaagaactattgggaaagcaaacgcggtgaataagaggcctccatacccatcaagtaaggtggtttcagcacaaaagccacaggatagggtgtctacatcatatcaaaatgatggccatgagaagaatccttgcaacaaaaatgaccaaagatctacccccaaatgtgaatcaagtcaatcaacaagcagcaatctacaaaagtttggagcatccaaggttgaagttttaaagaagccttcaaaatttctcaaaaccagccttgtgggattgatcaatgataataagaggaacaaggtattgttcccatatgaagatcttgtcaagttttttcagtatgaagcccggggtatttcccctagaggtcttttcaattgtggaaacagctgctatgctaatgctgttcttcaatgtctcatgtgcacaaagccactgatgatctaccttcttctgagattgcattctaaagattgttcttcaaaaaaatggtgccttatgtgtgaacttgagcaatatgcttcaactttacgtgaaagtggtgggcccttatctccaagtagaattctttctaatctgaggaatattggatgtcgcttgggtggtggaactcaggaagatgctcatgagtttttaaggcatcttgtgatgtctatgcaagcagcttgcttggatgggctgggtggtgagaagcatgttgagccaagtttgcaggaaacaacactgatacaacagatgtttggtggccgtcttaaatccaaggttaagtgcctcagatgttatcacgagtctgaacgatatgagaatataatggatcttactttggagattcacggctgggtagagtccttgcaggatgctttgacacagttcactgcccctgaagatttagatggtgataatatgtataaatgtggaagttgtgctgcctatgttaaagccaggaagcaactgagcgtgcatgaggtgccaaacatattaacagttgttcttaaaagatttcagtcaggaaaatatggcaagatcaacaaatgtgttactttccctgatatgttggacatggttccttttgtgactgggtctggtgacaatccccctctttatttcttgtatgccgtggttgtacatgtggatacagaaaatgcatcattctctgggcactatatatcatatgtcaaagatatgcagggtacatggttgagaattgatgattcagaggtccaggttgtatcagtgaatcaagttatgtcagaaggtgcatatatgcttttctacatgaggtctttcccccgaccaccaagaatatacatcgagaaggggccgactgttccatccgcgaagcgccacacatcaaagtattccaagggctctaaacacgagcgcgagcagacagagttactcctctcggcgaacgatccagcatacggtgtttatgactttagacctgatggcgagggctacacgcaagatcagcaagcagagttgagatccagggatttccatcgcgccgacgatgccttcgcagactcggtcagcgcggacttctcggaggccacgtcaagcgaatggtcgctgtttaccagctccgacgagtcctcattcaccaccgagagcacaagggactcgttcagcgttgtggactacggcgacaacgctggcctggacccaatctcctcgatatttgggccaagctatgctccggagcatcatcccggtccacctggcagtttcgccgcgtgcacgaggctctcgccttccaacccacagacaaggtacttctcggagagcacagggttcgtctcggactactcttccagcggcattgtacatagaggaagggatccaggtagggcatacacctgttcagcggaaccgctcgcttcggctgcggcggcgcaccagcaccagcggtgaggcgtattaaattttggctgcatgtcattcctaggctagctcgattcaatgtagcgagagagagaggaacaaatttagattgtgtctatatgcaggtgaaattttagagcgcggtggagctgctccggttgaagccatcccccgaggcccgaaccagtaaattacgccgaatccggcagtcgtatggccctgcacaccagtgctttgtgaaaagcttgcagattcatcaattgacgtgcacttgccttttatatggacgctgacgtatggaggtgcacactctccacctccgtatatctcgccacctactctgtttatattagaaggttgattgctgacacacaacacctgctcgtacttttttgtcgaaatcatgacggacaacaacgctaaacatatagtacaatcttcttgtcttgctgatctgctatgcccctttgtgaaatctgccggtgacatcagcgatggcgtcttgctgatctcgtggtatacctgatgtttcctcggtctcagcttttatcacgcag

SEQ ID NO: 6115 - DNA, 2250 bp, Zea Mays
aggcagcactaaaacatttctctgcctaactacttccctgtacgtggacgaggaccaaggagacagagagaaagcctggccgcgccgcccaccgtcgcctcgtcagtcgcctcctccatcctccctccccatcgacttcccaaatcccagccagcttggagaacagtgatgtacatgtactgtgagctatttgatttgactgaaggaaaaaaaatgttgctgcagtctcctcgatcttcagagctgtgatgtgatttgtccagatacctacaaaaacggttgttatctgtctttgtagcagaagaaacagtcctaaaaaagaatggagagctcctcagataggagcaacgtttctcaggggaaccacctgggttatgcgagaagcacatccatggattccactggtcctcagttagctggtaggtctagctcaatgttgagtaggagaagtagcagacagggctcaaggggatccatcagcctctcaagggagatgggggactccatactgagctcaatgaggcattctcttcagtcggcggatcaattgctaggagacatcgatagctcagttctggctcaactcatcgaaagtggtcgagttctatcacccgaaggcgatgttgatgaggatacagtaagaatctctgaacatcataaggttggccctgttccagatgatgcaataaagcaaaccagtgacaattttgcatcagcacctatatcttcagcggagacaaaagacactatttctaacgtcctagcagattcatctactaaggttgaaccatataagctttctctgaggctagactatgctgcttacatgatccatttagctgtctttggctttttcggggtattcacaaggtatgggctccaaaagctgtttggcccagactgtttggcactcacttcagatcaaagcccactttaccctgatcttccatctaatatgcttgggtctttcttgatgggctggtttggtatcattttcaaggctgatatacgatacatatctgaccatcttattgtcggaatcacaactggatacatgggaagccttacaaccttcagtgggtggaaccagaaaatggttggtttgtcttccaaaggccattgggtatatgctatagcgggcgtagtactagggatgttcattgtcaacgagtccattacggttggtgctgagacgggcgagcgcctacggagtttgatcctgaaatacatcagggagaagagtttgataggtcacaagtatgattgggagcactggagggtgaataccagggctaagcagtcagtgcttttgtcagtgatgataattttgatgtctttcttttggattttgagcattgtgctgactgtagtaaagatgcatagtcttgctgatggtgctgtcctatggatgggctgctcggtagcacctccaggtgtttggttacgctggtacctggcaaggctcaatggccagggaattggcaaacagagatccttgaaatggctgcccactgggactctggtagccaatgttcttgctgcaggcataatggcagttcttgctgtaacatccaaagcggtagatacaaagcgatcaacaactattcttagtggaatacagctcggcttccttggttgcctaagcacagtgtctacttttgctgctgaagtgtatacaatgagaagaagcgggcagattgccagggcctttgtttatgccgcatccaccttcctgctttcttttctgctaggaactctagtgtattctgtgccagtttgggaaaagcattataaatgacctattgcaacttccagattcaacattttaccagatggcttaaatgtgcaatgggaaagagagcatcaacttcctgaacaaagtacaagatacagagccaagacctcaaaggttcacagatgcaaaagagagcatcaacacaaacgtttgcagaatggacccacagaaccatctatatacctggctgggaaaaacagagtaaactttgcttagtagaatatgtagtggcgtggaataatttttgtcttggagaatggagtacatgtatgtatctgtgaactagatgtatcattaatgcatgagatatgcatagatgaatttaattagtgtgggattagctccactttattctcatgctgtctcatgtaaatgcaggacatctagaaatgtttttcttgttactaagacatattggcttaattagtttttgaataaaacatttccttttgaca

SEQ ID NO: 6116 - DNA, 1815 bp, Zea Mays
gcagcctcacgtgatcccgttcctaagttctaactacccgcggcgctgtgcccgtggaacttggaacgagtatttactgtattttgagtcacaactcacaagggtagttcaaagtccggaactccagactcgcgttcgcacgccgcctttcgcgctgcgttagcgccttagcctgctagggctcgtcgattcatcgccggctcgacttctgatctcgcgggcagagcagcgcgccggcgcgatggcttcggatccggatgtgtccggcggcgagcaggcggagccgcccgacgatgtggacgaccccgacgtcgacgaggtcgaccccactggccgctacttcaggtacaaggaggtcgtgggatcaggggccttcaagacagtctacaaaggtttcgacgtggtcgaaggcatcgaggtggcatgggctaaagtggagataaccggccggaccatgggatcccccaaggagctccagcggctcaagacggagatccagctgctgcggtcgctccatcacaagcacattctcaagctctacgcctcatgggtcgacaacaagaagagggcggtcaatataatcactgagcttttcacgtccggcaacttgagagagtaccgtacgaagcacaagaaagttgacatgaaggcaatgaggcgatgggccaaacaaatactgacagggctagcctatctgcatagtcagaagccaccaatcatacacagggacttgaagtgtgacaacattttcatcaatgggaaccatgggaaagttaagattggagacttcggtttggcaatggtgatgcagcagaggaaaacacagagtatacaaggcaccttagagttcatggcaccagagctgtttggtgaaaactacaacgagttggtggatatatactctttcggcatgtgcatgcttgagatggtgactggtgagtgcccttacagtgaatgtcagggctttgttcagatatacaagaagatatctgaagtaagtgacctgtcacctagatagtacttgtctacttcaagagttcgctaaaaaataaccagattgttcctttttgttttatatgaatggtgcaataatggtataactgcagggtgtaaaaccagttgctctctccaaggtcaaagatgcagaagtaaggagtttcatagagagctgcctagcttcagctgctgatagattgccagcaagtaaatgtaagaacattgagttcgcgtttgacctggagaatgatacaagtcttttggtggctacagagatggtgcaagagcttgaactaccttcttggagcatgcctattgtggcaaagctggtagatgcgttcctgctcaaaactgttcgtggttggaggccgtgtgttcaggtcggtcagatgattcaggcagtgcaaaacactgcatccgtgaatggaaaaagcatctgaatcaatgtttgtagctgatgcattattctgcaccttatgtaaatatatcatgcccgaatgcaacgccaggccttgctgactaagcacatcttcttttatctgatgctggttaaagtttgggcatgattcctaattagaatagtggtatgtttcgtattttttttggttcgtattgttagaaagaggttcagagataagagaaattaagaatgctgtaacagccatccttgctttttttcagttttttttaaaagccttaccatgtgtctatttggtactgctcaacttcatgatttgcagcttagctttacaagaagtctgttgttcacttgttaccaaatgctatggataaaaaacaagacaattgttaaggataaag

SEQ ID NO: 6117 - DNA, 3243 bp, Zea Mays
tagggaaccaattttcccaacttcagaaacaccgagccttatccaaagcccttcccttcactgtcccgctaaaccccggccacgaccacgatggccaccccctccacctccgctccgtcgccgtcgccgtcctccgccttcccactcaccaccaccacacgcttcccccgctcatgctcctgccccgtgcgagcctccgcgctcgccgagcggcggcgcacgcggcggcgccgggcgcccgatggtgggggcgccggtggggaccgctcggcggccgccggggcggtggagaagggcctgcgcctggtcttcctcgagcagctcgcggagcgcgcgagggctgccgacgccacgggcgtggccgacaccatctacgacatggtcgccgcggggctttcgcccgggccgcgctccttccacggcctcgtcgccgcgcatgtcctcgctggcaacgctgaaggcgccatgcaatctcttagaagggaactcagttctggtgtgcgccctctacatgaaacttttgtggctctggtccgtgtttttgccaagaagggtctttctaccaggggcatggagatccttgctgccatggagagatataagtatgatattcgcaaggcctggctaattcttgtagaggaactagtgaagaatcattatctcgaggatgccaatacggtatttctgaaaggggcaaaaggcggtctacgaggaactgatgatatttatgatcttctgattgaagaagattgcaaagctggagatcactccaatgctttgacagttgcttaccaaatggaggcttatggaagaatggcaaccacattccattttaattgccttctcagcgtgcaggctacttgtggaattcctgaagttgcctttgcaacatttgaaaacatggaatatggaggtgaagattacatgaaacctgatacagagtcttataactgggttatacaagcatttactagagctacgtcctatgacagggcagcggatgtcgcagaattactcgggatgatggtggaagatcacaaacgcattcaacctaatgcaagaacttatgcgttgttagtggaatgctttacaaagtactgtatggttaatgaatcaatcaggcattttcgtgctttacaaagaatccctggaggaacagaagtcctttacaatgaaggaaattgtggtgacccactttctctctatctacgatcattgtgcctcgatggtaacttaatttttataaccaggaaggcctgttgagttgcttgaggctttagaagcaatggctaatgataaccaaagtattgcacctcgagcaatgatcttaaacagaaaatatcgcacattggtgagctcctggatagaaccattacaagaagaagctgatgttggttttgaaattgattatgtggccagatatattgaagaaggaggtcttacaggagagcgcaaacgttgggtgcctcgcagaggaaaaactcctttggatccagatgaatttggatttgcctattcaaatccgatagaaacatcctttaaacagcgatgctttgaggaattgaagttatatcatcgaaaactcctaattacgttgagaaatgaaggccctggtattttgggtgatgtctctgaagaagatgtacgcagagttattgaaaggctaaaaaagttagttgtagggccaaagaaaaatgttgttaagcccaaggcggcaagcaaaatggtagtatctgaactgaaaactgagcttgaagctcaaggattacctactgatggaactagacaagtgctttaccagagagttcaaaaggctaggagaatcaatcgctcacgtggtgtaccactttgggttcctcctgtagaagacgaggaagaggttgatgaagatttagatgagctgatctcacgaatcaagccagaagatgggaacacggagttctggaaacgccgttttctgggagaaactcgaaactatctttgtgaagaagatagtaaagaagacggtcaagatttagatgatgaattggaagatgatgatgacaacgatgatgatgaggatgacgatgaatctgtaaaagaagcagaagaagatgagatagatgatgaagaggttgttgagcaaacagaaaatcaagttggtgatgacactaaagataaaccagcaaaagaacccaaccatcatcttcaaatgataggggtacagttattgaaggatatagagaggacacctgtttcttcaaagaaattaaagcggatgccagagattgatgatgatgaagactggtttcctgaagatccaattgaagcctttaaggttatgcgggaggagaggatgttcgatgtatcagacatgtatactactgcagatgcctggggatggacgtgggaaagagaaataaagaacaagatgccacgtaagtggtcacaagaatgggaggttgagttggctatcaagataatgcacaaggtaatagaactgggtggtactccgacaattggtgattgtgccattatattgcgagctgctatgagagcaccactcccatctgcttttataccaatattgcaaacaacacacagtctaggttataagtttggaagcccactgtatgacgaagtagtcctattgtgccttgatctggaagaaattgacgcagccattgcagtagttgcggaaatggagacttgtggggttaaggtgccagatgaaaccttggacaaggtgcttgcgtccaaacggtctggaaattctgccctcccaccacctacggaggagtaatcaatttggacatgcgagacttctgctgctcgtgcttgacgtgacaccagaaaatcacaagcaatgcatatgtttggagcttctcctggaaaagaacatgctgtatgatagtttgtcggtgctgtgtccaacgatagaggagatatgaagttgttagtatgatacctggcatggtatatttgattagtccgttgaatttttgtatggatggtgaagcatgagaaaaggtcgagtttttttttataactggtggaatggtgtgggtgcgttgtcttagggtgctttgggtttggcttctgggagttgcttttgcttcaaaaagtcaaaagctgattaaagtgatagaaacaagaactttcggattttaactttttgctttttaaaatggtcaaaacagttgtttagagacatagataacaagtagaatttcaagtagaatttctacttgtttgaatcaaata

SEQ ID NO: 6118 - DNA, 2515 bp, Zea Mays
gtagatctaagaaaacagcacagcagcagggcatatagttccaaacacgttggttttattcgtcacacgaaaagcgccgcaaaaggtaaagaaagaaaaaaacaaaagaaaaagaaaaggaatggcgaaataacaaaaccacctctgcacctccataactccattgcctttcgtccttcgtcttctcgttcctcgataagcacgtaataaataaacaaatttcatttttttctcggtcgtcctcctctgcttcgactctcttctccaactccgcctcggcgtcgtcgtgcgcttcgatctttcccatttccaaccggaggggaggcgtcggcgcaataataggaggcgcctttgtttcgcccatcgccggcatggggaactagcttcgtggctgggccccacgccatgcaaaccagtgagaccaccgggaccgcatcgccgccggctgttgagccggaggccgaggacaaggtggaagagggggcgcgggcgaatgaggaggcggcggcgaaggtgggcggcgacgacgaggatgactgggaatcggagcatgaggggaggagaggcaggcggcagcggtgccggcgaggcggtgcggcgggggacagcgccgtggccatggtgaagcgggagctgctcacgcgctgcttgacgtgcccgctctgcgaccacctgctccggcaggccaccaccatctccgagtgcctccatacattttgtagaaagtgtatctataaaaagctcaatgatgaggatctggaccactgtccagtatgtaaaattgatctgggctgcactccagtcgagaagcttagagctgatcataatatacaagatgtgaggtcaaaattttttccattcaaaagaaagaaggttaatgctgaagaagccgaatctcctattatgctgcctgttaaagttaaagagaggtctatctcatcgttggtggtcaatacacctagagtaaccccagcagctttgacagggaggcgaacaagagcggttaccaggaaggctgccgcattgcgtggccttggtcctatcattgtggatcctttaaaaaaggacaacgataacccaaataagcaaactgataattcaagcttgctagatagcttgaacaaaatacctcaaacaagaagacagttattgtcgaatggggacacaacaagtcatctctctgttaaagataaagcaggtgataataaggacctggataagtccgagttctggaaacctttgaattgtcttgtagaagctgcaagcaaaacaaagcccctgacaagtgcaccaaggccagctttgaagggagataagcccagaaaatctccgagtagtgatagcgaacattctagcagaacaaagactagggagcctcttcagaagtccaaagctgaagttgacaaaagcgatcccgggccaatagtgatgcttagaaagagagggcggcctggccggaagaggaaaaatcccctacctgaaacaaatgcagattccactgctacagctatccaggccaggaaggcattgagcccaatatggttttcattgattgcctcgtttgaccagaaaggtgtccctcctttgcctcagatacctgcacactatttgagaataaaggatgggagcatacccgcgtcatctattcaaaagtacattgtgcagaagctcagtcttctaagcgaatccgaggaaattctcaatgagtcggctgagaagtccatacttctcatgttgacacataagaagctccaagctgtcgagtccacttggcaagacttggagatagagaaggccgccagctctgaactggcggacatagtttagaagctgagagaccagctcgaagcaaagtcactcgagcttgaaggtcgaaataagctgctgcgggcagaccgtgaaccctgggcaacctgtgcgcaacttggtggagcggtggctgagggttggcccggcgcgcccgctgcacacggtgatcggctcctccgggggagattatgtgatggtgataagctatgggcggcccaagtccgcgtcctgttaaaaccatatcaccatcgacggcctggcgaggtcgattcctagttcgaacaagggttggtgccgccgccgctgccgccgccggggaagaggccgtcgacagataaactcaagcagcggtagcgggctgctctgccgcagcagctcgtcctctcaccggcgtgttctttaaggatctgttcgttcgttcgttgttgccatacatgcacatgtgatggaagtcgctgtaatttggtagtacttggtaggctgtgagtgagaactgacgtttaggttggaggcgagatcgttaacctgagcttaagtgttgggggcgatgagtccgccgtgtatgggagaggcgctgctggttcagttctttttcctccgttttttttttcacttcttgaagggaaaaacacacacaaatacataatgtactacctccgtttatttgtcctgaactaatatccagccgtgactgattcggatcgtt

SEQ ID NO: 6119 - DNA, 2095 bp, Zea Mays
gaaatgaaactcgcgacagacaggtcgtcctctgctccgtggaccctattcctgcgattatctggttgctcacatggacggtgatccgtgatccccggtgaccaagggtgttgaatcctcatgcaggcagaggcagaaacactgcccgaggctgatgcctgatggtgcgatcccgttccctgtcgccatcgagttcgttttttcgttgcttgacagccttaaagcggcgcacgaatgccacgagccactgaggcggcttcccagttcactccaggcccagggcgcccggtcgccatgaactcccgctcctcctccggcggcgtgcggtccgagagctcgctgtcgttgggggagcgcctctgcgcggtcttcttccccgtcatcgccatcgccgaggccgttttcttcgccttcaccgactgcctcgcggacctctgcaccgactccggctcctcgcactcgcgccgcttcggcgcgggcgcgtcctcctccgccgccaggaacagtcggagcaaccattgccagccccaccacagacctttcctacgccgcgccactgcgggtggatggacctcccccaacctccgccagctcgcacgcctcgccgacgagtcccgatgctgtaaaaaaaatcgatccaagcctactccaccttttgctcttccttggtttctccgcctccatctcgcaatgccgtttcatctgactctgtttcgattgaactgaattggactaaatgaagtctcggtgaacgaggtggaggcgctctttgagctctacaagaagatcagctgctccatcatcgacgacggcctcatccacaaggttttttatttgtttgatgagaagaaaaatggtgtgatcgagtttgatgagtttattcattccctaagtgtcttccaccccttggcaccaattgaagacaagatcgattcatgcatttcgtatgtttcagttgcatttaggttgtatgacttgagacaaactgggtttattgagcgtgaagaggtaagctcgcaaagatgttctgtatctatgcataccttttatgtggattcttttctagtaaagtggctaattgccatgccttgccttataggttaagcaaatggtaattgctatattgatggaatctgatttaaaattatcagatgacttactcgaggccatcatagataagacatttgaagatgctgatgcggataaggatggaaaaataaataaagaggagtggaaggaatttgcgttacgccaccctaacctgttaaagaatatgacactgccttatctgagggacatcacaaccgtcttccctagtttcgtcttcaacacggcggtggaagattagtcgttcgaattgaaggcaataaagcagtattggggattgcttgaggtgcacaaggttcctgaaacctgacggctgttggtcgccttcaaccactgagaatccgatgtgttctgagcatcaaggcagccacccgaccatcactcctgctataaattataatataaattataaggctcatccggggtggcagatcggcagcgggaacttagggggtgtttgggaacaaagtttttctacagttttgaaagaatactgcagtattctcaaatactgcagtattatatacagaatggtgtttggcaagctagctaaaatctcagtttttaaaactgaagtattgcaaatactatagtagttttaagctattctaaacttaagtctggacctcagtttttaaaactgcggtattgtaaactgcggtattgtcatgactaaagtatactgtagtatttcaaaaactttgttcccaaacagggccttacctgatataatttcttgctgccgttttttgcgcagcaatggattgagagttggtagctgtagatacatctagcttccattctgtacgtagggatccaggaactgtaaatacgttctatggaattgtatcggaaagttcctagtacgccagccagatctagaataagccagagcttgtttcttgcagtggttttcttgccctcaatgctctcttctgaacacgaacatgcttatgcttgtcaagactgcactgggttaccatgtcct

SEQ ID NO: 6120 - DNA, 3067 bp, Zea Mays
gaaatgaaactcgcgacagacaggtcgtcctctgctccgtggaccctattcctgcgattatctggttgctcacatggacggtgatccgtgatccccggtgaccaagggtgttgaatcctcatgcaggcagaggcagaaacactgcccgaggctgatgcctgatggtgcgatcccgttccctgtcgccatcgagttcgttttttcgttgcttgacagccttaaagcggcgcacgaatgccacgagccactgaggcggcttcccagttcactccaggcccagggcgcccggtcgccatgaactcccgctcctcctccggcggcgtgcggtccgagagctcgctgtcgttgggggagcgcctctgcgcggtcttcttccccgtcatcgccatcgccgaggccgttttcttcgccttcaccgactgcctcgcggacctctgcaccgactccggctcctcgcactcgcgccgcttcggcgcgggcgcgtcctcctccgccgccaggaacagtcggagcaaccattgccagccccaccacagacctttcctacgccgcgccactgcgggtggatggacctcccccaacctccgccagctcgcacgcctcgccgacgagtcccgatgcttctcggtgaacgaggtggaggcgctctttgagctctacaagaagatcagctgctccatcatcgacgacggcctcatccacaaggtgcatccaacaaaatccctcttcgattccctgtatctaccgtccatattcttgtcattcatgacgtgatttggggttaatttgaacatctatttctttgagtgaagtatttcttgctgtacttggaagatgcgattttttttgtttttttagcctgcggacaattgcctccttggctttaaatatggaagaaatagttacataagacctgggatagtgacactctgtcatccccgcatgattgacgagtatattaggccattgagggcgacgtgcaatttagtacacaaatccatctttaattttgcagggcatgcagtggattggattattttctgagggctggattggttaagacaatgtaatattcttctttttgagttgattggagaccgtcatgtgacaagcacacatgacaaaattttaaaagtttgtttgacagcccattaagattgctcgcctgaattttcccatattccgtgtgccattatatcctaggataacacctgcatctcggtatgcttggatccctgtatgcatgattgaagagtaggtgattgaggacgatgcttaacttagtacatagatccatgttgatttgttgcactacacgcaatggattggattatttcttgaggactgaattagctaagacgacatcttattcttctttttgagtcgattggagactgtcatgtgacaggccacatgagtgcattataaaactttgtttgacagcccataggatcacttgtctgaattttcccatgttgcgtgtgcaattgggtcgtaggataacacctgcatctcagtatgcttggttgtcatgttccttcctctgccataccaaggttgaaggttttgattggtgaagcatgtgatcacatttttttattaaactaacacagcagcaattttgtgtgcgtgtgatgcggttcaaaatcagagaaatatttttcagccttacattttcagcagcatcttctatgtgtgctgtgtgcacaatagtccaattagaaaataaaatatgaatgtccttgctcgttttgtatgcaactagacgaatggccaatgtcatattaatttttcttaaccattccactgctggatggttcttcatcaggaagaacttcagctggcactgttcaaaactccaagcggcgagaatctttttcttgatagagttttttatttgtttgatgagaagaaaaatggtgtgatcgagtttgatgagtttattcattccctaagtgtcttccaccccttggcaccaattgaagacaagatcgattcatgcatttcgtatgtttcagttgcatttaggttgtatgacttgagacaaactgggtttattgagcgtgaagaggttaagcaaatggtaattgctatattgatggaatctgatttaaaattatcagatgacttactcgaggccatcatagataagacatttgaagatgctgatgcggataaggatggaaaaataaataaagaggagtggaaggaatttgcgttacgccaccctaacctgttaaagaatatgacactgccttatctgagggacatcacaaccgtcttccctagtttcgtcttcaacacggcggtggaagattagtcgttcgaattgaaggcaataaagcagtattggggattgcttgaggtgcacaaggttcctgaaacctgacggctgttggtcgccttcaaccactgagaatccgatgtgttctgagcatcaaggcagccacccgaccatcactcctgctataaattataatataaattataaggctcatccggggtggcagatcggcagcgggaacttagggggtgtttgggaacaaagtttttctacagttttgaaagaatactgcagtattctcaaatactgcagtattatatacagaatggtgtttggcaagctagctaaaatctcagtttttaaaactgaagtattgcaaatactatagtagttttaagctattctaaacttaagtctggacctcagtttttaaaactgcggtattgtaaactgcggtattgtcatgactaaagtatactgtagtatttcaaaaactttgttcccaaacagggccttacctgatataatttcttgctgccgttttttgcgcagcaatggattgagagttggtagctgtagatacatctagcttccattctgtacgtagggatccaggaactgtaaatacgttctatggaattgtatcggaaagttcctagtacgccagccagatctagaataagccagagcttgtttcttgcagtggttttcttgccctcaatgctctcttctgaacacgaacatgcttatgcttgtcaagactgcactgggttaccatgtcct

SEQ ID NO: 6121 - DNA, 3084 bp, Zea Mays
gaaatgaaactcgcgacagacaggtcgtcctctgctccgtggaccctattcctgcgattatctggttgctcacatggacggtgatccgtgatccccggtgaccaagggtgttgaatcctcatgcaggcagaggcagaaacactgcccgaggctgatgcctgatggtgcgatcccgttccctgtcgccatcgagttcgttttttcgttgcttgacagccttaaagcggcgcacgaatgccacgagccactgaggcggcttcccagttcactccaggcccagggcgcccggtcgccatgaactcccgctcctcctccggcggcgtggtaggtgccaggtggctgcaatgtccacccttctcccgcggtccgagagctcgctgtcgttgggggagcgcctctgcgcggtcttcttccccgtcatcgccatcgccgaggccgttttcttcgccttcaccgactgcctcgcggacctctgcaccgactccggctcctcgcactcgcgccgcttcggcgcgggcgcgtcctcctccgccgccaggaacagtcggagcaaccattgccagccccaccacagacctttcctacgccgcgccactgcgggtggatggacctcccccaacctccgccagctcgcacgcctcgccgacgagtcccgatgcttctcggtgaacgaggtggaggcgctctttgagctctacaagaagatcagctgctccatcatcgacgacggcctcatccacaaggtgcatccaacaaaatccctcttcgattccctgtatctaccgtccatattcttgtcattcatgacgtgatttggggttaatttgaacatctatttctttgagtgaagtatttcttgctgtacttggaagatgcgattttttttgtttttttagcctgcggacaattgcctccttggctttaaatatggaagaaatagttacataagacctgggatagtgacactctgtcatccccgcatgattgacgagtatattaggccattgagggcgacgtgcaatttagtacacaaatccatctttaattttgcagggcatgcagtggattggattattttctgagggctggattggttaagacaatgtaatattcttctttttgagttgattggagaccgtcatgtgacaagcacacatgacaaaattttaaaagtttgtttgacagcccattaagattgctcgcctgaattttcccatattccgtgtgccattatatcctaggataacacctgcatctcggtatgcttggatccctgtatgcatgattgaagagtaggtgattgaggacgatgcttaacttagtacatagatccatgttgatttgttgcactacacgcaatggattggattatttcttgaggactgaattagctaagacgacatcttattcttctttttgagtcgattggagactgtcatgtgacaggccacatgagtgcattataaaactttgtttgacagcccataggatcacttgtctgaattttcccatgttgcgtgtgcaattgggtcgtaggataacacctgcatctcagtatgcttggttgtcatgttccttcctctgccataccaaggttgaaggttttgattggtgaagcatgtgatcacatttttttattaaactaacacagcagcaattttgtgtgcgtgtgatgcggttcaaaatcagagaaatatttttcagccttacattttcagcagcatcttctatgtgtgctgtgtgcacaatagtccaattagaaaataaaatatgaatgtccttgctcgttttgtatgcaactagacgaatggccaatgtcatattaatttttcttaaccattccactgctggatggttcttcatcaggaagaacttcagctggcactgttcaaaactccaagcggcgagaatctttttcttgatagagttttttatttgtttgatgagaagaaaaatggtgtgatcgagtttgatgagtttattcattccctaagtgtcttccaccccttggcaccaattgaagacaagatcgattttgcatttaggttgtatgacttgagacaaactgggtttattgagcgtgaagaggttaagcaaatggtaattgctatattgatggaatctgatttaaaattatcagatgacttactcgaggccatcatagataagacatttgaagatgctgatgcggataaggatggaaaaataaataaagaggagtggaaggaatttgcgttacgccaccctaacctgttaaagaatatgacactgccttatctgagggacatcacaaccgtcttccctagtttcgtcttcaacacggcggtggaagattagtcgttcgaattgaaggcaataaagcagtattggggattgcttgaggtgcacaaggttcctgaaacctgacggctgttggtcgccttcaaccactgagaatccgatgtgttctgagcatcaaggcagccacccgaccatcactcctgctataaattataatataaattataaggctcatccggggtggcagatcggcagcgggaacttagggggtgtttgggaacaaagtttttctacagttttgaaagaatactgcagtattctcaaatactgcagtattatatacagaatggtgtttggcaagctagctaaaatctcagtttttaaaactgaagtattgcaaatactatagtagttttaagctattctaaacttaagtctggacctcagtttttaaaactgcggtattgtaaactgcggtattgtcatgactaaagtatactgtagtatttcaaaaactttgttcccaaacagggccttacctgatataatttcttgctgccgttttttgcgcagcaatggattgagagttggtagctgtagatacatctagcttccattctgtacgtagggatccaggaactgtaaatacgttctatggaattgtatcggaaagttcctagtacgccagccagatctagaataagccagagcttgtttcttgcagtggttttcttgccctcaatgctctcttctgaacacgaacatgcttatgcttgtcaagactgcactgggttaccatgtcct

SEQ ID NO: 6122 - DNA, 2429 bp, Zea Mays
ccgtgctgtccggtgctcctcgtcgggcgcttcgctgccgccttgcaattgcaacccacggcaaatgctgctcgacgatgagcgaggctagcaggagccacctcctcacctggatcgatggcggccgttcatctcggctaagatccaaatctcggcatcggcggcacccctcgactctccccacgcccctagccatcctaactgcgaccgtggatgaagatctcaaagaatcttggaggtgcagcgggatgacagcgtagggaggcccaatggtgtgatgtagcgagtcctaacggtgctcggatcggggcggatggcccccagtctcggcaggaggcttgtacaacatttgatcgatgagtcagtgggcctaaagaaaataaagcagcccaagatgatctccatcatgggaatccgtggctccggcaagaccgcacttgccacagaggtgcatgagaggcatcttagactatctccagcagcttacccatccccatacccatattcaaactctactctgcgaacagcgcaatctatagtacaaaacagtgcttttgggtaaactatgggtagactgctgcagacggtcttaggacagagaaattcaataactccggacacaatttggataaaatgatgatcaacatggtcaacttttcatctgacagctgcaacctaaaagaagacaaacgtcaaacgcgtgatatagaccacgcgctacacacagtatcaccaagcccaaaacataccaaaaaaagttgaaccaagtggttgagaattccccttttgctctcatggccatggagaacactgcgccatgcggtgacttcgggaagatcgtggccgatcttgagtctgagaacttggtggctaacgtctctgccgtgaatcaagcctcggcgttgattgctggaggtaaaatccctgaaccccagcttctgtgccgcctgatcgctggtcttgcttccaatctggagaagcctgaccatgactctgccatcaagaggtgtgtttcctttactctaaaggcaatcagggtggccgtcatcaagaaccgcatgaacatggattcctcagctcgtggtgaggctctccatgccatctggtgttgttttatggatcaaggccttcgccgtattcagcgtgattcaaatatggtgaggctgtggacagtccaggatcaattgtctgcagtcaaaatcatatgtactttcttccgtctctcaccggtaaacatcagtgacacaaggtgtgtcacagccttcgcctcactgatgttgtcaccgtacagcactgtggtgtgtgcatgtgcagatgccctgctctctttgccccctgttgttccaggattttcatttgccattgcaagagcctattgccatatgcttgcaacagtgtcaccacaatcaccacttgaggtaagcagcatggttgcgatgcttggtaggctgaagcaagtaagtacgaccatggtccaccacccaggggtttagtgaccttgctgtggatgtcctagcagctttatcaaattgcaatcttgctgttcgaaagaatcttctgaacctgatggtgaggctcctcactccaaggaacatcagtgctgtgctattgctccttgataatgagctgaatagggctgctaacatccatatcgagtaccacaagatgctagaggaggcgatcagagaatgccatgctgcttttccggggtgtattgtagaattcacactagatcccaagtacagtgtgttcattgatagtattctgtacatcatagacatcatgaatcccgaccagtcgttgcgaggcccacttctgaaaggtctactaagggcgctccggcatgtgaagtcaccactggacctgcttgatcgacgtaagattgagaagctgatacttggaggagaagcggagaatcaatacaagctttctactgactattatggtgtcactgccggagatgcaacacagggaaagcaccagcagccatggctgatggagatggaggaactgctgtttgtgcgcatagggctcacacggcaagcaggtgggagctatgccattccttcgagttccaagagcagtgctagttcttcaaacgcgtatcttcctgagccattgggtaatacagacaatctgatcttcctcgtgcattctggagatgccctcttggcagatttcgtggaaatcatgctgtctaacctcaagaagaaggtcaaagagctggagtgatgctgatgagttcatttgatgtaataatttggaggtcaaataactagaaatggagtcgttgaaccttggccaatcgtacctcaatatgcataataatgctgtcttctgtgtgcttattacttctattattactatattatcactgatactttttctattcaacattttgccatctatttgtgtgacttgtgtggtct

SEQ ID NO: 6123 - DNA, 1391 bp, Zea Mays
atttaacatccgaatccctgccccttcgcccttcccctccggccgcagccccttccctgccgctccggcctcctccgtcgggaccgccgacgacgcgccgcgcggaagcctgcggggatattgggtaagcagttgtgatcctgttctcttgctcggatgccgggttactatgacatcgatgacatcctcatggaggatgagcctatttcagttgttttccaagtaactgcaaatggtgttggcctgctagatcctggtgctgaaagtaactgtgtagagaagggcgccaaggtggacctcccattttggcttgcgcatgggctgctgtctctggaacaagctgtgtcaataaacccacctccatgcttcacacagaagtagtttttttcagtgtttgttattgcattacaccatacacagaaattcttggatcaacagcaaagcatgggagagcaaggagtattcttatttggaaaaacatatatggaattccctatcaacaacttaataaaaggatctgatctttttgacaccattgtggcctactgtagcttttcatagtaaatagtagcattttgcagatctttctcttataacttgatgatagaacttattaaagacatgaatctattcaaacggttctccagaatttgacttttgctgcatggcttgggttttggttctgactatgaactaaagcgtgaaatacagattctgcagtattattctcctaacaaatctgtattctgttatctccatatcatatatactgcagaacttggaaggagatccaagctgatgcggcctgtgtggatttgagggttcgttgcccgtacttttatgagctaggatgcaagattgttcctttggtgagtgacaagagcattggcctgttcttgcgatatgcattcaccagtaggtacaaagaggttctaagtaagtcccacagttcttccatgatgacagtgcccaagttcgttccacgccttacaaaagaagaaactcgggtgtttgaatctgccagagaatcgatgactggtttcaagaaatggcgagcaggtgggatgagactgcaaaaggcttccattcttggccggaagaggaagacaaagctgcctgaatgagttttaaggtgatgtgcgctgctttgatttgctagcaccgtgagcaaagagaaaagtgaatggcagattaaatctggatgtactatgatctgctgtacattgtgcacttgtgtacagcagctctgatcagtccgtcctttgtaaggaaaatgaacaccgtcttaaatcatgatatcctgtttggagcaggtgtcatgattttcagcagggtatcttgaatgagtttgaatcatgatatcctgtcttaaatttcacatgttctcaaaa

SEQ ID NO: 6124 - DNA, 1011 bp, Zea Mays
atttagcagcgacaaacttggagtagtcaaaaccgcaaaagttatcggatcccgcatcgtggaatgcttgccaaagggaggaaggtagctggaaggcgtgaagaaatgtctgcaaattatgcgtttggaccacaggatgatgatgcgattattaaacacaggcttctgactaggacaacgaccaccaggggtgaaccgccactaaagaagcttcagaagaagttcatgtcctttgcaactgagatcgagaaggatgcagataacataagtgactgtgaaagactgtacaaggcctttctacatgaaattaacacctttgagctacctcttctgaaaagcaaggctgtggttgatgcaaacattagggagaaagaaagctttaatgagctgcaggttgagattgagcggcagatcttgcatgctaagactgatattgaggaccttaagaagcaacttgagcagagcaagattgagaggcagcacaaagaagagtgtgaagccatccggaagctgattagtttgcagcctccacggtcagaaactgaaaaactcattgcagaccttgagaaggagataactgatttgaaggcggagaatgtagcatgcataaggactttggaactgaggaagaagcagtttgcccttcttctacatgtggttgaggaattgcagatctcgattgaagatgagcagaagagtatagcagatgagctgagagctattgctggagagcagaagatgagcatggaagaagggagcgtcggtgcttcagattccatggttgttgactgatcgagatacattcacatatgttgcagacctgcttgccaaaatccatcacatggtttttggacaatatggcgatttggtagatgtcttttgcggtgtctttgtacctcatgtaaattgaactgtatgctagtatgaagtgaaattgaagtacacgttgttgtgtaacaaagtcagttcttattgatgaattcagtcaatatatgttacttcacaagcata

SEQ ID NO: 6125 - DNA, 983 bp, Zea Mays
actgaaggaaggagtggtagcgcacccagtcacgccgccccgccgccgccccctataaatgcgccaagcccgagttaaccaaattaaagaaaaaggaaattttcttgggcgttcttcggcttcgttgtcacaaggttcgagttcgtcaccgtctagtacgactgtgcgagggaggaagaggcgaggagaagatgcagatcttcgtgaagaccctgacggggaagaccatcaccctcgaggtggagagcagcgacaccgtcgacaacgtcaaagccaaaatccagcagatcaacagcgactgatattcgctggcaagcagctggaggatggacgcacgctggctgactacaacatccaaaaggagtcaactcttcatttggtcctcaggcttaggggtggaaccatgatcaaggtcaaaactctcactgggaaagagatcgagatcgacattgaacccactgactcgattgacaggatcaaggagcgtgttgaagagaaagaaggcattcctcccgtgcagcaaaggctcatctatgctggtaagcagcttgctgatgacaagaccgcaaaggactacaacatcgagggtggatctgtcctccatcttgtccttgctctgaggggtggttactagtctaaacctgatgaactagcaatagtaacaaattatcagctttgcgcctttgcccagtggaaggggctgtcttccaagttattgtctgatatggaattgttccagattatcatgtctcggcgtttacccattattattatttgatttgaaccttgctatgttagtcagttttcatacttatggtgtggttgcgtcttcttttttatactgtagtttggttttgacggcattgttccaaattgacttgcttttgcactgaaatactctcgttttttttgtaagattggttccttatggcagtcctgcgtgatgtagcgcatgaaattcatgttcttcaaggtacgagttt

SEQ ID NO: 6126 - DNA, 659 bp, Zea Mays
taccatgattcaaatgcaattcacatggctctggtggcataatatatcctatatggaaatgttgcttttgcttcttcccctcctaaactcgtcttcggtaaagaagttccttctccccttctccaaagataagtcaggaggttcttctggtgatgaagcagattgtcctatatgtcggtccagtcctagcattccatttattgctcttccatgtcaacacaggtattgctactattgcctacgcacacgttgttcggctacgacttcttacagatgcacacgttgtgacggggcggtggttgcaattcaaagactaggatcaggttagttttacgacctagttgggttaaagaattctcgcccgtttctacagagaatcagcacttcggtgtttcatacggttacaagtttggatacgcgtcattcactgtatgtacatgtaattgccccaagtgtggacagttcggatgccatgagcccataactgacttgttgtatatcgaatgaatagtccgtcacaaaactaacacggattcactatgcgttttcttttcgattcgtctatttcaaaaatcgtgtattgaaaaatgccaaaacaattattggaaagagcaactgattcactgattatgtattgaaaagagattaggtttttaagt

SEQ ID NO: 6127 - DNA, 1777 bp, Zea Mays
ttttaataatgtcgacttatttcactggttcctacttctcatcatggcctatcaattctgcttctgagagctacagtttggctgatggttcagcggaatcatatggagaaggaagcatgccaccgtcaacctatttcatgacagctagatcagatcacaatttaaatttcagtgtgcatgaacaggattccactatgcttccaaacgaacagttgacctatgctggtgctggccagattgatctattacctgctgagactctatctagggataagcttcctgaaaatcttctggagcttcaaggacttcagaatatcagcaacctacagagtaatttagtggccccaggggtgtttcagcacaatttaacacctggggtctttcatccacagttgaacactcctggactttcagaactgcctcatgccttatctagttcaattgacagtaatggaagtgaagtttctgcttttctcgctgatctaaacgctgtttcttcagcgccaactttatgttccacattccaaaacgcttcttcgttcatggaaccagtgaatctagaagctttcagtattcaaggcgcacaaagtgattgtgttttgaacagaacaagtcatccgaatgggaatatctcagatagcaaggagtttatcagtggtagtctcccttcttttgctagtgtccaggaaacaaacctagctgctagtggcttcaagactcagaagcaggagcaaaatgcagtgtgcaatatccctactttcactgcacggaatcaaatgtcagttgctgcaatgcaaggagcacttgtccctcaaaagattccttcacggatcaatgataataaaagtgagggtcctgttagccatccttctgatgtacaaactcaaccaaattcagctgttaatggtgttggtgtgaaaccacgagtaagggctcgtcgtggacaagcaactgatcctcatagtattgctgaacggcttcgcagagagaaaatttcagataggatgaaaaatctgcaggatcttgtcccaaattccaataagggttaccacggccaacctctgccacaaggattactggacgcactagactcggaagacagcttcgtcttcgaggaagaggtcgtgaagctaatggagaccagcatcaccagcgcgatgcagtaccttcagagcaaggggctctgcctgatgccagtcgcccttgcttccgcaatatccacccagaaaggtgtgtccgctgctgcagtccctcctgaacggtgagataaagacacgctcctcccccatgagcacgaggaaacagccgcagatgacagaactcagacggctgaagaatgcagcaatgcaaagcccgtagagtgcagcataggaagttagtctgtgaccagagcgcatggcctcgtctactaatttcgctctcagaatcagctttttttttcgtacctattgcgcatcagttgattttgcctttttgccttctctcttttctttttggccgtatttcatcaggttgcatataaaaaaaagtaaaatctactggttctggcgttctgctatatgggatcttgtgatcaggcatctccaaagtgatcctcttgcccggctgtcagtttgttagctgtagccatctactacctcagtttgaaaaactgagtttatgagctgccccaagaaacctacttagctttgctttgttgtcatggccatgcaatgaatttggctgcctcaaactttgaacaaactagaagtgtaagcaattagaatgaacaacaaca

SEQ ID NO: 6128 - DNA, 2057 bp, Zea Mays
ctatcgtgatttcttttattcgttccgagttctgacgatttcgtagacggatacggaatacgcatattgtcaactgtgcgtattttcagtctgtagaagccatcttttaaagaacattttgggcagaaattgccagtagcatttcttgtggttaacatggacttctcagctggttcctacttctcatcatggcctatcaattctgcttctgagagctacagtttggctgatggttcagcggaatcatatggagaaggaagcatgccaccgtcaacctatttcatgacagctagatcagatcacaatttaaatttcagtgtgcatgaacaggattccactatgcttccaaacgaacagttgacctatgctggtgctggccagattgatctattacctgctgagactctatctagggataagcttcctgaaaatcttctggagcttcaaggacttcagaatatcagcaacctacagagtaatttagtggccccaggggtgtttcagcacaatttaacacctggggtctttcatccacagttgaacactcctggactttcagaactgcctcatgccttatctagttcaattgacagtaatggaagtgaagtttctgcttttctcgctgatctaaacgctgtttcttcagcgccaactttatgttccacattccaaaacgcttcttcgttcatggaaccagtgaatctagaagctttcagtattcaaggcgcacaaagtgattgtgttttgaacagaacaagtcatccgaatgggaatatctcagatagcaaggagtttatcagtggtagtctcccttcttttgctagtgtccaggaaacaaacctagctgctagtggcttcaagactcagaagcaggagcaaaatgcagtgtgcaatatccctactttcactgcacggaatcaaatgtcagttgctgcaatgcaaggagcacttgtccctcaaaagattccttcacggatcaatgataataaaagtgagggtcctgttagccatccttctgatgtacaaactcaaccaaattcagctgttaatggtgttggtgtgaaaccacgagtaagggctcgtcgtggacaagcaactgatcctcatagtattgctgaacggcttcgcagagagaaaatttcagataggatgaaaaatctgcaggatcttgtcccaaattccaataaggcagacaaggcatccatgctggatgaaattattgattatgtgaagtttcttcagcttcaggtcaaggtcttgagcatgagtagggtaggagctccaggagcagttcttccccttctcacagaatctaagactgagggttaccacggccaacctctgccacaaggattactggacgcactagactcggaagacagcttcgtcttcgaggaagaggtcgtgaagctaatggagaccagcatcaccagcgcgatgcagtaccttcagagcaaggggctctgcctgatgccagtcgcccttgcttccgcaatatccacccagaaaggtgtgtccgctgctgcagtccctcctgaacggtgagataaagacacgctcctcccccatgagcacgaggaaacagccgcagatgacagaactcagacggctgaagaatgcagcaatgcaaagcccgtagagtgcagcataggaagttagtctgtgaccagagcgcatggcctcgtctactaatttcgctctcagaatcagctttttttttcgtacctattgcgcatcagttgattttgcctttttgccttctctcttttctttttggccgtatttcatcaggttgcatataaaaaaaagtaaaatctactggttctggcgttctgctatatgggatcttgtgatcaggcatctccaaagtgatcctcttgcccggctgtcagtttgttagctgtagccatctactacctcagtttgaaaaactgagtttatgagctgccccaagaaacctacttagctttgctttgttgtcatggccatgcaatgaatttggctgcctcaaactttgaacaaactagaagtgtaagcaattagaatgaacaacaaca

SEQ ID NO: 6129 - DNA, 1237 bp, Zea Mays
gcagccgctgccgttgccgctgccgctgccggctgccgctacctatgctcaagtgctcagtgctcaccgctctgcccctgcctcatcacacgcgcgcacggcgcacagataccttttctctcctctcccgtcccactctcctgggcaatcccggcccggcatggcgagcccgtcctcgtccccctcgcggaaggctctgagcaagatcgcctgcagccgcctgcagaaggagctcgcggagtggcaggtcaacccgcccgcgggcttcaagcacagggtcaccgacgacctccagaggtgcccctccgccatcgtcgcccttcctatcccctttcctcagcaggcaatccctgctgtgcggggtctcttagattcctttctccgtggctccgtgcttggctaccgttttcttgttcgcgagtctagcacgtccagcgccctggacgcgacgcgacgcgacgtgatacgtcgcgtgcgttttgggcttgtatacattggtttctttattattctctcgtcttctcttccaagggggtttcagcttgtatacattagaatctttcaagtgtttttgtgatcctggaagaaagaaaattttaagaaatgcaaaaataatggtggatgaaacaacaaaaaaaggtgggtcatcgatgtagcgggggcagcaggcacgctctacactggcgaaacctacaagttgcaggtggatttccccgagcattatccgatggaggcacctcaggttatatttctgcatccagcaccgatgcatccacacatttacagcaatggacacatctgtttagatatactgtatgactcgtggtccccagcgatgactgtcagttctatctgtatcagcatattatctatgctgtccagctcgccagaaaagcaacgcccagctgataatgatcgctatgtcaagaactgtcgcaatgggaggtctccgaaagagaccaggtggtggttccatgatgacaccgtgtgatcggtgttccgattattgttgtcctgtatgcatttagttgccagactatgggagatggacttatttcgaacgacccatttgaccagaaattaacatgctcttgtggtttgtagatgaatgtgcatcagcgtcaggcctgtactttctgattcttacaccgtcgatgatatatagaataatgtttgtatcttgtcaatttacggaacagacatgaaattcaatgcaggtcactggtttctgaatcct

SEQ ID NO: 6130 - DNA, 2807 bp, Zea Mays
tctgttcattgtacgtgccctaagttttccgctgcaagacaaacgaaggagcaccgcctttacaaattgtgcgttggcttttttgtgttgtacaaataggagataggacagaacccaccaacgtgttggttatttaccccgtttaccactgagtcctccgcaagccattcttcccgacatggcgatacccacggccacgcacgcgtcagagatgaggacgacgacaatcaggatgagggtttgagcacggacgaccccctctccatcgtccgctctaatttcttcctcccccgtcagcaacccttgtagtctctgctaccgtcagcccgtacgcgatcaaagccccgctgcactgcggccaaccgtttctggcaccggcaccggcaccggatccgccgccttcgtcgtccaggatggcgatgatgagccggacgcgggatctgctgatggaggggttcgaggggctggtgcgggatgggtcgttcaagtggggcctcccccgccgcggggacacggccatggacgacggcggcgacgacgacggctccctctccgtgcagcgctcctccatcgctggcctttccttcaaggccaacgccgtcgtcgcccgctgctcccgaatccttggcgtttctaccaatgatctacaaaataactttgataagcaagcatctgattccataaagcagccaaaaagctacgcaagaaattttttggagtactgctgcttcctggcacttgctcagatatcacaagtgacagggtatcttgctgacaagagctttcgccgcttgtcttttgacatgatgttagcttgggaggttccctattcttcaagccagctcactgttaaggctgaggtagatagcacagttagctcagaagcttttacaagaatagcacctgccatcccaaccattgctgatgtagtaacttgtgcaaatctctttgatgtactttcatgttcgagcggaggccgtctttcattttctgtatatgagaagtacctttcagaattggacagagcggttaaaaagatgaagacacaatctgagtcatcacttctatcaaactttcggtctcagagaggagaaaggattctggaagttgatggtacattgacaacacaaccagtacttgaacatgtgggtatttcaacgtggccaggaagattaatactcacagatcatgccctttactttgaagctcttcgggttgttacctatgataagcccaaagtttatgagcttgcagaagatttaaagcaggttgttaaacctgagctgactggtccatgggggtcacgtctctttgacaaagccgttatgtacaaatcaacaaccttaacctgtgatcatagaatttccggagttagctggccattctcgccgagattattggctggccattatatcagaagtactttatgcccatagatttgttaggaagtttgatataagcggaattgacaaagaggaaacaattctgaaagcagtacttggtattatgaggttacaagccattgaagagttacattttgaagttccaaatcgttatgaatctcttttgttgttcagccaatgtgacaaacttcctggaggtgatgttatacttgaaacattagccagttctatagcatcaagaacttcagatcgaactaaccaacctggcacaagtagaggaatgcatgctgtcctgtcaaacctgggcatggtatcaccagttaatagtggtgagcgtttgtttgttggtgagattgttgttggggaaattagtgccttgcagaaggctgttactgattcaatgaacaactataagaaagttgaactggcccaagcgtcggttgatggagtcaaagttgatggtcttgatacaaacttagcagtaatgaaggaattgttatccccggtaagtgagctttggagggttttgctattgctcacatcatgggacgagcctatgaagtccatgttgttttgcttcctattctcttatattatcatcagggggtgggtaatctattttattgtcacggtactattgttttcagcaacttttatgtttctcacaagattaactaatcaaggaaagcaaatgagtgaggtaaaggtggtatccccacctccactgaacacaatggagcagctcctagctgttcaaaatgccatttctaaaattgaggagcttgtccaagatgcaaatattgttcttctgaagataagagctctattgttggcttttccatcccaggcgacggacagggctattctggcattggtactgatggccctgagccttgccatcgttcccacaaaagtgcttctgctgctggtgtttctggaggtatccacgaacaactcaccactacgaagagcaagcacagaaaggtgtaccagaaggttgagagagtggtggttcagcatacctgcagctccagtggtggtggagaaagagaaagaggacaagaaaactagatgatacatccaatgtaatctttatgttgcttggctgatacgttgtgtaacgtatcagccaatgcccacctttgtacaaagaccgcaatatcaacaacgaggggcagtttcaatgaagatttcatctcacttgtaccacctgccctgtttacatggctcttgatgctttgttgcaagttgactagagctgaggccggtgtcaatcgccgctaataacacaaatccctttctctgggttggacatatcgccgtgcggacctgcgccccttcgtttgtaacatgaacagtattgattcttcgatattatgggattgcttctctaatagactatgt

SEQ ID NO: 6131 - DNA, 1624 bp, Zea Mays
ctccgtgccaaaacgaaagggaccgctgctctgctctgcctgcctccccttcatcctccacttcttcctcttggtctggttcgggcagagcatccgcacctgctcggccgattaccccggcgttttctgttccctttcaccccgcgtgcgggcgctatccttcccgtggcgacgtctgggtgaccgctgccgcagccctacactaggttcctaggtattcgccgggcccttccccggcgacgagcacccaccatgttgtagctgctattgtcatcctcatcttttcaagacatgaacatccccatgctcctttgttcgcatggataattggatatacacttggctgcattgctagtcttcctcttatttattggcggtatgttcatcgaaacagacatttggatcaagaacctcagcagccacctacaacatatcctactttgactccttctcagtcatcagaaggacgcaaccatcgtaccagtggtattgttttgcatcttggatgtatctcaatttcttgcccaaggcttagtgtgctggcttatcacttcaagacaggtgttgactgtttctttgctgtatggtttgttgttggcaatgtgtggatttttggtgggcgcagtatttcatcagatgctcaggacgctcccaatatgtacagatttgggtcaaaatagaggagctactcaagagctaatagatgcattgccaacctacaaattcaaaccaaaacgtgtcaaaaactgggggattgaccatgcttcaagctcagagcatcttgatgagggtggcattcttggcccaggaactaagaaggaaagagttgtttcagctgaagatgctgtgtgctgcatctgtcttacgaagtatggagatgatgatgagcttcgtgagcttccttgcacacacttctttcatgttcaatgtgtagataaatggcttaagataaatgcggtgtgcccactctgcaaaacagagattgggggtgtggttcgatctttctttggcttgccatttggccgccgccgtgtcgataggatagcggcaagaggtgtagctagctcaagattcagtgtatagaacaatgctgtttttccgcataaagagctctgctctgttgcaatggtttgattgattgtcaaggaaagcgctgtgtgcatgacttgaagacaatgacacctggtgggagacctgatgcttgtaggggcaaatttctaagaaatgtaacggactgaaggtgctgctatactctgatgaacattttttttccaagtatgtaaataaggaacacgaagttcgcttgccaggtataatgcaactttgcaagcaacttcacaggtgctctagcatcggccttggtgttctttccttccttctggttctgtgattctcttcataacggcaatgcactgcatgcattgtaaggctgtcttcagtagcttactcattctagtttctatcatcatatattctattttaaacttcaccttgtaaacagtgtaatttataatataaaatagttatttataatataaaatggtgttttatgcgatcatatgcatgatttgttggagattgtctaaattgtgaaataaaaggcaatgacctatttatggaaccc

SEQ ID NO: 6132 - DNA, 1959 bp, Zea Mays
caaatatttgttcctctctttgccttgcagacaaatagcacacagcaatcaaccgtcgtcttcttcctcgacgcctcataggctcatagggttctccaaattctaaatcgttgcaagcgaaaccaccaaaactgtactcacaaccctcgtctgcgctgcgccaccactcccccgtggcggcttgtagttgtagaagttcccggaaccagacaacccctaggcgctgagttttctgatagcggcttcggatatctcgtcgtgggcggccatggcgggcccgtgctgagtgcggggcgggagcaggtgaaggtctccgagctcgagatctcgatgcagattcgggagggcccggcgcggcggcaggcgccgtccgccgctggggcgctgcggtcgcccatgtccgccatgatgctcgctatgttcgctactatggcctccttctacgtcgccggtcgattgtggcaggatgctcagaaccgacttcatctcattaaggagctcgacagacgaacaggccaggggcaatcagcaatatctgtggatgataccttgaaggttgttgcatgcaggcagcaagggaagcggttggcatcacttgagatggagctggctgcagcaaagcataaaggttttgttggcaaatatactcctgagacaaatggaactcattctgggaaaaagccactgattgttattggaataatgagtagctttgggaggaaaaactaccgtgatgctgtcaggaaatcatggcttccaacaggttcaatgctgaagaaactagaagaagaaaaaggcattgtagtacgttttgttgttggaagaagtgcaaatcgaggtgatactttcgatagggagattgatgacgaaaataggagcaccaaggatttcttgatattggatgatcatatagaatctgatgaagagcttcctaagaagacaaaaagtttctttgctaatgcagcagaaacattcaatgctgcattttatgctaaggtcaatgatgatatatacataaatgtcgatactttgagtgcaatgctcgaaactcactgggacaggcctcgtgtctatataggttgcatgaaatcgggcgaggttttctctgacttaacccacaagtggtacgaatcagactggtggaaatttggtgatgggaaatcgtactttcgacacgcttctggtgaaatgtttgtcatatccagggccatagctcagttcatttctataaacaagtccgctctccggacatatgcccatgatgatgttagtgttggatcgtggatgattggccttgccgtgaatcatgtaaatgaagcaaaactgtgctgttcatcgtggccctcaggcttgattcggaacggctgaatcagcagccaaagttccgctgaactttggcacgacatacataggtggcatccaaacatgccctgaggttcctcactggtcctgatcaaggtgcgttatgttcagcgctataacgagcaacaatgcttaatgaggaagagttttgcaaacactgtgcctgttggatcgaatcggtattgggaaaattttgttttcttctgccatcttgtgtagtcctttggaggaggcttgtacgagccagttcatactgattactggatcggatatcttgtttttcttttccaaaggaaaggtcttgcatattttctttgcaaggccactacactagaatcatgagttctgacgaaaagccctctgcagattgtatcctgttccgcgtgccatttgtagatgccccaccctttaccattcttttttctgacagacactgccattgttggagtgacagaaatcaatagcaattcgggagattactttgctccagaatacatttatgcgtaatgcgtgtcttcagacctgttgccatggttgtgattttttgacacatacataatgatgccctcttgaagtcaagaatctgccatgtacact

SEQ ID NO: 6133 - DNA, 618 bp, Zea Mays
ggtggatttggatagcgcggtgcagaaaaaatggcggcttcagctctccacctctgccgcctccccaagccacggcaggtgtgaagcttcagcagaggcagttgcgcccgatgagccatgcagggtggtctatctcaaagatttttgaaagttgtttcttattatggtctcacgactctgccatataaactggtctgtaagcttgttggtgccaatctcagaaggatgctctggaaccttacatgagaaagagaacagttgaacttcactagggtctcgaatcatcactttttctgggaatcgatgcaaccagaaggtggtggcttacctgagggaggtgtgctatagcagattgaaaaggattttggcttgtttactaattttagggaagagtttattcgttcagccttacaactattggggtctggttgggtttggcttgcttgtaagtttctttctattttctttgaagtacagacaccaccggttcaaactaccgatttcctgattgctctttctaaagctaatattctgctggatatttgttgcagtgaagagaaataagagaaagctttcagtagttcatacacgaaacattatctacccacttgcttttgg

SEQ ID NO: 6134 - DNA, 1428 bp, Zea Mays
ctttttaatttttgttgatctaactcaaagaaaaatttgcagcccacgataggccggagcctaagagcagcgtgcttttaggattagttgagatttgagaacatgcaatatgctgtgacggtggatgttctgcaaactgtgttttctgtttttggcgctgttaaaaaaatcaccatgtttgagaagaatagtggaatgcagactctaatataatattcagcttgagaaggacctcaaggaacaacaagttgtgcaaggtgcagtggaaaacactttaggggctggttctatcaatttgctattagagaatccaataccaaagcaaattctccttccaacacaccaaatccatatgaacaaggcatctcgattattgggcgaacactatcgaaattcgatgaagataatctgattccatgtttcggatttggagatgcatcaacgcatgatcaagacgtctttgtttctctcctgacgagaaaccttgtaatggatctgaagaaacttttggacaatgcagggaacttgtaccacattttcgtttagctcggaagttgttatgccttgttcatccatttaattgcattgttcatatgtgtttacactaattcttaacaggatcaacaccctttgcaccaatgtgaagcaaagtggtggacaataccaagtcctgttgataattgcagatgggaaggacgccatggcagccttgccccgctcccccaacagcgcccgcctgcccctttccttgcgcgacgcgagatggatcggtgaatccatggcagcttggcagggtggtctatctcaaagatttttgaaagttgtttcttattatggtctcacgactctgccatataaactggtctgtaagcttgttggtgccaatctcagaaggtttgtgtgctgtcattaaaggaatatccaaattttaactttgttaaactttgttctctggtacaatgtccaggatgctctggaaccttacatgagaaagagaacagttgaacttcactagggtaagcaccatcaagattacgtggatggcttgaataagtagctggctaccagccctctgtatgtatatacaccctggacgatctgataaaagaagcccacaacaatgaaggtggtggcttacctgagggaggtgtgctatagcagattgaaaaggattttggcttgtttactaattttagggaagagtttattcgttcagccttacaactattggggtctggttgggtttggcttgcttgtaagtttctttctattttctttgaagtacagacaccaccggttcaaactaccgatttcctgattgctctttctaaagctaatattctgctggatatttgttgcagtgaagagaaataagagaaagctttcagtagttcatacacgaaacattatctacccacttgcttttgg

SEQ ID NO: 6135 - DNA, 1040 bp, Zea Mays
ctcaacctctcaacctcaactgctgcatgccgcctatacatactacgcacgcagtcgcgcccggccctgcactgcactgcacgggcgcggcgggagatcgagaggagactttgctcgcttttggtgggcatccgcgcggagcgtgaccacagacggtgtagagactagatagatcggaaggggatctaggcatagagagcgaggaggatgaccggcgttgttgcaggcgccggagggggcaacaaggcggcgggcgccacgctgcggctgcaccactaccttgtgatggccggggtggcggcggcgttcgtcctcgcctgcctccggtacgcgccggaccccgcggggtacggcttcctggccgtggcgccgcggccggtggaggccgatgctggtgcccggcgggacaccactcctccaccgcgcccgtcgtcgtcgtcgtcgtcggtggtcatcttcaacttcggtgactccaactccgacacgggcggcatggcggcggtcaacgggatgaacattaacctgcccgagggacgcaccttcttccgccgccccaccggaaggctctccgatggccgcctcgtcatcgacttcatctgtgagagcctgcacacgcctttcctgagcccatacctcaaggcgctgggcgcggatttcagcaacggcgtgaacttcgccatcggcggctcgacggcgacgccggggggctctccattctcgctggacgtgcagctccatcagtggctctacttcagggccaggtccatggagatgatcaacctaggtctgtcaagtcaactgtggagtagcttagcttttgttaagtagtagtaaatttggtgtgagacctgttaaattaattatcgatgtgtgctgggggcgggggcgggcatgcaggacagaggcctcccatcgatcgcgaaggattccgaaaggccatctacaccatcgacatcgggcagaacgacgtgtctgcttacatgcacctgccctacgaccaaatgcactgcaagtgctggatccacggcacctcattgaca

SEQ ID NO: 6136 - DNA, 2344 bp, Zea Mays
cagatgcgccgtcgccgttccgccctcgcgcgcgcgcgtcgcgcatccagcctttattactccaaatgcttggagtatatcgcaaaaaccatcatcaacagaccccgccaccccaccaaccgcccttgactccaagcatggcgccatagatgccagcggagggtcctgatcgattcataaacacgcgcgttaatgcatcgcctttctccgcgcgcttggccttttccttttccttttcttttctccccaccaccattgttgtattgtatcgctccgtcggttcgtcgtcgtgcgacgtctcgtcatctcccgacaacgaggagatgctatgctgctactactacggtactacctactgtgggaaaaaaggctgaggccacacctcaacctctcaacctcaactgctgcatgccgcctatacatactacgcacgcagtcgcgcccggccctgcactgcactgcacgggcgcggcgggagatcgagaggagactttgctcgcttttggtgggcatccgcgcggagcgtgaccacagacggtgtagagactagatagatcggaaggggatctaggcatagagagcgaggaggatgaccggcgttgttgcaggcgccggagggggcaacaaggcggcgggcgccacgctgcggctgcaccactaccttgtgatggccggggtggcggcggcgttcgtcctcgcctgcctccggtacgcgccggaccccgcggggtacggcttcctggccgtggcgccgcggccggtggaggccgatgctggtgcccggcgggacaccactcctccaccgcgcccgtcgtcgtcgtcgtcgtcggtggtcatcttcaacttcggtgactccaactccgacacgggcggcatggcggcggtcaacgggatgaacattaacctgcccgagggacgcaccttcttccgccgccccaccggaaggctctccgatggccgcctcgtcatcgacttcatctgtgagagcctgcacacgcctttcctgagcccatacctcaaggcgctgggcgcggatttcagcaacggcgtgaacttcgccatcggcggctcgacggcgacgccggggggctctccattctcgctggacgtgcagctccatcagtggctctacttcagggccaggtccatggagatgatcaacctagaggcctcccatcgatcgcgaaggattccgaaaggccatctacaccatcgacatcgggcagaacgacgtgtctgcttacatgcacctgccctacgaccaagtgcttgccaagatccctggatttgttgctcagatcaagtacaccatcgagacgctgtactcgcacggggcccgcaagttctggatccacggcacgggcgcgctgggctgcctgccgcagaagctggccatcccgcgggacgccgacgacggcgaccagctggacgcccacggctgcctcaagacctacaacaacgccgccaagcgcttcaacgcgctgctcggcgacgcctgcgcccagctccggcgccggatggtggacgcggcgctcgtcttcgtcgacatgtacgccgtcaagtacgacctggtggccaaccacacgacgcacgggatcgagaaacctctcatggcgtgctgcggctacggcgggccgccgtacaactacaaccacttcaaggcgtgcatgtcggcggagatgcagctgtgcgacgtgggcacgcgcttcatcagctgggacggcgtgcacttcacggaggccgccaacgccatcgtcgccgccaaggtgctcaccggcgactactccacgcccagggtcaccatcgccaaactcgtcaactccacgctgcccaacgacgactagctggctggccgatcgatcgatcgatcgtcgtcgtcgtcattctgataaacatactgcaggctgcaggcttcatcgatccatatccaattgtccgtagaaatctacgactagctcattgtagatctgtaatgtgggctaagagatgcatgacgatcgactatagctgcccaactcgtcaagagctggttcaccgccctcgtcatgatcgagctagtttggacgagcaaattccatggcaccgagtgacacaattgatatcctcattgactaatactagtagtcgtactagcaaaaggaagagagggttggaacttggaacaactgagtggttctgtgggggtcgttagtgttagaatttatactgatcgattcctaagtccttagaaaaccaatccgtaactggaagtaaaatcttgatgacgagtagatctgatctactaagaggaataggaaaacatacctttgttgttattattgttggagagttgcagttgccgtct

SEQ ID NO: 6137 - DNA, 3498 bp, Zea Mays
cgggggtctattcgtcagcttcggcgccgcccagttctcccacttccggggccgccaaaattccctccccaattctctcgtgctttctctcgaccgccgccaccgcctcctctcctccgccaccgccaccgccaccgacgcctccaaaaccctacaccccagcagagtcagcaagcgttgtagcaggctgcggccgctgcctcgctgcgatgcaccgcgccttcgaggagatctccgacgaggagtggtctaatcacaccttcgagccctcgcgcgtcctcaagcgccctaatcagcggccctcgcagcctccgccgtcgatcgattcattcatctacaaccccaaggcttgctccgccgccggcaccagcactgcaactgtcgtcctctcggacgacgacagcgacttcgacctaggtgcggacgggggttcccgccgcgctgcgaagagccaacgcgtcctcaagcgcccgcataacggggccccatcgcggccttctctgccagttaaatcgtcccgccgcaatccccaaccatccaatgccgctgccgcctttgggttctccgatagtgaggacgatgacttcgatcttcctacgtcgcctttgaggacgtcaagccttcgccgcaaaggaaagaaccaacgccccctcaaggcccctcagctcaaacctcacttgcgggctcctccgccacccaactcttccagccataatccgaaacggtccaaatttgcctccgatgtgaagctttccaacagtgaggacgacgatttcgacctcacaaaaacgttaagcctcaacagcagcacaaataggcaacacatccagaagcgtccacagcacaagccccgtttgcagcatcgtcagtcctttggctcatcttgcggcaatcagaagcattccaaggctgttgccaccacacggctatctgacagtgatgatgatgacttcaacatcacggacaatgactttgaccttccagcttcgcattcaaggatatcacgcccacgccgcactactagttgccgccggttgacgagttttgctattgacatctctgaggaagacgaagaagaccttgctgatgatgacttcgactaccaagacccaaggcctccccagcaacgctcctctggccgccgctttgtggtcggggacgatgatgacagtgatgtgcctgtagctctggaggaggaggatggggtgaattggtcggagctggagaaggaggacgtagatgaggactacaatggggtgagaagtgtacatgtggaggagcccgagggagatgtagtgggaatggcattgcacaaatgttcacgcatctcgtcagatctgcgcaaagagctttttggttcatcagcgcagaattgtgaaagctactgtgagatagatgcttccacttgtggtattgttactcaggaagacgtaaatgctgcatgcacacgtgagaagtctgggtttgagcctgtgttgaagccttatcagcttgtgggagtcaatttccttctcctactgcatcggaaaagcattggtggagcaattttggctgatgaaatgggtctagggaagacagtgcaggctgtcacttatcttaatctattacagcatctatataatgacccaggtccacatctgatagtttgcccagcttccgtgttggagaattgggaaagagaactcaggaaatggtgcccttcgttttcgatcatcatgtttcatggagctgcaaggactacctactcaaaggaattaagctccttaggaaaggctggctgtccagctccatttaatgtcctccttgttggctactcactttttgaaaggcggagtgctcagcaaaaggatgatcgtagggccctcaaaagatggcgatggagctgtgttttgatggatgaagcacatgttttgaaagataagggtagcttccgatggagaaacctgatggctgttgcgcaacatgctcgccaaaggctaatgctgacaggaactcctctccaaaatgatttgcatgagctatggtcattgttggagttcatgatgcctgatatatttgctactggggatgttgatctgaagaagctgctgaatgcagaagatcgcgaactaatttcacagataaagtccattttagggccatttattcttagacgtttgaagtcagatgtaatgcagcagcttgttcctaaaatccaacatgttaagtttgttgtcatgggcacagagcagtctgaagcttacaaaaatgccataaatgagtaccgtgctgcttgccaggctcgtagtgccaagtcttcagatggcatttccaataatgttgctggattgattccaaagcgacaaatatcaaactattttacacagtttcgtaagattgcgaatcaccctttgcttataaggtgtatttatggtgacaaagatgttgatcgaattgcacggttgctgtaccctaaaggtgcatttggcttcgaatgctccttggagagagcaatacaagagctaaagaactacagtgatttcaatatccaccaactattattgtcatatggtgatgtgggcacaaagggcgctctaaaggatgagcatgtttttgcatcggcaaaatgtcaggccttaggggagcttttaccttctctggcaaatgatggtcacagagtactcatatttagtcagtggaccacaatgcttgacatccttgaatgggcattggaaattataggagttacatatagacgccttgatggagggaccgctgtgacagaaaggcagactatagtggacacgttcaacaacgatctttctatatttgcatgtttactttctacaagagctggaggccagggtctgaaccttgtaggagctgacacagtcattatacatgatatggattttaacccccagatggatcggcaagctgaggaccgttgccatcgcattggacaacagaaacctgtcactatctataggctagtgacaaaggattcagttgatgaaaacatctatgagattgcaaggcggaagctagtactagacgctgcaattcttcattctggagcagagttggacaatagtaccgatgtaccagagaagacaatgggggagattttggcatctcttctcctggtctgaagttctaaccctggagtttcttgaagcgtacgtccaagcatggttctgtcccgagaaggtgacaagccaagaactgacaagaaacactgttatctggaggcgcggcgtcctggtgccctttccatgaaggaaaaggtcttagcacgccctgggtaagttgctattggcatgcatcattgatggaatgagcgctgtcccccgaccatggagctgccctcgtggagggacgtgatttggtagttaattgctggtgggtaaagctgggtttatgggctcagtgctgggccactttgttgctcttgctctctgaatttctgataccgtcgtctggatgtcttgggaatggtccgagccttttctgtttggt

SEQ ID NO: 6138 - DNA, 2280 bp, Zea Mays
tgccaccctgcgtttcatcacgctcgcaggtttctaacaccaaggcacctgccaataaattttgcctactggcactccatatattagaagcaatatgaatccgtatttcttgggattcattctcccttttgtggcatctctgctgcttaccaagagaaagtccgagaagaagaggggggtgccagtcaatgtgggtggagagcctggctgcgccatccgtaaccacagatttgaaagacctgtcaagacgcgctgggaggggatttccacgcttgctgagctatttgagcaatcgtgcaagcagtttgcctctacacccctgtttggcaccaggaagctcattgcaagagaaatggtagtggctgctgatggaagatcctttgagaagctccatttgggaaactatgagtggagaagctatgctgatgcattcaaaactgtctgcaatttcgcttctggtctactgcggattggacacctcaaggatgagcgtgttgctatttttgctgacacacgggctgagtggcagattgcgttgcaggcatgcttcagacaaaatattgcagttgtcacaatctatgcctctttgggggagggagcgctatgtcactcactaaatgagaccgaggtaactactgttgtatgtggacgaaaagaatttaaaaagctgattgatataagtgggcaacttgacactgtgaaacatgtcatctacattgatgaggaaggcatctcagttgaagtgtccttggctgaaaactgtactagctggacagtcaagtcatttgaagaggtagagagtataggcttgcaaagacctgttgaagcaaacttgcctctcccatcagatactgcagtgattatgtatacgagtggaagcacaggaatgcctaagggagtcatgatgagccaccaaaatgtcttggctgtagtttcagctgttatgacgattgtgcctggtcttggcaagaaggatgtgtacctggcatatcttcccctagcacatatccttgaattggcagctgaggcaatcataactggtgttggggcttcaataggttacgggtcacctttgaccctgactgatacatcaaataaaataaaaaaggggacgcaaggtgatgcttctgtactgaagccaacgctaatgactgctgtacctgctatacttgatcgtgttcgtgatggtgtacgaaaaaatgtagatgcaaaaggtgggttagcgaagagattatttgatattgcctatagccgtcgtctagctgctgtcaatggaagctggttgggtgcgtggggactagagaagcttttgtgggatatgctcgtcttccgaaagagtatgatgaaacatctgttggtcgcgttggtccccctttgccttgttcatacattaagttgatagactgggccgaaggtggatacttaacaaccgattcaccaatgcctcggggtgaaatagttattggaggtccaaatgtaactaaaggctacttcaaaaatgaagcaaaaacaaatgaggtgtacaaggttgatgaaagaggcatgcgatggttctactctggcgacattgggcgcttgcacccagatggatgtcttgaaattatcgaccgcaagaaggatatagtcaagcttcaacacggtgaatatgtttctctaggaaaggtggaggctactttgagtgtgtgctcatacgttgaccagatcatgatccatgctgaccccttccacagctactgtgtggcacttgttgtaactgcacagagtgagctgaaatcctgggcctcaaaacaaggaatgacatatagtgatttctcagatttgtgccacaagcaagggacagtcaaagaagtcctccaatctttggtgaaggctggtaagcaagcacggttggagaagtttgagatccctgccaaaatcaagctgataccggagccgtggacgccggagtcaggcctcgtcacggctgccctcaagctcaagagggaggtgatcaagaaggcatacgagatggaccttgcccagttgtacagtcagtgacctgccgctacagtttctcaacgataggggtgatcctggtagctaccggcaacaacagttttttttatttgtacctcgtactatgttcctgtctttcttttaagacaatagttgactggtaaatcagttgccgataatgtgtagccttccattgcccgcccaaagagaactataattagcccttatttatttggctattatcatattcacctcaattcaaatacgttagccattataattgaa

SEQ ID NO: 6139 - DNA, 2423 bp, Zea Mays
tgtccgcgtaatcagctactcagcgtttctaacaccaaggcacctgccaataaattttgcctactggcactccatatattagaagcaatatgaatccgtatttcttgggattcattctcccttttgtggcatctctgctgcttaccaagagaaagtccgagaagaagaggggggtgccagtcaatgtgggtggagagcctggctgcgccatccgtaaccacagatttgaaagacctgtcaagacgcgctgggaggggatttccacgcttgctgagctatttgagcaatcgtgcaagcagtttgcctctacacccctgtttggcaccaggaagctcattgcaagagaaatggtagtggctgctgatggaagatcctttgagaagctccatttgggaaactatgagtggagaagctatgctgatgcattcaaaactgtctgcaatttcgcttctggtctactgcggattggacacctcaaggatgagcgtgttgctatttttgctgacacacgggctgagtggcagattgcgttgcaggcatgcttcagacaaaatattgcagttgtcacaatctatgcctctttgggggagggagcgctatgtcactcactaaatgagaccgaggtaactactgttgtatgtggacgaaaagaatttaaaaagctgattgatataagtgggcaacttgacactgtgaaacatgtcatctacattgatgaggaaggcatctcagttgaagtgtccttggctgaaaactgtactagctggacagtcaagtcatttgaagaggtagagagtataggcttgcaaagacctgttgaagcaaacttgcctctcccatcagatactgcagtgattatgtatacgagtggaagcacaggaatgcctaagggagtcatgatgagccaccaaaatgtcttggctgtagtttcagctgttatgacgattgtgcctggtcttggcaagaaggatgtgtacctggcatatcttcccctagcacatatccttgaattggcagctgaggcaatcataactggtgttggggcttcaataggttacgggtcacctttgaccctgactgatacatcaaataaaataaaaaaggggacgcaaggtgatgcttctgtactgaagccaacgctaatgactgctgtacctgctatacttgatcgtgttcgtgatggtgtacgaaaaaatgtagatgcaaaaggtgggttagcgaagagattatttgatattgcctatagccgtcgtctagctgctgtcaatggaagctggttgggtgcgtggggactagagaagcttttgtgggatatgctcgtcttccgaaaggttcgtgcaatcttgggaggacggattcgctttattcttgcaggtggagcacctctgtcaggggaaacacagagatttatcaatatatgtcttggggctccaatatctcaaggatatggcttgactgaaacctgtgctggtgggacattttcagagtatgatgaaacatctgttggtcgcgttggtccccctttgccttgttcatacattaagttgatagactgggccgaaggtggatacttaacaaccgattcaccaatgcctcggggtgaaatagttattggaggtccaaatgtaactaaaggctacttcaaaaatgaagcaaaaacaaatgaggtgtacaaggttgatgaaagaggcatgcgatggttctactctggcgacattgggcgcttgcacccagatggatgtcttgaaattatcgaccgcaagaaggatatagtcaagcttcaacacggtgaatatgtttctctaggaaaggtggaggctactttgagtgtgtgctcatacgttgaccagatcatgatccatgctgaccccttccacagctactgtgtggcacttgttgtaactgcacagagtgagctgaaatcctgggcctcaaaacaaggaatgacatatagtgatttctcagatttgtgccacaagcaagggacagtcaaagaagtcctccaatctttggctggtaagcaagcacggttggagaagtttgagatccctgccaaaatcaagctgataccggagccgtggacgccggagtcaggcctcgtcacggctgccctcaagctcaagagggaggtgatcaagaaggcatacgagatggaccttgcccagttgtacagtcagtgacctgccgctacagtttctcaacgataggggtgatcctggtagctaccggcaacaacagttttttttatttgtacctcgtactatgttcctgtctttcttttaagacaatagttgactggtaaatcagttgccgataatgtgtagccttccattgcccgcccaaagagaactataattagcccttatttatttggctattatcatattcacctcaattcaaatacgttagccattataattgaa

SEQ ID NO: 6140 - DNA, 3124 bp, Zea Mays
atttgggggcagctgtcagcaatttctcccttttcttcctcatttacttatccctctcgcttcccgcatcccacgccgccgtcctccgcaccgtccacgccgccgtcctccgaccaccgcgactctgccgcagccgccctctgcaccgtcctcgccgcgcaccaccgcgactctgaccgtggcccgcagtcctgcctcgctgccagtactgagcccgcaggcggcgcccgcagccgagccggaggtcgccagcgccgccagaagacttgcttcgagggattccctacgggctcaaggtcaatcaggtgtggtcgcagttttccatttttagggttcagctaaactggccccccatgtcccatggtgtgcccgcccccatgttagaagagttggcgagggaggcaacactcgccgatgtgtctattcttgtagatgggaatgacgcagagctacatgtacatggcaatggcgcagaggtacatgataatggcacagagttacatggcaatggtgcagtgctgaaaagagttgaaatgccccaggatttgggagcgatttcagccaaggaggtgccgctgcatgagggcaaggaggtgatacttgtggatgataatgacagcgggcaggaagatgatgcagagggtaaggtggatgagaacacacctcgtgttgggctgagattcaaaacttatgatgacgctctcaagtactataaacaatatgctgaggattctgggttttcagcaatcattctgaagtcgtcgtatttaaagtcaggggtgtgccgaaggttggtgattggatgtagtcgagctgggagagggagagcaaatgcgtgctatctatcaagagagtcgaccaagataaattgtccagcaaggatatctttgaagttaaggcaagatagatggcttcatattgatgatgctaagctcgagcacaaccatccatacaaccagtccactacatcacttattaattgttataaaaaactaacagatgccaagaatggggtatctgcctcacgattgaagggtcgcaggaacattccagctgaaaaagagcaagggaacttcacggagataggaaggcttaaatttggggaaggagacgatgaatatatccagaagttttttgggaatatgcagaacaagaatccttacttcttctacttagtagatttggataatcagggacgtttgaggaacttattctggagtgatgctaggtcacgggcagcgaatgattactttggtcatgatgttgtttactttgacacctcatacttgacagagaaatatgatttgccacttgttttcttcactgggatgaataatcatggtcagcctgttctgtttggtactgctttactgtcagatctaagtgttgatagttatgcttggttacttagagcatttttatcatgtatgaagggtctctgcccaaaggcaatcatcactgaacattacaatgctattatggatgctgttcaagaagttctccctgaagttagacatcgcctttgcctgtatcgtattatgaaagatgtagcagagaacttgaaagaacatgcagagtttaaaacaataaataaagcactgaagaaagtaacatatggatctttgaagataccagagtttgaaatggagtggaagaagattatcgaagagcatggacttggaggaaatgagtgcctcagttccctttatgagcaccgccaactctgggcacctgcatatctgagagataaattctgggcagggatgtctatttcacagcgaggggagtctatttcctcgtactatgatgggtttgtgtacccaaaaacttctttgaagcaattttttagtaaatatgagatgatattagagaacaaatacaaaaaggagtggcaagcagatgaagaatcttcccataggtctccattgactgtaacaaaattttacatggaagagcagctggctaaagcctatacaataaacatgttcagaaaatttcaagatgagttgaaagcaacaatgtattgcgatggtatgccaattaaagttgatggccgacttgttacttttgaagtgaaagaatgctcatacatggaagatggaaaggacacagagagcaggacctatgaagtttacttttgtaaagaagaacccaaagttgaaattgagtgtgaatgtggtttcgttcagttcactggcatcctgtgtagacatgcattgtctgtgttgaagttgcaggagatatttgagatcccaaaagattatgttctcgatcgctggagaagggactataagaaattatattataatgcaaagaaacctaatgaaatgcctcttagtgacattgttgaacgctctgattatttgttcacacaatgtagtcagctgctcaatctagggtttgtatctgagagtaggtaccttgttgctctgaagttactgagagaaatggaaagatctcttctggatgatggactacctgctagagacaggcagccaatgcttctttcctttgaggctgatgcaccagaaaatggtcaaggcctttttagtcctcagttttcagagggcgtaaagaattctcagtcagcccatgcaaagcgccgtggccggccactgaagaaagtgacagaatctactgatgataccgtaacacagccaaataaagaacaggatttcctacgatcatcatttgtcacagaaaatacaaatatgatccaagggccatcttctgcctcccatcttgaaggtcctcacatgggagtgcaaggaggcattgatttaatggatggaataccaaatctctcatttggtaatcattttggaatggatattaatcaccaacatcaagtacccaaccaccaaaggatgcagcagaacaatttcatacaggtgcaggcagaaccacatgggtttgggaatcagtgggtttaccacccaatgttgcaggataatccagtgctaagaactcctgcacgaagagcagggtagtgtgtattcattgctctaattatttcagttaaactttagattcagacattcagtcatacactacggcatgattttttagcctggttgctgttagtactgttatcaacatcaacagccttttagtcccaagcaag

SEQ ID NO: 6141 - DNA, 2217 bp, Zea Mays
ggggtgcggcgctgcggtggcgcgagacgggctcggcacggcggcggtgtgacggcctcacgcggagtcgcggctgcgacgacggcgtgcatggactcgggtcagcacgggtccggtggagggccgtgcgcccgtgcctaggccgtgctgcccgtttcccatgtatcccttccccatatccatacctgtgttccatatgccatatccaaacgcctactcgcttctcccgtcgtcttccccgctcctacgacctgcgtttgtcgatgctctctccatggcaccctctcctctcccccgttgcacctcctgccatggagctacggtcaccgctgaactcacataactgctcccttacctcctccattagaccaccgccaccgcgctccttggcgcgggcgccccccacgctttccgccaccgcagcagccgtctcgtcgctgtccgccacctcagcggccatctcgtcgccttcctgtccaaagaagaaggttctcgtgcccatcgccatgggtacggaggagatggaggcggtcatcatcgccggtgtccttcggcgggcttccgctgatgtgacgcttgcctctgtggaggacggcatttcagttcgctttatcatttgttgagcaattgtttgggcttcgtgcagctgaagatatggacaagattttgatggcacagactcatgacggtcttgaaaggagtgcagaagtcaatgagcttgagtggtcttgtggtcgcaatcctgatgtccttattccaattgcaaatgggtgtgaagagttggaaatcataattctggttgatattttaagacgggcaaagataaatgttgtattagcttcagttgaaaaatatccagctgttcttggatctcaaaggatgaagattgttgctgataaaagcattatgagtgcctctgattcgatatatgatctaattattcttcctggaggacctgctggggctgagcagctgcacaggtccagaattctgaagaagttactcaaacaacaaatgcaagctggcaggatgtatggaggggtttgttctgctctgaaggttctgcagcaagaaggtttactcgaggataaaacagtgacagctcatcatgctgtagccagtgagctcacgtgccaagttatagaccaacccaatgttgtgatcgacggaaatttgatcactggtaaggggcttgggacagttgttgattttgccctagctatcatcaggaaattttttggccatggacgagccaaagctgtggcgaatggaatagtttttgagtaccctaagagctaaaccccaagaattgctgaaatcacgaaatctacaataaggactaatgaaacacattggctgtaattgaagatttggctatctatacttctgataaaaggtgagctgatgcttttgggatagcaaaagattcctctattgttgcctttctggacagctggactgaaatctccagatccactatatatgttggggtggaccaaatttacacgggaaagcttcagtggcagtcatttcatcagcttcatgacatgatttattggtggataaattacagagtggttgctaactgattatatgcgttcagaggaaactttactgtcttctgtgtgcctgtattggtttgggggcgtattttccaaggtttgaactctgaaggcattattcctcgatgttgccatcatgctatattgctgtgtttcccatctgtgaattcatctgagaagcttgacattctaattccggacttccccagatactgggtttcaagagtgcaggctagcaactgaatcagtatttaattaaatttcgaacttctgtgctgcgttttttttattggaagtcattttgccctctttttctgtgtattgctgatggattgcggttttagcttcatgggttgagcgggacataactgctcacatggttgtccctttaagaagtaacaacagttactgaatttaaattgcagttagcataacggagtagattattttgcttgctgtcttcacgctttcgcaagataaacttttggggtgaagccaagggtcgtgctcctgaaagactggtagtttctgtaaaagcgttgcaattgtagttagccagaagaggagctcctattattgtgtggccatagtcatcagacacaaataaccacagttctgcttgtggactcgtgccgagagagagcgcgagaacagt

SEQ ID NO: 6142 - DNA, 2985 bp, Zea Mays
ggggtgcggcgctgcggtggcgcgagacgggctcggcacggcggcggtgtgacggcctcacgcggagtcgcggctgcgacgacggcgtgcatggactcgggtcagcacgggtccggtggagggccgtgcgcccgtgcctaggccgtgctgcccgtttcccatgtatcccttccccatatccatacctgtgttccatatgccatatccaaacgcctactcgcttctcccgtcgtcttccccgctcctacgacctgcgtttgtcgatgctctctccatggcaccctctcctctcccccgttgcacctcctgccatggagctacggtcaccgctgaactcacataactgctcccttacctcctccattagaccaccgccaccgcgctccttggcgcgggcgccccccacgctttccgccaccgcagcagccgtctcgtcgctgtccgccacctcagcggccatctcgtcgccttcctgtccaaagaagaaggttctcgtgcccatcgccatgggtacggaggagatggaggcggtcatcatcgccggtgtccttcggcgggcttccgctgatgtgacgcttgcctctgtggaggacggcctcgaggtggaggcgtcctgcggctcccgcatcatcgcggacacgcacattgcctcctgcgctgaccaagtgttcgatcttgtggctctcccaggaggaatgcctggttcagtgcgattgagagacagtgacatccttcagaggatcacagttagacaggctgaggagaaaagattgtatggtgctatatgtgctgcaccggcggttgttctagtgccgtggggtctccacaggagaaaaaaggagatctccctgcattccgggcagttgaatcaaatgttcaggtttcaggagagcttactacaagtcgtgggccagggacaacatttcagttcgctttatcatttgttgagcaattgtttgggcttcgtgcagctgaagatatggacaagattttggtttgtcaaaagaaactttaatacttttgtatttcacataatagatttaagcgaatgagtctatagccttatggtcataagagtcttaatagcacctcaggtcgtgcgttcgactttctataggatcgaatttaagtaggctaggttaaaaacaccactcattggtcgtgttcctaagttatatgtgaccacctgagtcactttcagtgagatgcacatggtcgtgtccttggccctttgtggcatgttcagggtagccagccttcagggtgtttctcagattgcatgtgagaagtttcttcttaatgcactgccacatggctctcttttcccacaggtcaagtccttttttcttcattttgtagtctttttgttgatgagagcgctgagaatatctgtgtgcagatcctccagatgagaggctcgtttcaggacctccctaaggacttgtttggctttgtgggaaattaactagttttccacctcaatacatgtggattgcagtgcaatcaaacaagccttaaggattggatgctccaaggacaaaccctggggcgcatgatggcacagactcatgacggtcttgaaaggagtgcagaagtcaatgagcttgagtggtcttgtggtcgcaatcctgatgtccttattccaattgcaaatgggtgtgaagagttggaaatcataattctggttgatattttaagacgggcaaagataaatgttgtattagcttcagttgaaaaatatccagctgttcttggatctcaaaggatgaagattgttgctgataaaagcattatgagtgcctctgattcgatatatgatctaattattcttcctggaggacctgctggggctgagcagctgcacaggtccagaattctgaagaagttactcaaacaacaaatgcaagctggcaggatgtatggaggggtttgttctgctctgaaggttctgcagcaagaaggtttactcgaggataaaacagtgacagctcatcatgctgtagccagtgagctcacgtgccaagttatagaccaacccaatgttgtgatcgacggaaatttgatcactggtaaggggcttgggacagttgttgattttgccctagctatcatcaggaaattttttggccatggacgagccaaagctgtggcgaatggaatagtttttgagtaccctaagagctaaaccccaagaattgctgaaatcacgaaatctacaataaggactaatgaaacacattggctgtaattgaagatttggctatctatacttctgataaaagcttcagtggcagtcatttcatcagcttcatgacatgatttattggtggataaattacagagtggttgctaactgattatatgcgttcagaggaaactttactgtcttctgtgtgcctgtattggtttgggggcgtattttccaaggtttgaactctgaaggcattattcctcgatgttgccatcatgctatattgctgtgtttcccatctgtgaattcatctgagaagcttgacattctaattccggacttccccagatactgggtttcaagagtgcaggctagcaactgaatcagtatttaattaaatttcgaacttctgtgctgcgttttttttattggaagtcattttgccctctttttctgtgtattgctgatggattgcggttttagcttcatgggttgagcgggacataactgctcacatggttgtccctttaagaagtaacaacagttactgaatttaaattgcagttagcataacggagtagattattttgcttgctgtcttcacgctttcgcaagataaacttttggggtgaagccaagggtcgtgctcctgaaagactggtagtttctgtaaaagcgttgcaattgtagttagccagaagaggagctcctattattgtgtggccatagtcatcagacacaaataaccacagttctgcttgtggactcgtgccgagagagagcgcgagaacagt

SEQ ID NO: 6143 - DNA, 4884 bp, Zea Mays
atgcgccatgtatctatcttcacttgaaagcaaactttcgtgtgccgacaaagccttgatgctgcagaggagaggcagcgtttgctcgtgagagtgtgagacggtggtggtggggctccgagggaggacagaatccaatccaaggcgcaagcaggcgagaagggtcaaagaagtgaaagcaaaagcagcaaacaattggggtggtgagtggtgacatggaggatgcaaaagaagatgctgccatggtgccatggccaggcctggccctggcccccagctgcctcacgcgccatattcccttgccttgcccgccgattcgaccccgggcgtatccatccatccatacatatgccgctgcccgctgcaggtggagacggaatatctccgagcggtgctctggtggagtcacacgaaaggaaccgaccggccgcctatctataagagcccccgcgcagctcgcagtggcatctggcattcgatcgatcaccttgctgctgctgctgctgctgtcgctggttggccaggagcacaccagctgcttgctgtgtcgccgtcgtagaagcagccgcgcgctgtcgtcgtcgtctcgtccgcgacgcgaccactccggcggctgctgctgcctctcatgctggccacgccaccgacgcttttgtgataccatacgaagcgccgcggcgggcacgttggagatgtcgtcgctgggtgggcaacagcagcacgggcgcggcgacgaggccagggcgcggctcaggtggacgcgccagctgcacggccgcttcgtgctcgccgtggcccagctcggcggcgcggacaaggcgacgcccaagtccgtgatgagggcgatggccgtgtcggggctcacgctgtaccacctcaagagccacctccagaggtaccggctggcggtgagccaaggcaccgcgtccccggtgggcgagggcgacaacggaggtggcgccaacgagcggtcgtcctcctcggagagccagctggacgagtacgacgacggttccgtggccgacctgcatggtgattcttccgggagcatggcggcgcgggtgcagagagaggcgaaaaggaagcggcatgagcagatgcagatcgaggtgcagcggcacctccagctgaggatcgaggcgcaggggaggtacatgcagtccgtgctgcgccgggcgcaggaggccctcgccgaccacatactgggctcgccggccaccggcgcggaggcagagctctcggagctggcctccgcggtggagaccgggaccgggtgcctgtcctccacttcctgctgctccacctcgccttccccgatgcgccaccgctccgccgacagctgcgtgacgtcctcctcctcctcctcctcctcggaggccgagagccaggcccccgccggcgccaacacgtgcgctggtacgcgcgactgctccgtcgagcggccggtgcagggcgaggagagtacattcctgcagaggcacgaggacgaggacgaggcagaggaagccgacgttggagctgcagctgcagctgaggacgaggacggcacttcgtcagagattgatctcaacaggtaggcgacgaagatcctgatcagaagcatctgtgctgcatgtgcccagcatcggatgattggcggggtggccttcaaggttgggacttgcttgggagggggcaggcttttgagcaacgtctgctgctgaaacagctggctacatacactgcaagtctgcagcgaccacactgctcttcattccataatatatgatatacataatattccaatttatgcaaatggttcttctgcttcatgtatgtacccctgtgaaaaatcatggcttgaactagaggcaggcccagctgcagatgatgcatgccgtatgcttgaggtgcaatgcaatgcaaggatgtatgcatagtacagaactgtagtagcagaggcggatctacgaccggggctgcctgggctgcagccccggtcgcggcccaatacaagcaaataggcccagtacaagtcgcgtctccgcctccagcttccagccgccagccgcgtacctgtgtcagcgcgtcgtgtaatcgcatccagccgccagcccgccagcggagcagctcagcaacgccgaggagatgagcaggaagcgcccaagctgaacagcacggagacaagcggagcagcgctgcgtccagtggcagatctggatttcgcttcgtcctggtctccaggaagccaagcaccggccaccagcccagggttttggatctggccgaccgacagactcaagatgttcctgttcgctctataaaggtaggaatatattatatttcactcgagatcagtcactgtaataatacaattcactagctaaaaatatgtttgtagatatttaagatgaaaatattttgaagcatttttaaggcttaagaactcggaaaataaatttatctcgcaacatcaactcatgaatagtatgtattgattattgtatttctaaaattcgtatcgacttatttttaggctatatatttcttaaatatttaaattatatcttgtttctggtgtcatattaaatattaattatatttttttgtttgatttaaaaaattttatagccttagcttattagcccccgtcttggatcaatcctggatccgccactgtgtagtagctattgttagtgagattatatgccatcagcgaggcaatgccgtgagaactggaaaaaaggtttagaatgtaacttaagatcattataattacaaacctggtatgggcactgagcagcaagttctgttacagcatttcggggataaaccagggttaaacttccccggcgaaatccggtaaaattttcgttatctcagtacgggaaaaaaatcaggaaaactcggtaaaattcgttggtaattttaaaaaatgaaaaaacagtggaaaatatgataaaaactacgtttttccgagcattctgaagttggcgtcgttaaaaatttaaacatatttcataggtaaaaaaattaaaaacacttgacccgttaagaaaccgcgcattccgagtggatttcgccgcatcccgaacgcctgaggtgagatttgttactgatttgatgtttttttttgttgatttcgcaagcggatgtaatgtgtagagaatttatagcgtctattcatgtactgatgaatttcttttaactgttcctgcatatggtttagggtttgtgttagtgcatagatgtgtcatttgcataattattcatcagcacgccagccacgataagacagcgcggacaaccaatcaagcggttagtttcaaaaccccatcccggttgaaaaatacaaaatttggtgaaattcgccaaaaaatcctgttttcgatgacctccaaaaaaaaggaaaggttaaccctgggataaaccaagctatcacatcgggagcaacagccaaaagaaaaagaaaaaaggcatcagtgcagtttttcttatagtgaaaaaaaggtgtgaaaatttggcatgatatgcatacgcgatgaagactaaaaattgaaatggtacgcaaggaatatttgtgttgaaaaatggcaactgggagatttgatggtatttcatttacctaacaacaaaagaaaaccgacaaaccaaagaatcttgcacagctagcaagacaaatgacagaaccctaatccatgcatggttttttctctacaactccgcatcctaaatttttcagagaatatttctgtcttgttgcaacttcacctgcccgcattctctagccaaataatcctacaagatcggacactggattccagaaccatctatagcattcaatgcacattgttcatatttgcgtgccgctgatgggaaaaggaatgagaatatgaacggatcatgtagagacggcctaggctggattccctggctagttgctatggatggttgtgcctatcctcagtgaccaaatatccacactaattaaagaaatctgaccacacaaaataatcgcagcccactatcttgatcggctcggctcatcttgtttcaaaaaatttcaacagctgagacctgagagtttcaactcatttttattgtcaatacctaaagtacatctttgattttttagcaagacgacaaagataaaaaaatattgccatgtaaaaaattatctccgttccaaattataattcatttgactttttcctgtcacgtttggccggctcgttctattcgatttttttgcgaaaaaatgaaaaattcgaagccacatttaaagtatattatatgctaaacaatatcactgcaaaaaatataaataattatgaaatttttgaataagacgagccagtcaaacttaaggtaaaaaggttaaacgaattataaattggaacagagtgttgagcatattttatatcatcctgatgactaggggtggatagcgagccagctcggctcggctcgttaaggtaacgagccacagagtcagcttggctcggctcgtttacgagctcgagctggctcgtttagctcgcgagccagagcagaaaaaaataaaatatacataataattatttttagttaattttaaactaatttaacaatagaaaatagtaattatactcagtttcacaaaccacgtcaaaacaacgccaaattagcataattcatcactcgttaatccacaattcgcatacatgttaatcagtttaatccataattatatttgcatagaccaaattaacacatagacatagttcattaatcattagtttaattcataaaccatagacacctcacatatatataacatgttaatcaattattctgtaaatgatctatatagtttcgttttgctggaatatggtagctcgtttagctcgcgagctggctcgttaa

SEQ ID NO: 6144 - DNA, 1021 bp, Zea Mays
aagttttcaagttttaatacttctagtttttcatggatgactgcctccaacaactgatggatcgaattgatgctggagaaggagagcagttgaagaacttgatactgagtgagagactctcaaaacttgttcggatgaggctggaaatgcaggcaccttatatatctaagtggcctcaagcactgagtattcagtctcaaccagcaaacgtctcaacaagcttgaagcagcgagctatcctggtggatgagatatggcatgctgctggagattctgggtcagatattgattggtatgtgaaacgtacagtgcttggtggtatctactcaacctcagaggtgtatatgttgacagacaattctccaggtttgcagttctcaatagctctatgttggtttccatttcttgctacatactgaagttaattttacccctgcaacaacttaacagcaaggattgaaacgaaagtgtttcactgtttcggagttccgtgatacttggacgtttgtgaaccgcagaataaaggatgctcttgatcttcagaaaaccttccaagaggccgcatacctcgctgaagccgtgggagcaggcatgagcggtaccgtgcagggtgttctcaacagggtcttccagaaccgtagtggatgaactttctttttctcaaacacgtagtgtggatggactaattccgtcttttgcacgctgcacaggataaagcacattttcccgttgaccaactggcgtatgtttataataaagcaaatggtgatgtggttgagatgcatcacgttagggtaggaagtgacgatgtgtatgctggtggtggtgttgaggtgcagatttttcaaatgaatgctttcgtcgcggagtccagtccacacgcatgcgtgcaaagacgtggggcttattataatttgatgccagctgcatgcattacttgcccgggatgccgcgtgatctaagtttagtttgcttgacttgctaaagaaaccaatgaacacgccaagatatcataccaaga

SEQ ID NO: 6145 - DNA, 1678 bp, Zea Mays
ttcaccacggcgatgctctgatcaaaccctcccccctctttgtatattacaaattttttcagctagcctacttttgatctgattaggcataacaccatacaaataagacttttggtttattctgatgactttaaatccttgactttcttctgtcaaatcatttattaacagtgaacttgtgttccacttgtacacttacctagaaatataatgcttggctcttaacaaacaatggtttcattttcttatccattcatgttttaatattcttccctgtgtgctagtgcttcttttgacttttgttcatggtccaccttttatgtgcatatacatttcaggctcaggttttagtgggatatgatgaagctaaaaagtggacgacgaccgttctataaggatgttaagcttgtagactgccgttcaggctcaagtcttccacatttggctgctcaagcaaagtttgcagccatgaacatgaagactgaagatgtcaatcctcgtcgaccagttcaagtcagacgaagtagatgggctcttggtgatgtaaccgaggtgttggatcataattcgtggaggcttgggaagattacagaagtactgaagaatgactattttgtcatcaggctagtgggttgcatccaaccaagagaattccacatatcttgcttgaggattccacatgatcgcaagcagttgactgttggaggcagggaccatcaagcctatgaagaggttgatcactatgctaagaggaaagcagccaatatctgtgcttccaccggtgctagagctgtcaagagaaaactagaagcaagcaggatcccacctaatggtttagtcagaagaacaggcaaggaacagaaagtatctacacatgaatttcgccagttaaccaagaacgagttgcctccaaaggtgtctgctaggaatgccatcgacgaagatgatcattttcataggcctttaagtagcagatacaacgatctgcctgagaaacctctgcgcaccagagaagaggacgagtgctcggtggctagctgcagcgcgaattacacaagtggaacgaaaaggccttcgagcaatacggacactgcttctagtccgccaaagaagaataagaacgcaatggttaggtgcatgaagggtttgcttgatcgattagattctggcagtagcaaagacgtagatacagctacgcagattcaagaaataattgagacaaaaagaaaggagcagcaagctgcagatttcaaggagatagacctgtgtttggcactggcaaaggaatgtggggctactgaggagacagacgagttcttcgtagcttcccaactgtttgcaagctgcaaatttcaaagacatgttttcctaggactgtcttcaaatgcaggaaggatggcttggttgaagaagcactgcaagggctggactttttaaggactttagtttatgtcataggactggcttttctatttgtgtatcatgaagttaagtctatgaactgttagttatatttggtttgtgaactgttatgtacggctgtgatgcataaactttgtgatgcatgaatcttgttgtggttgtgctgcatgattttgcatgatttgtggaggttgtgcatgaatcatttgcatcttagttgtcttgtgaataatttcgaagaagttgtgttgtgacc

SEQ ID NO: 6146 - DNA, 1768 bp, Zea Mays
cgcttcgttgctctaaatttcttctcatccgatttttatttctatttaggagtttgttagttgggatttttttcctccctgtttcttggctgccttgtgatccatctcagatcggtcggaagaagaacagcccaatctcgattcatccgaaataactcatttcatttttttggggagttcctagatcgacaagttgagttggttgggtacttgggttggtttgcttcagtgaaacggccgagagcatatttcttggattccttgcatgctcaggttttagtgggatatgatgaagctaaaaagtggacgacgaccgttctataaggatgttaagcttgtagactgccgttcaggctcaagtcttccacatttggctgctcaagcaaagtttgcagccatgaacatgaagactgaagatgtcaatcctcgtcgaccagttcaagtcagacgaagtagatgggctcttggtgatgtaaccgaggtgttggatcataattcgtggaggcttgggaagattacagaagtactgaagaatgactattttgtcatcaggctagtgggttgcatccaaccaagagaattccacatatcttgcttgaggattccacatgatcgcaagcagttgactgttggaggcagggatgaagaagcacaggacgcacaagacgcacaatggattacacagtacatattgaagtgtcgaaaatggaaaatgactatttgtattgctgctgcagctatgggtatgtactatcttgacaaatattggaacaaagcagattacagaatacctactgagtctggttaccaatgggtgatgagatcattgggcaataggacttactgctatcaaaattatagaatgcataggaatgtgtttgatcttttgcataatgtcctagttgagtcctatggtttgacttcaactagaagaatgtcatcagttgagaccttagcattctttctgtggatgtgtggaactccccaaggcatgaggcaggcagaggacagactatttaggtccaaggaaaccttgagtaggaagtttgagaaagttttgaattgtcttaacaaactagctgttgacaacataaggcctttagatcctgagttcactacaattcaccctaggctgcagtcacgaagattctctcattactttgataattgcataggtgctatagatggcactcatataccagttgtagttccagcaaatcaggttgtgcaacatactggtaggaaagggtacactagtcaaaatgtgttggcaatctgtgacttcaacatgagattcactttcgtcgtcgcgggttggcatggatctgtacatgatatgagagtctttaaagatgcagttgacaaatatggcaacaagtttccccatccaccccaggcaagttttatcttgtggattcgggatatcccaacaggcagggttatctggcgccgtatagaggtacaaagtaccatcttcctgagtttcagcaaggtcctatgccaagaggaccatctacgcagggaacaaatgagttgacaaccacaacagttgatgaagacataaatatgaaccattttagagattcgatagctgatgggttgtttgctagacaatagttttttctttaagttgttgtaagagaaatagtttgtttgctgtgctcgacaattggatctgttccaggcaattgtttgttcccattagattgtgatgagaaatcagtttgcgttgtaatacaaactttgattgttgagaaaacaatttgaa

SEQ ID NO: 6147 - DNA, 3524 bp, Zea Mays
ggacattttcagaaggaattcgaaggagaagtttctgcagagaacctcgggtcgaaatttggtggatatggttcatttttacccacatatcagcgttctcccctgctgccccaatctgaaagcccacacattgcattgaacattagcatgtcaggatcaccttaccaaccatctgctgagagaatggatcaaaacccctctactgtagctgtggagcccatttcccgaaataacggttttggagcaccttcagctagtgattcaatcaagaagaaaaaattcctgagtacaaatgatgaggaatcgattgcaggttccgattctttggacacttcacttagtggtagtgactcaaagtcactcaaatttcagaccaaagtttgtctcagcaatgatctgccaagagaaaatgcagttatctatagtggcctgggccttgatatttctccacgttcgtccatggaggagagtcctaatgggcttgggggactatctcctgagtgcagcaatgtgccatttgaatcacctcggactatcctacaggtcatgacatgccttccagttcctggaggtttcttgttgtcacctctgcatgggaatttgctgcaattaagaaataaagttgctccggtgctaaagaatttggaaacacatttagacatggaaaatgtatctagagcattggaaggacgttcacagtcttttcatccccttggacttatcagaggcaatgtgactaagcagatgaggccttgcagtaagaaaaaagtggcagtggatacaaagactagcaagtacaaaggtgatgctagtgcaaccatgaacaatgaagttaacatccaagtgcctgccagccaaaaagagaagatgaacacgaataacaagaatgagtttgaagttggttctgcaaggaaggagatcccagccagtgtaaagcatggagagttgtatatgcagccggccagcagtgtatcaactatgaatgcatatcatgttcctgcaccagttgtgatcgaggaccactgggtacgctgtgacatatgccataaattgcgtcttctaccctatggaatgaacccttctatgcttccaaaaaaatggaaatgtaccatgcttcactggctgcctgggatgaataggtgtgatatcagtgaggatgaaacaacaggggctctgaatgcattgtttgccattccagcgactgccacaaccctttcttcaggtagtcctcatactgcagttacaggaggtattatggaaaggaacaaggcttatccaaagttaaagactaaaataaggattgatcaagatgaacagaaatcatataagaaaactaaaattgaggcttggcatcaaattgacagaggccaggaccacaggtgtgattcagatggtgtggaagttcctgatgaacacaaagctttacttgcaaaagcaaaagcaatgaagggttcacatgaaactgatgacatgtctttatgcaagaaaaatatcgcttcagggtatgattcatcggaaaacgtcaataatgttaatgctttggatgtaccctttcacagtgagaagaaagaacatccttctgatgtagacatattagatttgtcttgcaagaagaatgcagtgaagaaattggagattcagcttaactctttacattgtataagcaatgggccccagaagaacttgaaggaaaagaagtctaataaattgaagtctaaagagatggcatccaaggaagatagtagacatggaaaagtgcagcatgcagatgccgtgttgtcttctctggggcacctaaattatgaactaggtgctgacaacaagtttgttactgggaaagaaagtctttcagaacaattagaaactttacctgccaagcaagttttggacttggctgaagcccctggaagggatgtagcctatctgcagtcttctacaactgtgagctcaagctcttcgaagatttcaagctccagaagaaacacaaactcgcaagaagcaaatgactctccaattaaatcagcctcttcattgccactgagagatttcagcattaaaatgatttccggtaacagaaaagatggaacagtggatgcttccttgggcaacacacacaatttagcaaggtaccaaaacagtgaagtcattgcattaaattatggtcagcaagctggaaactttgagggggatcaggttgcaggtgaacccaattttcatggttctttgcaaggaatctcggatagcaatatcaaggaaatacctcagtcagctggtgctcaagtctccaatatcactggttttgggaggagtttggataatagtctgccggaggcatcatgtagagaggaccttactgtaaatgatactgttgtaggtagaggagaccatcaactgtgttctggtgaacaaaaggactttaatatggaggttcgtttaccactacctgatcagcattgttttggcaggattaacactgagtctggttctgttcgacatgaaagtaagaacattgaagttcgccaaggtagtggaactgctcagcggctgggcatgttatttaaaaaagaaaaatctcaccttagaatccttaatcgagatattcagaaccatgttaatcaagttgtcaattttcctttgaaaggaggtaaacaaaaggtctgccctacttcagtaaaatctgaatcgttgaaaatgaaagcaaagttagtgaggttcaatgttgaaactggagtgcaacatggcagtgttaagcaagtgacatcaagcactttggacacaagtccaatgaggaaggatggtagtatgattacatttgctctcaaggaagctagagatctaaagcataaagcaaatgatttgaagaataaaggacaagaacttgaaagtacaggtctgtacttcgaggcggctttgaagtttctgcatgttgcgtttcttctagaaactcctagttttgacatttcaagacaaggtggtggaggtcggtcaatgaagatgtactctgaaactgcaaaattatgcaatttttgtgcttatgaatatgaacggtgcaaaaaaatggcttctgctgctttagcgtacaagtgtgtagaagttgcttacctcaaggctgcatactacaaacaccgtactgctacaaaagatcaacaggaacttcaggcagctgtacagataacccgaggtgaaccaccatcgccttctgccctagatattgataatttaaatagccatggatcatcaaatgcctcctcattaaagggtgacaattcacctcatgtgccaggcaatcatttgcctctagctattcacaaccaagcccagctgttgagattacttgcctatgaagcaaaatcgttataggaagaattaaagtgatgaggtacaagaattaggtagaagaatccataggagccgtggatactgtgaaaagagtacaaccagtaagtgtaaatgttgaattaggtagtgtgttgaacttcgttatctgtgccagactaaacaatgcctttatgctttttatatgt

SEQ ID NO: 6148 - DNA, 4072 bp, Zea Mays
gatgaaaaacttcagcatgttctaggacattttcagaaggaattcgaaggagaagtttctgcagagaacctcgggtcgaaatttggtggatatggttcatttttacccacatatcagcgttctcccctgctgccccaatctgaaagcccacacattgcattgaacattagcatgtcaggatcaccttaccaaccatctgctgagagaatggatcaaaacccctctactgtagctgtggagcccatttcccgaaataacggttttggagcaccttcagctagtgattcaatcaagaagaaaaaattcctgagtacaaatgatgaggaatcgattgcaggttccgattctttggacacttcacttagtggtagtgactcaaagtcactcaaatttcagaccaaagtttgtctcagcaatgatctgccaagagaaaatgcagttatctatagtggcctgggccttgatatttctccacgttcgtccatggaggagagtcctaatgggcttgggggactatctcctgagtgcagcaatgtgccatttgaatcacctcggactatcctacaggtcatgacatgccttccagttcctggaggtttcttgttgtcacctctgcatgggaatttgctgcaattaagaaataaagttgctccggtgctaaagaatttggaaacacatttagacatggaaaatgtatctagagcattggaaggacgttcacagtcttttcatccccttggacttatcagaggcaatgtgactaagcagatgaggccttgcagtaagaaaaaagtggcagtggatacaaagactagcaagtacaaaggtgatgctagtgcaaccatgaacaatgaagttaacatccaagtgcctgccagccaaaaagagaagatgaacacgaataacaagaatgagtttgaagttggttctgcaaggaaggagatcccagccagtgtaaagcatggagagttgtatatgcagccggccagcagtgtatcaactatgaatgcatatcatgttcctgcaccagttgtgatcgaggaccactgggcctgggatgaataggtgtgatatcagtgaggatgaaacaacaggggctctgaatgcattgtttgccattccagcgactgccacaaccctttcttcaggaggtattatggaaaggaacaaggcttatccaaagttaaagactaaaataaggattgatcaagatgaacagaaatcatataagaaaactaaaattgaggcttggcatcaaattgacagaggccaggaccacaggtgtgattcagatggtgtggaagttcctgatgaacacaaagctttacttgcaaaagcaaaagcaatgaagggttcacatgaaactgatgacatgtctttatgcaagaaaaatatcgcttcagggtatgattcatcggaaaacgtcaataatgttaatgctttggatgtaccctttcacagtgagaagaaagaacatccttctgatgtagacatattagatttgtcttgcaagaagaatgcagtgaagaaattggagattcagcttaactctttacattgtataagcaatgggccccagaagaacttgaaggaaaagaagtctaataaattgaagtctaaagagatggcatccaaggaagatagtagacatggaaaagtgcagcatgcagatgccgtgttgtcttctctggggcacctaaattatgaactaggtgctgacaacaagtttgttactgggaaagaaagtctttcagaacaattagaaactttacctgccaagcaagttttggacttggctgaagcccctggaagggatgtagcctatctgcagtcttctacaactgtgagctcaagctcttcgaagatttcaagctccagaagaaacacaaactcgcaagaagcaaatgactctccaattaaatcagcctcttcattgccactgagagatttcagcattaaaatgatttccggtaacagaaaagatggaacagtggatgcttccttgggcaacacacacaatttagcaaggtaccaaaacagtgaagtcattgcattaaattatggtcagcaagctggaaactttgagggggatcaggttgcaggtgaacccaattttcatggttctttgcaaggaatctcggatagcaatatcaaggaaatacctcagtcagctggtgctcaagtctccaatatcactggttttgggaggagtttggataatagtctgccggaggcatcatgtagagaggaccttactgtaaatgatactgttgtaggtagaggagaccatcaactgtgttctggtgaacaaaaggactttaatatggaggttcgtttaccactacctgatcagcattgttttggcaggattaacactgagtctggttctgttcgacatgaaagtaagaacattgaagttcgccaaggaggtaaacaaaaggtctgccctacttcagtaaaatctgaatcgttgaaaatgaaagcaaagttagtgaggttcaatgttgaaactggagtgcaacatggcagtgttaagcaagtgacatcaagcactttggacacaagtccaatgaggaaggatggtagtatgattacatttgctctcaaggaagctagagatctaaagcataaagcaaatgatttgaagaataaaggacaagaacttgaaagtacaggtctgtacttcgaggcggctttgaagtttctgcatgttgcgtttcttctagaaactcctagttttgacatttcaagacaaggtggtggaggtcggtcaatgaagatgtactctgaaactgcaaaattatgcaatttttgtgcttatgaatatgaacggtgcaaaaaaatggcttctgctgctttagcgtacaagtgtgtagaagttgcttacctcaaggctgcatactacaaacaccgtactgctacaaaagatcaacaggaacttcaggcagctgtacagataacccgaggtgaaccaccatcgccttctgccctagatattgataatttaaatagccatggatcatcaaatgcctcctcattaaagggtgacaattcacctcatgtgccaggcaatcatttgcctctagctattcacaaccaagcccagctgttgagattacttgcctatacaaatgatatgaacttggcattcgatgcaactcgaaaagcagaatctgtgattgcatctgctactgggtgtccggaaagaggtgttgttggtgatggccttgcttcggtaaaagcagtcttggatcttaacttcaacaatgtgaatgaactactaaggcttgttcgggtttcaatggaatcaataagcagctgatgatgtgttcaaaaatcggaattgcacagaatgtcacacagtgaactgctgatattggattaacatgcaatctgtgctccgtgatgctggttgcagctatgtcagtatatttttacagtgcaaaacaaattaacttgaaatcaagcattccctttcctaaattggaaattatgtgaaccaaggttctggaattcgggagcggtactgctgcatcttgtggtagtgtaaccatgcattgatgtgtgtttgtttcaatgggtcagaggagatcgattgcgattacctgcactacctgtcatgtacgggcgctcgtacgccaggcagcgtcgcgcccgtgacaggcgccgcgcacaggagcgcgatctgggagatcagcaggaacctatggaaagcagtggccaggaaggaaattagaagaatggaaagttgagggaaggaaaggagagattgattagtgattgattaagtgattgattagtgattgattagtgttaccatgtttaggcttgcctaaaataaaggctctaggacagcaggccgatggctatatatgcggcacaaggagacaggaataaagggcagcaaacaagttatctcctctccacctctctctaccatctaagcctacggctgtgggggataaccacgccggagaagacgaaccgcggctacaaccccatgctctaaacgcccaggcccttgacaacctggtatcacaagtcaggcgatcttcgtcctctcgatcccaca

SEQ ID NO: 6149 - DNA, 1887 bp, Zea Mays
cgacgcggggggcaggacgtggcagagcgccgcccaggcggacgccaagtgccgagctaccagggcaccttctttattccgtccttgctcagtcacacctcgctctcgctcactctcgccgtccgcacagccgctcatcgtctcccactgcctgccctctccctgcgccggccggtgccccgacgcgccatgtcgtacaacaaggccccgtccatcaccgccgagaccataaatcccagggtcaagatcatcagatacgcgccttgcggggagatcgtcaagcacgcagcggttctctccctgtgcgacaacccagccctcatggacagagatgaagctcgtgccttattcagcccttgtagcataagaagggccaggaggatcctaaactcgatccccagcaaagacactggtggatatactgattgccggggaatcaaatgcctgcgtcaagtagtagcagatgggattaccgcaagagacggttttccatcgacagcggacgatatctttctgacagatggagccacctcagcgatcaacttgatgatgcagatactcatcaggtctcacgaagacggcatcttgagccctctacccgaataccccttgtactcggcctccatcatactgcacggtggaacgatggtgccgtacaatctcactgaagataacggttggggcctagagatctttgaagtcaagaggtgcttggaagaggctcgttcggctggcctcactgttagagctatggtggtaataaatcccggcaaccctactggacaggtgctatccgtcacaaaccaggaggagatagtagagttttgtcggaaggaaggtctggttatacttgctgatgaggtataccaggaaaatatctacgcagagaacaagaagttccattccttcaagaaagtggccagatcacttgcttacgacgaaaatgacctcaccctagtatcacttcattccgtttcaatgagctatggggagagtggcagaagaggaggctacatggaggtgtctggtgttgcagctaatgtgaaggatcagatttacaaggtggcttctttaacactctgccccaacattgctggccagattctcgtcagccttgcaatggatccaccgaagctaggagatgaatctttcgagtcatttgataaggagaaggaacagatccgttcatccttctgcaagcgagccaagaccctggagaaagctttcagcggcctggagggcgtgacttgcaacaagttagagggtgcgctgtacttgttcccacggctccacctcccctccgctgcgatcagggccgccgatttcgagggagtttcacctgacatattctacgctcaccgcctgcttgatgccaccgggattgccgttgtgccgggctctgggttccaccaggcctctgggacgatccatatccgatgcacgatccttcctgacgaaagaaaaatcgaggcgatggtcgcacgcttgagggcgttccataaggcgttcatgaacgagttccggggctctcagcaggtcatgaacgatctccgtcgctgatggtgtcgatgcatggcacggttaggcctgtgcgtgtgcccatgggcaatcaagacaacttctgagctctggagttgttgtttgttgttctgtgttcttgcttcctcgttgagctgtgccccgtttgtcctcacttatgcagtcagtggtctgtctgtagtctgtactgcttaaagataagctgtgctttcaggaataaaaagtctgcagcttgtgcatatatatactgactccgttctcaaatattatatttatggtaggctagtttatttttaaactaaaacgtgataaataaaaaataaaaagaaagatgagtacataataaac

SEQ ID NO: 6150 - DNA, 1418 bp, Zea Mays
gccacgccgtcttagtcctagtctctgcagagagcgtcgttcctgctgcgccgccttaacgccatttccaagccactcgactcgagagggagctcggtctgctgccgatcgacttcaccgccgcgagaggcacgggcagctaagagagagagagagatgggcagggcgccgtgctgcgacaaggcgacggtgaagaaggggccgtgggcgccggaggaggacgccgtgctcaaggcctacatcgacgagcacggcgccggcggcaactggatacagctcccccacaagatcgggttgaacaggtgtggcaagagctgccggctgcggtggctcaactacctccggcccaacatccggcacggcggcttcacggaggaggaggacaggctgatatgcaacctctacatcagcatcgggggcaggtgggcaacgatcgccgcgcagctgccggggaggacggacaacgacgtcaagaaccactggaacaccaagctcaagcgccgcctgctcggcggcggccggcggccgagggcagaggcgcgcctccagctcctcaccaccagcccattctggcagcaccgcgattccttggcctcgtcggcggcggcgctcgagaggatgcaggtcagcacgcgcctgcaccggcgacaccagcctcgcctcgacgacccggcggcggcggcggcggccttcaccttgtacaacaactacggcagcctcggtgcgccgttatggccgagcctgctgtctccctcttcttctccttcgccggcggcgagtgagacctcggagatactgccgcggcagccaccacccggagctagagtagtgcggcaagagaacatggatggcacctgcacaccgccgctttctactagcaccaccggagagaccatgacgacggcagtaggcgtggagagctcgagctccacgccgacagcaagctctgcctccgccacgtttgggggtagtatggacgatgagatcgacatgttgctccggcagatccagtgcttcggggagaacggcagccacatcggcgacgatggcatagaccactgcttcagggcaacggaccaccacgagacggcgaacggcagcgttggttcttggggctcctgctgctccactcctggagtggattcagtgttccatgactacgtgcaagggcacaaccagtgctagaagctttgcagacatgcactactagctagcagcacgtgtaagatatatacagatatgtgtgattgatgaaattttagttgcggggacgtgtgatatcatattatcgtgcatcgttcggtgtgttttcctttctgaagacttgaatctgcttgatatgcgtttgttgtcaatgctggatgggagtggtacatgtgcttatgtacataagagttttgctatagcgacatatacac

SEQ ID NO: 6151 - DNA, 1424 bp, Zea Mays
gccacgccgtcttagtcctagtctctgcagagagcgtcgttcctgctgcgccgccttaacgccatttccaagccactcgactcgagagggagctcggtctgctgccgatcgacttcaccgccgcgagaggcacgggcagctaagagagagagagagatgggcagggcgccgtgctgcgacaaggcgacggtgaagaaggggccgtgggcgccggaggaggacgccgtgctcaaggcctacatcgacgagcacggcgccggcggcaactggatacagctcccccacaagatcgggttgaacaggtgtggcaagagctgccggctgcggtggctcaactacctccggcccaacatccggcacggcggcttcacggaggaggaggacaggctgatatgcaacctctacatcagcatcgggggcaggtgggcaacgatcgccgcgcagctgccggggaggacggacaacgacgtcaagaaccactggaacaccaagctcaagcgccgcctgctcggcggcggccggcggccgagggcagaggcgcgcctccagctcctcaccaccagcccattctggcagcaccgcgattccttggcctcgtcggcggcggcgctcgagaggatgcaggtcagcacgcgcctgcaccggcgacaccagcctcgcctcgacgacccggcggcggcggcggcggccttcaccttgtacaacaactacggcagcctcggtgcgccgttatggccgagcctgctgtctccctcttcttctccttcgccggcggcgagtgagacctcggagatactgccgcggcagccaccacccggtacaggagctagagtagtgcggcaagagaacatggatggcacctgcacaccgccgctttctactagcaccaccggagagaccatgacgacggcagtaggcgtggagagctcgagctccacgccgacagcaagctctgcctccgccacgtttgggggtagtatggacgatgagatcgacatgttgctccggcagatccagtgcttcggggagaacggcagccacatcggcgacgatggcatagaccactgcttcagggcaacggaccaccacgagacggcgaacggcagcgttggttcttggggctcctgctgctccactcctggagtggattcagtgttccatgactacgtgcaagggcacaaccagtgctagaagctttgcagacatgcactactagctagcagcacgtgtaagatatatacagatatgtgtgattgatgaaattttagttgcggggacgtgtgatatcatattatcgtgcatcgttcggtgtgttttcctttctgaagacttgaatctgcttgatatgcgtttgttgtcaatgctggatgggagtggtacatgtgcttatgtacataagagttttgctatagcgacatatacac

SEQ ID NO: 6152 - DNA, 971 bp, Zea Mays
ccctctatcagatttttatctgccgcgccttctgattttttttccaccgtcggaggcatacgtcccctgccctcttcccatatcggtgctcatctcctgggttgaagccgccgcacagccttcatctccccgcccagcccctctctctggcgagcttgacccggcgtcgagctctggcggtcctcctccgctgccactcgttggaccttgcccctgctgcgccgtcgatagctcaccacaccctctcctccctggctcccgagcttcaaccatggagcttgtcccctctctgctcgtcggtgacctacgtcttctccagccaagccgcagccaagctcatctccatagccgacgcccctgccctcctgctcgccatggctggccatcggacgacgcacagcaacctcgccgtttctgagcccgaccccgccatggagctcacggcgcctactgctgctcagccttgggtgccgtcgctgagctcgccctgctccctggtgcttcctgctcgccgtctctggcgagctggctgtcctgcccgtcatggtggcgcgcgctccatctcccatggcgcccggccgcccctctttgctcatcttcgccgtcgggctgggatattccttggtgctacaactgggaggtgctcgccgagccctgtatcactggttaagcgtgcctgcccacaccgtcgtctttgatctctcgctccggtctccttgttcttcatcgcttgccaggtgttcggtaaaatgggtgaaccggtgaacgtcgttaattttatgttttcgagtcaaattactatctggtgcttatgggtgtttttgtgtgtgagattggagaaaggagatcctcggattttgtggatgatgaagtaagatccatgtgacgttcgccaagtattcggtggattgctcgaactaggattcgttgtcgttttcgtgaattcgtgttgttttgatcatggtgccaaa

SEQ ID NO: 6153 - DNA, 4444 bp, Zea Mays
ttcgtccaccaaaccaaaccaaaccaaaccctactcgcccccgcccgcgccaccgccatggactcgatcgacgcggatctagcgcgcacgcaggaggagcggcgcaagatggaggaggcgctggcggccggcgcgcccatggccgtgtcctccgtcaccttcgacaccgacctctacggtggcgggggcgccgaccccaaccgcttcgcgggctacgacacctccatcccggcctccgaggatgacgccgcggaggacgacacggagttggccaaccccgcaccgcgccgcctcgcggcctacacgggccacgccatcgccgccgccgacctcccgcggtcagccgacgacgacgacgggctgcccaagaggtcccagcgcatcatcgaccgcgaggacgactaccgccgccgccgcctcaaccagatcatctcgccggagcgccatgacccgttcgctgccggggaggccaccccggatccctctgtgcggacctacgccgacgtcatgcgcgacgcggcgctgcagaagaagaaggaggacctgctcagggagattgccaagaagaagaaggaagaggaggagaaggagaaggagaggaaggctgccgcgcctgagcagccggctgctgcgacgaagcggcgtaacaggtgggatcagtcgcaggatggcgatgctgctgccggtggcaagaaggcaaagacatcctcggactgggatgcccccgatgcgactcctgggattgggcgttgggatgccacccctggacgtgttggagacgccacaccctccgtgagaaggaacagatgggatgagacaccgactccaggtaggatggctgatgctgatgcgacgcctgcagctggcggtgccacccctggggcaactccttctggggcttgggatgcgactccaaagcttcctggtggtgtcacgccaacacctggtaagaagcagaggtcaaggtgggatgagacgccagcgagtatggggagtgcaacccctggtggtcttggtgctgcaacacctgttggttatactcctggtccaacgccatttggtgcagagaaccttgccacaccaactcctagccagattgcccgtggaccgattactccggagcagtaccagctcatgcggtgggagcgggacattgaggagaggaacaggcctctcactgatgaggagctcgatgccatgttcccgcaggaaggatacaagattcttgagcccccggcttcctaccagcccatcaggaccccagcaaggaagctccttgcgacaccaacacctctggggacaccactttatgctattccagaggagaatcgtgggcagcattttgatgtgcctaaggagctgcctggtggattgcctctcatgaagccagaggattaccaatactttggaactttgctgaatgaagaagaggaggaggagctatcgccagaggagcagaaggagaggaaaatcatgaaactgttactcaaagtgaagaatggtacacctccacagcgtaaaacagcacttcggcaattgacagacaaagcccgggagttcggtgctggaccactgttcaacaaaatcctgcccttactcatgcagccaacactggaggaccaggagaggcatcttctggtgaaggtcattgatagggtactgtataagctggatgagctggtccgaccttttgtgcacaagattcttgtggttattgaaccactgttgattgatgaggactactatgctcgtgttgaaggcagggagatcatctcaaatcttagtaaagcagctgggcttgctactatgattgctgccatgcgaccggatattgataacattgatgagtatgtgagaaacaccactgctagggcattcagtgtagtggcttctgctttgggcatccctgcccttttaccattcctgaaggctgtctgtcagagtaagaagtcttggcaagctaggcacactggtatcaaaatcgtgcagcagattgctattctcatgggttgtgctgttttgccacatctcaagtcattagtcgagatcattgagcatggtctgagcgatgaaaaccagaaagtccggacaattactgccctttctcttgctgcacttgctgaggctgctgcaccatatggtatagaaagttttgataccgtattgaagcctttgtggaagggtatcagatctcaccgagggaaagtccttgctgccttcctcaaggccattggtttcatcatccctcttatggatgctctgtatgctagttactacacaaaggaggtgatgcaggtcctcattagggagttccaatctccagatgaagaaatgaagaagattgttctcaaggttgtgaaacagtgtgtcagtacagagggtgtggaggctgattatatccgaaatgacatccttccagatttcttcaagcacttctgggtgaggagaatggctctagatcggaggaactataagcagcttgtggaaactacagtggagatagcaaacaaggttggagttgctgatattgtggggaggattgttgaggatctgaaagatgagagcgagccttacagaagaatggtgatggaaacaattgagaaggtagtggccaacttgggtgcttcagatatcgatgctcgtcttgaggagctgcttattgatggtatcttgtatgctttccaagagcagactagtgatgatgcaaatgttatgcttaatggttttggagctgtggttaatgcacttggacaaagagttaagccttaccttcctcagatttgtggtaccatcaagtggcgattgaacaataagagtgcaaaagttaggcagcaagctgctgatctgatctccaggatagccattgtcatgaagcagtgccaggaggagcaactcatgggtcacttgggtgttgtgctgtatgagtacttaggagaagagtatcctgaggtgttgggttcaattcttggagccttgaaggctatcgtcaatgtcatcggtatgactaaaatgactcctccaatcaaggatcttcttcctcgtctaacccccatcttgaagaacaggcatgagaaggtccaagagaactgcattgatcttgttggtaggattgctgatcgtggagcagaatttgtgccagcaagggaatggatgaggatttgttttgagctgctcgagatgttgaaggctcataagaaaggtattaggagagccactgtgaatacatttggttatattgcaaaggctatagggccacaggatgtgctggccaccctgttgaataatttgaaggtgcaggagcggcagaaccgtgtctgcacaactgtagcaattgccatagttgctgaaacttgctcacctttcacagttttacctgcccttatgaatgagtaccgggtcccagagctcaatgtccaaaatggtgttctgaagtcactctctttcctctttgagtatattggtgagatgggtaaagattacatatatgctgtcactcccttacttgaagatgctttaatggatagagatctggttcaccggcagactgctgcatctgctgttaagcacatggctctaggtgttgctggcttgggttgtgaggatgctcttgttcatctgcttaactatgtttggcccaacatatttgagacatctccccacgttataaatgctgtcatggaggcaattgagggtatgagggttgcgctaggtgcagctgtgattttgaattattgcctgcaaggtctcttccatccagcaaggaaagtacgtgaagtttattggaagatatacaactctctgtacattggtgcacaggattcacttgttgcttcttatcctgccctggaagacgatggggataacatatttagtcgcccagagttggcaatgttcgtctgattaacgctggatgtccatgtatcttcatccatattgttgtgaagcttgaactgggtggtatttgagattgttccttccgaagggggtgcacaatgtttaggaatttttattatggtttactgtaatgcaactctaaatcactgtcgtaatctgatctactaaccatttgggaaatgttctgttttcaggatagtccgtgttgaagctgctgaagagttccactggattgaggaccgatttcgaggctgcagaggaccctttaattaatccatcatgatcctatgttttgaaggagaaatgacgatcctagcgtgttgtcttaatattagacgttggcaccttctgtgttcttgaactttttgtgatagccgtggatgttgttgttatatataggtgtggacagtggaacattgcaaacccctctgtgaccttgattcctcgctgtattcctgagatggctgttattagcgtgccttgatcaaatagcttgtgtatctcggtttgcaaaggctactggtgataatccatctgttactcctatgtt

SEQ ID NO: 6154 - DNA, 4531 bp, Zea Mays
tggcgatgtcggggactgcctgaacggattggggacgatcgattgggttggccgtttgggggcgaggcctttgtttggagaagtcggtaccacaaatgaacggcccagatcgcgtctacgacaatcaacggacaagatctagccattgtgccgacatttcaacccaatacacgttgtcactggtcaggggtgaagggcgtctcccgtctccccgcagtcccgctagctagtccccttcccttctccaatctcgcatcgcaattcgcatcttccatttcgtccaccaaaccaaaccaaaccaaaccctactcgcccccgcccgcgccaccgccatggactcgatcgacgcggatctagcgcgcacgcaggaggagcggcgcaagatggaggaggcgctggcggccggcgcgcccatggccgtgtcctccgtcaccttcgacaccgacctctacggtggcgggggcgccgaccccaaccgcttcgcgggctacgacacctccatcccggcctccgaggatgacgccgcggaggacgacacggagttggccaaccccgcaccgcgccgcctcgcggcctacacgggccacgccatcgccgccgccgacctcccgcggtcagccgacgacgacgacgggctgcccaagaggtcccagcgcatcatcgaccgcgaggacgactaccgccgccgccgcctcaaccagatcatctcgccggagcgccatgacccgttcgctgccggggaggccaccccggatccctctgtgcggacctacgccgacgtcatgcgcgacgcggcgctgcagaagaagaaggaggacctgctcagggagattgccaagaagaagaaggaagaggaggagaaggagaaggagaggaaggctgccgcgcctgagcagccggctgctgcgacgaagcggcgtaacaggtgggatcagtcgcaggatggcgatgctgctgccggtggcaagaaggcaaagacatcctcggactgggatgcccccgatgcgactcctgggattgggcgttgggatgccacccctggacgtgttggagacgccacaccctccgtgagaaggaacagatgggatgagacaccgactccaggtaggatggctgatgctgatgcgacgcctgcagctggcggtgccacccctggggcaactccttctggggcttgggatgcgactccaaagcttcctggtggtgtcacgccaacacctggtaagaagcagaggtcaaggtgggatgagacgccagcgagtatggggagtgcaacccctggtggtcttggtgctgcaacacctgttggttatactcctggtccaacgccatttggtgcagagaaccttgccacaccaactcctagccagattgcccgtggaccgattactccggagcagtaccagctcatgcggtgggagcgggacattgaggagaggaacaggcctctcactgatgaggagctcgatgccatgttcccgcaggaaggatacaagattcttgagcccccggcttcctaccagcccatcaggaccccagcaaggaagctccttgcgacaccaacacctctggggacaccactttatgctattccagaggagaatcgtgggcagcattttgatgtgcctaaggagctgcctggtggattgcctctcatgaagccagaggattaccaatactttggaactttgctgaatgaagaagaggaggaggagctatcgccagaggagcagaaggagaggaaaatcatgaaactgttactcaaagtgaagaatggtacacctccacagcgtaaaacagcacttcggcaattgacagacaaagcccgggagttcggtgctggaccactgttcaacaaaatcctgcccttactcatgcagccaacactggaggaccaggagaggcatcttctggtgaaggtcattgatagggtactgtataagctggatgagctggtccgaccttttgtgcacaagattcttgtggttattgaaccactgttgattgatgaggactactatgctcgtgttgaaggcagggagatcatctcaaatcttagtaaagcagctgggcttgctactatgattgctgccatgcgaccggatattgataacattgatgagtatgtgagaaacaccactgctagggcattcagtgtagtggcttctgctttgggcatccctgcccttttaccattcctgaaggctgtctgtcagagtaagaagtcttggcaagctaggcacactggtatcaaaatcgtgcagcagattgctattctcatgggttgtgctgttttgccacatctcaagtcattagtcgagatcattgagcatggtctgagcgatgaaaaccagaaagtccggacaattactgccctttctcttgctgcacttgctgaggctgctgcaccatatggtatagaaagttttgataccgtattgaagcctttgtggaagggtatcagatctcaccgagggaaagtccttgctgccttcctcaaggccattggtttcatcatccctcttatggatgctctgtatgctagttactacacaaaggaggtgatgcaggtcctcattagggagttccaatctccagatgaagaaatgaagaagattgttctcaaggttgtgaaacagtgtgtcagtacagagggtgtggaggctgattatatccgaaatgacatccttccagatttcttcaagcacttctgggtgaggagaatggctctagatcggaggaactataagcagcttgtggaaactacagtggagatagcaaacaaggttggagttgctgatattgtggggaggattgttgaggatctgaaagatgagagcgagccttacagaagaatggtgatggaaacaattgagaaggtagtggccaacttgggtgcttcagatatcgatgctcgtcttgaggagctgcttattgatggtatcttgtatgctttccaagagcagactagtgatgatgcaaatgttatgcttaatggttttggagctgtggttaatgcacttggacaaagagttaagccttaccttcctcagatttgtggtaccatcaagtggcgattgaacaataagagtgcaaaagttaggcagcaagctgctgatctgatctccaggatagccattgtcatgaagcagtgccaggaggagcaactcatgggtcacttgggtgttgtgctgtatgagtacttaggagaagagtatcctgaggtgttgggttcaattcttggagccttgaaggctatcgtcaatgtcatcggtatgactaaaatgactcctccaatcaaggatcttcttcctcgtctaacccccatcttgaagaacaggcatgagaaggtccaagagaactgcattgatcttgttggtaggattgctgatcgtggagcagaatttgtgccagcaagggaatggatgaggatttgttttgagctgctcgagatgttgaaggctcataagaaaggtattaggagagccactgtgaatacatttggttatattgcaaaggctatagggccacaggatgtgctggccaccctgttgaataatttgaaggtgcaggagcggcagaaccgtgtctgcacaactgtagcaattgccatagttgctgaaacttgctcacctttcacagttttacctgcccttatgaatgagtaccgggtcccagagctcaatgtccaaaatggtgttctgaagtcactctctttcctctttgagtatattggtgagatgggtaaagattacatatatgctgtcactcccttacttgaagatgctttaatggatagagatctggttcaccggcagactgctgcatctgctgttaagcacatggctctaggtgttgctggcttgggttgtgaggatgctcttgttcatctgcttaactatgtttggcccaacatatttgagacatctccccacgttataaatgctgtcatggaggcaattgagggtatgagggttgcgctaggtgcagctgtgattttgaattattgcctgcaaggtctcttccatccagcaaggaaagtacgtgaagtttattggaagatatacaactctctgtacattggtgcacaggattcacttgttgcttcttatcctgccctggaagacgatggggataacatatttagtcgcccagagttggcaatgttcgtctgattaactccgtgttgaagctgctgaagagttccactggattgaggaccgatttcgaggctgcagaggaccctttaattaatccatcatgatcctatgttttgaaggagaaatgacgatcctagcgtgttgtcttaatattagacgttggcaccttctgtgttcttgaactttttgtgatagccgtggatgttgttgttatatataggtgtggacagtggaacattgcaaacccctctgtgaccttgattcctcgctgtattcctgagatggctgttattagcgtgccttgatcaaatagcttgtgtatctcggtttgcaaaggctactggtgataatccatctgttactcctatgtt

SEQ ID NO: 6155 - DNA, 1389 bp, Zea Mays
ctagtggaagcttaatttcctgaacatcatgtagctgcaattccatttcctgaaagtcatgtacggcttcacaatgtatctaagattctttcatattgcaacaccaaacgattggctgtggttccacaaggtggcaacacaggtcttgtaggtggaagtgtgcctgttttcgatgaggtgattgttggccttgcaggcatgaataaaattatttcctttgataacgtttattatgccacttgacttgggagcgaaaggtagttgccacatcggtggaaacatttcaactaatgctggcggcctgcgttttatacgctatggttcacttcatggaaatgttcttggtcttgaagttgtcctggctgatgggactatccttgatatgcttactactttaaggaaagacaatactgggtatgatctgaagcacttatttataggaagtgaaggctcgctaggagtagtcaccaaaatatcagtacttacacctgcaaagctatcttcaaccaatgttgcatttctttcctgcaatgattacacaagctgccagaaattactactggcagctaggaggagcttgggtgagatcttgtctgcatttgaattcatggatcatcactgtattgatctggctatgcaacatttggaaggagttcaaaatcctttacctgcatcaccgtacaaattttacgttctagttgaaacaacaggaagtgatgaatcatctgacaagacaaaactggaagcttttttgttgcgttcaatggaagatggtttagtagctgatggagttatcgcacaggatatcagccaagcatcaaacttttggaggatccgtgagggtatatcagaagcatccgtcaaagttggagctgtgtacaaatatgacttgtccataactgtagagaagctctatgatattgttgaagaaatgcgctgccgtcttggtgataatgcagaggtattgggctatggccaccttggagatgggaatctgcatttgaacattgtatcaagcaaatatgacgacaatattctcgcacaaattgaaccattcgtctatgagtggacatcagcacaaagaggaagcatcagcgcagagcatggtttggggctaatgaaagctgagaagattcactacagtaaatcacctgaagcagtgagtgtttccatactgccctgccaacacttggaagtatgttgtacataatgattaagaaaatgaccaatcatcctgagttgtagacttgttttcttttgcatttgagctgtctgtttccttagcaagccttagtagacaggtcacatatgaaaaagattgaatataccaagacttgcatacaccaccttttatgcattgttttgaaatgacacaaaacaagaacgatg

SEQ ID NO: 6156 - DNA, 2456 bp, Zea Mays
cgacgccgcgtctcttctgtcttcgcttcaagtccccaacgattttttttgtacatctaagatgtacagggcctcgaatttcatacctgatcctaatcaggtgctcctagatgccaaaccattaagatcgttagctccaatgttccctgcccccatgggagtcaatgttaatcagtcaagtacaccaccattggtctgtgtcactccggttggtcaattttcagcagggtttggtgcaggcaccagtgctaatggtgccattgatgccacccctatctctgcatacaaaacaaggtcaaacatatcacttgatggtgatgatgatccttactcgggtaaccaaactgaacggaagcctaggagaggccgacctcccggttctggtcgtgatggctcaaatggtaagttaaagcgccctaagcccacttacaagaattttgttgctggcaaagagcttgcctttctggcagcttcatccgatcccagggatatcgtggaagcagttcacatgacctttgaggcactccggcgaagacatctgcagatggatgaaacacaggacgctagcaggcgtgcagacctgaaggctggtgccatcatgatggcaagtaacatcagggcaaattcgggcaagagggtaggaactgtccctggagttgaaataggagatattttctatttcaggatggagctgtgtgtcattggattgcatgcacctagtatgggaggcattgattacatgactagtaaatttggaaacgatgaggattctgtagccatatgtatcgtttccgcaggaggttatgagaatgatgatgatgacacagatgtgctggtatacagtggtcaagggggaaatagtaggaatactgaggagaggcaagaccagaagcttgagaggggtaacctagctcttgagaggagtttgcataggaagaatgagataagggttgtacgtggcttcaaggatccattttgcctaactgggaaaatttacatatatgatggcctgtacaaaattcatgagtcctggaaggagaaaacaaggtctggtatcaattgcttcaagtacaagctgctgcgtgaacctggacagcgtgatggagctgcattatggaagatgactcagaaatggatagatgatcctgctaccagaggcagggttctactagctgatctgtcatctaaggctgaaactattccagtttctcttgtcaatgaggttgaccatgagaaaggacctgcacatttcacctatactaaccaggtcaaatacgtgaggcctctcagttctatgaaaaagctgcagggctgtggatgccagagtgtttgcctgcccggtgatgccagttgtgcttgtggacaacataatggaggtgatttaccctacagttcattaggattattgtcatgccgcaaaccgatgatctatgaatgtggtgaatcttgcaactgttctacaaattgccggaacagagtgacccaaaaagggcccaggctacattttgaggtcttcaggaccaccaatcgaggctggggtcttcgttgctgggaacctgttcgtgctggttcatttatatgtgagtatgctggtgaggtcattgatgaactcaaagttaatttgaatgacaccgaagatgattacatttttcaaactgtatgccctggtgagaagactttaaaatggaattgtggacctgaactattaggtgaagctagcacatatgtatcggctgatgaatttgagccactgcctatcaagataagtgcaaaaaacatgggaaatgtctcccgtttcatgaaccacagttgctcacccaatgtcttctggcaacctgttcaatatgatcatggagatgatggacacccacatataatgttctttgcactgaaacatattccacccatgacagaactgacttatgactatggtgttgctggagctgaatctagtggttcaggctctcgtagaacgaagaactgcatgtgtggatcacaaaactgccgtggactattttgatgggttaagatccttgctctttgtggttaatcatacaaaccactttcagctagatcctttcttagtctccggatgatatgagtatgactgatgattccaattgctgccatgtgtactgtgaagacagcaagttgttgtcaaactgtagaatttctgttgccctgcacggcatggtggccgttctcccaccatttgttcaaatatttatgggggtgtggattgatgtatttcttctgctaatcttgtccaccagctgcaccggtctgtgtaaacttgttatgatccctgtttgctctggacgcctggttgtttaaccgtgactccttggatctggtcatgtaaattatcctggtttaggattatgttgcttttgactcgaattttctgcctcccttgctcgtttcatgtgatgcatcgtggccgatattttcagcaa

SEQ ID NO: 6157 - DNA, 864 bp, Zea Mays
caaccggatacttccaggtccttggactccttgcatatcggtcagtttgccgtcagaacaaggagaaaaaaaggttccggtcttcatcccttccatttccaaaggacgacgctctcaccattcacgaacggcgactgcggatcgatcgtgcgtcgtctcctgcgccggcctcccttccagtcagtttcagatagtgtcttcagtgccatggcgccgctacgccagggagcaagtcggtccgccatggctgggtggggcatgtaccacggactgaaacataaaccaacgcaaatccaatgattgttcaaacaagggacgatacgcatcggacaagaaatggacatcaaatcctccgagaactaaagtttcactcagatcttcgtcgaccttttgagttgcacaatgtctattttgcaacatatgtcgatgtctgagcacagagctcggaagatgtgcgtatcaaccaataggctgtggctgtgcctgcaagatgccctgaaggacgcgcttcttgaaaagtcagaactgcaaaggtgtatgggcgtggaaggtttgcatccatcggatgtgttggaccagcatgttgtagttttgattcgtgctgcgtgcatcgagccatcaggagatctctgcatcggaatcatatctgcacaaagccgtcggaaagatgcaggattcccactgatattttgaaccatcatccaggaggctaggtattagattttatatatacgtggtctgtattttgattaattaaatcaaatcaatcttatacctggtctgtgttttgtttaattaaatcaaataaatcttaagtttatattaaatgtgatggtgttattacctgtttgtttacccccatgg

SEQ ID NO: 6158 - DNA, 1033 bp, Zea Mays
ggatacttccaggtccttggactccttgcatatcggtcagtttgccgtcagaacaaggagaaaaaaaggttccggtcttcatcccttccatttccaaaggacgacgctctcaccattcacgaacggcgactgcggatcgatcgtgcgtcgtctcctgcgccggcctcccttccagtcaggttcaaacaagggacgatacgcatcggacaagaaatggacatcaaatcctccgagaactaaagtttcactcagatcttcgtcgaccttttgagttgcacaatgtctattttgcaacatatgtataattatatatgatgacctactcagctctttgaaaacaatttatgtaaatataacagcttaattctacgtagtggacaaaaatgttgactctgattacagctcagataactctatttcatataaacatatagcatctgcagtaattaaattagaaaaaatttctaacgcgcgcagggcgcgcgccagtgactagtatttgttaggtcctcgcagatgctagcaagatgatagtgttgtagcatggaggaccattgtctctagtgtctgaaatacgagactggcatgcaggtcgatgtctgagcacagagctcggaagatgtgcgtatcaaccaataggctgtggctgtgcctgcaagatgccctgaaggacgcgcttcttgaaaagtcagaactgcaaaggtgtatgggcgtggaaggtttgcatccatcggatgtgttggaccagcatgttgtagttttgattcgtgctgcgtgcatcgagccatcaggagatctctgcatcggaatcatatctgcacaaagccgtcggaaagatgcaggattcccactgatattttgaaccatcatccaggaggctaggtattagattttatatatacgtggtctgtattttgattaattaaatcaaatcaatcttatacctggtctgtgttttgtttaattaaatcaaataaatcttaagtttatattaaatgtgatggtgttattacctgtttgtttacccccatgg

SEQ ID NO: 6159 - DNA, 1226 bp, Zea Mays
cttggactccttgcatatcggtcagtttgccgtcagaacaaggagaaaaaaaggttccggtcttcatcccttccatttccaaaggacgacgctctcaccattcacgaacggcgactgcggatcgatcgtgcgtcgtctcctgcgccggcctcccttccagtcaggttcaaacaagggacgatacgcatcggacaagaaatggacatcaaatcctccgagaactaaagtttcactcagatcttcgtcgaccttttgagttgcacaatgtctattttgcaacatatgtcgatgtctgagcacagagctcggaagatgtgcgtatcaaccaataggctgtggctgtgcctgcaagatgccctgaaggacgcgcttcttgaaaagtcagaactgcaaagctttgctgcatctgatcacaatgatctctcagcttgttgtaacatcgtcttgaccattgtccattgcgctcatatcagctacatacatggttgaaaaacttgttataaaaatgtgccatttcaaacacggattcgattgtaatttgaaaagttaatttatactgtattatctgatgcatcattcactggagaatgggggataacaggattcgggctaagaacatccattcttttcaccgtgtatctctttgcaatctcagccattcgatctactatactatccatagaacatattccaaaggagataagcagccggtgcacgccccttgggagccaaaggaatatatctgtgtgggtatatgtagcttttcatctccaatgatcctggaaagggaattgactacattccaatcttttcccctgcttgttcatgaaattcacgatgtcacatgatttaccgccacttagatctgtcaaaaggctgccatttcttcgttcaggtgtatgggcgtggaaggtttgcatccatcggatgtgttggaccagcatgttgtagttttgattcgtgctgcgtgcatcgagccatcaggagatctctgcatcggaatcatatctgcacaaagccgtcggaaagatgcaggattcccactgatattttgaaccatcatccaggaggctaggtattagattttatatatacgtggtctgtattttgattaattaaatcaaatcaatcttatacctggtctgtgttttgtttaattaaatcaaataaatcttaagtttatattaaatgtgatggtgttattacctgtttgtttacccccatgg

SEQ ID NO: 6160 - DNA, 1399 bp, Zea Mays
tccaggtccttggactccttgcatatcggtcagtttgccgtcagaacaaggagaaaaaaaggttccggtcttcatcccttccatttccaaaggacgacgctctcaccattcacgaacggcgactgcggatcgatcgtgcgtcgtctcctgcgccggcctcccttccagtcagtttcagatagtgtcttcagtgccatggcgccgctacgccagggagcaagtcggtccgccatggctgggtggggcatgtaccacggactgaaacataaaccaacgcaaatccaatgattgttcaaacaagggacgatacgcatcggacaagaaatggacatcaaatcctccgagaactaaagtcgatgtctgagcacagagctcggaagatgtgcgtatcaaccaataggctgtggctgtgcctgcaagatgccctgaaggacgcgcttcttgaaaagtcagaactgcaaaggtgcgcaaaccaaacctctgattgaatgcttccatggctcatagtccctagattcttgtctctatctgatagcccattgtttaccattgtccgttcatgtgtcagctttgctgcatctgatcacaatgatctctcagcttgttgtaacatcgtcttgaccattgtccattgcgctcatatcagctacatacatggttgaaaaacttgttataaaaatgtgccatttcaaacacggattcgattgtaatttgaaaagttaatttatactgtattatctgatgcatcattcactggagaatgggggataacaggattcgggctaagaacatccattcttttcaccgtgtatctctttgcaatctcagccattcgatctactatactatccatagaacatattccaaaggagataagcagccggtgcacgccccttgggagccaaaggaatatatctgtgtgggtatatgtagcttttcatctccaatgatcctggaaagggaattgactacattccaatcttttcccctgcttgttcatgaaattcacgatgtcacatgatttaccgccacttagatctgtcaaaaggctgccatttcttcgttcaggtgtatgggcgtggaaggtttgcatccatcggatgtgttggaccagcatgttgtagttttgattcgtgctgcgtgcatcgagccatcaggagatctctgcatcggaatcatatctgcacaaagccgtcggaaagatgcaggattcccactgatattttgaaccatcatccaggaggctaggtattagattttatatatacgtggtctgtattttgattaattaaatcaaatcaatcttatacctggtctgtgttttgtttaattaaatcaaataaatcttaagtttatattaaatgtgatggtgttattacctgtttgtttacccccatgg

SEQ ID NO: 6161 - DNA, 1918 bp, Zea Mays
cttggactccttgcatatcggtcagtttgccgtcagaacaaggagaaaaaaaggttccggtcttcatcccttccatttccaaaggacgacgctctcaccattcacgaacggcgactgcggatcgatcgtgcgtcgtctcctgcgccggcctcccttccagtcaggtgtgttttttctcagattttttcttctcacgcaactttttctagaaaaaaatggcgttagggttttcgtcttccgttggaatgtctcttcctccttcttccgctgtctcactcgatcttccgatgaactgtctcttcctatttcttccgctgcgcaatcacggcacggagaaaaccagaccaaaaaaggctctgtggttagacttagacgcagaaatgcgaaaacggagaggcgagctcggcccgtgctcgctcacctcggcgcgacggagtgggcggggacggcgcccgctggcaggagtgagagtgggagctggggcgccgttgcttcgccggtgctcgcgacccaccgccgtgcagcatcgcttccgcctccgcttctcctgtcttaatataaagcatacaaacatgtaaaaaccacatatcattcgtttcagcaacaaggtgaggttcattagtgttaaactgtaaaaacgctaatataaacaaagtagcttgattccttaactacctaaattgttttttagtttcagatagtgtcttcagtgccatggcgccgctacgccagggagcaagtcggtccgccatggctgggtggggcatgtaccacggactgaaacataaaccaacgcaaatccaatgattgttcaaacaagggacgatacgcatcggacaagaaatggacatcaaatcctccgagaactaaagtcgatgtctgagcacagagctcggaagatgtgcgtatcaaccaataggctgtggctgtgcctgcaagatgccctgaaggacgcgcttcttgaaaagtcagaactgcaaaggtgcgcaaaccaaacctctgattgaatgcttccatggctcatagtccctagattcttgtctctatctgatagcccattgtttaccattgtccgttcatgtgtcagctttgctgcatctgatcacaatgatctctcagcttgttgtaacatcgtcttgaccattgtccattgcgctcatatcagctacatacatggttgaaaaacttgttataaaaatgtgccatttcaaacacggattcgattgtaatttgaaaagttaatttatactgtattatctgatgcatcattcactggagaatgggggataacaggattcgggctaagaacatccattcttttcaccgtgtatctctttgcaatctcagccattcgatctactatactatccatagaacatattccaaaggagataagcagccggtgcacgccccttgggagccaaaggaatatatctgtgtgggtatatgtagcttttcatctccaatgatcctggaaagggaattgactacattccaatcttttcccctgcttgttcatgaaattcacgatgtcacatgatttaccgccacttagatctgtcaaaaggctgccatttcttcgttcaggtgtatgggcgtggaaggtttgcatccatcggatgtgttggaccagcatgttgtagttttgattcgtgctgcgtgcatcgagccatcaggagatctctgcatcggaatcatatctgcacaaagccgtcggaaagatgcaggattcccactgatattttgaaccatcatccaggaggctaggtattagattttatatatacgtggtctgtattttgattaattaaatcaaatcaatcttatacctggtctgtgttttgtttaattaaatcaaataaatcttaagtttatattaaatgtgatggtgttattacctgtttgtttacccccatgg

SEQ ID NO: 6162 - DNA, 1877 bp, Zea Mays
cggctcctccctctcggattcccaaacgccaaaatctcgttgtcacgcccacgcaccgcatcgttcgcttcctttcgtcaactccacttctcttctccgcgtcacctcctcttcgccgccgccgacgcttcacccggcagccagccatggatgaggagtacgacgtgatcgtactaggcacggggctcaaggagtgcatcctcagcggtctcctctctgtagacggcctcaaggttttgcatatggacagaaatgactactatggaggagattccacctcactcaaccttaatcagctctggaagaggtttagaggggaagacaagcccccagcacatctaggtgcaagcagagactacaatgtggacatggtgccaaaggactttctattatcagtttatgatggcaaatgggacattggttcgaaccctcattcacaccgacgtgacaaagtacttgtcattcaaagctgttgatgggagctatgttttcagcaaagggaagatttacaaggtccctgccactgatatggaggctctgaagtcccctttgatgggcctattcgagaagcgcagagcaaggaacttcttcatttatgtccaagattacaatgaagctgatccaaggacacatcaaggattggaccttactagggtgacaactagagaacttatagcaaaatatggtttaagtgatgatacagtggatttcgttggacatgcacttgctcttcatagagatgatcgttatctcgatgaaccggcacttgatacagtgaaaaggatgaaactatatgcagactctcttgcacgctttcaaggaggctcaccttatatctatccactatatgggttgggtgagctaccacagggttttgcacgactgagtgctgtttatggtggtacttacatgttaaacaagccagattgcaaggttgaattcgatatggaggggaaagtgtgtggtgtcacatctgaaggtgaaactgcaaagtgcaagaaggtggtgtgtgatccttcgtatttacaaaacaaggtcaggaagattggtagagttgttcgtgcaattgctatcatgagccacccaatccctaatacaaacgagtcacactcggttcaaattattttgcctcagaagcaacttggacgcagatcagacatatgagattttctatgatatctatgacagatatgaaccagtgaatgaaccatctcttgataattgctttgtctcgacaagctatgatgccaccacacattttgagacaactgtaacagatgttctgaacatgtatacaatgatcaccggaaagactgtagaccttagtgtggatttgagtgctgctagtgctgccgaagaatactgatttcagtcatagtgtcatgtttatcaaagatcacatcgttggcgacagcacatgacccacattaatgaatggctggaatgcgtttattcggttccagattatatcatgccacatgtactgttctgcgtaatgtctactgggctggcagaactatgcacaatgttgattcaagttgatggatggtggtggttctgttatttactagttagtcgaatggtgcacaacattaaacagtgaccatcatggctgtgtgatgtatcataataactgttcagtaaatttgtgctctgcctgagttctgctcgatgctattgacggcgccctaggtgcttgttccactgtgaatgaaccaagtctgtcacccatcatgttcttcaaagatttttaccaaagatctttttggtctgatgtgtcagaccggctcttgtgatggacgtattgtttgccaaattatgcgattatttttggcagatggagtctggcaactaaattttgtggcacgtgatatggg

SEQ ID NO: 6163 - DNA, 1953 bp, Zea Mays
cggcatccggcatccggctcctccctctcggattcccaaacgccaaaatctcgttgtcacgcccacgcaccgcatcgttcgcttcctttcgtcaactccacttctcttctccgcgtcacctcctcttcgccgccgccgacgcttcacccggcagccagccatggatgaggagtacgacgtgatcgtactaggcacggggctcaaggagtgcatcctcagcggtctcctctctgtagacggcctcaaggttttgcatatggacagaaatgactactatggaggagattccacctcactcaaccttaatcagctctggaagaggtttagaggggaagacaagcccccagcacatctaggtgcaagcagagactacaatgtggacatggtgccaaagtttatgatggcaaatgggacattggttcgaaccctcattcacaccgacgtgacaaagtacttgtcattcaaagctgttgatgggagctatgttttcagcaaagggaagatttacaaggtccctgccactgatatggaggctctgaagtcccctttgatgggcctattcgagaagcgcagagcaaggaacttcttcatttatgtccaagattacaatgaagctgatccaaggacacatcaaggattggaccttactagggtgacaactagagaacttatagcggttgtgctcctacaggatccattgtgaacattgctgcctcgcagattatacatgaatagcattttattccatatgcgaaaatatggtttaagtgatgatacagtggatttcgttggacatgcacttgctcttcatagagatgatcgttatctcgatgaaccggcacttgatacagtgaaaaggatgaaactatatgcagactctcttgcacgctttcaaggaggctcaccttatatctatccactatatgggttgggtgagctaccacagggttttgcacgactgagtgctgtttatggtggtacttacatgttaaacaagccagattgcaaggttgaattcgatatggaggggaaagtgtgtggtgtcacatctgaaggtgaaactgcaaagtgcaagaaggtggtgtgtgatccttcgtatttacaaaacaaggtcaggaagattggtagagttgttcgtgcaattgctatcatgagccacccaatccctaatacaaacgagtcacactcggttcaaattattttgcctcagaagcaacttggacgcagatcagacatatgagattttctatgatatctatgacagatatgaaccagtgaatgaaccatctcttgataattgctttgtctcgacaagctatgatgccaccacacattttgagacaactgtaacagatgttctgaacatgtatacaatgatcaccggaaagactgtagaccttagtgtggatttgagtgctgctagtgctgccgaagaatactgatttcagtcatagtgtcatgtttatcaaagatcacatcgttggcgacagcacatgacccacattaatgaatggctggaatgcgtttattcggttccagattatatcatgccacatgtactgttctgcgtaatgtctactgggctggcagaactatgcacaatgttgattcaagttgatggatggtggtggttctgttatttactagttagtcgaatggtgcacaacattaaacagtgaccatcatggctgtgtgatgtatcataataactgttcagtaaatttgtgctctgcctgagttctgctcgatgctattgacggcgccctaggtgcttgttccactgtgaatgaaccaagtctgtcacccatcatgttcttcaaagatttttaccaaagatctttttggtctgatgtgtcagaccggctcttgtgatggacgtattgtttgccaaattatgcgattatttttggcagatggagtctggcaactaaattttgtggcacgtgatatggg

SEQ ID NO: 6164 - DNA, 882 bp, Zea Mays
aaaaggactaggatccataagggctggtgtatgtgaacccttttattttatatttttactccatccaggtgctggtacaattgaatcttatagatgatgaagtggctaatattaaaattactgttagaagaagacgatgtgctgttgcagttgattgaaatatgtaatgatggttaattgtcttttgctatattagaattagttgctatattggtaatcctttacatggatataatgttgttgcttcatatttacaatttgtgttcttctgtctagttcgatgttggtaatactacttttctcttggtatcaggtaatgagtgctcttgagaagatgacaaggggagttgcttggggggaccttgatattcttgttgttgatatgcccccaggcactggtgatgctcaactatcaatgtcccaaaggcttcggttatctggtgctttaattgtttcaactcctcaagatattgctcttatcgatgctagaagaggagccaacatgttccgcaaagttcaagttccagtacatattctgtcttctctccataactgttggtacctcttgaaatcagtatcagaacaggttcagatgaaggcaaccctattgttgtatcatcacccaactcagcatctgcgcaagcgtacgtaaatgttgcggagaaggtgactcaaaggctcaaggagttagcagaggagcgacggatgggcccagaaatcttactttgagaaattcaggctgcttttctcacacctttccctgtttgacgctacggcgccaaaacaatgtactgataagtagattgctgttggaagtaaactttaaatttcgtcactctgtctgaaaatttactcaaacaaacttctgctgcttctatggtc

SEQ ID NO: 6165 - DNA, 2005 bp, Zea Mays
gaaacggcagaagcgccgagcgcgcgctcctggagtggcagcgaatcttggaaggaaagcagggtcgagaacaggtgtacggacaatggcggaggccgacgagacggcggcgctgcagtacacaccgacgtggatcgtggcggcggtctgctccatcatcgtgctcatctccctcgccgccgagcggggcctccatcacctcggcaagacgctcaagaagaaccatcagaggccgctctacgaggcgctcctcaaggtcaaagaaggggacgatccagaggacatgcattcctcccagctggacagactacatgctgccgtgccaaagaccggggcacgacgaggctcctgctgcggccgcctccatggcggcgcgttttgtcgccgccgacatcctcggtgggatcagttgggcacgcgtgctcagcgagggcgagggtgcggcggcccaagccgggctgtgcgagaaggaggggaaagttccactgctgtcccttgaagccctgcatcagctgcacatcttcatatttgttctggctgtctcgcacgtatttttctgtgcttcaactatgttgccaggatgtgcaaagatacgcaaatggaagaagtgggaggaggaaattcagaaaatcgctgcagaaaatggacccaagaaggtgttacctatgcatcaagtttcatttatcagagaacgttacaagggtattggcacagattccaagacgttgtgttggctgcattcatttcgtaagcagttttatggttcggtagctaaatcagactacgccgcaatgcgtcttggttttatcatgactcactgtcgcgggaacctgaaatttgatttccacagatacatgctggcacttgtggatcttcgtggtgatatttctgctgctcaatgtcaacgcctcaacggtttgcacgcatacttttggatagctttccttcccctggttgtaagtgcagactctgaagtcctttatcgtctgaagttctgaacaaatccaattcagttctttcctcaaaatgcgggacactatatatgttactctcaacactggaaatcaaagatatgtgcttgagcgctgtgtaagcattgaggattactaggcgcttaagggcgtttaattacttgtttgcagcttctgctagccgttggcacaaagctggagcacgtaatagcacagctagcctacgacgtagccgagaagcagacggcgatcgagggcgatctggtcgtgacgccatcggaccagcacttctggttcgggcggccgcgtatcatcctgcacctcatccacttcatcctcttccagaacgcgttcgagctcgccttcttcttctggatactgatgacctatggattggagtcctgcttcatggaccatatcggtttcctggtgcccaggctcgttctcggggtcgtcattcagcttctctgcagctacagcacgctgccgctttatgcaattgttacccagatggggagctactacaagaaggagatcttcaacgagcatgtgcagcagggcgtgctgggctgggcacagaaggccaagaagagatcgggggtgaaggaggtcagctcgccgtccgaacccatgcacggcgaagatgcggcctaggattgggatgccgagggtaacgggtagctggcgaggacaatgatgcagcagttgtaaagcacagactagctgtaatttttttgcagatagaaccgtaaaacactgctcgtaatctttactattataaatcacaccagttttgacagtactcaataacaagtagcagcgagtttccatctaagtagaatgaaatattaaagaagatcggcaagagctttgagaggatatttcaaactaaattattcgaagacacgaaaagatctcataaactaggcttcaaaaagttgacaaaacaaattaaattagagtaggaagaagcaacaaaaaatgtggaagagaaagatgagaaagagaagtagtggtttattagttatatttct

SEQ ID NO: 6166 - DNA, 1201 bp, Zea Mays
tctattctatctagatctcactctttatttcaaacctttaagccataaatagtgaaaaacatctatacgcagattctcctggagatgagcttattcactcattcggaccaagacgacgaacttcgaatttcctcaattttcacgcgagcacctgtttgtatcgccggcggatcggatatattttctcggttcctgctactcctttctttctcgcctgcatccatggtctcgctgctccctcgcgctccctcactcgccttcctcgctaagtccgcctcttcgcagcggccgcctgcgccatccatgtcgtcgcccttctccgccgcttccgtggccgcggggtcagaggcggcagccggcacgaggaagctgcctgtgctgctgttcgacgtcatggacaccctcgtccgggacccgttctaccaccacatccccggcttctttcaaatgtccatgaaggaactactagaagccaagcatccaacggcttggtcagaatttgagaaaggactgattgatgagaatgagctggccaaaaagttcttcaaggatggcagatcgtttgatttgcaaggtctaaaagagtgcatggtgagagcatatgaatacattgatggcgtcgaagatattctttgctgtttgaagaaaaataattatgaaatgcatgcttttacaaattatccagtaccaattaattgaggataagctaaagctctcaaagtatttatcttggacattttgttcttgtagaactggatgataaacattgaagcagctcttagtgtaggaatggttgggttgcagtttaaaagtgctgaggcactacagaaggacttgtgtgctctgggagttgaattatctcctcttgtttgtgaaggtgaagcacaagtacaataaggtcgtgtgtgccctatcttatcttatgctcaaccaaactacaatacgaatgtacataatgtatggtgcccttgctttgtgagctatgtcaataaattattgtgctaatctgaatcgtctatcaaatataactgatatgttaactgcacatattctctcctatgaagagctttttgttgtcagttagtagaggtgaatttgttttatcacaaacatgtgctgtcaagcctcagccaataggccctgtaacttcaattcaggttaatgttcgtcgagtttgaggagtttttatcaaaagttataa

SEQ ID NO: 6167 - DNA, 983 bp, Zea Mays
ctaatataagatgaggaagaaatcaacatgatgggtgctggtctggatgctagctggattccaccgtggtcaagccctgtgatagataatcccagttcctctagtgcagtgaggtcagtaggtctttctggagttcagatgatgatgaggcagttggcttctgtgaccgacagttatgggcatgctgatggtacctggaacctatggcccgagcccatggcagggtcctctcttgttccatccacttcctcgatggtgcctggtagtgcatctgcttccggattgcggctccgtggtagtgcaggcacaggcaatggaagtctttcagaggtactcactatggtagatagggtgcgggaagttctacctcatattcctgacgagctaattatagaggatttgatgaggacaaacaacataaacgcgactgtgaataatcttctgctgatgcaatagtagatacgtcaatacaacatataagtatgacgtttactggctgtaaaagcttataagaaaagtatgtgtatagttaaaggcgagcctgggtgtaacaacactcttcgatcctgtaataaaatccttttctctctctttatttttgtccgcagggatttgtttgtatagtaaccatagctgtataattatcatactcggtatgctataggttagtgtatttagaaaagatcggaataaaatttgttttgggactaaatatcatgcgtctggaaagcacttgtcgacggtacgcatcatcttcaggcttctatttgggcacgcggagttctaacctgcagctatatgttgaacatttgattgaagggaaaatagtgtgtttccaatgcaatgcaaagctatctgttgtgcagtagtaatatgttctgttggtacttgaattgcatgaagtctggtgcggagtttgaaaaaggatctcctggaatatagagtatatatatgcgagcgttgggactatctatttgattgta

SEQ ID NO: 6168 - DNA, 2517 bp, Zea Mays
aatacatatacccctcgctgccgcaacaatttttggatccacttccctccccacgtgttttttgattgttcctccccatgttcctcgcgttcccgtgaggccgtgacgcccccctcggcctcgcctcgccatcgctcgcggcatcgccgcctgccccctttcccccacgcgaataaagcgccggaagcgcgccccccaagcaaagtcctccggcgctcaggatcgggagccaccccctagggttagggctccgttttgcctcgttccggcgtcgaccgatgcgcggcgcatggcgacggtgaactgcctctacgtcgcggccgcctccacggcggtaagcaccgctgctctgcagtggtgggcgtcctcgctcctcgacggcgacgctggggccggcggggatggagactggcttggagccgtgctgcggtcaagggtcaccgtcgcgctcctggcgaatctggcggcccacgtgttcgtcgttgtcatcctcgcgctcaagactatattttttgttcagctaacttctgtagagaccagaaaagtgttggagcacatcattaactatgtacttcacaagggaacttttctcccgctggctgtgcctccaacttctcagcaaattatcctttggtcaacttggttggtcattctttgttcactgaagatgtttcaatcattggccagagaacgtctagagcagctcaatgcttctccctcagcgactccttcaaaatattttcgtgtgtactctgcattgcttctggttttatcagctgatctactttggatgtggctcagtgtagggttctgcagatcctgtaattccaagttgttttggctcctgttctttgagccacttagtattgcctttgatacgctgcagtctatcatggtgcatgggtttcagttatttgacatctggcaacgacatctaatggaaagtggtgcggactttcttgatttccagaaatcttataagcaagcagcaggatctttttctgaatggaggggcaagcttactagggactttggttttgctattgatttgataagcatgttgatgtcatttggtcattactcgatgatcttttggcttcgtggtatggcgtttcatctggttgatgcagttctcttatggaacttgcgtgctcttatagtttcctttttgaagaggattaaaacttacatcaaattacggaaggcacttagttcactcgacggagcacttccagatgctacttatgatgaaatttgtgcatatgatgatgagtgtgccatctgcaggggaccgatgggtcgagctaaaaagttgtcctgcaaccatctatttcatctagcttgtttacgatcatggttggatcaaggattaatggaaggttactcctgcccaacttgtcggagaccgctcgtattgtcatctgaagggcaaacaaggtctccgattgtggaggcagcaaatgttcagcgaatcgcagaacagcttactatggggatgaatcagcagagagtttctggtaatgaacatcctgttgaacagcagaacccttcagatgctgtttggaggggtgctggtctggatgctagctggattccaccgtggtcaagccctgtgatagataatcccagttcctctagtgcagtgaggtcagtaggtctttctggagttcagatgatgatgaggcagttggcttctgtgaccgacagttatgggcatgctgatggtacctggaacctatggcccgagcccatggcagggtcctctcttgttccatccacttcctcgatggtgcctggtagtgcatctgcttccggattgcggctccgtggtagtgcaggcacaggcaatggaagtctttcagaggtactcactatggtagatagggtgcgggaagttctacctcatattcctgacgagctaattatagaggatttgatgaggacaaacaacataaacgcgactgtgaataatcttctgctgatgcaatagtagatacgtcaatacaacatataagtatgacgtttactggctgtaaaagcttataagaaaagtatgtgtatagttaaaggcgagcctgggtgtaacaacactcttcgatcctgtaataaaatccttttctctctctttatttttgtccgcagggatttgtttgtatagtaaccatagctgtataattatcatactcggtatgctataggttagtgtatttagaaaagatcggaataaaatttgttttgggactaaatatcatgcgtctggaaagcacttgtcgacggtacgcatcatcttcaggcttctatttgggcacgcggagttctaacctgcagctatatgttgaacatttgattgaagggaaaatagtgtgtttccaatgcaatgcaaagctatctgttgtgcagtagtaatatgttctgttggtacttgaattgcatgaagtctggtgcggagtttgaaaaaggatctcctggaatatagagtatatatatgcgagcgttgggactatctatttgattgta

SEQ ID NO: 6169 - DNA, 2420 bp, Zea Mays
caatattcctccacggaccacggccaagcggcagcagctgcagctctgagccccgggccctgcccctgcccctgccgcttcctcccctcagcagcatcaggggacgcggacggaggaggaggagaaggcggcgtcatcaggatcaggactgccgctgtcgccaggtccgccatggcatggccatcaaaatgtaaatggttgcccttacagaacagtgggaggtgtctttcgtatactcatgtttgcaaataccacaagatttggaaggacacgaagccatttatttctgcaaaagatgccctgaagaaagaaccaattagcgatgtgattgctttaaaggattccatgaagtactttgatgctgagttcttcaatgattcaaaactacgtgagatggaagatggtgcaaaggaattcaatgtacccgcattcagagaaaatcggaaattggttgcgacggagaatggtgggttgcacaacccttctgttttactcttcaaatcatcatggagtagtggcagtatgacaagtgagactagaagtttcgagtaccctcgtgcgtcttctgtacatcgtccaactaatgatgaagatattgcatttatgtcggtaatcgagcttggagagcttattaggacaaagcaaataacatcacgtgaacttacagatatatttctgaggagattaaagaggtacaatcctgttctagaagctgttattacatatactgaagatttagcatacaaacaagccaaggaggcagatgacttgctggcacaaggaaaatatcttggtcctttgcatggcattccatatggcctcaaagatataattgcggtaccacactataagaccacttggggctcaaggacgtttaaaaaccaagtccttgatagtgaagcttatgtgtacagaagattgaagtccgctggagcagtcctggtagcaaagcttgtcacgggctcacttgcctatgatgacatatggtttgggggaaggacacgaaacccctggaacatcgaggaattctctactggctcatcggcaggtccagcggctagcacctctgcaggaatggttccatttgcaattggttcagaaactgcaggatccatagcatacccagccgctagatgtggagtaactgcattgcgcccaacatttggaacagttgcacgaaccgatgtcatgagcatttctgagagtttggataagcttggtcctttctgtagaagcgcagtagattgtgctgttgtattagacacaattcgcggaacggatgccggtgatccatcatcgcgtgaggttgctttgggtgatccatttcatgttgacatcaccaaactcactgtaggctacctcgatgacgctgagatggaggttgtcgatgttctttcctctaaaggtgtcaagctggtccccttcaagctgaactacactgtggaatcagtccagtccatcctgaacataacgatggacactgatatgcttgcgcacttcgataactggcagcgggaaggacatgatgatgactatgaggcgcaagaccagtggccggtagagcttcgtcgtgcacggttaatcccagcggtagattatatacaggcgcagcgagcacggggcaagttgatcagagaaatcaaagatagcttcactgttgatgcgtttgttggcaacgtgactgactgggagcgtgtctgtctcgggaaccttgttgggatgcctgtggtcgtggtgccgacaggcttgaagagcatcgagaacccgcctaaaggcggtacgaagagaagaacaacagtgacgacaggcatctacgctcctcctgaccacgaccatattgctctggcgctggcaatggcgtaccagtccgtcactgatcacaacaaacagcggccgccgatcgatgatctggggccgaatgatgtcatacaaagatagttcaacctgctcatggaccgcgatgatccggtgatggtagcacgagggtcgttatggttatggaagctgaagttgaagacgatcagtgagccagaatggctggccacctggcagaagacatcagctgtggaagtatcaagtaccaatccacatatgggcttcttcatcagctcaaataactcagcactttttttttctgaagcaggcagcattgtatcaccttaacatacgttacaaaggaggttctggatttcatctggggcctcatcagaccaaaccgagccaaagaactgatcagctagcctagtcattacatgagctgcaacttctctgggagggtatttggtttctatggactagtccatctattttattctaaaaatttttattctattttagttaataaattgtaaaatacgatgagttttcgtatttaataatttagggactaaaaccgaataaataaaagaattaaaaattac

SEQ ID NO: 6170 - DNA, 2630 bp, Zea Mays
ccgggggccaatattcctccacggaccacggccaagcggcagcagctgcagctctgagccccgggccctgcccctgcccctgccgcttcctcccctcagcagcatcaggggacgcggacggaggaggaggagaaggcggcgtcatcaggatcaggactgccgctgtcgccaggtccgccatggacacgaagccatttatttctgcaaaagatgccctgaagaaagaaccaattagcgatgtgattgctttaaaggattccatgaagtactttgatgctgagttcttcaatgattcaaaactacgtgagatggaagatggtgcaaaggaattcaatgtacccgcattcagagaaaatcggaaattggttgcgacggagaatggtgggttgcacaacccttctgttttactcttcaaatcatcatggagtagtggcagtatgacaagtgagactagaagtttcgagtaccctcgtgcgtcttctgtacatcgtccaactaatgatgaagatattgcatttatgtcggtaatcgagcttggagagcttattaggacaaagcaaataacatcacgtgaacttacagatatatttctgaggagattaaagaggtacaatcctgttctagaagctgttattacatatactgaagatttagcatacaaacaagccaaggaggcagatgacttgctggcacaaggaaaatatcttggtaaatatattgctaatcaggctgatcctctaaggcattatcgccactattggcagtacttgcaccttttccctcagcttcatttagaattatgtctggtatacatagcttctcattacaaactgattctcatttggggtgctatctgagttcaggtccacttgaagtttgtgctcatatgactaatatactgactgcctgagaattcttggtgtcaatgttgactagtgtattttttttctctttgagtaattatcttgtccctagccaaaattttgcacttaagctaaaaattcacactgacaaatcctgataccaggtcctttgcatggcattccatatggcctcaaagatataattgcggtaccacactataagaccacttggggctcaaggacgtttaaaaaccaagtccttgatagtgaagcttatgtgtacagaagattgaagtccgctggagcagtcctggtagcaaagcttgtcacgggctcacttgcctatgatgacatatggtttgggggaaggacacgaaacccctggaacatcgaggaattctctactggctcatcggcaggtccagcggctagcacctctgcaggaatggttccatttgcaattggttcagaaactgcaggatccatagcatacccagccgctagatgtggagtaactgcattgcgcccaacatttggaacagttgcacgaaccgatgataagcttggtcctttctgtagaagcgcagtagattgtgctgttgtattagacacaattcgcggaacggatgccggtgatccatcatcgcgtgaggttgctttgggtgatccatttcatgttgacatcaccaaactcactgtaggctacctcgatgacgctgagatggaggttgtcgatgttctttcctctaaaggtgtcaagctggtccccttcaagctgaactacactgtggaatcagtccagtccatcctgaacataacgatggacactgatatgcttgcgcacttcgataactggcagcgggaaggacatgatgatgactatgaggcgcaagaccagtggccggtagagcttcgtcgtgcacggttaatcccagcggtagattatatacaggcgcagcgagcacggggcaagttgatcagagaaatcaaagatagcttcactgttgatgcgtttgttggcaacgtgactgactgggagcgtgtctgtctcgggaaccttgttgggatgcctgtggtcgtggtgccgacaggcttgaagagcatcgagaacccgcctaaaggcggtacgaagagaagaacaacagtgacgacaggcatctacgctcctcctgaccacgaccatattgctctggcgctggcaatggcgtaccagtccgtcactgatcacaacaaacagcggccgccgatcgatgatctggggccgaatgatgtcatacaaagatagttcaacctgctcatggaccgcgatgatccggtgatggtagcacgagggtcgttatggttatggaagctgaagttgaagacgatcagtgagccagaatggctggccacctggcagaagacatcagctgtggaagtatcaagtaccaatccacatatgggcttcttcatcagctcaaataactcagcactttttttttctgaagcaggcagcattgtatcaccttaacatacgttacaaaggaggttctggatttcatctggggcctcatcagaccaaaccgagccaaagaactgatcagctagcctagtcattacatgagctgcaacttctctgggagggtatttggtttctatggactagtccatctattttattctaaaaatttttattctattttagttaataaattgtaaaatacgatgagttttcgtatttaataatttagggactaaaaccgaataaataaaagaattaaaaattac

SEQ ID NO: 6171 - DNA, 1244 bp, Zea Mays
taatatgaaatttttacaagaatgagcccatatactttagggagggctgcatgtgtctgccgcaagtggaaatatactgcacgcaatcctactttgtggcgtgctgcatgcttgaaaacttggcaggttagtgtatttgattttgttattcagtttcatgttcttatgttctcaagcatccaattttatgttgtgaagaggagtggaatggaggcaaactacatgatggttcggtcgttgtatgattcctcttggaggagaatgtggctacagagaccaagaatccgaattgatggtctctatgtgagcaggaacacatacattcatactggagttacagaatggcaattcaagaaaactgtcaatgtggtttgctactaccgttacttaagatttttcccgagcgggaagtttctctataagatctctccagataaagttaaagacgctgttaagtgcatgcatttccgggcatcaaaggctgattgtgtatttaaaggtgactacgtgctgtcagaggatggccagatagaaatggctctcctgtacccagggcatcggtacacgcttgtcaggatgcaccttaggcttaggggcaccacagttggtgcaaataacaggttggatgtactgaagattctaaccaccggagtgaatgcaactgagctgcaaaactggaaaggaagcatactagaactcgttgagggctgggaggaggatgagacgcatgacccggatgtgcctgccgtttcccacagcaggggtttgtcaccctttgtgtttgttccgtttgaggaggctgatacttcggtgttaaacctccccgtggagaagatggactactacgtccctgggtgagctcttcatgacgacgatggccattggagaatgagatgatgggtggtcatgttacaggttaaaatgatgatggccaacgatctccttccctctcagatcccttgctagagcaaatgtgtaaatacagtgttgttttgtttacacttttcggttggtcgcatgctgttgtatgacattatgtttgttgatacctggaaacaggttttattattgttggtgcttgaaaatggtgtgggaggaaactcactatcaaaaaaagtagagctaccctcctgaagtaatgtgggtctgtattattatagaaacaagcagtctatcgttgcgaactttttagtctgtatgtattttcgtattgtacagttaaaccttggcaccgtgcttcgttt

SEQ ID NO: 6172 - DNA, 1144 bp, Zea Mays
tttataatttggacatgagtagtccgtagtcgctaccactatagtggggcacaggcgatcgcatattcgcacccacccatcacacgacaaaatccctcaccctcgtgagtcctgacgtcctcgcccgtgctcgcagttggtagggttctagccatggcgtggagcgccgccgccgtctccaggttcgcagccgcctccccacccgcggcacccatctccgtcaggcttggagccgccgcttctcgctcgtccctgtccttctccagtgggcgccgacgccccgtggccgcgtccctctcgacctctgccaccggaggctgttcagacagagaaggcaccaccagcactaggcccttattctcaggccatcaaagcaaataatcttgtgtttgtttctggagttcttggcttgaatcccgagaccaggaagtttatctctgaaaatgttgaggagcaaactgagcaggttatgaaaaacatgggcgagatattgaaagctagtggtgctaactattcttcagttgtgaagacaacgatcatgtaagtaaatgttctttatgttttgctcaagatattttgatgtcttcaggtgtgattctattattttacctgcaggttggctgatctgcaggatttcaataaagtaaacgagatctatggcaaatatttcccggtgccagcacctgcacgatcaacctaccaagtggcggcgctgccactgaatgcccggattgagattgagtgcatcgctgctctctaatcagatcatccaaccactcattaaatcatcaataagcacccaggaatttgtggtagaggtacctgtaccagttcagtgtctgaaaactgcgggtaacaaacctttgtgtcccggataagtgatgtgtgtgtgtgtgtgagtgaacagtgcatctagtaggagaattgttgcgtggtttgttacttggattcttcgctctttagacaagaagtaccatggcatcaacatcaatagcctactgttttcttcccaataagaatgaattggcttccccaacagatcatggatatagtcgtgcgtaatattgttttataatgtagactatattatttatagagtgaatttaaaataggagatgagatgtgacctaggatggataagctg

SEQ ID NO: 6173 - DNA, 2599 bp, Zea Mays
ggcaaagtagcaattttttcgactgcgagacgacaccgggaagagagaggagccgcccgccgccgcctcaggcctcagtccagacccctcgtctcactcgctccgccgctggcgattggtgaagagagctccgaggtgggctctactcgtcgcggttctcgcgaggtccgccgatccgcgccccgctctggatctctggctgatttgttgttctgcaagggtgtggtatggcacgaaacttgactgagaacaggaccagaaatacactaattgtgattgtggtttttggcctctgttccttcttctatctcttgggtgcttggcagaaaagtggttctggaggaggagacagaatacagaattgggtcaatgagcagaccaaatgtgcacaacttccaaatctgagttttgagacccatcatagtgcatccaaccttccaaatgatactggtagttccaaaatcgaacctttcaaaccatgtgatgagcagtacactgattacactccttgtgaggagcaaaagcgtgcgatgaccttccctagagataacatgatctatcgggagaggcattgtccaccggataaggagaagctttattgcctgatcccagcaccaaagggttatgttgctccttttcgatggccaaagggccgtgattttgttccttatgccaatgtaccacacaagagccttactgttgagaaggctatccagaactgggtgcactatgagggcaatgttttcaggtttcctggtggtggaacacagtttcctcagggtgcagataaatatatagagcagcttgcttctgtcatcccgatagctgaagggaaagtgagaactgcactggatactggttgtggggttgcgagtttgggtgcttacctgttgaataaaaatgttttgaccatgtcatttgcaccacgggataatcatgaggcacaagtacagtttgcattggagagaggtgtccctgcatatattggtgtcctcggatcaataaagctgccatttccatctcgtgtttttgacatggcccattgctcgagatgtttaattccatggagtggaaatgatggtatgtacatgatggaagttgacagagtactaaggcctggtggattttgggtgctatcaggcccacccattggctggaagattcactataaagggtggcaacgttcaaaggaagatcttcggaatgagcaaagaaaaatagaacacttcgcacaacttctttgttggaagaaggtatctgagaaggatggtatcgccatatggacaaagaggttaaatgacaagtcttgctccatgaaacaagataatccaaatggtggtaaatgtgatttgacaagcgacagtgatgtgtggtacaagaagatggaagtttgtatgacccccctacccgaggttaatagtgtagatgaggttgccggtggtcaactagagccttttcccaagaggctttatgcagtacctcctcgtataaccgatggctctgtgcctggtttctcagttgagtcatatgaagaggacaataacctttggcggaaacatgttaaggcttacaagaaaatcaataacttgcttgatactggaagatatcgcaatataatggatatgaatgctggtctcggtagctttgctgctgcactagaatctccaaaagtgtgaaggattttctacttatccaaggacatatgacctcatacattctaatgatatcttcagcttgtaccaaaacaagtgccaatttgaagatatactcctggaaatggacagaatcttacgcccagagggtgcaatcataattcgtgacaaggttgatgttcttgtaaaagtggagaagatagccaatgccatgaggtggaagacaagattggctgatcatgagggtggccctcatgtacctgagaagatactcttcgcggtcaagcaatactggactgctgaaaaaacaagcagctaacgttgttcattttcatttttttctccagtcacagctaacttgccccctggctgtgtttattggaaaaatttctgtcgattatacagcccatgtttgttactgaaaatataaaacaacccccttgagggggagtaaattatgtgggatttagctgtgaacttgggatttgattattccactggtgccgagacgcagaagacatgccaaaaggatcaattggcattgtactagtgactcatatctgatcagacagatgcaactgcttatagttggaaccctgcagcagtccgtcaggaagttatgaactagcagtgaacttatagttttgtataggactcctttgcccctccactcactttttttttgttgtatctcagaatttcatcaactggattgtatctcaacccataaggtcttcctatcctattttattttaattgacaaacattttgggcccaaggatgcaacttgtgaccttggttactaatgagatgataatgttttcttttttgttgtggatgtaagttggttactaatgagatgatatgttttctttttatgtaagttggagcgaaaggggctgagttggttaggtgatctgaattttcatgatgctgtgatgaatgag

SEQ ID NO: 6174 - DNA, 1483 bp, Zea Mays
acgtgtttgattatcactagtcgctggataaaagcatactacgggtctgtgtatggaattgtcgcccaaatgaatcattagcagcatgccagcatgttgtggttttcgtcggctgtgctgcggccaacttgcagcattggatttattggctttcgctggcatctagatgtagccctccccagatgatttattaaccccccacgttctcttgcgtctccacttgtctttacaaatcgactatatgtactgcgcctctattcccgtaagaccaagaaagacctgaacctgatacaccttgcctctccccactaagcttgtttaccacgcttataagacatgggtcaagcactcggcttgattcaagtggatcaatcgacagtagccatcaaggaaacttttgggaagtttgacgaggtcctagagcctggatgccacttcttgccatggtgcatagggaagcaaattgctgggtatctgtcactgcgtgtgcagcagcttgatgtccgctgcgaaacaaagacaaaggataatgtcttcgtcaatgttgtggcatctgtgcaatatcgtgcccttgccgataaggcatctgatgcattttacaggcttagtaacaccagggagcaaatccagtcatatgtttttgatgtcatcagggcaagtgttccgaagatgaacttggatgatgcctttgagcagaagaatgaaatcgccaaagctgtagaaaatgaacttgaaaaggcaatgtctatgtatggatacgagattgtgcagactctgattgttgatattgagcctgatgagcatgtgaagagagctatgaatgagatcaatgcagctgctaggctgaggttggctgccagcgagaaagctgaggcagagaagatactgcagatcaagagagccgaaggtgatgcagaatccaagtacttggcgggtctgggtatcgcaagacagcgccaggctatagtggatgggctcagagacagtgttcttgctttctctgagaatgtgcctgggacctctgcaaaggatgtcatggacatggttctggttacccagtacttcgacaccatgaaggagattggggcctcgtccaagtcctcgtcggttttcatccctcatggaccaggtgctgtcagagacatcgcagcgcagataagggatggtcagctccaggccagtctgctgtgagcacgttggaaaaggcatgcttttgacattcccatcagtaaagaagtacatatacatcatgaggagtaaaaaaaaacttactagcgataatgtgagtacagcttgttcgttctatctatatggtgcatgtgattattattatggagattaatgttaaataggttcgcatgtattgtgccagaacaaggctaaggaccagtttgcgtaaaaaaatattaagaggaaattctgggatttgattactgacgtggatgcatcctgtgagatttttgaggcaataatcaaaagtgcc

SEQ ID NO: 6175 - DNA, 2735 bp, Zea Mays
tggataggtagggagtggataggctttgtcggtaggtcctttttccggggagaattcgcctgagttccttggaataaaagaagatttgcgatccttaagcctcacgttccttgatctgctggtgtggaagttgatcttgatcatgttcccgttcgtcgtcttcatggacaatttgatttggagatggggccggaaatgatagagcaggatggatggtaggaaaaggaaggggaaattcaggaattctctcaggcgtatggctatggagtgcctgtgctctggtgagcagttgaaggcgtcagatgagaccatgcggtcatctgattctacgatcacaaaggatttctcggccagtgggtactcttctcggaatggagagattgagcagtaccttgataatggcaacatagaggaagccgagttgtcgctccgggagggcatttgcctaaattatgaggaagcaagggcattgctaggaaggctagaatatcaacggggtcatgtagaggcagcactccgtgtctttgatgggatagacatatctgcattagttcctaagatgaaaatctcaattgctagaaaaacagaccgtcggaagactcattcacagtgggattccccaccaatgcccttgcatgctgtcagccttctcatggaggccatatatcttaaagcaagagcacttcatgatcttgggaaagataaagaagctgcacaagaatgtagaatgatattggatattgtggaagcagctgtacctgagggcttgccagcaggctttgggaaaggctgtaaattgaacgaaataatatgcaaggctgtagagttgctccctgagctgtggaaatcaggggggttttcacttgaaaccatttcttcatataggaggtcacttcttaataattggaatcttgatggagagacaatagcaaggatacaaaagaaatttgctgtttttctcctatatagtggttgtgaagcacgccctccaaatcttcattctcagttggacggttcatttgtacctcgcaacaatattgaagaggctatccttcttttgatgattcttttgaggaagtccaatctcaagaggattgagcaagatccctctgtgatgcatcaccttacttttgcactgtccatgtcaggacagctaattccactggctggacagtttgaagaattgttacctggtgtgttagacaaaaaagaatggttgtacagcgttgcattgtgttatttagcagaagaagatgatctgagtgccctgaatctactcaaaattatactaaaatctggagaggactccgttcaactcatagaactgcttctagcttcaaaggcttgcattgagatgagtattcatactgaaggtgctttttatgcaaggagagccattgcaaatatgcagggaggatgcaaaccaatggcaggacttgcaaacctattgcttggtgttgcactttctaatcaggctagaagtgcaatatctgatacagatagagcttcttggcagtgcgaagcactggaagcccttgggaatgctgaaaaaaatatacatgggaaagattctagggcattatacagtctcagccttgaaaatgctgtgcagaggaaattagaattagctgccttttatgcaaagaggctggtgaaacttgaggctggatcagagttgaggagttggctccttttagctcgaatacttagtgctcaaaagctgtttgctgatgctgaaacagttgttgatgctgctctagatcaaactgggaaatggtgtcaaggagatttattgcgaaccaaagccagaattcaggctgcacaggggcaatttagagaagcggttgaaacatacacccaacttcttgctatcattcaacttagaacgaaaagtttaactgctggagtttgcttgccaaagggcaacaaggatgataaaggcctggaaacagagacctggtatgatctagctctcttatacctaggtatggcacaatggagggatgcagaggtttgtgtattgaagataagatccatcagtccttattctgcattggcttggcatgctacaggaaaaatatatgaagcaaaaggtcttagaaaagaagctttgggagcttttttcagagccttagatcttgatcctaaacatgtcccaagtttaatatcaactgccactgttctacaacaacttggtgacaggccattgccttctatacggtgcttcctgactgatgcattacaactggatagaactaatcatgttgcgtggttcaatcttggccttctttacaaagaggaaggtggcaggtcagcagctgaggctgctgaatgcttccaagctgctgcttttcttaaagaaactgcaccttcagaacctttcagatgacatctacaggggctatagatcttagctagttgcatcaattaatggtgcagatattggtctctatccagcactaatgaaatggtacaccagataaccagcaaccgattgaattatatcagtcttcttgtctggatatgcccaagtatgaagggcaattgctggtaaacatctggaaagttcaaccatggatatattgagttgtaatgtatgtagctatatggaacatggagtcagtaagtaggatactagaaatgtatacgtataccattgttctcaatgacatctactagggttttatgtgtttttttttgacatctctgcaaataaggcaagatacccagctttg

SEQ ID NO: 6176 - DNA, 667 bp, Zea Mays
tattggagattcgagattgtgattaagaagtgatgtcatgtggaacaaccagacatgtaaactttaatttaagctcaataaccattataagaaaaagggcagacccagtgctggagtcttccacatgagcgtggtttgaggaagggatgaaccgaggcctgccttcccctgcaaatgctgagagactacctcaagccctcgaacccatgatccggtgactcagtgagacaactctcaccactgcaccagaatatgcaccagggctatcccaaagaaacactggtgcgtttccttaaggctagagagtggaacgtaccaaaggctcataaaatgattgttgattctttggattggaggattgaaaatgaaattgatagtgtgctagagagacctatagtcccagtagatttatacagatcaatacgtgattcacaacttattggcctgtcaggatacacaaaggagtggcaatatcgtcggctctgcccgcgcgtcagcgcagcacacgcccagcgaaattcatagcaaaaaagcggcagaatggggcttcaaacccgcgaccagtgactagaagagttgagtctctaacactgcagctgaagttcatttgtgttatactaagaatagatattgtatatatacaaggtcaactacatataagatatat

SEQ ID NO: 6177 - DNA, 1527 bp, Zea Mays
ctgccgccgaggtccgagcaaactgtcgtacagactgagacgcttgcgcgattagcgaacggaacggaaggaagaccgtggaagcaaaggcgcgcaggcgcaagggagcagagcacacggcacaccacaagagaacaaatacacctcaggtggccttcctaagatcgccgactgaatctacctcgcttcgcgcctccagttccgcaccgggactgccgaatctgtgctcgggatcgtctcttccagcggcaatgggggccgattctgaggacgccgtcaagcagctcagcctcctcatggagcaagtggaggccccgctgaagagatcatttcagaatatgcaccagggctatcccaaagaaacactggtgcgtttccttaaggctagagagtggaacgtaccaaaggctcataaaatgattgttgattctttggattggaggattgaaaatgaaattgatagtgtgctagagagacctatagtcccagtagatttatacagatcaatacgtgattcacaacttattggcctgtcaggatacacaaaggagggtctcccagtttttggcattggtgttggacatagcacatatgacaaagcttcggttcactactatgtgcaatctcatatccagattaatgagtaccgtgatcgtataattttgcctaggctgacacaacagtttgagcggcctgttgtcaggtgcataaaagttctggatatgactggtttgaagctatcagcactgagccaaataaagttgatgatttaaattaccctgaaaagacagagacctattatgttgtcaacgttccatacatattttctgcttgttggaaggttgtgaagcccttattgcaggagaggacaaaaaagaaggttaaagttttgagtggctgtgggagagatgaactgctgaagattatggactactcatcacttccccatttctgccgccgggagggctctggatcatcaaagcattcgtctgctgatgttgacgattgctactcccttgaccatccattccacaaagaactatacgaccatatcaaagagcaagcgtcgcgtagggagctcatcaagatgggatcgttgcacgtgagcattcctgagccagacccagaggacgccaagatcgttgaggtcatccaggctgagttccagaagatcggcgagcaggatgagtccaccaccggccacaaggattagcatgccccaaggacggtcatgtgcggagcgccgccggtgacctcccatgaagttgatcgctgctgtccgtttctattttttttggttgacagtccccagttgcgtggggaatatagcagcaagctcatgcatttgcatgatggagtttatgtagttggaggagaggctgagagataaacgagccagtgtatattagatgcacatgaagccataatcgccttttttgttagtatataaccaacacatatttagctgtatattaaagaagccaaaatccatggaatcgcctttttccatacacttgtttgctgtgt

SEQ ID NO: 6178 - DNA, 3824 bp, Zea Mays
cagaaccctaccctcccgagtcccgaccccgtcctgctcgctccgccgtcctccgcccgccacccgccggactgccaaagcccggaggcctgaggcccgagttacgcgaggagcagcagaaccagcggcccggcgcctcatccctcagcggccacgcgagtgcgcggtcggcgcggagtgagcaggagcaacccgtggctggcggtcagtcgctggctagctggagcctggagttgcgacttgcgagcggcgttagaactcgccctacctataatttttgtctgcctccgtcactgattccacccgttctgttgccggcgacagaggcacagagaagcgccaatccgccggcttgatctgaagcatggacaagcaatctgatgggcagggggtggagagggttgctgaggagaagcaacttgatgagaaagagttagaaaggaagctgaaaaaagatcaaaaggcaaaagagaaagaagagaagaaacttaaggcaaaacaaaaggaggcggctaggctccaggcacaagcaacatcagatggaacaaagaagactgagaagaaactaaggaagaaagctgtggaggacgaaaatccagaggatttcatagacccagacactcctaatggacagaaaaaattgctcgcacctcagatggccaagcaatacagtccaagtgcagttgagagatcatggtatgcctggtgggaatcttcaggatattttggggcagattcggcaagcacaaaaccaccatttgttatagttctgccacctccaaatgtgactggagctcttcacatcggtcatgcacttacagtggctatagaggatgctatgatacgatggcgtcggatgtcaggctacaatgctctgtgggtccctggagtggaccatgctggcattgctacacaggttgttgtagagaagaagcttatgcgtgaaaggaagttgacaaggcatgacatagggcgtgaaaaatttgtttctgaagtactcaaatggaaagatcaatatggtggtaccatattgaatcaattgcgccggcttggggcttcacttgattggtcccgtgaggcttttacaatggatgagcaaagatcaaaagccgtaactgaagcttttgtcaggttacataaggaaggcctgatatatcgagattatcgccttgtgaattgggattgcacgcttcgaactgcaatttctgacattgaggttgatcatattgatcttaaagaagaaacaatgttaaaggtccctggttatgccaatcctgtacagtttggtgtattgatatcttttgcctatccgctcgaggaaggacttggtgagattgttgtagcaaccaccagaatagaaacaatgctgggtgatacagcaatagccgttcaccctgaggatgaaaggtataaacatctgcatggaagatacgcagtccaccccttcaatggccgaagactcaaaataatctgtgatgctgagttagttgatcccacttttggtactggggctgtcaagattacccctgcccatgatccaaatgactttgaagttggaaagcggcataaccttgaattcatcaatatcttcacagacgatggaaaaataaatagcaatggaggtgcaaaatttgatggaatgccaaggttcaccgctcgagttgctgttattgaggcgctgaaggaaaaggggttgtataaggacacaaagaagaatgaaatgagcttgggtgtttgttcaagaactaatgatgtagtggaacctatgataaaaccacagtggtttgttaattgcaaccacatggccaaggcgggccttgacgctgtaaggtcgaaaaagattgaaattattccccagcagtatgagcaagactggtacagatggcttgaaaatatacgtgattggtgtgtctcaaggcaactttggtggggacatcgtgtacctgcatggtatgtgacactagaggatgacctggataaaaaccttggttctgcaaatgatcgctggatagtcgcaagaaacgaaagcgatgcaaaccttgaagcgcagaaaaagtatgcaggaaagaaattacgtctagatcaagaccctgatgtgctggatacttggttttcatctggtcttttccccttaacagtacttggttggccatctgataccgctgacctccgtgctttctaccctacatcggtactagaaactggacttgatattctcttcttttgggtagcaaggatggtgatgatgggaatgcaacttggtggtgatgtgccatttcagaaggtttatttacatcctatgattcgggatgcacatggccgaaagatgtcaaaatcacttggtaacgttgttgatcctcttgaggtgataaatggcatgtcgctggatggtcttctgaaacgtttggaagaaggcaatctggatccaaatgaattaaacattgcaagagatgggaagaagaaggattttcctgatggcatagcagaatgtgtctgacaggataaatcttgatattaagagggtggttggatacagacagtggtgcaacaaattatggaatgccatccgttttgcgatgggcaaactgggtgaccattacattccgccggcaactgttgatgtgtctcttatgccaccaatctgcaagtggatactctcggtgcttagcaaggccgttgggaaaaccgtttcctctttagaagcatataagttgtctgacgcaacatctgctatatactcatggtggcagtatcagctatgtgatgtatttatagaagctatcaaaccttacttcttcaacgattctcaagagcttgaatcagcaagagctgcctccagagataccctgtggatttgcctggatactgggctgcgcttgctccacccattcatgccctttgtaacagaagagctctggcagcgtcttccacagcccaaagattcttgtaggaaaggttcgattatgatttcacagtatccatctcttgttgaggaatggagtaatggcagacttgaaaatgaaatggacatcgtcttggatgctgtgaacaaaataaggtctctgaagccaccaacagattcaaatgaaagacgtcctgcttttgcactttgccgaggccaagagatcgctgccacaatccagtgctatcaatctctaatcgtgtatctttcttccatatcacatctcaagatcctgacagagaatgatgaaactccagccgattgtgcaactgctgttgtcaacaaagacttgtctgtgtaccttcagctccaaggagctttaaatgcagacgctgaacgtgaaaagctaaagaagaaaaaagatgagattcaaaagctacagaatgcactggcgcagaaaatggacgcctctggctatcgcgagaaggctccacagagcgtacaggaggaggacatgaggaagctcaccgctttgttggagcaactagaggtcatcagtgaagctgagaagaaattagacgcgaactgagtttgacctctgtttcgaagaggccttgcttgtaccgaagctgaccccatatttttcttgtttgcaaaaaagctcagttatgtgcctgtacgctcgggctcaggtttacagttgatggttcaaatggaagccacatttttgcagcttgtcaagggtgcactggctaatacagaagcatatttattttgtcaagtgaggaacttttgatgatgaatgatgatgcatatggaatctgtcagaaaatgcagtagcggtgctattaaggtttcaggtttgcaagccttacgcatatgcgccagcgtgtcacttgtggaacaactttttttgtccggg

SEQ ID NO: 6179 - DNA, 1004 bp, Zea Mays
aggagactgcaggaggttccaagccagttcaaaccggattgcagctttctggctggaaatagacggcgaccaccgcctcaacggcgacggcagcgacggccaccattcccttccaatctgccgcacaacatggcgtcgtgcgtggccgcgatggcgctggtcggcgcccgacctccgtctcacgccgctggccctgcggcggccagctgcagtggccgcgcgcagcttagcttccaccgcctcggcgctcgcgctcgcgctcgggtcatccgcgcctaccgccgccgcccacaccatccctcttatgtgcctgaggatggggtcgttctggagtggctgaggagcgcggccgccgcgctcgccatagtaacccagatttccgtctcgctgccggcgaacgcggtgctttactcgcctgacactaaggtgccgaggaccggggagctggccctgaggagggcgatccccgctaacccgaacatgaaggccatacaggaatcgctggaggatatttcgtacttgttgaggataccgcagaggaagccgtacggttccatggagggcgatgtgaagaagtccatgaaaatagcaatggacaacaaggaggcaatcctggcaagcattcctgaagagcataaggaggagggtgccaagctatatacctcattactcgaagagaagggtggtttgcagactctcttgaaatatattaaggagaataaccctgacaaactttctatagcacttgcttcatcacttgacactgttgctgaattggagctgttacaggctcctggtctgtcctttctcctgcctcaacagtatatagaatatccaaggctgacaggaagaggagttgttgaattcacagttgaaaaaggtgatggttcaacattctttccaactggtggtggtgaaccgaaaagtgttgctacaattcaggtcgttattgatgggtactctgccccactgactgctggaaactttgcaaaattggaaaaaaa

SEQ ID NO: 6180 - DNA, 1366 bp, Zea Mays
acttgcaaggtttcaggtcaagaaaaagcagttcttccacaacttcatgaccatcatgtccttcggcgtgttcggcgttttcatctcaggtgcaatagtttcggcaggctgctattggctcttcccgaaagtcgggtttggagaacttggtgcggtagattatttagcactgggagccatattttcttcaacagacaccgtgtgcacgttgcaggtcataaaccaagatgagacaccaaggctgtacagcctggtgtttggagaaggagttgtcaacgatgcaacggcggtcgttcttttcaatgccatcaaggatctcgatatcagtcggctcaagggtggggttgtgctaaaagtgatatttgacttcctctatctctttgcaaccagcactgtcctcggaatctcaatcggtctagtaactgcatatgttctcaaagctctgtattttggtaggcattcgaccgatagagaggttgccttgatggctctcatggcctatctatcgtatatgctggcagagttgctagagctgagtggaattttgaccgtgttcttttgcggcattgtcatgtcccattatgcatggcacaacgtgacagagagctcaaggattacaacaaagcatatatttgcaacattatctttcattgccgagacattcatcttcctttacgtcggtatggatgctcttgacattgataagtggaggacatcaaaggaaagcttcaagacatccatcggtatctttggcatcctcatattgctcatactactgggacgagtggcatttgttttccctatatccattttgtcaaatatcatgagtggaagttctgaaagaaccccgatcacattcaagcaccaggtgtaacatcggatccagttcatgccaccatcatcactagcacaataatcgtcgtcttcttcaccactctggtgtttggcttcttgaccaggcccctgatcagtggcatgctcccgcaccagtcgagggcgctgtccagaggccatagcacaggcagcaactccccgaaggatgacttcaccctgccgttcctgtcgggcgatgaaggcgcgtcaggcagcggtatcgtcttggagcaagccaagaggagcttgtctatgatgctggagaggcccgtccacacggttcacatctactggaggaagttcgatgacaggttcatgaggccaatctttggtggaccgcggtcgcactgactgcaggtgcatataagaggagttagtttctctgaattctgtcagcatagttcgcccatggcactgtaaagttgataacactgaatgctttcaagcaactctttattatttttagtacttatattacatcactgcaatctta

SEQ ID NO: 6181 - DNA, 1809 bp, Zea Mays
tgtttccaaggcacccccctggcccctggctacgcgccaaaatcgtccctcacacggcggcagcaaaaacagaggacacgggtgcgagagacatgcgacagagaatccatggcggcggcggcgtggtgggagacgctggtggtggcagcggcggcggatggaaccggtgggagcagcaccacggtggtgtccatctgcatgttcacgacggtgctgtgcctgtgcctcgtcgcgggccacctcctcgaggagaacaagggtgcatcataggagtgatcgtatttctgctgaccaaggggaagcactcacacatcctgcggttcgatgagcagctcttcttcatctacgtgcttccaccgataatcttcaacgccgggtttcaggtcaagaaaaagcagttcttccacaacttcatgaccatcatgtccttcggcgtgttcggcgttttcatctcaggtgcaatagtttcggcaggctgctattggctcttcccgaaagtcgggtttggagaacttggtgcggtagattatttagcactgggagccatattttcttcaacagacaccgtgtgcacgttgcaggtcataaaccaagatgagacaccaaggctgtacagcctggtgtttggagaaggagttgtcaacgatgcaacggcggtcgttcttttcaatgccatcaaggatctcgatatcagtcggctcaagggtggggttgtgctaaaagtgatatttgacttcctctatctctttgcaaccagcactgtcctcggaatctcaatcggtctagtaactgcatatgttctcaaagctctgtattttggtaggcattcgaccgatagagaggttgccttgatggctctcatggcctatctatcgtatatgctggcagagttgctagagctgagtggaattttgaccgtgttcttttgcggcattgtcatgtcccattatgcatggcacaacgtgacagagagctcaaggattacaacaaagcatatatttgcaacattatctttcattgccgagacattcatcttcctttacgtcggtatggatgctcttgacattgataagtggaggacatcaaaggaaagcttcaagacatccatcggtatctttggcatcctcatattgctcatactactgggacgagtggcatttgttttccctatatccattttgtcaaatatcatgagtggaagttctgaaagaaccccgatcacattcaagcaccaggttgttatttggtgggctgggctcatgagaggtgctgtttccattgcactagcatacaatcagttcacattttcaggtgtaacatcggatccagttcatgccaccatcatcactagcacaataatcgtcgtcttcttcaccactctggtgtttggcttcttgaccaggcccctgatcagtggcatgctcccgcaccagtcgagggcgctgtccagaggccatagcacaggcagcaactccccgaaggatgacttcaccctgccgttcctgtcgggcgatgaaggcgcgtcaggcagcggtatcgtcttggagcaagccaagaggagcttgtctatgatgctggagaggcccgtccacacggttcacatctactggaggaagttcgatgacaggttcatgaggccaatctttggtggaccgcggtcgcactgactgcaggtgcatataagaggagttagtttctctgaattctgtcagcatagttcgcccatggcactgtaaagttgataacactgaatgctttcaagcaactctttattatttttagtacttatattacatcactgcaatctta

SEQ ID NO: 6182 - DNA, 8163 bp, Zea Mays
aggcatgactgtactgccgcttgatgattaggttacgccctctgcgctctgagtctagctgttttgaccaaacaacatttcttcccggtagcctgatgccaattatgggagtgagaaacactgcagttccctccacatttctcatccgggcttggaccggcaaaggcagtgttaaaccgcaaacaaacaacaaatcaggaaatacaaacaattacacaaagaaatcgtgttcccagacataatttgaaaaaaaaaacaaatcgtataaccggttctgcgtcgaacatattagttgaatggtcagagcacttgtatacctaattcgaataacctaatgatctcgaggactgaacagcaacaggaaccagctttaataaaaatcataccatcaacaaagatccatagaaatttgagcaagtgcaaagctaaaaaaacagccagtgtacaatgtacactcgtgcaatcttatgtacagttaagacttccaacatcctagcttgcatgaccaaacatatcctagctaggttaaggtactattgtcatcgccaatgttacctggacaattttgcaaggacctaaccaaatgcaatcctagtgttaaattagcctaactactcaatcaccattataacaagatgaatgaacatgctaatttggagatagtacagaattacagaaacagaagcaatcatatcctagcttgcatgaccaaacaccaagctgtacagatgacacaaatggaaccaaccattcaagttcactcaaggtcaagattcaagaaacccagttgtaacagatttaagcaagcactaagcttccactgactttagcacaaccttatttgatctataaattaggatgagtcaacttgaacccaaacttgtgataaattgaaaatccatgtatataaggcactactgctagtccacgacagaaatggtcaaacaataagcacatagaagccaagtttgttcagagagattttcttttggcatgcacagaagcactaacatcctttcttgactttcataaacaatgcagtcaacagccttatactaataatgcataactgaaccagtaagtggactaggggttataccacagaaagtaaaattagaagcaaaccagaaactagattaaacattagtaggggtcctaaaagaaaatttgggtatttgggaccataaagaatacgatgcacatatgctcaagtacctacaatttcagtaacaaaacaattttgctcaatgaaggtatgtatgtcaagaaagagttcttgctggatatcagcgcaaatagtggacctgagccatcagatgaggcatgcagattaataaggacagcttcaaaataaaggtagtgcaaaggagtagcctaaccttagctccaaatggatccaatttccaatgtaaaatggcagtatgagcaaagagtatttgagtgcctcctcactcctaacatccaagcattaattctctcaaataactggaaaccaagcaaaccaccaaaaatccaaatcaaacaattgaaatggaaagtgatatgcagtcaatattcaggaacagtagttagtgcaatctctggacaatgtatcgtctcggttgtgatcatgtagatcatataactatagcatggaggattcaaagcatctgaaacagtagatcagtccaagtaatcaagcttcaatacacactatgcacactatctgaaagttctctggctagcaaaattgaaggtactaaatttcagaagataggcacacattatgatcaggatcagactgaactttaaagtttcaagtgcaaaacctacatttactaaagagaccatctatgatgatttgtctattttggttcagtgataggcttaaaaaaccttcaaattcaaggcaaatcaaatggccaatggaacagggatgggctttgaagacagcaccgatggttggagattctatctcagcttctgtgtgccacacctgcacaaacttgaaagactggttgaagaaagtaactggataggactgttggcagaaatgaaggattagaagcatccttgtaatttagattgttgcagcacaaagagctactggttgaagaaagaaactggataggactgttgacagaaatgaattagaagcacccttgtaatttagattgttgaagcacaaaacaactcataggcgttttgtaaattagataagtttagtactccccacacatattccgtgtgacaagcccatgcaaaaatatgagaaggcctgcaacaatgaccccaatcattatctacttccaggtagtagacactgaacaaacacaaagtttagtactccccacacatattccgtgtgacaagcccatgctaaaatatgagaaggcctgcaacaatgaccacaatcattatctacttccaggtagaagacactgaacaaacacaatgagttaaaggttgttgtaggtttgaatagatctggatccttctgtgcccatgcaagtatcccacctagagatattcgtcaaataatgtgggataggaagtccaatcatccgccaacaagttcaactgcaaagtcctatctccattgcgatgcctccaaaactgcagattacaatcgaatcattgaaggtagcctacaagtgaactaactttagaagaacatttgacatataggatgggttttttttttgaacaaacaaggaaccctgaagagttcagaacttattattgctgacgcagaagcagaatcgaactcaggcaccaatccatccatttacaatccagttgctggagaagaacaccagcccaaaaataagaaacaacaaattcaagagtaccaataaaagagagcatgcccatgaacttagtccagtcaaagcttcaatctacgtccaaaacatcacctctgttgcctctacatttttccaatcaaggacaatcaagtttaattaatcgggtggcgatcttcacgccaccatgatcataagaatagccatgtaacaaatcaaaaccaacgaatttaagcaaacctccacccttcaacggatctctccataaccagaggacctttccttccgcatctaggaggacaaaaccagcaaggacctttcattttgcatctagccagacaagctctgcagattcactaaccaagcattaaagggagcctatgtgtgcagttaattttcaaagatcattgacaggaggatggttagtgaacaaacaactctgaacatttccaaacttctgatagcaaaagcagaagcaggatctaactcgcctccaacccatccatccaaaaatcgagttgctggagaaaaccaccatcccaacataagaaattaaaatggcagcggatagaaatctaagaatatgaagagcgataggtaaattaattcaaacgatcttatcgccgatactatgaactcgagtcgagtcaaggccttaatctactttccaaaactcggttgcccttgcagatccaaccagcaacatttccaatcagcagatagacatttaaggatgtgaagaacgataggtaaatttatccaaacgatctcatcgatgatactacgaactccagtcgagtcaaggcctcaatctactttacacaactctattgcccctgcagatcgagccagcagcatttccaatcaagcttagagcaagtctggttctaataatattcgcaccaatacgatgatatcagaatgagaaacgacgagtgagccataagcaaacctccacccttcaactgatctctccataaccagaaaggacccttctgcatctgatgaagtttgaggacaaacaaccaaaaggccacaagtgagatcagtcgttaacataagaacgaaggtctccaaattcacatggtgcacaagctacgactgcgctatttgattctgatggtaccacaccagggacagacaattgagcctgaaaccaccaaatccatgtccaagtgacaaaaccaatgaaccgttggatctaacagaatactgacctgcctccgaacttgggcaaacagatcgccacacgacaccacgacgaacccccaacaccagatcggacccaatcctgcaacccacgcacagagaaaacgaagacgaaacaagattcgacacaaaaactagacgggttgcaggaaaaaacaaactacaaacccaaccaaccctgccacaactcaggctcactccccgggtcgcaggaaagcggaacgccccaaagggatctgcgagagcacaaaagcgcaacagcagcagaagagatcagccagagaagaaactgacccaactcgaagtcgaaacggagtgtacaaagaaggaagaaatggaaaacgcaaacgcgccgagatgaataaacggagagcgaggaaaatccacctccaacctgcacctctaaaggacacaaccacatactatgatcatttgatatacagtaccaaataaatccagattacaatcgaatcattgaaggtagcctacaagtgaactaaatttcgaagaacatttgacatataggatggttttttttgaacaaacaaggaaccctgaagagttcagaacttattattgctgacgcagaagcagaatcgaactcaggccccaatccatccatttgcaatccagtcaaagcttcaatctacgtccaaaacatcacctatgttgcctctacatcatttttccaatcaaggacaattaggcttctaattaatcaggtggcaatcatcacgccaccatgattgacataagaacagtcatataacaaatcaaaaccaacgaaagtaagcaaacctccacccttcaactgatctttccataacaaggcggacctttccttccacatctaggaggacaaaaccagaaggtacctttcattttgcagcaacacaaccggaatgatttctgacctgcccccagttttaaatatcagttcttcgctacagggatttttgattgccaaacttaccctacaaccacatgtaaaagcaaccacaacatagataaagctagacaaaagcatccacagaaatcccaaaccaaaacaagtatcgtgaccgttggactaccaattatttgagccaaatgatctgcagacacagaaattccagcagcacaagaattaaagctccagtcgaagcatatagcatgataaagcagaaacaagtttgattaaatgaaagttgtagggctgtagttctaccaatatctgcttaaatctcccacatcccaaacttgcccagtgacttctatcgctgcagattaaataagaattatctgaattttatcatggttcatatactagcattttgtaaattggataagtttactctaaacatattctgcgtgacaagcccacccaaaaatatgagaagacatctatccatatacaatccagttgctggaaaaaaaatactagcccgaatataagaaacaagaaatttgagtaccaataagtgagagatacatatatccaaacgatgttatcggcatgccatgaacttagtccagtcaaagcttcaatctacgtccaaaacatcacctctgttgcctctacatttttccaatcaaggacaatcaagtttctaattaatcgggtggcaatcttcacgccaccatgattaacataagaatagccatgtaacaaatcaaaaccaacgaatttaagcaaacctccacccttcaacggatctctccataaccagaggacctttccttccgcatctaggaggacaaaaccagcaaggacctttcattttgcatctagccagacaaactctgcagattcactaaccaagcattaaagggggcctatgtgtgcagttcattttcaaagatcattgacaggaggatggttagtgaacaaacaactctgaacatttccaaacttctgatggcaaaagcagaagcaggatctaactcgcctccaacccatccatccacaaatcgagttgctggagaaaaccaccatcccaacataagaaattaaaatggcagcggatagaaatctaagaatttgaagggcgataggtaaattaattcaaacgattttatcgccgatactatgaacgagtcgagtcaaggccttaatctactttccaaaactcggttgcccctgcagatccaaccagcaacatttccaatcagcagatagacatttaaggatgtgaagaacgataggtaaatttatccaaacgatctcatcgatgatactacaaactccattcgagtcaaggcctcaatctactttacaaaactctgttgcccctgcagatcgagccagcagcatttccaatcaagcttagagcaagtctggttctaataatcttcgcaccaatatgatgatatcagaatgagaaatgacgagtgagccataagcaaacctccacccttcaactgatctctccataaccagaaaggacccttctgcatctgatgaagtttaaggaggacaaacaaccaaaaggccacaagcgagatcagtcgttaacataagaacgaaggtctccaaattcacctggtgcacaagctacgactgcgctatctgattctgatggtaccacaccagggacagacaattgagcctgaaaccaccaaatccatgtccaagtgacaaaacctccaatcaagcttagagcaagtctggttctaataatcttcgcaccaatatgatgatatcagaatgagaaatgacgagtgagccataagcaaacctccacccttcaactgatctctccataaccagaaaggacccttctgcatctgatgaagtttaaggaggacaaacaaccaaaaggccacaagcgagatcagtcgttaacataagaagaaaggtctccaaattcacctggtgcacaagctacgactgcgctatctgattctgatggtaccacaccagggacagacaattgagcctgaaaccaccaaatccatgtccaattgacaaaaccagaaagccgtaggatctaacacaatactgacctgcctccgaacttgggcaaacagatcgccacacggcaccacgacgaacccccaacaccagatcggacccaatcctgcaacccacgcacagagaaaacgaagacgaaacaagattcgacacaaaaactagacgggttgcaggaaaaaacaaactacaaacccaaccaaccctgccacaactcaggctcactccccgggtcgcaggaaagcggaacgccccaaagggatctgcgagagcacaaaagcgcaacagcagcagaagagatcagccagagaagaaactgacccaactcgaagtcgaaacggagtgtacaaagaaggaagaaatggaaaacgcaaacgcgccgagatgaataaacggagagcgaggaaaatccacctccaatgtcctgcacctcttttcgataaaggagactttatattaaaaggttacaaagagcgatacatcaagagaatacatagtcttggtacataaaggacacaacgacatactatgatcatttgaaatacagtaccaaatagatttgatatacagtaccaaatagatccagatcttgtgcttcactactgctataccagcaatatccatagagggcagaatgttagccaaccattcagatctgaaatcactggaagcaagtgatgaaaccaacacaaccagaatgacttctgaccagggcccagttttaaatatcagttttcgctacagggatttccaattgccaaacttaccatacaaccacatgtaaaagcaaccagccaaccacaacaacatagataaagtagacaaaagcacagaaatcccaaaccaaaacaagtatcgtgaccgttggactaccaattatttgagctaaatgatctgcagaacagaaattccaacagcacaagaattaaagcttcagtcgaagcagaaacaagttcgattaaatgaaagttgtagactgtagtactgtagttctacccgtatctgcttaaatctcccacatcccaaacatgcccggtgtcttctatcactgcagattaaataagaattatctgaattttatcatggttcatatactagcattttgtaaattagataagtttactcaacacatattccgcgtgacatgctcatccaaaaatatgagaagacctgcaataaaggccccaatcattatctacttcaagatagaagacactgaac

SEQ ID NO: 6183 - DNA, 4839 bp, Zea Mays
atggccgcactgccgcgccacacaccgggcggaaaggcgcgggcagcggcagctagggtttggtgtggcgggggagaccgatcgggggcgagatgtgggcggcggaggcggcgttctcgcgctccgggtcgtggcgggaggcggaggacgagcgggaggcgctgcggtgggccgcgctgcagcggctgcccaccgtcacccgcgcgcgacggggcctgctcaggtccccggctcccgacggggccgcggccgtcgagggcgacgacgtgctctgcgaggtcgacgtcgccgggctctcctccggggaccgcaccgcgctcgtcgaccgcctcgtcgccgactctggcgactccgagcacttcttccgacgcatacgcagccgcttcgacgcagtgcagatagagttccccaagatcgaagtgaggtatgaggatgtgacagtggacgcttacgtgcatgttgggagcagggctctaccgaccatcccgaacttcatatgcaacatgacagaggcttttctgaggcatctgaggatctatcgaggaggaagagttaaactgccgattttggacaacatcagtggggtaattcgcccatcaagaatgacactgcttttgggccctccaagttccgggaagaccaccttgcttcttgctcttgctggacggctcggtcctggactaaagatgtctgggaacattacttacaatggccaccatttgaacgaattcgtgcctcagcgaacatctgcttatgtcagtcagcaagactggcatgcttcagaaatgacggtcagagaaacgctggagtttgccgggcgctgtcagggtgttggaataaagtatgacatgcttgttgaactgttgaggagagaaaagaatgcggggataaaacctgacgaggacctagatgtgttcatgaaggcgttggctcttgagggtaagcagacaagcctcgtagcagagtatataatgaagccaagattttaggactggacgtctgtgctgatactattgttggagatgaaatgatcaaagggatctccggagggcaaaagaagcgcctgacaacaggtgaattgctagttggttctgcccgcgtgctgttcatggatgagatatcgacaggccttgacagtgcaactacatatcagattatcaaatacctaaggaattcaacacatgctcttgacggaactacaatcatatccttgcttcagccagctccggaaacatatgagctatttgatgatgtcattcttatagccgaaggtcaaatcgtataccaaggtccacgtgaatatgcagttgacttttttggtgctatgggattcaggtgtccagaaagaaaaaacgtggctgattttttgcaagaagttttgtccaagaaagatcaacagcagtattggtgccactatgattatccataccaatttgtttctgtatcaaaatttgctgaagccttcaaaacatttattattggtaagagattgcatcaggaattaactgttccatacaaccgacatcacaatcatcctgcagctctttgtacatcaagttacggtgtcaagaggcttgagcttctcaagtccaactaccagtggcagcgtctgctcatgaaaaggaactcattcatatatgtcttcaaattcattcagcttctacttgttgcccttatcacaatgacagtgtttttcagatcaacaatgcaccatgactcagttgatgatggaatcatttatctcggtgccctttactttgcaatagttatgattctgttcaatggcttcactgaagtctcaatgctggttacaaagcttcctgttctttacaagcacagggacctgcacttctacccaccttgggcgtacacacttccttcttggctcttgagcatccccacctcactttacgaatccggaatgtgggtgcttgtaacatattatgtggttggttatgatccccaatttacaagatttttgggacaatttttgttgcttttctttctgcaccaaacatctttggctcttttccgagtcatggcctctttgggccgcaatatgatagtcgctaacacctttggatcattcgctttgttggttgttatgatccttggaggattcatcataaccaaagaaagcataccagtatggtggatatggggttattgggtatctcctatgatgtatgcacaaaatgctatttctgtcaacgaattccatggtcattcttggaacaagcaatttgcaaaccagaacatcacaatgggtgaagcgatactcactggatatgggttattcaaggaaaaatactggttttggatcggtgttggagcattgtttggttatgcaattattttgaacatcttgttcacaatgttcttgacacttctcaaccctattggtaatctgcaagctgttgtggccaaagatcaagtacggcacagggattctaggaggaagaatgacagggtagccctagagtaatctcaaggaacagaaggggatggtgttaccttttcaacccctttctatgtgcttcaggaatatcaactactatgttgatgtaccagtggtacgtcagagctggatcatttgcaatgaggtttctcagaaaaaaagtatgtatttattcattcattcataatccagttctgctagcaggaattaaaaaagcaaggtgtagcagaagaccgcctgcagctgcttgttgatgtcactggagcttttaggccagggatactaacagctcttgttggagtcagtggagctggcaaaaccaccctcatggatgttttagctggcaggaagactggaggtctcatagaaggaagcatcactatatccgggtatcctaagaaccaagagactttcactaggatatccggatattgtgaacagaatgatgttcactcaccttgcttgactgtgatcgagtctttgttatactcagcatgccttcggttgccttctcatgttgatgcagacactcaaagggtaagccttgattggttatacatcacacgcgctttttgtcctccttatcttttgtgttccctttcataggcttttgttgaagaggtgatggaacttgttgagttgaatcccttaagcggtgctcttgttggtctgcctggggtaaatggtttatcgactgaacaacgtaaaaggttgacaatcgctgtggaacttgttgcaaatccttctattgtgttcatggatgaacccacgtcaggattggatgctagatctgcagccattgtaatgaggacagtgcgtaatattgttaatacaggacggaccattgtctgcacaatccatcagccaagtattgacatatttgaatcttttgatgagcttttattcatgaagcgtggaggacagcttatatacgctggtcccttaggtgccaaatcgcgtaatctggttgacttttttgaggcaattccaggagtgcctaaaatcagggacggctataatcctgctgcatggatgttggaagttacaagcacccaaatggagcagattcttggagtggattttgctgaatactatcggcaatcaaaattatttcaacagaccagagaaatcgtcgaggccctaagcagaccgagcagtgaatcaaaagaacttactttcgccacgaagtatgctcaaccattttgtgctcagtatatggcttgcctatggaagcacaacctatcgtactggaggaaccctcagtacaccgcagttagattcttctacacagttattatttccttgatgtttgggacaatttgctggaaattcggttctagaagggggacccaacatgatatattcaatgcgatgggtgccatgtatgcagcggtgctgttcataggaattaccaacgccacttctgttcagcctgtgatctccatcgaaagatttgtatcttatagagagcgagctgctgggatgtattcagcgttgccttttgcattttctctggtcactgtggagttcccttacatccttgtgcagtcactcatatacggttcaatcttctacagtttgggatcatttgagtggacagcagccaagtttctgtggtacctgttcttcatgtacttcacgttgctgtacttcactttctatggcatgatgacgacggcgatcactccaaaccataccattgcgcctattattgcggctccattctacacgctgtggaatctcttctgtggattcatgatcccaagaaagcgcatcccagtttggtggaggtggtactactgggccaacccggtgtcgtggacgctctacgggctcctgacctctcagttcggcgacctggaccagcccctgcttatggccgacggcgtcacctccaccaccgtggtggctttcctggaggagcacttcgggtttcgccacgacttcctcggcgccgttgcggccatggtggccggcttctgcgtcctcttcgccgtcgtcttcgccctggccatcaagtacctcaacttccagcggcgatgagagagcaagtggttcagctagctagctagtatagtagccaccgccgacacagacccaccaaacggatcgcagcctactgtacatgcatacaccgatcagtgcaggagggcagcagcacaatgaattatgaatgcgatgtacctaccagcgcgtcgtattggcacagttaatttgcccattacccccagaacatttcgccggggtaaataatcttccggtcggtcacgggagcgagagtgagaaaaagtaaagggtactgtatagccagctattccatgtacttgctgccttggcctcccctccatcgttatacggtggcgtcgcttcatgcagggttt

SEQ ID NO: 6184 - DNA, 4995 bp, Zea Mays
  misc_feature (4995)..(4995): n is a, c, g, or t
gcaccaccgggaccggagcgccagcctggacatcagccacttcatgacgttaaacacagatcatcatcacttgatacaagtaaagaagaataatgctcaagtagttggctgctgatttcatcaggttgaaaagtgttgggcagagctagaagcatcattactattacacatatctgacggcaagtagctgttactactttacattatcgtaaatgttctgtttgtggcaagcaaaaatcgaacaaaaaactgtaggtgcatacagaagaaaaaaatacagtacaagctaattgtcaaacaagaagccaacaacatcagcagaatttccaaggcccaataacaaggtgcatgaatttccaaacacgcaagaactgcattaagttcaatggctcgtaaagagatcgatggtacatcgtcctacaccacgtaggaacttttcacttgtacttgacctataacataagcttgcttgctcatcagaaccaccagtgcctaccacttcacttctgaaaatatgtgatggcctatccattgcatttcaaacatgttccttcaactgcacaacgatcacttctgtaaattgaagggcaactggctttagcacaaaagtagggcggccaaataattctccaaaataagtctcatgaagaacagctacaatatctgcaagtattctttgatgcaaggccagaccatgtaatcccaacgttttgtgtgtacatggaaatcagctgcaagtcctgaactagggcacatttgtatgcttttacaaaaatcgtagtagagcattgcttggtggcatggggtacagatggctttggttacaaaaaaactgaccctggacagatttattaacaagagaactgtccaagacgccttatcaaataggagatggactatcttcatctttaggaagttccctcagattttgaactgcagcccaatagggaggataagcatatctttagcattgcttcatatggcagatacaccgcaaaggctgcttataaggatcttttcttggggtcaagctcctttggacattacatgacagattggctaagagagatctgaatcacccaagcaaatgtcctttatgtaaccaggaagctgaaacaataaatcatttgtttgtgtggtgtgtatttgcaagactcttctggtacaagatgttgagaaagattggtatgcattctttagcaccacaaccaggtgccacatccttctttgagtggtgggaaaaagcctcggaggctgtgaatgggctcttcaagaaaggacttgactccctcatcatcctgggtgcctgcatgatttggaagcaccgcaaatagatgtgttttttgataactggacacctagcctggctttaatcctaaatatcacttatgtttgagtttcacactatttcacctaaatatcacttcctttaagctaataataaattctgattatagaattgcagtgtgcatcaacttatccatgagccgaaatgaacttgcaccgattgcacattgaaagctcataaagcccaaaaatgttcatcgttgtcctgtgcaataaccaatgtgattatcaaaatcttgttagaatgtgtgtgtgggccggcggcactgttgggctgccggctgccagcccattagggttagggttgagtctctatatatatgtacttcatctcctatcaatacatccacttccatattcctacatggtatcaaaagattagggtttcctcacttctttccccagccgccaccccacctctgccctaggcacggcttccgcgccgccgccccgggaggctcatccttccctcctagggcagctcctctccagccgccggctcccagccatcctaggccggcgagcctccctgcgcgagatgtcctggagctcggtccctgccacctcccctcgtgtgcagggcgctgacgcacacactcctgggggcggcctccctcccctacgccgccagggcacctcctccccggccttgaaccgccgtcggacctccctgcaccggccgcgcgctacccctccctcccctacgccggcgcgaacaacagaggaggttggggccggggctgtccgcctggatctgcgctgccgctggcggatccgcctgaaccacagtagccgccgaccgcctctcaccccacagcagccgccaggaccgacgagccatcgcgtggatccgacggcggcctagttgcggccttccctggcgggcgcggcctctcccggtggcgcggttccccatggcgcgccggagcagcccctctgctctcgcccctctcctctccagctcggcagcaatggccgccctcagcttttcctctctctgctcatctcccatggcgctcaggtcctgtccctggtcgtcatccctctcctcaggaagccgacacccccatcttcttctccctgtttcctctacagcagccgctgctcttcctctctctggttcctctccggccgtctggctccctgctcggcgggcacaagcccccggacgcacggcgctctacctccagccccatggcggccgcggtctccaaccggcttcccacttcagctacctctcctaggtcgccagccaagcttcggatccatggcactcggctcctgagccccatttcccgcgcgttgagatgggacagggtgcgagcagtccctctgctcgttccctgttccccatggctgcctcccttggtcggcgtcctcctcttcgttgcgtccctcgcatgtgccccctcctcttcgctgcgtcctccgtcggcaccctcgcacgtgttgcccctcctcatcgcgttggccacctcctaaactgaccgcgctgatgcccagcagcgcgtcacccttcgagcttctcccgtcaccggtgtcgtcaacaccccttgctaggtccggcgcaggcccctgcccggctggacctgccccgccgcccacccccttcatcgccttcgctggatctgtcgctgtcgcggctttcccagccggatccacattgctgcgacctttccggctcgatctgccgtcccttttgctggatcgcttcttcccggctggatccgtcgctgtcgtggccttcccggccggatctgccgtttccccttctattctgccgcaggcgcggctaccatgaccggtgcagacgcgtgcgctgctgtcggcttccctggcggggctccttgacgcccggacgatcgaagaagcaggaaggccgacctgctggtgctcttttgttgtgtcgccctcgccaatcgttgacgctcgaacgtcgactcctcccgaagaacaggcttttgctgcgtgtctcctgaccgcgaccacctcgacttcggctacctcggcatctaggggctatcgtcttcttggagcacacaccaatctctactccagccgcaacattcgcaccatcacgacgctgcgactgcgggggatttcaacccgtcggctcctaccttcggcctctactccagtctcatcgtgtgtggtacccccgttgcgactgtgaggggatgttagactgtgtgtgtggaccggcgccactgttgggctgccggcccattagggttagggttgagtctctatatatatgtactccatctcctatcaatacatccactttcatattcctacacttgtaaacaaacaaattagcactacatatcccatactgaatatttgtctgcaatggggagataacggaagcaacgatctagcacataagaatgtgtgccaatttctaattacatgtattaacttgcacaccgtaaagcatttttccccagttgtctaagattccatcatgcatggagtattctatttaagcataggtataaaacaattctaggcagcaattggcatttttaaagcaaataaacagtaaacagttaaaacacctaagtgttcaacacaaaacatgtaaagcaaaatgtagaacacagtcattgtggatgtggtcacttacaaagatctcaggatgtgaggaagaaaagattacgtttttacaggaattgaaagatatcaggatgttatgtaatgagccgtggctgacagctggagatttcaacatgatttatcaggcttcagacaaaaataatgataatctggacagggacatgatgggaaggttttggagatttttaaataaatttgatttgaaagaaatccctctcctgggccgtaaatatacttggtccaacgagaggagttcacctactttggtaaggctggatagggccttttgctgtttggaatgggagaatatatttcctgattcagtcctccaaagttcggcgtctaatgtatccgatcattgccctttgattcttggtttaaaactccaaactaaaggcaagaggagatttcattttgaaagcttttgggcaaaagtgccaggattccttgaggtcgttcaacggaactgggaagctcatgtacagtccacaagtgcagtagagcgcctttttctcaagttgcaacggctcagtaaagatttacagaagtgggggcaaagaaaggttggtaacattaaattacatattgagatggctaaggaaataatacatagactggagattgcaagagattccagggatctttcaaacagggaagaatggctaaaaaagaagcttaaactacatctgcttggtcttgcttctttggaacgtaccattgctagactgcattctagaatcctttatctcaaggaaggagatgcaaataccttcttttttcaccatcaagcccgtttcagaaagaaaaagaattttattgctaagctgcatacagaaacctctatggctatcacacaagaagaaaagcaggcagcagtgctgaaattttatgaaaaggccttgggaacagctgaaagtcgccccctaactttaaatcttagtgagattggtatgcagcagcatgatttggccagcgtggacaacccattcacagaagagggattatgggcagcagttaaagacttacccn

SEQ ID NO: 6185 - DNA, 4587 bp, Zea Mays
ggaggatccagcgaaatgcaatgcaactcatcttcgtcggggcggacaaacagacgacacaaggcgaaggcaccgcccgcacgccgacacgcgcggctacacctgccactcctcccgatctcgccggccggcgactggtgcctcccgccccagccctcctccgggggcgatggaggcggccttcgacgcctacttctgcgccgcggatctggaccgcgacggccggatcagcggccaggaggccgtcgccttcttcaagggctccggcctcccgcagcccgtcctagcgcagatttggacatatgctgataaaaatcggactggtttccttgggcgcgaagacttctgcaattcgcttaaacttgtcacagtagctcagagcggtcgagaattgacacctgatattgttaggtcagcattatttggtccagctgctgcaaagatacctgctcctcggataaatgtttctactgctggtcctcagacaaacagtgtagctagccccccgaatgccactcgagcactagggtctggtcaacagaatcctgctgtaagaggaccacaagtgcttcctggggcatcatcaaatccacaagtgaggccgccacaacctccaaatgcaaacactgtgccccctgttcagggagttgcatcaaggccacccgtgggaggtggtcctagtgggctaaaccataccagctcaaccacaacaaatctcgctacggattggtttagtggtaagaggagtgcaagttcgttgggtgcaacttcacaagctccaaccagaggtatttctccgcagggcaaccttactactgcaggaatttcagcacagaattcaactcctctgccagtctacaattctcatatgccgggtgctacaacacctgccaatgcaaattcaacaaacgtaaacatgatgccttcacaaccatcagttagtgactccaagacattggtacccttgggtaatggattgccatctaactcaacttttggtgttgaccctttttctgtgactctacaagcgaaacaagagtcagctttgacccccaatgttccaaataatcttcccagttctacagctcctgcctcagctgctggacctcatcaccctcctaagccaatgcaggccggtcctttgcagggtatatcgtcgcttccttctcatactagccagttgccacacagtcagccagctcctaggcaacaacaatttaatgctattccaagcactccaggaccagtgggtgcaaatattcctggtggacaaattccttcaaacccataccaatctcaggccccatggccaaaaatcactcaagtggatgtcaggaaatacatgattgtatttatcaaggtagacagagatcgtgatgggaagatcaccggcgaagaagcaaggaatctatttttaagttggaggctgccaagagatatcttaaggaaggtatgggatttgtctgatcaggataaggatgggatgctgtctttcaaggaattttgtgttgccgtgtatttaatggagagacaccgagagcatcgtcctcttcctgatgtactaccagatggtatttgggctgagggcacctcgctaccctctaccggccagtttgcaggaaaccctagtggaccgccttctcatgcaagtacaggattcgcaagtagaggaatgcaaggaccacatcatgggatgcttccctcatccatgaagccaacatctcgaaggcctcttcctttagatgctgacgatactgttaaggcagagcaacaaaagccaaagatccctgtattggaggaacatctagttggccagttgagcaaggaggaacaaggcacactggatgcaaagtttaaggaagcttcagatgctgataagaaagtccaagaattggaaaaggaaatccaggattctagagagaagaccgagttttatcgcaccaagatgcaggagcttattctttacaaaagtaggtgtgagaacaggcttaatgaagtctcagaaagtatgtctgccgataaacgtgaggttcaatcccttgcagcaaaatatgatgaaagatgcaagaaggagaagaaacttgaaatttataacgccatagttaagctgcaaaaaggggatgaaagtgatgaaaagcttcaggagcgggctaataagatacagtctgatcttgaggagcttgtgaaatcattgaatgaacaatgcaagagatatgggttgagagctaagccaactacattggtggaacttccttttggttggcaaactggaatacaagagacagcagctacatgggatgaagaatgggacagatttggagatgaaggattctccatcataaaggaactaacagttgaagtagagcctcccgttgtaccaaagagtcaacctactgttgaagatgtcaaagtgtctacaaatggggcatcaacagagaaagaagacaataagtttgctaaatctactgctgctgctgctgtggagcaggcagttgaacctgaagcaataccatccaatagcaaactagagtcaacaaaaagtcctccagttagtcctgtcaagaacagagacgatggttcgaccgatgagcttgatacaaagcaatctggaccaaatgacgtcttaccacgtgccactgagagcgtcagtaaccgtggaatggattcctctgcccatggagataaaacttatgatggacattcatgggccccatcatttgatcatggcactgacaatgactccctatggaactttggtcataagatatactgcactatctggtacttacctccacgatctgtttctcaggatggtgagaatggtgattcagatctcttctttgggccacaaggtcttccaccgataaggactggaggttcctcatctaatagtttgtttgtcaaggaacagaaaccatcttttgattctgttcctggtactccaatggagaaacctttctttgattccatcccaggcacaccagttcagaagtccgtcttcgattactccgtccctagtacaccgatgcaaaactcagtctttgattattccatcccaagcacaccgatgcaaaagcctctctttgattccgtccctggtacaccagtgcagaaatcagtatttgattctgttccgagtacaccgatgcagaaatcagtatttgattctgctccaagtacgccaacgcagaaaccattctttgactcttttccaagcaccccaatgcagagatccatgtttgattctggcccaagcagagcagaatctcctactgctggcagcgtgtacggcaaagagcaaaagggattctttgattcttcagttccgagtacaccaatgtacaactcaaacctcacgcccagatacagtgaagcaggagatgattcatttgacacaatgtctcaatacagctccttcggcatgcacgacaacaattcttttggacagatagacagcttctcaagatttgattccttccggagcaatgctgataatggcggtaatgacgcctttgcgagatttgattctttccgcagcacttcagatcaaggcgggggcaacagcttcatgaggtacgattccatgaacagcagcagtgaccatgacagaacggatacatttgcgaggtttgattccatgaagaacagtgacttcaacaaccagggctactcatttgatgatgacgacccctttggaactgggccgttcaaatcaacagagacatcgaacagcccgacgagacatgggacggatgcgtggagtgcattttgacaggtattgtattatagaggtcatgttcttgtgcaccttactgcagatatacatacacgtacaagggcaagacattattttttttgcatgggcctctgctccgcaccttttggacgggacggggcttgcttgtgtgtttaattttgtacctaggctgggaacatgtgtttggagggatggtgctgcttataaacattctttataccttgtattgtacaagtacacctacaagatgctagtcaacccgttgggttgaagaactctccgagtgttttcttccattgtgtagggttttttttctctctcagtttcttctgtttctgcaaaaagttctgagctctgtacatacattttggctaagtcaacctagttatgaggatattgtgagcaattaagtcggttcagcgagaagctagggatcagtttgttcgttgttttaacaaaccgtgagggttgccctccataggggtggtcattctaaggctgaaacttgaacccgaactaaactcgaatagaccgaattgtcggtctatttgggttttttggttcaggttcgattcttatatgtgctatattttggggtatgggttctgttgggggtctgctgctctgcttcgtcgtcgaaggttctttaaaaagaaataccttcgaaagatcagcgtataatcaagcacaatgtgaaggtatacacgaagctgctgtcttcgaaagatcagtgtataatcaagcacggtgcgaaggtatacacgaagctgctgtctgaggagcttcggcataatgatagcttgagatgaagggctgcaccgacttaaaaa

SEQ ID NO: 6186 - DNA, 4784 bp, Zea Mays
cggaatttaacatttccaaccatcccttcttcttttatgttcttttccaaaagtaaccgcaagtacttaaactctagccagaaatcttaagccccttgatgtgatgaaagtttttgtgttgcacggctactttgcccccggaggatccagcgaaatgcaatgcaactcatcttcgtcggggcggacaaacagacgacacaaggcgaaggcaccgcccgcacgccgacacgcgcggctacacctgccactcctcccgatctcgccggccggcgactggtgcctcccgccccagccctcctccgggggcgatggaggcggccttcgacgcctacttctgcgccgcggatctggaccgcgacggccggatcagcggccaggaggccgtcgccttcttcaagggctccggcctcccgcagcccgtcctagcgcagatttggacatatgctgataaaaatcggactggtttccttgggcgcgaagacttctgcaattcgcttaaacttgtcacagtagctcagagcggtcgagaattgacacctgatattgttaggtcagcattatttggtccagctgctgcaaagatacctgctcctcggataaatgtttctactgctggtcctcagacaaacagtgtagctagccccccgaatgccactcgagcactagggtctggtcaacagaatcctgctgtaagaggaccacaagtgcttcctggggcatcatcaaatccacaagtgaggccgccacaacctccaaatgcaaacactgtgccccctgttcagggagttgcatcaaggccacccgtgggaggtggtcctagtgggctaaaccataccagctcaaccacaacaaatctcgctacggattggtttagtggtaagaggagtgcaagttcgttgggtgcaacttcacaagctccaaccagaggtatttctccgcagggcaaccttactactgcaggaatttcagcacagaattcaactcctctgccagtctacaattctcatatgccgggtgctacaacacctgccaatgcaaattcaacaaacgtaaacatgatgccttcacaaccatcagttagtgactccaagacattggtacccttgggtaatggattgccatctaactcaacttttggtgttgaccctttttctgtgactctacaagcgaaacaagagtcagctttgacccccaatgttccaaataatcttcccagttctacagctcctgcctcagctgctggacctcatcaccctcctaagccaatgcaggccggtcctttgcagggtatatcgtcgcttccttctcatactagccagttgccacacagtcagccagctcctaggcaacaacaatttaatgctattccaagcactccaggaccagtgggtgcaaatattcctggtggacaaattccttcaaacccataccaatctcaggccccatggccaaaaatcactcaagtggatgtcaggaaatacatgattgtatttatcaaggtagacagagatcgtgatgggaagatcaccggcgaagaagcaaggaatctatttttaagttggaggctgccaagagatatcttaaggaaggtatgggatttgtctgatcaggataaggatgggatgctgtctttcaaggaattttgtgttgccgtgtatttaatggagagacaccgagagcatcgtcctcttcctgatgtactaccagatggtatttgggctgagggcacctcgctaccctctaccggccagtttgcaggaaaccctagtggaccgccttctcatgcaagtacaggattcgcaagtagaggaatgcaaggaccacatcatgggatgcttccctcatccatgaagccaacatctcgaaggcctcttcctttagatgctgacgatactgttaaggcagagcaacaaaagccaaagatccctgtattggaggaacatctagttggccagttgagcaaggaggaacaaggcacactggatgcaaagtttaaggaagcttcagatgctgataagaaagtccaagaattggaaaaggaaatccaggattctagagagaagaccgagttttatcgcaccaagatgcaggagcttattctttacaaaagtaggtgtgagaacaggcttaatgaagtctcagaaagtatgtctgccgataaacgtgaggttcaatcccttgcagcaaaatatgatgaaagatgcaagaaggttggagatgtggcatcaaaattaacaatggatgaggccagttttccgtgagatccaggagaagaaacttgaaatttataacgccatagttaagctgcaaaaaggggatgaaagtgatgaaaagcttcaggagcgggctaataagatacagtctgatcttgaggagcttgtgaaatcattgaatgaacaatgcaagagatatgggttgagagctaagccaactacattggtggaacttccttttggttggcaaactggaatacaagagacagcagctacatgggatgaagaatgggacagatttggagatgaaggattctccatcataaaggaactaacagttgaagtagagcctcccgttgtaccaaagagtcaacctactgttgaagatgtcaaagtgtctacaaatggggcatcaacagagaaagaagacaataagtttgctaaatctactgctgctgctgctgtggagcaggcagttgaacctgaagcaataccatccaatagcaaactagagtcaacaaaaagtcctccagttagtcctgtcaagaacagagacgatggttcgaccgatgagcttgatacaaagcaatctggaccaaatgacgtcttaccacgtgccactgagagcgtcagtaaccgtggaatggattcctctgcccatggagataaaacttatgatggacattcatgggccccatcatttgatcatggcactgacaatgactccctatggaactttggtcataagatatactgcactatctggtacttacctccacgatctgtttctcaggatggtgagaatggtgattcagatctcttctttgggccacaaggtcttccaccgataaggactggaggttcctcatctaatagtttgtttgtcaaggaacagaaaccatcttttgattctgttcctggtactccaatggagaaacctttctttgattccatcccaggcacaccagttcagaagtccgtcttcgattactccgtccctagtacaccgatgcaaaactcagtctttgattattccatcccaagcacaccgatgcaaaagcctctctttgattccgtccctggtacaccagtgcagaaatcagtatttgattctgttccgagtacaccgatgcagaaatcagtatttgattctgctccaagtacgccaacgcagaaaccattctttgactcttttccaagcaccccaatgcagagatccatgtttgattctggcccaagcagagcagaatctcctactgctggcagcgtgtacggcaaagagcaaaagggattctttgattcttcagttccgagtacaccaatgtacaactcaaacctcacgcccagatacagtgaagcaggagatgattcatttgacacaatgtctcaatacagctccttcggcatgcacgacaacaattcttttggacagatagacagcttctcaagatttgattccttccggagcaatgctgataatggcggtaatgacgcctttgcgagatttgattctttccgcagcacttcagatcaaggcgggggcaacagcttcatgaggtacgattccatgaacagcagcagtgaccatgacagaacggatacatttgcgaggtttgattccatgaagaacagtgacttcaacaaccagggctactcatttgatgatgacgacccctttggaactgggccgttcaaatcaacagagacatcgaacagcccgacgagacatgggacggatgcgtggagtgcattttgacaggtattgtattatagaggtcatgttcttgtgcaccttactgcagatatacatacacgtacaagggcaagacattattttttttgcatgggcctctgctccgcaccttttggacgggacggggcttgcttgtgtgtttaattttgtacctaggctgggaacatgtgtttggagggatggtgctgcttataaacattctttataccttgtattgtacaagtacacctacaagatgctagtcaacccgttgggttgaagaactctccgagtgttttcttccattgtgtagggttttttttctctctcagtttcttctgtttctgcaaaaagttctgagctctgtacatacattttggctaagtcaacctagttatgaggatattgtgagcaattaagtcggttcagcgagaagctagggatcagtttgttcgttgttttaacaaaccgtgagggttgccctccataggggtggtcattctaaggctgaaacttgaacccgaactaaactcgaatagaccgaattgtcggtctatttgggttttttggttcaggttcgattcttatatgtgctatattttggggtatgggttctgttgggggtctgctgctctgcttcgtcgtcgaaggttctttaaaaagaaataccttcgaaagatcagcgtataatcaagcacaatgtgaaggtatacacgaagctgctgtcttcgaaagatcagtgtataatcaagcacggtgcgaaggtatacacgaagctgctgtctgaggagcttcggcataatgatagcttgagatgaagggctgcaccgacttaaaaa

SEQ ID NO: 6187 - DNA, 3185 bp, Zea Mays
cggaagaagccgcaccaggagcaaattcctcctctctcgagggcggttgcgtgctcgcgtgaagaaggccggggccctatctctccgatcgcggtagggcgttcgcagcgccgattcgagccgacgattggccgtccgcgaaggtttagtgagatctggcctctgcaatagtcacttccttgaaagcagatataaggattattatagttggagttcaatctttggggacatgaattgattctgttatttgtttgactccagtttggggcaatcacgggctttaggttgggtgaggtattgttgtttcaatgaattcaggtactcaggtactatttgaacactgaactaaaaattggagtttcttttcttatttgacatcttgatgtgccaaaatcaagctctcgttaaaggtcaaacaaatgggcaaaatttgggctctttgattagttttttcagtgttaagtggtgaatctactgtggtaaatgggagagctgatccagttgatctatatgccttgtgaggactattttgtcctcaataagaatatatgttcaacatcactgttggacttgtgttgcccttagattgagatggtggcttctcttacaagattgtagcagccttttaactctcgaagagggggccccttcaattgtgagttttgagaagagccaattgctgctaccttcatatcattttgaggactggaaaaggtggaccagtgtcactcttagcatctaccacctagaactttagcccaatggtggtttatatgttgaaattcatcaagtataaaggcgagaagggtagtttcgttgcccacagttaacttgtagggagagaaatattgagatctgtggaaatattggctggagcagcagaatcactcaataattttgattttggatggtagaataggttggcgtaaatttggcaaaaagaacttaaacagttctttcacatcaaattagttgttctgaagattctttccaagtaaaaatcagcttatcatgtatgcttgggccatgaagtaacaattcttttgatcgctgaggatgtcatttgcagatagatattcaatgttgttggaaagagaaagatgctagttgaaaataggtgaattgatgatgttggaaacaagatgcatttattcataagacgaacaaagggacaacaatttcgaggaggaaccctttagctaggttaaacaaaatcaaatccccctgttcatgtgttatggcagggcatcatcataataacacacatgcctccaggatggatcatgtgaacaggttccagagtgaagcacagccttttggcccaaagttatttatgcattctagaactgatgcagcaaatggagctctaccatcaggttatgtgggcgcaccaataagaccaaatggcattccattctcaagtcacaccgggcaatctcatattcagcacagtgatgctcctggaaccatgcttgcatcctattctggctatcctcttgctggaagctccagtagcacctatgcaccacataatactcatcatctgcctgctttgagctatccacataggtctgatgataacttcattctgagttcccatatggatgacagaagggttgcactgaagcggagaaatccaattatttatccagtggatggagtcaataatgggagctgttatgctggcagttcatctaatcctcagttcccatgctacatgcctccaaatcctattcctgctcctgaaccctgccctcctcgaataacatcaaatatgggttcaagctactggactgatcagccctttggtagcaatggaggatctcagaggaatgtgagaggtcgccatgatcacaatcctatccatttgggacacaatccaggtgtagcttgcgcaacaagcagcactcatgggccaccacaccatgctaatgtaattggtcctcaaagtacagcagtgccacaaaatagagcatatttttctatacctccaagagtgactgccccaggcagcgatggaaactgtagcatggttttcagggaagggacatactactctgctccgcagaggaccaacataaatgccccccctgtcctagcacctcctggttcttctgatagtctacattttgtgcatggtgggtatgccccaagagcagcccctcctaacagcatcagcacatatcctgccccggcttttgcgactcctaacaactcagtgacagttacccatgagcctgatatcccttgctatcgacctgccgtccctggctatccgcctgctacctcagcagcagcagcagcagcaagtgttcatgctgaaggtgctgctgcatcttcgagacatctaggtcatgtggctctaggttccagtggtagtgcaaggagtagaaggctgagggattcataccatgcttttcgtccactggttattgaagaaaataacttgagaggaccagcaaccgagcgttttatgatgctaaatcagttatttatccatgaatcgagagaagattctgaccctcactgggacatgaggctggacattgatgatatgagttatgaggagctgctggctttgggagaacgaataggcaatgtcaacacgggcctagctgatgaaaaactttcaagctgtgtgacggagataccctgctgcagctctgcccgtactcatgatgataatgagagcgcaagatgtgtaatttgcctggaggattacaaattcgaggactctgtcgggaagctaaaatgcaatcacaagtatcacgcagactgcatcaagaaatggctgcaggtgaagaacgcttgcccagtctgcaaagcttctgcggcagatgacggcggaggcaccgaatgaagcgccctgccgcccccattcaccctatctcaggcgaagctgtactggctgatctggtttgctgtgtgtaaataatggtcctgaaacggattatttgtgagctgaattaaactcgacatgtaaatttaatcctcaagctagttgcaaattgatggcagcggttagccctacgtgtcagccgtctgacgtaactgcagagagaaaacgtttgcatgcatatgtacagctcgatccaatagaggttattaaatgttaacaatttattagttagttaagccgtctttacgacgtccatcgtcacctaattaaattgcaactaattttc

SEQ ID NO: 6188 - DNA, 4558 bp, Zea Mays
cggaagaagccgcaccaggagcaaattcctcctctctcgagggcggttgcgtgctcgcgtgaagaaggccggggccctatctctccgatcgcggtagggcgttcgcagcgccgattcgagccgacgattggccgtccgcgaaggtactatttgaacactgaactaaaaattggagtttcttttcttatttgacatcttgatgtgccaaaatcaagctctcgttaaaggtcaaacaaatgggcaaaatttgggctctttgattagttttttcagtgttaagtggtgaatctactgtggtaaatgggagagctgatccagttgatctatatgccttgtgaggactattttgtcctcaataagaatatatgttcaacatcactgttggacttgtgttgcccttagattgagatggtggcttctcttacaagattgtagcagccttttaactctcgaagagggggccccttcaattgtgagttttgagaagagccaattgctgctaccttcatatcattttgaggactggaaaaggtggaccagtgtcactcttagcatctaccacctagaactttagcccaatggtggtttatatgttgaaattcatcaagtataaaggcgagaagggtagtttcgttgcccacagttaacttgtagggagagaaatattgagatctgtggaaatattggctggagcagcagaatcactcaataattttgattttggatggtagaataggttggcgtaaatttggcaaaaagaacttaaacagttctttcacatcaaattagttgttctgaagattctttccaagtaaaaatcagcttatcatgtatgcttgggccatgaagtaacaattcttttgatcgctgaggatgtcatttgcagatagatattcaatgttgttggaaagagaaagatgctagttgaaaataggtgaattgatgatgttggaaacaagatgcatttattcataagacgaacaaagggacaacaatttcgaggaggaaccctttagctaggttgtgtgtgcatcattacatggacatgtgtgtacctgaaatgctagtgctatatctacctgccttcatattttctggggcttctggagctgatagatagtgtcatactttctgccttatgtccatttactttctgtttaacagaattatgtacaatttattattagtttctctcccaatgactaagcccgtttgacgggcttttcactccatgtaaagaattagaagattctagccaatcttcttatgttcaatataatgtatatgaactgtactgtttgataagtgctgccatataatttagttgcacactgtttcagcttctttggttattactgtattcctgttgttatagatgtttgtattgctgtcaataagttctttgccttcgaaaattggtcctttcacctggtgttgcacagagtcctggtgttgtgctgaactaatgttgtaaggcaactgtctttgttggttaggtattatgattttcatacttgatactggactactaaaatagcatctgtaatttgatcctaatcaatggattgtatagatgcttatctagtatttttctatcacatagagaaaagacaatgcagtctagatatgctgcttgtaattatcttttctaaagcttgtctaagttaaacgctatatatatctactagtctctttgttatcttcaaacaaacatcatcgtttgatactattacgacaataaatgatctccaatcctttatattggaggaataataatatgtaacattggttgggtgtagagattacattatatacgtctctaaccctaataggctacatgtgctaggctaggtccatgacacacaaccatgaagaggacccagatccttcatcacgaactttggttgaagtgtgtgtgtttgtgcatatataaaatcttaggcaccataataacatgacgtatacataatggttctcttcaacttgcatctacattattgacataacataggtatcgtctagctacttggtgaataaaacttcagagaatcatattttgttgttttcatatggtaaattcatatgttctttctcttcaacttgcatctacattattggcataacataggtatcgtctagctacttggtgactaaaacttcagaaagtcatatttcgttattttcatatggtaaaatcatatgttctatcattacttgtcaggccaagttactgccataaccaaagctataaaggtttctaattcttgtattgaggtctaaaagtcagatctccaccatatatattttattttgtagcagactattatgcaagtatgatgatgattccttctctagtttaattctgtaaactacatactgtagtcaaaaagttttatgtttactttgttaattacgtcggcatggtttctagtcttcttggatatatgacgaggacttcatttgtgttgtgtgttgcaccaaagttaaataagacactggatatgatggaatatttgggttttggcactggcagctctagcctgtgtgactgtaatctcacatcttgcggttctaaggttaaacaaaatcaaatccccctgttcatgtgttatggcagggcatcatcataataacacacatgcctccaggatggatcatgtgaacaggttccagagtgaagcacagccttttggcccaaagttatttatgcattctagaactgatgcagcaaatggagctctaccatcaggttatgtgggcgcaccaataagaccaaatggcattccattctcaagtcacaccgggcaatctcatattcagcacagtgatgctcctggaaccatgcttgcatcctattctggctatcctcttgctggaagctccagtagcacctatgcaccacataatactcatcatctgcctgctttgagctatccacataggtctgatgataacttcattctgagttcccatatggatgacagaagggttgcactgaagcggagaaatccaattatttatccagtggatggagtcaataatgggagctgttatgctggcagttcatctaatcctcagttcccatgctacatgcctccaaatcctattcctgctcctgaaccctgccctcctcgaataacatcaaatatgggttcaagctactggactgatcagccctttggtagcaatggaggatctcagaggaatgtgagaggtcgccatgatcacaatcctatccatttgggacacaatccaggtgtagcttgcgcaacaagcagcactcatgggccaccacaccatgctaatgtaattggtcctcaaagtacagcagtgccacaaaatagagcatatttttctatacctccaagagtgactgccccaggcagcgatggaaactgtagcatggttttcagggaagggacatactactctgctccgcagaggaccaacataaatgccccccctgtcctagcacctcctggttcttctgatagtctacattttgtgcatggtgggtatgccccaagagcagcccctcctaacagcatcagcacatatcctgccccggcttttgcgactcctaacaactcagtgacagttacccatgagcctgatatcccttgctatcgacctgccgtccctggctatccgcctgctacctcagcagcagcagcagcagcaagtgttcatgctgaaggtgctgctgcatcttcgagacatctaggtcatgtggctctaggttccagtggtagtgcaaggagtagaaggctgagggattcataccatgcttttcgtccactggttattgaagaaaataacttgagaggaccagcaaccgagcgttttatgatgctaaatcagttatttatccatgaatcgagagaagattctgaccctcactgggacatgaggctggacattgatgatatgagttatgaggagctgctggctttgggagaacgaataggcaatgtcaacacgggcctagctgatgaaaaactttcaagctgtgtgacggagataccctgctgcagctctgcccgtactcatgatgataatgagagcgcaagatgtgtaatttgcctggaggattacaaattcgaggactctgtcgggaagctaaaatgcaatcacaagtatcacgcagactgcatcaagaaatggctgcaggtgaagaacgcttgcccagtctgcaaagcttctgcggcagatgacggcggaggcaccgaatgaagcgccctgccgcccccattcaccctatctcaggcgaagctgtactggctgatctggtttgctgtgtgtaaataatggtcctgaaacggattatttgtgagctgaattaaactcgacatgtaaatttaatcctcaagctagttgcaaattgatggcagcggttagccctacgtgtcagccgtctgacgtaactgcagagagaaaacgtttgcatgcatatgtacagctcgatccaatagaggttattaaatgttaacaatttattagttagttaagccgtctttacgacgtccatcgtcacctaattaaattgcaactaattttc

SEQ ID NO: 6189 - DNA, 4828 bp, Zea Mays
gaagtactgaatctgttaaatggtacaacactgttgtcctttgctttgatggtaatgcatgaaattcgaacaccgacatgtcttctgcatcttcaggtttagtgagatctggcctctgcaatagtcacttccttgaaagcagatataaggattattatagttggagttcaatctttggggacatgaattgattctgttatttgtttgactccagtttggggcaatcacgggctttaggttgggtgaggtattgttgtttcaatgaattcaggtactatttgaacactgaactaaaaattggagtttcttttcttatttgacatcttgatgtgccaaaatcaagctctcgttaaaggtcaaacaaatgggcaaaatttgggctctttgattagttttttcagtgttaagtggtgaatctactgtggtaaatgggagagctgatccagttgatctatatgccttgtgaggactattttgtcctcaataagaatatatgttcaacatcactgttggacttgtgttgcccttagattgagatggtggcttctcttacaagattgtagcagccttttaactctcgaagagggggccccttcaattgtgagttttgagaagagccaattgctgctaccttcatatcattttgaggactggaaaaggtggaccagtgtcactcttagcatctaccacctagaactttagcccaatggtggtttatatgttgaaattcatcaagtataaaggcgagaagggtagtttcgttgcccacagttaacttgtagggagagaaatattgagatctgtggaaatattggctggagcagcagaatcactcaataattttgattttggatggtagaataggttggcgtaaatttggcaaaaagaacttaaacagttctttcacatcaaattagttgttctgaagattctttccaagtaaaaatcagcttatcatgtatgcttgggccatgaagtaacaattcttttgatcgctgaggatgtcatttgcagatagatattcaatgttgttggaaagagaaagatgctagttgaaaataggtgaattgatgatgttggaaacaagatgcatttattcataagacgaacaaagggacaacaatttcgaggaggaaccctttagctaggttgtgtgtgcatcattacatggacatgtgtgtacctgaaatgctagtgctatatctacctgccttcatattttctggggcttctggagctgatagatagtgtcatactttctgccttatgtccatttactttctgtttaacagaattatgtacaatttattattagtttctctcccaatgactaagcccgtttgacgggcttttcactccatgtaaagaattagaagattctagccaatcttcttatgttcaatataatgtatatgaactgtactgtttgataagtgctgccatataatttagttgcacactgtttcagcttctttggttattactgtattcctgttgttatagatgtttgtattgctgtcaataagttctttgccttcgaaaattggtcctttcacctggtgttgcacagagtcctggtgttgtgctgaactaatgttgtaaggcaactgtctttgttggttaggtattatgattttcatacttgatactggactactaaaatagcatctgtaatttgatcctaatcaatggattgtatagatgcttatctagtatttttctatcacatagagaaaagacaatgcagtctagatatgctgcttgtaattatcttttctaaagcttgtctaagttaaacgctatatatatctactagtctctttgttatcttcaaacaaacatcatcgtttgatactattacgacaataaatgatctccaatcctttatattggaggaataataatatgtaacattggttgggtgtagagattacattatatacgtctctaaccctaataggctacatgtgctaggctaggtccatgacacacaaccatgaagaggacccagatccttcatcacgaactttggttgaagtgtgtgtgtttgtgcatatataaaatcttaggcaccataataacatgacgtatacataatggttctcttcaacttgcatctacattattgacataacataggtatcgtctagctacttggtgaataaaacttcagagaatcatattttgttgttttcatatggtaaattcatatgttctttctcttcaacttgcatctacattattggcataacataggtatcgtctagctacttggtgactaaaacttcagaaagtcatatttcgttattttcatatggtaaaatcatatgttctatcattacttgtcaggccaagttactgccataaccaaagctataaaggtttctaattcttgtattgaggtctaaaagtcagatctccaccatatatattttattttgtagcagactattatgcaagtatgatgatgattccttctctagtttaattctgtaaactacatactgtagtcaaaaagttttatgtttactttgttaattacgtcggcatggtttctagtcttcttggatatatgacgaggacttcatttgtgttgtgtgttgcaccaaagttaaataagacactggatatgatggaatatttgggttttggcactggcagctctagcctgtgtgactgtaatctcacatcttgcggttctaaggtctgaatgattctttttagtttattacagaagtctaagtatttgtggttctctgtatatattttgtttctaaatctacaagtatatttgcagctgcaacttgcttttctagaatactaatgccaaccctatattttttcaggttaaacaaaatcaaatccccctgttcatgtgttatggcagggcatcatcataataacacacatgcctccaggatggatcatgtgaacaggttccagagtgaagcacagccttttggcccaaagttatttatgcattctagaactgatgcagcaaatggagctctaccatcaggttatgtgggcgcaccaataagaccaaatggcattccattctcaagtcacaccgggcaatctcatattcagcacagtgatgctcctggaaccatgcttgcatcctattctggctatcctcttgctggaagctccagtagcacctatgcaccacataatactcatcatctgcctgctttgagctatccacataggtctgatgataacttcattctgagttcccatatggatgacagaagggttgcactgaagcggagaaatccaattatttatccagtggatggagtcaataatgggagctgttatgctggcagttcatctaatcctcagttcccatgctacatgcctccaaatcctattcctgctcctgaaccctgccctcctcgaataacatcaaatatgggttcaagctactggactgatcagccctttggtagcaatggaggatctcagaggaatgtgagaggtcgccatgatcacaatcctatccatttgggacacaatccaggtgtagcttgcgcaacaagcagcactcatgggccaccacaccatgctaatgtaattggtcctcaaagtacagcagtgccacaaaatagagcatatttttctatacctccaagagtgactgccccaggcagcgatggaaactgtagcatggttttcagggaagggacatactactctgctccgcagaggaccaacataaatgccccccctgtcctagcacctcctggttcttctgatagtctacattttgtgcatggtgggtatgccccaagagcagcccctcctaacagcatcagcacatatcctgccccggcttttgcgactcctaacaactcagtgacagttacccatgagcctgatatcccttgctatcgacctgccgtccctggctatccgcctgctacctcagcagcagcagcagcagcaagtgttcatgctgaaggtgctgctgcatcttcgagacatctaggtcatgtggctctaggttccagtggtagtgcaaggagtagaaggctgagggattcataccatgcttttcgtccactggttattgaagaaaataacttgagaggaccagcaaccgagcgttttatgatgctaaatcagttatttatccatgaatcgagagaagattctgaccctcactgggacatgaggctggacattgatgatatgagttatgaggagctgctggctttgggagaacgaataggcaatgtcaacacgggcctagctgatgaaaaactttcaagctgtgtgacggagataccctgctgcagctctgcccgtactcatgatgataatgagagcgcaagatgtgtaatttgcctggaggattacaaattcgaggactctgtcgggaagctaaaatgcaatcacaagtatcacgcagactgcatcaagaaatggctgcaggtgaagaacgcttgcccagtctgcaaagcttctgcggcagatgacggcggaggcaccgaatgaagcgccctgccgcccccattcaccctatctcaggcgaagctgtactggctgatctggtttgctgtgtgtaaataatggtcctgaaacggattatttgtgagctgaattaaactcgacatgtaaatttaatcctcaagctagttgcaaattgatggcagcggttagccctacgtgtcagccgtctgacgtaactgcagagagaaaacgtttgcatgcatatgtacagctcgatccaatagaggttattaaatgttaacaatttattagttagttaagccgtctttacgacgtccatcgtcacctaattaaattgcaactaattttc

SEQ ID NO: 6190 - DNA, 2222 bp, Zea Mays
aaacgcagccggtgggcggagccggtaattatcactcgcccctcttcaatcctcctccggtcggaaccctagcccttcctgccagcggtgggcggcgcttggccatgtacccgtcaggggccatggtgggggcggcgcccgcggcgcgcccgagcgcgtcgtcgcgggtggagaaggccacgagccacctgctcatggggcccgactgggccgtcaacctcgaaatctgcgacatcctcaacgccgacgcaaacaaaggatgtggtgaaggcagtgaaaaagagattgcagaacaaggacccaaaggttcagttttttgctttaacgcttttggagacaatgatgaagaactgtggtgaatatgttcagtttgaagttgctgaacaacatgttctgcaagaaatggttaaaattatccagaagaagaatgatatgcaggtaagggacaaaatattattgcttttggactcctggcaagaggcatttggaggacctggaagtaaatacccacaatatcattgggcataccttgaagtaaagacgacaggtgtggtgttcccaaaacgtcctatggatgccccaccaatatttactcctccagctacacataattctgagacctatggttcacccagatattctgcgggaagtctaagtgacagaatgtcctcagatgttgagactctgagtttaggagatttgaataagattcgaaatgtgacagacctactgaatgatatggtgtatgctttaaacccatctgatcgaatggctattaacgatgaaattatcacagatcttgtgacccagtgtcgctcaaatcaacaaaagcttctgcagtttgtcagttcatcagggaacgaacagttactaaagcaaggactggagacaaatgatctcttacaaagcgtactttcaaagtatgatgctgtggcctctggtgctcctttggcggttgaagcatctgtgagagaggcaatcgaggctcctgcagtaaagtcatatgcaccccctgaacataatgataatgttaacgaagaggaagatgagtttgcccagctagctcaaaggaaaaacaaatccgtcgtaagtagtagcgacgatgcatcatccagcactttgggggaccttgcccttgtacccattgatcaagcagtttcagaatcgccatcttctgttgcaagcaatgcgctggttcttcttgatcctgctcccagtactagcactgaatcaaaagagctggacatgatcgaccttctaagcctcaccttgtgcagccctactcctgaaacttcaacagattcttcagcacaggatcaaaatggaccccagcaacctgcagttacacataatcaaaaagggcttcaggaacctacagttacaaatgggcaacaatatccttctagtgtgccacagtatccttcaaactaccagcctcacactgcaaaccaggcatatgctccacagaccagcaactatgtggcaccttgggcccagaccggagcatatccacctcagcctccggcatatgcatctggctatgcctaccctgcaccgccatgggtggcgcctacacatcctgttgattctaacccttttctttcggtcaattaccaagatccacgccctgctgccacttctgttgctcaaacagcaacatatgcacctcccccagcttcatatcccccttcaatatcttatgcacagtttgcaaccccccagtcaattcagcatagcaattctgtggcttcaccgagcaatggtcagattgcaaatcaagcacaaatgaatgtgaatcaacaaccaaaagattcttcggcagcatctagcagaccatactacatacctgataatctattcagtgatttgatcgatgcaaaaagttttggcggtggaaacaagatgggcgggcccactacaatgggtagctcaaatggtggccagcctatgattggtggaaagaaatagggttatttgtctatatatatacagctgatggtgatcggtagctgccttgttatttattatgattactttgtctggtgtacatttgtacttgtatatcgccattcccccttttgacagatttggctgcattggttgattcgtgggtgcaactgttaagtttaacagagatatggacaattgctcatgtacataaatgattagcatttgctccactgaggtggatggttgtgatgaaatctgttggtattgaattc

SEQ ID NO: 6191 - DNA, 1415 bp, Zea Mays
cgaaaatgttatttacaagcattttgtgaaaaggagaaagccaaattggatttgcagtatccgaaggaaccaccacatatttatgctgtggaaagtaagggccttgatgagaaccgacagatatatcttatcaccagcatccagaacaaggcaaacgaactttcaaactgtccaatgcttgtgacgttatgtgaggaagctggagagatcctctcgaacatgaatcatccagcaggggattgtccattgtgtctatatcctttaatgggagaggataaggttggctcggagttgccatttatgaagttgatgtcatgctaccattgcttccacagtgactgcattatgagatggtgggaatggctccaacatggtgacacaaacccaaaggagcccaatactggagctcagacaagcattataatgtgaatcagccaagaggattttgtcctgtttgccgcaaagtgttcgatgagaaggatattgagcatgttcgtgatttgttgggtgacaatacttccaggctggcatcactaacagttgaccttggtgaagatgaaaaggaattgctccattccgaggctgagcaaaacaggagaaaaagaatcgagtcacttgttaatctgcagcaagaactaaacggcctgattgaaccaaagaaagaccttgccatacaaccaggaatgtacgtttccgttcctcccagcacgccagacacagctgaagaagagaatgctgatcccagccaaggcacggctacttcgacctcagaaactgagcaacgtggccaggcaagcaacgccagcagcaacaagccgaagaatccaggccatcgaaggagaaacagagctaatgcatcaagacgacagcctcacggccagggccagccagctaggcagcagtggcagaggaaagaagcaggcacttcacaccaataaaacaacatcgaagcaacgaggaggatgtgacctgtgagttgtttttgtcggctatgtacatcaatgtcgtgccttgctttcgtctcataataattgcgagccatggtatgacaatgttttggcgctgctatggaagttccatgcaagtgatactctggaaagaaccctgcaccggattctatgggagtagtataaagcacatgcatgcttggctagtacatacaatatctgattttttgtgtgtgtgtcattgccaggtactatgttcaaactgattgtccatagtcagaaaagcaactgattacactgtttgttactctttgagttgcatcatgtgtttgaaatacatacattacagcttaggtcatgtgggacattacaatataaagcactgcatgcagaatttgcaggggtcggctatgttggtaacccaataacaatgcatacctgtaaggtgctattgttttgtccgctact

SEQ ID NO: 6192 - DNA, 1955 bp, Zea Mays
gtcctccccttaacgcacctcatcgagtaggggtcctatcatcgagtcatcgttcagagacagaggctggtcgatcgtcggtgactgatggcgatggcggcggcgcaattggaggcggaggaggagctgcggctggaactggaggcggtggcggcggtgtacggagacgacgtccgcgtgctccgcgacctcccaccgcacctcttcgtccacgtgcggccccgcaccgccgacgacacctcgcagcaggaagctgaacttggacgactgggatcctaagcagaagagccactatccttgtaggctgtttttcgaaacttgtttcctacgagttgttgtttcatctcttacaatgataatcaactaatcgtaatggaagcctttgtccaaatgccagcagtaacttcttggtgtttcttttgttgaaaatcccttcatgtccattttccatgagctttctagtcactgtaattgtagcatcacctcttttccatcatatgaggttgaacgcatagataaccatttactgtttgttttcataaatttggttttctctgtttcagttcgtggagctctttcttggcattaaagcatcttcacagtatccgaaggaaccaccacatatttatgctgtggaaagtaagggccttgatgagaaccgacagatatatcttatcaccagcatccagaacaaggcaaacgaactttcaaactgtccaatgcttgtgacgttatgtgaggaagctggagagatcctctcgaacatgaatcatccagcaggggattgtccattgtgtctatatcctttaatgggagaggataaggttggctcggagttgccatttatgaagttgatgtcatgctaccattgcttccacagtgactgcattatgagatggtgggaatggctccaacatggtgacacaaacccaaaggagcccaatactggagacaagcattataatgtgaatcagccaagaggattttgtcctgtttgccgcaaagtgttcgatgagaaggatattgagcatgttcgtgatttgttgggtgacaatacttccaggctggcatcactaacagttgaccttggtgaagatgaaaaggaattgctccattccgaggctgagcaaaacaggagaaaaagaatcgagtcacttgttaatctgcagcaagaactaaacggcctgattgaaccaaagaaagaccttgccatacaaccaggaatgtacgtttccgttcctcccagcacgccagacacagctgaagaagagaatgctgatcccagccaaggcacggctacttcgacctcagaaactgagcaacgtggccaggcaagcaacgccagcagcaacaagccgaagaatccaggccatcgaaggagaaacagagctaatgcatcaagacgacagcctcacggccagggccagccagctaggcagcagtggcagaggaaagaagcaggcacttcacaccaataaaacaacatcgaagcaacgaggaggatgtgacctgtgagttgtttttgtcggctatgtacatcaatgtcgtgccttgctttcgtctcataataattgcgagccatggtatgacaatgttttggcgctgctatggaagttccatgcaagtgatactctggaaagaaccctgcaccggattctatgggagtagtataaagcacatgcatgcttggctagtacatacaatatctgattttttgtgtgtgtgtcattgccaggtactatgttcaaactgattgtccatagtcagaaaagcaactgattacactgtttgttactctttgagttgcatcatgtgtttgaaatacatacattacagcttaggtcatgtgggacattacaatataaagcactgcatgcagaatttgcaggggtcggctatgttggtaacccaataacaatgcatacctgtaaggtgctattgttttgtccgctact

SEQ ID NO: 6193 - DNA, 935 bp, Zea Mays
agactaccccttgaatctgaacatatctctgttggccgtcgaccagttgttggcctcaaactgattttggaaggagccaaacagaatcgtctggctattcatttgcagcaccttggctcattaccaaaaatattcctacctcattgggactcctatattactattggacctccaaaatggcaaggtcctgaagaacaggacagccgatggtttgagccaatcaaatggaagaactttgctcatgttagcacagcacccatagagtacactgaaacaaatattacggacctatctggtgtttatattgttacaggagcacagttgggagtgtgggattttggtgcaaagagtgttctccaccttaaacttttgttctccagggttcctgggtgcacaattagaagatcagtgtgggaccacagcccatcaagttcctcggtacatagaacagatgaatcttcgtcatcctcaagtgataatgctaaacttctgaagatcgttgacctgacagaaacattcaagggcccacaagatgcgcctggccattggctgatcacaggtgctaagttgggtgtcgagaaaggcaggattgttgtgcgtgcaaagtactccttattgaattattaaccaaatgtttaaatcattcaatcactctgatattgagcactgtgttttaaggtagcatttgttcttttgtttttcatgtatggcttttgttcccccttgtaacatgatgtggatcatgtttcttgttgatgatgccgtgagtgaagcactacattcgttctcgaatatttgacgtccactagtccactagttcattactaatcagcgataaataaaaaagaactcgaatatttggcgtccgctagttcattactaaacaacgataaataagaaagaatggagggagtggcatatgaagatgttatggt

SEQ ID NO: 6194 - DNA, 894 bp, Zea Mays
cgacctgaaagagcttctgcagctagctccaataaagaaggtaattttcgaccaccaacacctacacttccttcctggcctacaccgtagaaagcagagaagcattcctctcctgccctcactctggttggtgatgctccaatttttacccctaacccccaaggcgacaactttcaagatccagaagtcaaatgccatgccacaacaattagaggatgagttcaagagatttggtgccattaaacatgaatgcatccaagttagaagtaataaggaggcggtcgcgcctgctctgccgaaagtgcgggggcacatcggcagcgcctacggggaggaggacgccagggaagccggctcctccagcctcttcggcggtgacggctcctcggacgacacgcatccgagctccggctcgggccaccgcagcagcgtcgcgtcgagccagaagagcctggatgaatttgaatttggtgtaacctgggatggcgatggactgcaggaggacgaagtggagcaaggaaagatctttcttggcgtgtctagacttttcagaggctcagtggtgacatcagctgagaacaccatgcggcaaaactgcacactcctagctgttctttgtggggagtttgctgagaagcagcggacaccagcttccctggcgctaggcacaaagcggttgcggctgtcataccctttccttgagctcgcttcgtttgggagactggaggggcagcagcaagagaatgaggagattggcacgcttgtctggggtgatacagatttatctgacccgcagatgtttgtctcacacctttgtatgagtttttaaataagttgtacttatccaaacttgcttcacttaatcttatctatcaaattcccatgtacaattac

SEQ ID NO: 6195 - DNA, 2345 bp, Zea Mays
agcacacggacagaggatagagaaaacagagtgcgacgccgacgaagagagagacagagagcaaaacccaaaccctaacaatcatttgcagcccccggcgtctcgagaacctccaaggaaccatccacaggagaaggcgcgagcgcgggtgtttggatcgggggaggcaacgctggcggctcgcggcggcagcaggtgatggcggatccgcctagcggtgggggatctagggcttgtgtctgcagggagagacaggtcgaggaggcagaggcgggtctggggctcgggagaagagaacaggggaggaaggagggaggatgctgagcgtggttcgggtacacctgccgtcggagatcccgatcgtgggctgcgagatcacgccgtacgtgctactgcggcggcccgacggtgcagtctccaccaacgatgtccccgaaaccgcgcccgctgatggccagttcatgcggtacagatggtatcgcatacagagcgaccggaaagtccctatctgcagtgtgcatccaatggaacaagcaactattcagtgcctcggttgtctcaagtcaaaaatacctgttgctaagagctaccactgttcagccaaatgcttctctgatgcatggcagcaccacaaagttttgcatgaacgagctagtagtgctctaaatgaaaatggggctgaagaagaggagttatttggcagatttggcagtggtggttctggggttctaagtactgctggatctggttctttgtcaaattttggacaaagccctggtgttaataatggacctgtgcctttctatccctcaggtaccgataaaaattctggagaaacttggtttgaagttggacgctcacgaacatatacaccaactgctgatgatattggacatgcactaaagtttgagtgcgtagctgtggattcagaaaaaaagtctccaattggaccctcaacctcaatcatgacatcacgtgtaattcccgcgccaactcctacccctcgccgccttatccaagtgaatggggatgttttaggtcacttggatttagacagccaaatttcgtccttagggacattcactgtgttatcctacaatattcttgctgatgcatatgctacaactgatgcatatagctactgcccaacatgggcacttacctggaattatagaagacaaaatttgctgcgtgaaattattggttatcatgctgatatcatctgtctacaggaggtacaagtaaaccatttcgaagattttttttcacctgagcttgacaaacatggatatcaggcgctttacaagaaaaggacaacagaggtgtattctggaaatcctatggccatagatggatgtgctactttttttcgtagagacaagttttcacatgttaaaaaatacgaggttgagttcaataaggctgcacagtctttaacagatgctattattcctgctgcccagaaaagagtggctttaagtcgattgattaaagacaacattgcactaattgcggttttagaagccaaatttggtaatcatggagctgaaaatcctggtaaaagacagctcctttgtgtggcaaatacacatataaatgtccatcaagacctaaaagatgtgaagctatgggaggttcataccctcctaaaaggattggagaagatagctgtcagtgcagacattcctatgttggtctgtggagatttcaactcaacccctgggagttctccacatgcgcttctggcaatgggcaaagttgatcagcatcatccagatctggcaatagacccccttggaattttacgccctccaagcaagttgaatcaccagcttcctttggtcagtgcatactctgcatttgcaagaatggtaggtgttggctatgatttggagcatcagcggaggacagaccctgcaacaaatgaaccactcttcacaaattgcacaagagattttactggaactattgattacatattttacacagcggactcattgacagtggattcattattggaacttttggatgaagaaagcttaagaaaagacacagctctcccatcccctgaatggtcatcagatcacatagcactcttagctgagttccggtgcaagccaagaatcagacgttgacacattaggtatgttacaaaggaaatcagtgttgtcatattgcttctattgcaactgaatgttgtttttttgttgacatgaatgatgttggattgtgttagagtaaataggaatagtaccacattgtctaccccatgtaggggtgacaatgggctctaaattttacactataagatttaaggattggatcagattaggattgggccttat

SEQ ID NO: 6196 - DNA, 3091 bp, Zea Mays
gccaactacacgacacaacctgccttccttggttcctccaccccgtcctcccctgtcccgtcgcgtcagccactcgccgcggccaactaccgccgccgctgttgcagccgcccatctgcttccatcgcgtcgcggaggccgctcgcttcgccgccgcacgctccgctcttccggtgccctcctccgggaccctcggccacgccgcgtcgccttaaaccctagatctgcgctccccgcccccgcgctggccgcggccgcgtactgacgccggcacgctgccgatctccatacgtcgctcgatcccaggtttagctgcttcgaatttagataagtttcttccatgcatcgtgttggaagtgctggtaacacggctggctcgactcgaccgagaaaggagaagcgcttcacatatgtgctcaatgatgctgatgataaaaagcattgtgcaggaatcaattgcatggcttatctaaatggttctacatttagtacaagtgattacctttttagcgggagtcgtgatggtaccttgaaaagatgggaattaaataatggggatgcaagtttctcagcaacttttgagtctcatgttgattgggttaatgatgccattatagttggagaaaagcttgtttcctgttcctcagacaccacaataaaggtctggaattgcttctccgatggtgcttgtaccaggactttccgccagcattctgattatgtgatttgtcttgctgctgctgagaagaatccaaatctgtggacgcaaaagaagacgaggttcctaatggaaactcagggcctcctttgacaacattgtgcagtgtaaattctagtagcaatattgcttcctctaatagtcaatcacatgggtacagtccaattgctgccaaaggtcacaaagattcagtttacgcattggctatgaatgatacaggaactcttcttctctctggtggcactgaaaaggttgtccgggtgtgggatccgaggacaggttcaaaaaacatgaaattgagggggcacactgacaatatcagggccttacttgttgattctacagggaggtattgcctatcaggatcatctgattcgatgataagactatgggatctaggacaacagcgttgtgttcattcttatgctgtgcatactgattcagtttgggcgcttgcaaccactcattcgtttggtcatgtctacagtggtggaagagaccaatctgtatacctaacagacttatccacaagagagagtgttttactttgcacaaatgaatgccctattctacagttgtctctgcaagatgacacaatatgggtggcaacaactgattcttctgtatatggatggccagctgaagggctcacaccccaaaaggttttccaaaagggtggctcattcttagctgggaatttgtcattctcaagggcaagagcttctttagaaggatcagcacctgtccctgtatacaaagagccatcttttgtcgtcccaggggttccagcaatagttcaacatgaaataatgaataatagaaggcatgtactgacaaaggataccactggttcagtcaaattgtgggagatcacccggggtgctgttattgaagactttggcaaggtttcatttgaggataagaaaaaggagttgtttgagatggtaagcatacctgcttggttcaccatggatgctcgattaggatgcttgtctgtccacctggatactccacaatgcttttctgcagaaatatatgcagttgatctaaatgtttctggagcacaagaagatctcaagattaatttggctcatgataccctttgtggcttgctagttcattggagtaaaagaaagcagaaatctagttcgcatggcttgcctaatggtgatagttcaatagggaaagatgttccgtcaaaagactcgcaccgatcaagaactgagaaggttctagtggagggccttggagaaagagaattactgatttggatggaaccgaaggtgatctaccttggtggtgtgtggactgtgttactcacaatcgatatccaaaggaaaatacaaagtgtggcttttatttacatcctgctgaaggttcgcctgcgccaaacataactcaagggaagcttagtgctccacggatattacgaattcacaaggttgctaactatgtggttgagaaactcgttcttgacaaaccattggatggaggctctgatagtacgtttgttatgggattgagttctgctcaatcacagctctcacagctagatagttcttcgcggcttggactaaagccatggcaaaaaacaaagccatgtattgaggtattgtgcaataaccaggttctatcaccagatatgagtttggctacagtgcgaacatatatatggaagaagccggaagatttgattcttcattatagagtggtccaatcgagatgatcacggcttcagatgtacatgctcacatggttctccagatatgtcccagcatgtccgcacctttagatggtgtggttgaagatgcctttggcttagagaggaagcatcatcttcacagaggaaatattttgctcttgctccgccctccccccggtagctgttcccagaatcgacttgttcgcttctctgtaaagttcctgaccttgccctggtagtaagatgtatcatagcacaggtataaggctctctgctggctgccgagcttgtaaatgtagaagattaggtgcttaataaaagatcgaaaggatatgttttttctttcgtttttctttgacagcatttgtaagaaaaaaaaagaggctgacgctcggcccagatcgtggcgctccgacgtcgattattggatttaaccccgccgatccccttggaggtgtttggttgagaccagggtaagaggtggacgggaacccgggaacaataaagctgtttttgggacatgttgatgtcgggagctactttacctctcatccttcaacaattgttctatatactctatagggctattttagttttttttgttttttgctagcgagaaatcagaaataaatgattgctttgttttgataatcaaagctgttggatcatgg

SEQ ID NO: 6197 - DNA, 3103 bp, Zea Mays
gccaactacacgacacaacctgccttccttggttcctccaccccgtcctcccctgtcccgtcgcgtcagccactcgccgcggccaactaccgccgccgctgttgcagccgcccatctgcttccatcgcgtcgcggaggccgctcgcttcgccgccgcacgctccgctcttccggtgccctcctccgggaccctcggccacgccgcgtcgccttaaaccctagatctgcgctccccgcccccgcgctggccgcggccgcgtactgacgccggcacgctgccgatctccatacgtcgctcgatcccaggtttagctgcttcgaatttagataagtttcttccatgcatcgtgttggaagtgctggtaacacggctggctcgactcgaccgagaaaggagaagcgcttcacatatgtgctcaatgatgctgatgataaaaagcattgtgcaggaatcaattgcatggcttatctaaatggttctacatttagtacaagtgattacctttttagcgggagtcgtgatggtaccttgaaaagatgggaattaaataatggggatgcaagtttctcagcaacttttgagtctcatgttgattgggttaatgatgccattatagttggagaaaagcttgtttcctgttcctcagacaccacaataaaggtctggaattgcttctccgatggtgcttgtaccaggactttccgccagcattctgattatgtgatttgtcttgctgctgctgagaagaatagcaatattgtagcctctggtggtcttggtggtgaggtttttgtttgggaccttgatgctgctcttgctcctgtagccaaatctgtggacgcaaaagaagacgaggttcctaatggaaactcagggcctcctttgacaacattgtgcagtgtaaattctagtagcaatattgcttcctctaatagtcaatcacatgggtacagtccaattgctgccaaaggtcacaaagattcagtttacgcattggctatgaatgatacaggaactcttcttctctctggtggcactgaaaaggttgtccgggtgtgggatccgaggacaggttcaaaaaacatgaaattgagggggcacactgacaatatcagggccttacttgttgattctacagggaggtattgcctatcaggatcatctgattcgatgataagactatgggatctaggacaacagcgttgtgttcattcttatgctgtgcatactgattcagtttgggcgcttgcaaccactcattcgtttggtcatgtctacagtggtggaagagaccaatctgtatacctaacagacttatccacaagagagagtgttttactttgcacaaatgaatgccctattctacagttgtctctgcaagatgacacaatatgggtggcaacaactgattcttctgtatatggatggccagctgaagggctcacaccccaaaaggttttccaaaagggtggctcattcttagctgggaatttgtcattctcaagggcaagagcttctttagaaggatcagcacctgtccctgtatacaaagagccatcttttgtcgtcccaggggttccagcaatagttcaacatgaaataatgaataatagaaggcatgtactgacaaaggataccactggttcagtcaaattgtgggagatcacccggggtgctgttattgaagactttggcaaggtttcatttgaggataagaaaaaggagttgtttgagatggtaagcatacctgcttggttcaccatggatgctcgattaggatgcttgtctgtccacctggatactccacaatgcttttctgcagaaatatatgcagttgatctaaatgtttctggagcacaagaagatctcaagattaatttggctcatgataccctttgtggcttgctagttcattggagtaaaagaaagcagaaatctagttcgcatggcttgcctaatggtgatagttcaatagggaaagatgttccgtcaaaagactcgcaccgatcaagaactgagaaggttctagtggagggccttggagaaagagaattactgatttggatggaaccgaaggtgtggcttttatttacatcctgctgaaggttcgcctgcgccaaacataactcaagggaagcttagtgctccacggatattacgaattcacaaggttgctaactatgtggttgagaaactcgttcttgacaaaccattggatggaggctctgatagtacgtttgttatgggattgagttctgctcaatcacagctctcacagctagatagttcttcgcggcttggactaaagccatggcaaaaaacaaagccatgtattgaggtattgtgcaataaccaggttctatcaccagatatgagtttggctacagtgcgaacatatatatggaagaagccggaagatttgattcttcattatagagtggtccaatcgagatgatcacggcttcagatgtacatgctcacatggttctccagatatgtcccagcatgtccgcacctttagatggtgtggttgaagatgcctttggcttagagaggaagcatcatcttcacagaggaaatattttgctcttgctccgccctccccccggtagctgttcccagaatcgacttgttcgcttctctgtaaagttcctgaccttgccctggtagtaagatgtatcatagcacaggtataaggctctctgctggctgccgagcttgtaaatgtagaagattaggtgcttaataaaagatcgaaaggatatgttttttctttcgtttttctttgacagcatttgtaagaaaaaaaaagaggctgacgctcggcccagatcgtggcgctccgacgtcgattattggatttaaccccgccgatccccttggaggtgtttggttgagaccagggtaagaggtggacgggaacccgggaacaataaagctgtttttgggacatgttgatgtcgggagctactttacctctcatccttcaacaattgttctatatactctatagggctattttagttttttttgttttttgctagcgagaaatcagaaataaatgattgctttgttttgataatcaaagctgttggatcatgg

SEQ ID NO: 6198 - DNA, 1931 bp, Zea Mays
gcgcgggtacggggcgtccttgccatttcccaccctacttgagctaggcggcaggacggacgcggacgggcgggggaggagaacacacgaccgcgacggaatcgcgaggggtaggcgaggcgaggcgaggcggcgaccgagggaggagcagtcgagcagagcgtagggggcgcgagggatggacgcgaacgggtgcggggagaatgacgacgcgcgggcgccgctcctggccgggcctgggcggcggcgcaactccgtcgcgtccatgcgcggggagttcgtgtcgcggttgcccaagaaggtgctcgacgccgtcgaccccgagcgcccgtcgcacgtcgacttctcccgctccaagggcctcctcgaagcaggcatgcaaacgagttttacagataccacgtagcaggcagtgtcctggcctcctggcctcctggccctggggcacctttctctccctgaaactaaagggagagagagtactatgagaaacaatttgccacattgaggtcctttgaggaagttgactcactagaagaatccaatgaaatcaacgaggatgaggagcttgcggagcaaatccagagtgaatttgctatgaagatatcaaattatgcaaacattgttctcttagcgttgaaggtatacgctacaataaaaagtggatcaattgctatagctgcctcaacactggattcactgcttgatctcatggctggtggtatcctttggttcacacatctgtcaatgaagagcatcaatgtctacaagtaccccattggcaaactgagggtacagcctgtaggcattatcatcttcgctgctgtcatggccactttaggcttccaagtatttattcaggctgttgaaaagctggtagtgaatgaggctccagataaactgaaccaagtgcaattattgtggctatattcaatcatgatctttgcaacaatagtgaaattaggtctgtggctctactgccgaacgtctggtaacaagattgtccgtgcttatgctaaggatcactatttcgatgttgtcacaaatgttgtgggtttggctgctgctgtccttggtgatagattctactggtggattgacccaattggtgcaattgttcttgcagtgtacacgatttcaaactggtctggaacagtgtgggaaaatgcagtatcgctggtaggtgaatcagctcctccagaaatgcttcagaagttgacatatctggctatcagacaccatcctcagattaagcgtgttgacaccgttcgagcatacacctttggggtgctttactttgttgaggttgacattgagcttccagaggacttgccacttaaggaggcacacgccattggagaatctctccaaatcaagattgaggagctacctgaagttgagcgagcattcgttcacctagatttcgaatgtgaccataagccggagcattcaattctcaacaagcttcccagcagccagccttgatccgaacgaatcctgtgtggtagattgtcgtgcagaatctgctgcagttcttgcattggcgtcttgtgctgtatgacaaaactaagagttcaattagttttgtggcggtgagtttaagatcaggcgcatctaagactacgagagatgaaggtgccgaatgcagagatttctcgagtgtggaaccctttgtggttctgttggtatggtcttcgttttgagcgaaattaagcattttgctgttggcatcatggcatgtgattggcggcgatctagctgtgtgctatcgactacggtgatgtttagacatggtttcgagaaagagagtagatccttgatttctttaagcaaatctcagtgcctttttattttagggctagtttgatatcagtttctaagtgatttctattttttttattttttagaaaataaagtaattttacttgaaa

SEQ ID NO: 6199 - DNA, 1307 bp, Zea Mays
cccctgctcgacgcgtcggcgtcggcccccgacccccgtccgcacgagaaaacaaatcgcctcttttccaggagccaaaccaccacaccttatatctgtcatactttctcgccccccgtgagccgtgaccccgtctcgcctcgccgccgccgccgccgccgatgggctccggggaggagccgtcgcagatgcggagggcgctggtggactctctcgcgggcgccatctccggcggcatctcccgcaccgtcacctcccccctcgacgtcatcaaaatccgcttccaggttcagttagaacccacaacctcgtggggtattcttcgaagggatgtgtatggaccttccaaatacactgggcttctgcaagcaaccaaagatattctcagagaggaaggtttaccgggattttggagaggaaatgtaccggctctgtttatgtatatgccatatacagctatacaattcactgttctacacaaactaaaaacatttgcttctggttcatctagaacagaggatcatttggatttgagcccttacttatcttatgtaagtggagctatagcagggtgcacagcaactatagggtcatatccatttgaccttctgaggactattcttgcatctcagggtgaaccaaaggtttaccccaatatgaggtctgcgtttattgatataattaaaactcgtggtgttcaagggctttattctggtctatctccaactcttgttgaaatcataccatatgccggtttgcagtttggttcatacgacactttcaaacgttcgatgatgacatggaacagatataaatattcacatcttagctttggaagcgaggatgattcagtatcaagtttccagctatttctttgtgggtttgcagctgggacattttcaaaggctgcatgccacccacttgatgttgtaaagaaaaggttccagattgaaggactaaaacgacatccaaggtatggtgctccaattgagagcagtacatacaagggcatgtaccatgccttaaaggagattgtcgtaaaggagggatttggaggcctttataagggccttttcccctctttagtgaaatcggcccctgctggtgcagtgacatttgtggtttatgaatacatctcagactgggtgcaaggctggagttgagtaagttcttgttggatcatggagctgtcaggataacatgacgaaaactttttgcacaccctggataatggaggggaatggagaccataaggtaaatgcacgtgtcgagcggcaggcatttctggtctttcgatacacatcgtg

SEQ ID NO: 6200 - DNA, 3564 bp, Zea Mays
cggttgccatccgtaacctccacccacctcgcgctctcgctgttctgcaacacgtgggtcagtcgaagcgggctcatctgcactgctgggttgtctaggacacgaccctacatcgcggctcgcgggcgtcagggcgcagatcagccatgccttccatcgagcagttccagcattggatggcaaccaacgtgtgtgctcttgtcttcgtttatccgtgcgtgggttctttcgtctggctggggactcctgcacgccggctctcgtacgaccgccgttctcccggacttcgtcggctcccacttttggaacttctagtctattgtcgccttctagcagagattggtggaagacgacgatgtctcgctaaaggagaggagtggaggaggcgggagcagcaagaatggcgtgctccaccaatctctgcttctcagtgtcgattcctcctctcccagcctcttgttcttctgactcctcccccttccgcacaatggagcgtgtgtcctgcactctgtccaggcattggtgaagcggttacggtgatggggatgggcaagatcgtgcggtggtgcgctgggaagtagcacttcctcgccaagaggaacaccaggcgcaagaagaggctctccaatatgtcaaaagaatcatagacaccatagatctctggcgattgttgcggttggcgacacaaaattggaacttaatgtgttccaaatagcgacaatgcctcactcgaaacaggtgtggcaattgcagcttcatttgcttccaagcaaagaggaccaatgtttcagtaaggacttttgattgtctttgtctacaatggtttatcaatttcacccttcctacacatgaaactcgcactaggtacaacagctatgacagagaacaaaaaggtagtcttttgttgactaaggccttgttcgtttctgccggattggtaggtcggaacgattcctgaccggattgtttctctaatttatataaactttgattagctggaacgattccagttataatccgacggaaacgaacaaaggactaagacgtctccaaccgtctcctctcccctcaccgtatttgctattgtggtctccaaccgtctcctctctcctcaccatgtttgccattgcattgcatgtacaacgtcacaatatactctttcaacaactcaccccgctctatgaatgagggagttttaagggcatgtttggttcgtatctaactgtattacactttgcataaggttagtcgttcgaattgaagaactaaccttcgataaaaaaaaagttaggcaaagtgtagcaaattaagcagtgaaccaaacatgtccttaatctccctgcttccattatcttaatttaattacctgataataatgtgttgtcttgttcttgattcatagcggttgaaaataagtgaccaacaatattcgttccaaatttttaactacccgtatccgttcatgtatcctggagaaatatattacgttaggatacagaataactttgtatctagttcctgttttcatccctaagcagacagcactgtcgcaagccataatctgcaataacaacatataattgtgccatccaaaaaacgtaattattgtttgttcgagataatgcgctaataacgtgtggctagttctagcaactggatgtgggtgcctgcagtgtgggcccgagcaaatccatctcttgcgctcgcagacaacggccttcccgccgccggtacaatcagatgcagatgctaatgatacagtccgtccagaccccacccgccgccgcccacctccgcgctgctgcgcccgccagcacgccaccgctcctcgcgcgtaggctggccggttctcgtccagctcccgcctccgccggaacaatcagatgcagccgatgctaacgctacagtccgtccagcccccacccgccgctgcccacctccgcgccgctgcgtccgccaagacgccactgctcctcccgcgcagagcggccggtcctcctccagcttccgcctccgcctccgcctcggctgagttcccaggatccgttccagacagcgctcagatggcgccccgacggcggcggcgccggagcgtggccggcatcgaccaggacgaactcctcgatcccgaggccctcgcggaccccgacagcggcttctacgagatcaacggcgtgaggctgcaccacaaggtctgcagccacgaggatgaggactcgtccagcgaccagtccaccggtagtaccattgcctcagactcagacgctgtcctgaaaagccagattggcctgcccatactgctgctgcacggcttcggcgcgtcagtcttctcctggagcagtgtgatgcggcctctcgcccgcattgtccgtgccaaggttcttgcgttcgaccggccggcgtttgggctgacatcccgggccagtcgctctgccgatgacgccaagcctctcaatccttactccatggcgttctcggtcttggccacgttggcgttcatcgactaccttggcgctgagaaggccatacttgttggtggatgcatactttgaggcaccggaacgggtggctgctctcgtgctagttgcgccggctatatttgcaccaaggaaggcggtgaaagagggccagtcaggggaagaagaaggagggcagcaagcacagagggttcccaacgatgaaaattcgcctccaaatttgttcgctaggatttcgggaggatttcttgagctatggaagcacgttgcggggcttgttctcaagatgatcacagcgatacgagatgtggtccgatctttgtgtcttaaagctgtcgttgcttttcttcggtcatcgttgggtgtggtgctggtaagatgggtgatggataaatttggtatactgggcgtccggaatgcatggtatgacccgagcaaagtaactgatcatgtcatacaaggctacacaaagcctctaaaatccaagggttgggagacagctctgctggaacacaccgtatccatgatcatagattctgtgtctgcatcaagagtaccagtttcaaagaggctttctgagatctcatgcccagtgctagtggtgacaggtgacaccgatcgcattgttcctgcttggaatgccgagcgtgtggcacgcgctatacctggagcaacttttgaggcgatcaagagttgtggtcacttgccccacgaagaaaggcctgaggaattcctgtccgtcgttgaaaattttctacggacaacgtttgcaaatccaaatgaacaagtatttcaagcagctgtatcatgaattatgtgttgagtacgatctatttgctttataataaatcttaaagacccactcgtgtacaatgagagtggaatttggagtttaagcacatgagaagtaaaagaagttgaagaaaacttatatagtttgtctcctgcttttttttaaacaaagcaagagagggagaaaactaaagctacaagtgcgcacgttttatgttttcttttgcgtgataattcgtgcgacttgtgacttacgatgtgatgattcatgctaattttatttctatcttttgtt

SEQ ID NO: 6201 - DNA, 3267 bp, Zea Mays
cgaaaccgaaggcaaaagctacaacgactccttccattcttgtctctccgcctccatctcgccccgcaacgcccgcatttggtgccgcctctctccacgcgctttcccaatcacggcgccgctttcaatcaccgcctcgccgtgcaccgccacaccttcccgtccccggacccgacgcagcgtgccctgccgccgtccgtcccccttcgtataatggacgccgacgagccaccggagcccgctgtatccgcacgcctctgccgccgattccggaggtaggatttcgccctcccgcgcggcaatgggctgcacgacctcccacgacgccgtcgccgccgctgtcacctcctccagttcccggccccgtgcgcgccgcgcgtccgcgtccgcgtccgggccctcaccgcggcgcggagaccccgccgcgctgtgccgcgagcgcgtggcgctcatccgcgccgcggccgaccgccggtacgcgctcgccgccgcgcacgctgcctacttccgctcgctcgccgctgtcggcgacgcgctgcggcgcttcgtggcgtccgcgctcgcgcccggcacgcccgggtcctcgccggtgctcacgctcccgccttcccccgccaagccggtcgctgccgcgtccgccagcctcccgccgtcgccgtcgtccaccgtctcgccgctctcgcactccgtctccgacgacgacctccatctccatgaccttgacgacaccccgtctccgtcgacgtccacgagacactaccaccacttcatgagaagatcgcccaccgtgcccaccgtggtgtacgaggaccccaacgcccagacacagtacaccacagccgagaccagctacggatacgcctacggcgtcggcgacggctacgggcctgcgtacccgtacggtccctatggtgaggtagttgcaggagagactccggaggcggcaccgagatcgcctgggccgccgccttcgcccccgaccgcggaggcctcgccatgggaattcttcgacccgttcacgcagtacgaccagttcatggaggactacactcgtgggaatctgccaaccaacagccccaactacgccgagctgaggaggatggaaggcatcccggagcttgaggacgaggccgagttggtggggaatgcagaggcatcaaagccatcgacttctggggtttctgatcagaacaagaaagggaagggaccaattcaagacaatgccgcttccaacggcgatttttctggtgacagcaagctgcagaagaaagcgacttcaaaggccgattcttctggtggaaagctgcagagggatgccacttcaatcagcgattctcctggtggcaagctgcagaggaagggatcggaaccacctcctggtggcaagttacaggggaagggatcggagccaactactgacgccaaaggcgaggcggggaaaccggtgtccaggaatgattccgggccaagcaatgtcagctcgaaaaacaaagaagggaggaagaagaacacaatgagcctaaagggcacagttagcagtgacattgatggcagcagcaccagtgggaagaagaaaggtgtggccttcgaaagggaacgatccatcagagaagcagaaggatgtggggagatccatggccagtcggtggtgagcagcgacccattctcaccatcgcatcatgggacgagggatgtcagagaggcgattaatgaggtcaatgagctgttcgacgaggcggcaaactgcagcacagatgtctcaaggctgctggaggtgggcaaaatgcctcgtagcgataccccgagagttctcagatatgtctcttccagagtgatggatcctttaggccttgctgtgtcgacatcgtcttgcctcccgaaatcacatggcaggaagtcgagaccatcaagcagcatggcaaggacttcagcttcgttagatgctggcagtagcaatgatgttggccacctctcatcaaccctggagaagctgtgggtctgggaaaaaaagctctatcaggaagttaaggtggttgttctaggatgaggagaagctacggatgaagtatgagaagtattacagaaggctgaaatccatggacgaacgaggcgctgaatcaagtacaatcgactccacccgtttgtccgcaagacttgtggagtccaagatcagcatcaacattagaaccgcaaacgccttctcgttaaaaatacaggagattcgagacgaagagctttaccctcaactggttgatctcatccagaggttcaggagtttgtggaaagatattatggaatgccatgagaagcagctattagccatacaggacagtaggattcactggatgaaggcgatgactgtaagtgaatccggcgttgtgtcagaggcctcacgggatttggaacgggagctgacgaaatggtaccgttgcttcaacaagtggatgatctcgcaaaggtcctgtgccgaggcgctgaacgaatggctgaagaaatggctccctgagtcgcaggaggaggttacagcagacggggctcctcctttctccccgggcaggcttggcgcgccacccgtattcgtcgtctcaaacgactggttccaagcgatcgagatggtctccaggactgatgtgctgaaagcgatcgaccagttctctaaggtcgtgcgtagattcaagaagagccaggaagacgagcggcggcagaggcggagagccgaccacgcctccaaagactacgacagaaagcgcaaggatctggaggaagagctcgggctgagcaccatggagagtcctcgctacagccatgacaaccgtgtggtggacctggagaagctgaggaaaagaagagacgaggagagcaccaggcatgacagggtcctgaatcatgcccacgtcacggcttcagctactctgccagtcggtttggtccctgtgctgcaacagatcaccagcttctttcagaggaaccaacgggtctacatgcagattagaactcaacaaggcgcctgatgatgatttctagttagcagtgttgcattcttttgtatatagaatttacaagatggggttatagactgctggagttttacataagtagctactaattcatggtaggtataggtgttagactgtgtgtgtgggccggtaccgctgttgggctgtcagtccattaggaggttagggttctgtgtctatatatgtaatcaccacctctatgcaatatcaatcaagagttccattctcctacaataggaagggctactaa

SEQ ID NO: 6202 - DNA, 1847 bp, Zea Mays
accacgcgaaacgaagcgaagaaaacgccggcgcccccgcagccagacgctggaagcgccggaacgaacgaacgcgcggcgccaccacccacatcactgccctgccgtcgtagcccagccccacccacccagcgccgcccgcccacgccaccacgcggaccgcagccgcgccgcagctgctcacacacacagggcaacagacgcctcctccatccccacgcgagcggacgacacgacgcggccatcgccgcacgttgagatcccctccgctcctcctctcgatggtctccgccagcgcgccgccgccgccgccgcaggcccagtccgacgcggccgggtcgggggaggaagccagcaagaaggtgcggaagccgtacaccatcaccaagtcgcgggagagctggacggagcaggagcacgacaagttcctcgaggccctgcagctctttgaccgtgactggaagaagatagaggcttttgttggctccaagaccgtcatccaggagtcacgcacaaaagtactttttgaaggttcagaaaaatggaaccagtgaacatgtcccacctccacgaccaaagcgaaaagctgcccatccatatcctcagaaagcttccaagaatgaaccaaactatggtctcaagacagattcatcttccatacataggaactctggcatgaatgtgtctgtttcttcatggcctcataggtctatcccgcaagctgttgcttcatcgatggtgaaagaagatttaggtgctggaacactaggtccaaacaatttttgctcaagcagtactgaaggccctccaagaacttggcaacctggtgaaacaaatggtccaataaatcaaattccgtcactccgccttatgccggattttgcgggagtgtacagcttcttaggtagtgttttcgatccaagcacaagtgatcatctgcagaaactgaaggagatgaatccaattgatgttgagacggcgctgttgttgatgaggaatctctccatcaatttgaccagtcctgattttgaagatcaaaggaaattgttgtctttatatagcgcttctgatggacctgagctagggagctccaggagttcggctctagcaacgagtgcacctttcatgattaagggtggatagtgtggccaggtctgtccgcatataatttcagttggacagacctcaggatggtgccctggcgtagcaccgatgagtgacgaaggaggcgcctgcaccttttcgcttctcgctagcttcatgactgctgattgtgtaagggtgcggccatgaaaggtgagattggtctgcggtcatgaaaggtgagattggtctgcggcctgatgtgtatataaaatttttgccacgaaggaggcgcctgcacctatcccaaaagctcggccatctagggcattggatgctgcttcagttcagataatcaaggctgtccttggaaatgggacgagaggaaagatcccttccccattcgttgagttcagttctctgattggtttcttgctgccctcttgatacggggacctgtgcgccatgtggccgtctcgctgtttatgtgggcaagtttcacttgaggagttgagagggcttgaggcgatcgtggttttgtagagcaacgagtgcaccttccgaatattccttgttcctgtgtgaatcgtctatattgcatcaggcgtcgttgccattgtgtaaaagggaaataaaatcacaatgtaaaggatacactaccatttgaattgtattcagtatcgaagcaacctggcgacgagttcattgcaagggtggatatgttatttgaagtggcctttccaaatgctttcggtttattagtt

SEQ ID NO: 6203 - DNA, 1580 bp, Zea Mays
tgctgtgccgctattcaaggtcatctactgatagctttctggtcctaagatcacactgataaaaggactggctctgaattactgccgttgcattctatgatgcaccattgcatgttgtgagcctgaacattttggaaggaacaaggttctcaattgagtctgctggcaaaagattttggttcacttgattgttttgcaactgagttcttaattgatggaagcaccttgagccttgtagtttcagattctgacaagaacgtgcagattttctattatgcccccaaaatggtggagagctggaaggggcaaaagctcctttccagagcagaatttcatgttggagcccatgtgtcgaagtttctgagattacagatgttgcctacacaaggattagcatctgagaagacaaatcgttttgctcttgtatttggaacgttggatggtggaatcggatgcattgcacctgttgatgaattgacatttcgacggctccagagcttgcaaaggaagctcgtagatgccataccccatgtctgtggattgaatccaagatcgttcaggcatttcaagtcaaatggcaaggcacatcgtcctggaccagataacatcattgactttgagcttctttctcactatgagatgatgtctttagaagagcagctcgagattgcgcagcagattggaactacccgctctcagattctttctaactttagtgacttttcactgggcactagtttcttgtaagtggtaacctgtggctaagtaacaccatgcttctgatgaaagtggtgcttgccattcattagccacgtcaagaattaggcccaattccatcaacatggtcacttccaccagttttattgtaaagatggctgctgtaatttagatattaatggtgtaactggaagttgggcgcttggcaactgattgcaaccatatttgtttcgttggactgaagtagtattggaaactgcactgaaaatgaactatctgaagagtttctcgacaacgtctcagcataataaggggatgtttgaatgcactagaactaatagttagttggctaaaagttggtagtagaattagttagctaataaataactatctaactattaactaatttatcaaaaatagctaatagttgaactattagttaagttgtttggatgtgtcaactaattttatacattaactaaaagctatagtgcattcaaacactccctaagtcatgtttggcttagcttttagctaaacaacgaagaccctgtttggaagcaatattatttttaagttaggagaggctaccttggtttttaagaaactgagaatcaaatttttataaactgagtaataaaacttatgtttagaaccatctcaatttctataaactagtgtgttaaaaattggatggtttctataaactgagtcataaagtttatataataaagtttatatgaaaagcatggttttttgagtttggaaaactaatagtatcatcgaaaatctaccattagcttctcaaaataaaaaacctaacaacacttttttttaaaaaaaactttaatagctgagcttca

SEQ ID NO: 6204 - DNA, 2395 bp, Zea Mays
ctagagccggcctaccgcggggtacgtggcgacacctctcctgcaacgtgtccggcgcggacgacaggcatcgccgtcgccgtcacccaatggcctcggtgtccgtcgtgctgctacagcgctcctcctcgcgcgtccgaggatatatacggctccagcgcatcgccagctcttcagttacgttggttttggagggcgaggggcattggtggtggagcaacagccgcggccgcgacgagaggtttggcgcaagaacggtgcaccatatggcgggatcagtagagggggaaaacggcggcgtgccggtgggtggtcaagttgcgatggcgccgggcgtggtgaccggcggtgtggaggatgcctatggcgaggaccgcgcgaccgaggaccagactgtcacaccgtgggccgtctgcatcgcaagtggtcactccctgctgagggatccaaggcacaacaaagggctctctttcacggagaaagagcgggacacgcactacctgcgaggattattgcctccggtagtgctatctcaggacctccaggagaagaggatgttgcagaatgttaggcagttccaggtcccgttgcagcgctacactgcgctaatggaccttcaggagagaaatgagaggctattttacaagctcttgattgacaatgtcgaagaactgcttcctgttgtgtatacaccaacagtgggggaagcttgccagaagtatgggtcgatcttcagacgaccgcagggtttatacatcagcctcaaggagaagggaaggatcttggaggtactgaggaactggacagagaagagtattcaggttattgtggtcactgatggtgagcgcattttaggcctgggagatcttggttgccagggcatgggaattcctgtggggaagcttgcactgtatactgctcttggaggtgtacggccatccgctgtgagctttaacattgcttacctattaccattgatgtgggaacaaataatgaagacctactgaaggatgaattctacattggcttaaagcaaagaagagcaactggccaggaatactctgaatttctggatgagtttatggccgcagttaggcagaactatggacaaaaagttcttgtccagtttgaggactttgcaaaccacaatgcatttacacttcttgagaagtacaggacaaaccatcttgtatttaatgatgatatccagggcacggctgctgtagttcttgcagggattattgctgctctgaagtctgttggtgggactctagctgatcatacattcttgttcttcggtgcaggagaggctggtacgggcattgctgaactagttgctctcgagatatccagacaggcaaatgtttcagtagaagaggctcgcaaaaagatctggctggttgattcaaagggactaattgtggcctcacgtgaagagactctccagccatttaagaagcgatatgcacatgagcatgaacctgtcaaagatcttttaggtgctgttaaggctatcagaccaactgcactcataggatcagctggtgtaggtcaaagtttcactaaagaggtgattgaggttatgtcttcgattaatgagagacccattgtccttgctctatcgaacccgacgtcacagtctgaatgtactgctgaacaagcatatacatggagtcaggggcgtgccatatttggcagtggaagcccatttgatccggtgaaatataatgacaagctgtttgtgcctgcccaggcaaacaatgcatacattttccctgggtttggtctaggggtggtgatctcaggagccgtccgggtgtcagacgatatggttcttgctgctgctgaagcactagcggaacaggtaaccccggagcatattgagaaaggcctgatctacccgcccttctccatcatcaggaagatttcagctaacatagctgcccatgtcgccgcaaaagcttatgatctcggaatggctacccagctccctcggccaaaagacctggtgaagtacgctgagagctgcatgtacagccccgtctaccgatcgtacaggtgatgtgagcggacagtgctggatgcacctgaggatatatatgcatacctgctatgcttgttgttcatgtcgtcactgtgacgagtccgctgctgatactgcacgtgcgtactctatgtatgtagctgtgtaataaagttcaggggatgtaaattgacactcctaccaagtatgctgatgtatgttctcatgcgtgtcggggtttcttatacatggtttgtgttagatttagtatgaagatgacctctattttatttgatacaaatcgaataaattgtaggtttatattaaggccatgttcgtttttcttctaggattattattataatccagttt

SEQ ID NO: 6205 - DNA, 1432 bp, Zea Mays
gtcgttgtctcctttttttctccatgcacatggtggttgcagcgccctcatggaaaccgtcgcgcagagcaagacatcccgctcttccatgggcggtgccgcggacacgggcatgtcaccggaggcccaagagttcaaggagtccatggacgttatgattccgctcctcggcacggccaacatgtgggacttcctgcccgtgctacagaggttcgacgtgttcggcgtgaagaacaagatggcggccgcggtgagcggcagggacgcgttcttccggcggctcattgacgaggagcggcggaggctggacgacggcgtcgagagcgagaacaaaagtatgatggctgtgctgctcactctgcagaagtcagaaccggagaattacagtgatgacatgatcatgtctctgtgcttctccatgttctctgcgggaacggaaaccactgcgaccacggcggaatgggcgatgtcgctgctcctgaacaaccccgaggtcctgaagaaggcgcagggggaaatcgacgcgcatgtggggaattcccgcctgctaggcgccgacgacatgccgcacctcccctacctccagtgcgtcctcaccgagacgctccggctgtacccggttttcccgatgctgatcgcgcacgagtccaccgcagactgcaaggtcggcggccaccacgtgccaagcggcacgatgctgctcaccaacgcatacgccatccacagagaccctgcggcgtggacggaaccggacgccttcaggcctgaacgattcgaggatggcagcgccgaagggaagctcctgataccgttcgggatggggcggcgcaagtgtcccggagagaccatggcgctgcggactctagggctggtgctggggactctgatccagtgcttcgactgggccactgttggaggcgtccccaaagttgacatgaccgaagcgtccgggctcactctcccgagggccgttcccctcgaggccatgtgcaaaccgcgccaagccatgcttgatgtccttcagaacctgtgagtgcccttgcggaccgaagaagttgatgagcatcattatcaaatgttgccacgttgttgccttgctatcgttatacgtagggcaatgtttaatccctacaagatctctctctccccccaataaacatgttcgtgcgttgtaatacaacatatcacttgtattgtcggttgtaatatgattcagagtgaaattctatatgtcactggatctgaacaatatctagttcatcatagactaaggaaaatactttgaaggttcctggttgaactctattagtagtaatagaaattttgcctgtttctggtctccaaccaaagggagatccggtggtctgcttgttggttttgatgctgttgttttgatgctgttgttttttatatcagacaagttgagaaaggg

SEQ ID NO: 6206 - DNA, 1441 bp, Zea Mays
ccctacaacagccgtagtcagaccatagctaagctgagagcaaagatgtcttggcggcgaaaccagctacgtgcgtttctcgttctcgccgtcatcctcctcatcaccgcagctacctaccgagccaatgcgcagccggcgcctccagcagacccaacgccagccgctgacacctgcgccgaccccagcgtggaaggggcgtgccgcaacgtcccgaaggcgctgcgcctgaagctgatcgccatcccgacgatcctcgtctccagcgtgatcggcgtgtgcctgccgctcttgtcccgctctgtgcccgcgctccgccccgaccgcaacctcttcgtcatcgtcaaggccttcgcctcaggcgtcatcctcgcgacgggctacatgcacgtgctcccggactccttcagcaacctcacctcgccgtgcctgccgcggaagccgtgggccgatttctccttcaccaccttcgtcgccatgctcgccgccctgttcacgctcatggtggactcgctcatgctcagcttctacaaccggaggaagggtggcaacacctccggccgacgcactagcggcgcggtcgccgaccacgagagcccggcgcatgagcaccactggcacagccacggccatggacatggacatggacatgctgggggcatcgtggtggctgacaagcccgaggacgatgaggccagccaggtgcagctccgccggaaccgcgttgtcgttcagaacgtgtgcaccatccggccgctggtgacggcgatgtgcttccaccagctcttcgagggcatgggactcggcggctgcatcctgcaggcggagtacggcgcgaagatgaaggcggggctggtgttcttcttctccacgacgacgccgttcgggatcgcgctggggctggcgctcaccaaggtgtacagggagaacagccccacggcgctcatcgtggtgggcctgctcaacgcggcctcggcggggctgctccactacatggcgctcgtggagctcctggccgccgacttcatggggcccaagctgcagagcagcgtcaggctccagctcctctgcttcctcgccgtcctcctcggcgccggcggcatgtccatcatggccaagtgggcgtgatcgtattcgtatctgagacgacatgacacagtactgttacaccaacactgcctgcagtctagctatctgcaagactgcatcgctgcatgcatgttcctcctatagctggctgttgtatcatttcgcgtgcttcgttgctccgtgcgcttccgtgtcgccatcaggaagctaggtatatattagacgcagatagcgttgttgtcatgactattcaacgtccacggtacaatacaaaagtagtactctatctatgtattaactatgttcttaaatatttgtcgtggtaaataaaaaaacaatataaatagtactc

SEQ ID NO: 6207 - DNA, 1202 bp, Zea Mays
gtgtgcgagctcacagtcacaaaagaaacgatgtccactggcgaactgacggctccgtcatgcggcgatcgataaaaatgccgcgaggccaccacgcgagacgaacgcaaacgaagtgcggaaaataggcctattttttcttcttcctcgtagagatatttcggaagagggagtgcgtgccttcctctcagctgattcgccgaggacacgagatcctctagagggttgtgctgtttggcgtgaggctttgggggcgatttgctttgctcgcatgggggatcatgtcgctgtggatgttggggagctcgttgcgtcccgagtcggtgaggcagcggggctattgtccggcggcaaggaggaaatgaaggcgctggctgggatggtggagtgccgcatttgccaggaggaggacctcgcaaagaacctcgagagcccctgtgcttgcagcggcagcctcaagtatgctcacagggaatgtgtgcaacgttggtgcaatgagaaaggagatataatctgtgaaatctgccatgagtcgtacaagcctggttacactgccccaacccaggtgcatcatgatgaaactaccatagagataagtggtggagattggaccatctctggcaaccgtttggatttacatgatcccagaatattggcaatggctgctgctcaacaccgtttacttgaagacgattgatggcccttctgctcctgaggcatacattgaccattactaacagtgatgatgaagatgatgcatctgctattttctcgctatttcttttgagagccgctggatttttgctgccatgctatattatggcttgggctattagtatcatgcagcgtcaaagacaaagacaggaagaagcaatgctgttaccaacggaagtggcgatcattctgcacccggacggaagaacaatgcaatttgcggtggcaccagcggaatctcctgcatcacatcagtgacaggctcacaggcctgcctcggaatctcagcatctggtcttaaaggtggaaagacgaggacgttgtgcaattcatgttgtgccttcgaatttagttaactttcaagcggagattcaatgtttgttcgatgggctctcagcaccttctgtacataaagagatttatctaataactaataagtgaatataagttaaatcaacacaaagtttgattttgtattgtggtatata

SEQ ID NO: 6208 - DNA, 2263 bp, Zea Mays
cccggaaccaccaaagccagagacacccaccagaaactcctagactcctagtacagttttacccacacagcctagcgggacctacaagtcagccaaacgtctcaagctcgccatttcgcctcggtttccagctcccactcctcccttcctcgcttcccaatctccaaacctctcacttgcacgggagcacgtacagccgtacaggcggagccaaagcgatcggcgccgcggcggcaagacgtcgtcggcggcgacgatgacgtggcacgaggacctggccactcacgtggggaacacgggcgttcgcctccccggcgccggaggtcacgcgccggcggcggcgaatgttgctgcggcgggggccgggtggtacggggaggaggaagaggggagggcggaggaggggtgggcgcagcaggcgaaggggttcgcggagtcgacggcggagatgctgcgggagctgggccgggggctgtgggacgtcgccgcgcagagcctcgccggcgccgaggacagcgaggtggcgcggcggctccggaagcgggcggcggctacggggaagcgcctcagcttcatgaacgagtacctccccgaggagcgcgacccggtgaggtgttggctcaccgtcgccgcagtcgcattcgtctcgctcctagttttaggttttgggagtggcaatgaaactccagtagagcttccaaagaaacttatcatcggccccccaagtgctgatagaatccaacttcctgatggacggcatctggcttatcaagaacaaggagtttcagctaacagagcaagattttcactgatttatcctcattcttttctttcatcaaggctagcaggaatccctggaattagagcatctcttctggaagaatttggagtacgacttgtgacctatgatcttcctggttttggtgagagcgatccacacataggccggaatctcaattcttctgcaatggacatgctctatctggctaatgctctcaatattccggagaagttctgggttgtgggctattctggaggtggaatgcatgcctggagtgctcttcgttacattcctgatcgcattgctggtgcagcaatgttcgcacctatggcaaatccatatgactccaagatgaccaaagatgagaggcgtaaaacatgggatagctggtcaacgaaacggaaactgatgcacattttagctcggaggtttccatcactactaccattcttttatcgccaaacctttctttctggaaagcaaggacatccagagagttggttgtcgctgtcattggggaagaaggacaaaactttactggaaggtcctgcgttcaatgcattctgggaaaggaatgttgcagagtctgtgcgccagggagatgcaaggccatttgtggaggaagctgtgctgcaagtatctgactggggtttcagcctatctgacatccaaatgcagaagaaagaggctcgaggcttttttgaactcatcaagtctctcttcaatcaggctgaaagagagtgggtgggatttctgggcccaatacatatatggcagccgaataagggattcccgaaggctgaagcactaacctttcatatctcaataggggatggatgaccgagtgatctcgccgtcagtggctgaatttgtgcggcggttggttccaggagccacggtccacaagcttcttgatgaaggtcacttctcatacttctgcttctgtgacgagtgccacaggcagatattctccaccctcttcggcattccccagggccctatgaaccctgcaccgcaacccagcgaggtcgtttcagagctcaacgaagaaataacagtaccagacaatgtcacagatcaggaacaaggaaaatcaggcctgccctgatcaagatcagttttcaggatcaacagtatagatacaagacattactactaaacacaacacctcatatcgacgggacaggcttttcgtcgctgcttgtggactgagctgctcctcttgcggagtcttgaaggatgaaggcaaagtattggatagaggctgtgccgtttcacttggatgtacaaaaatgctcattacagattcgcacggcacctgctcggtgtgcttttagtatagtcggcattaacattcgattaacctgctatgactgcattataggcttcttttagcacatttgttttggcatgcgaacccaatggttcaattgcgtcctcagctgaattttgttactttgtcagggactgtttgatgtagct

SEQ ID NO: 6209 - DNA, 1279 bp, Zea Mays
gcacaccggcacacggctcctccaagatcgagagctgtagctgcaacctgcagcagacgcatatgtccgtcgccgccgccttgggccgcgccgatgagctccgcgcgctggacgacaccctcgccggcgtccgcggccttgtagcgtctggtgcgaagcaagttcctcgcatctttcgcgtcccctacccggaggagctactccaccatgaacaaccgccagcggcggcgaccgtcccggtgatcgatctcagcggcgaccgcgcagccgtgatcgacgccgtccgtggggcggcggcggggtgggggttcttccaggtcacgggccacgcggtgcccgagcaggtgatgtcagcagccgtggcggcgatgcgggcgttccacgaagccgacggcggggagggcagcgacaaggcgcggctctactcgcgagagcccgggagggcggtcaagtaccactgcaacttcgacctgtaccagtctcccgtggccaactggcgcgacacggtctacctgcggatggcacctgaccctcccgccgccgacgatctgccggagatctgccgcttaacaaacaaggtcgcgtcatctacatacatcgagatccttatagtgggcgagcgactcccaatttgctcagtatgctagactttgtagcaatcttcagaatttttcgcaatgagatgatcgctaaaacaaaaaggagggggagaaagggtcgccttgtccgagacctctcccatggtgtatagtcggattagggactccattagtgcttctcccttgaggttgaggtggaaaggattgaagcgatccagtcagtcgtccacctgacgggaaagcctaactacggagtaaggcaagaagatagtcccaacggacggagtcgaatacctttgcaatgtctagcttgaggagcgtgggcgagttgttatgctagaaacgtctaatcatgcttctcaccgctaggaagtttctatggattctccttttttatgaaggtgctttgaaatggcgaaactagctcattcattcatggtgccagccgaagagctaggattttggtaataaacttaatgaaagaatgaatgagcattatcggtctgaagccccccgactgtctccgctccttctttttgggggaattaggatgatgctagccgtattgattagctagaggttgaggtagcgagtttgttcagctaaccttttttggaaatgtttatttctatatgtttaatcatttattccatccattcaaattataattcacctgtttt

SEQ ID NO: 6210 - DNA, 1748 bp, Zea Mays
gagaagccgaatcgcgagcccacccggccagggggcagatttcgtgctcctctcctccagtctccaccctccagcgccctccacttgcagaggttcgcgactcgcgacgcctccgcagccccagccccagccccacgccccgcgatccaaaccctagccccctccaccgtaccgccaccgtcatggccgaaccatccgccgccgccgtcaccgcagctgaggtcggggaggagtccgatgccgccgcgatggaggaggtcgcggcggccgcgaagaggtggccggggtggcccggggacagcgtgttccggctggtggtgccagtgctcaaggtcggaagcataatcgggcggaagggcgagctcatcaagcgccttgtcgaggggaccaaggccagagtccgcatcctcgagggccccgtcggcgccaccgagcgtatcgttttggtttctggaaaagaagatccaggcttggagctatctccagccatggatgctctcatgagagtttttaagcgtgtcattgggataacagatggagctgcggagggcactcaggctgctgctactcctggtgtatgtgctgcccgattgttggttcctggagctcaggcaattaacctaattgggaagcaaggtgccactatcaaagcaatccaggagagcacgggtgctacaatacggatgaacatgagagaccattttatgtaactgacgatgaaaggatagttgagatacagggcgatacagagaaagttctaaaagcactgcaagctgtttctaaccatcttcggaagtttttggttgaccatagtgtacttccattatttgaaaaaactaatactgcagtgagccaagatcacaatgttggttggagtgatatgtcacatccttcaattggttctgcacaagtgaatcaaccaccttcagtggtagatgaatatattcttccagtgaagagggatactttgtatcttgaacgagaaactttgttagatcataacattcatcgctcaggcgtatcactttatgggcgggatccagccttgtcaacactacgaccacctggaatacatggtgctggcccgctacttacacagataacccaaaccatgcaaatcccacttacctatgctgaagacattataggagttaaaggagcaaatattgcgtacatacgagctaatagtggagctgttgttacaattcaggagagtttgggtagtccagatgatattactgttgaaataaaggggacatcttcacaggtacaagctgcacagcagctcatccaggactcgttggctgcacaccgagaacctgtcagaagcagttatgtgggagcaggattagattcactgtataggtccagctactcacaatatggcagctccacctatccttcgtcatcactgccatcttattctagcatcgatgatgttagtaggtacccatcttcaggtcttggtggctatgggtcgagttacaggtactagtactagttcgtccttaggcttgaatgcttgatggcaccttgtatccattcctgggtgattattgtacaagtcagcaagttttctgctctgcgtgcttacgggcaggggatcattttacaagtcagcaagttctctgctttgtatgcttccgggcagggatctggtagattatactgcatcccaattcccagtacccagacttcggagtccaatttgctttgacaatggaatcggaaatcgtgcttgttaacaa

SEQ ID NO: 6211 - DNA, 1846 bp, Zea Mays
ccatgcccaacaaatagctaataaagcccagtccaacacaaacaaccacccgtccaaagcaaagaaagaagaaaagaaagtagcgtgtgggaggaaggagcgcgagaaggagatcctcgtcccctcccgcccccgtacgtctcccctccatcttccattcttccacatatccccacacaattgccgtctcgctccacattcccttcgcaccacctttcccctctctctctccctctctctccctctctcactcgctctttctccggggccgccattcctgctccgtccactcccaccacatgcggcggcgcgggcgcctccccgcggcgctgtggctcgttgtcgtgacgttggcggcgctggtggcgcgacctgcgtgtgcggcgtggtgcatcgcgcggagcgaggcctcggacaaggcgctgcagtcggcgctggactatgcgtgcggccccgcgaggggtgccgactgcgcgcccatccaggccagcggcctctgctacctgcccaacaccctcgccgcgcatgcctcttacgccttcaactccatcttccagcgctcccgcgccgcgccgggggcctgcgacttcgccggcaccgccaccgtcacggtcacggaccctagttatggatcatgcacctacccttcatctccaaggtaaatgcatcagaattttactagtatccatttgaagtagtgcagaaatgattcaggcagtgtggaagaaatggtcgtaaactgtaaactctattgctccttatggaactcccagataatgtgagttttatgactttggatatgctgcgtacagatctgtacgtgagtgtcttacgcatggagaatttgttaggttcttagattacactaaacaccatgagttcacatgatttttcttccactggagctgatttcatgcatctctgcttgcttcatgtaaacttcaccgtgccaaaaaaaatggtttgctggatggcacttagagaacgtttatacaaaagaggataagaaaatgaaggtattagagtatgcatcatgttttcatggctatatatttagtttcagttgagaccacattgctcgaacagctagttaggtagcttgaatgttacacattgtgaatgtaagtatgtaactgctgcactattgatctaaaaaatatactgcattacccgtggtgttacaaaaataaattttgaaaagtaaatgaagccttccaatgaagatttgattgctggctttgtctgtgctttagttttattaattaattaatctgatgaccacacataaatagtttgtgtagcttttacagtttagtatgctttatttatgtaccagaacttataccgcgtttctgaaacagggtcatattgatcatggaatcttgtttttcttttgaagattcatggtaattcttgtttgcagcactgccgggcaaacaggatcacctggttcaacgtccatgccagggactcccacgtccttgtcgccaaaaggcaccgggagcactggaggattaaatccacctgacgtcgattcgaccgactccaatgctaaacctctggcgaccacatccctcccatctcttgctctgtcctgtttcatgtatattttcttgcagttgtggtgatgcatggatgatctagttaggttcagtagagcattgagatgcagcattgttgcatcgtgatctaagagacaccacaacagttttgtttcagggaattggttggttggtggtagccgttgtaacctgccgttcaagtgaaaggcaagagtgcccgtcagttggattctctcaacacattatgcttcttttggtctaaaaaaatcattatgcttcttttt

SEQ ID NO: 6212 - DNA, 1996 bp, Zea Mays
aagaagaaaagaaagtagcgtgtgggaggaaggagcgcgagaaggagatcctcgtcccctcccgcccccgtacgtctcccctccatcttccattcttccacatatccccacacaattgccgtctcgctccacattcccttcgcaccacctttcccctctctctctccctctctctccctctctcactcgctctttctccggggccgccattcctgctccgtccactcccaccacatgcggcggcgcgggcgcctccccgcggcgctgtggctcgttgtcgtgacgttggcggcgctggtggcgcgacctgcgtgtgcggcgtggtgcatcgcgcggagcgaggcctcggacaaggcgctgcagtcggcgctggactatgcgtgcggccccgcgaggggtgccgactgcgcgcccatccaggccagcggcctctgctacctgcccaacaccctcgccgcgcatgcctcttacgccttcaactccatcttccagcgctcccgcgccgcgccgggggcctgcgacttcgccggcaccgccaccgtcacggtcacggaccctagtcagtatgcttaactaactttgcgcttcttcatgttcttcgctaaatctgttcggtcttggagtatccgcctccgactccgactctccggcatcacttttgcttttgcttttctgttcggtcttggagtacgtcctctgtcccttttgcaaccatactatgctaaactggctgcttttttcccccagaacctttggggttatatatccgtttgtttcttgcatcatttatttaatttctttcatcatctggctaattaatactccttggttttcttcgttattacttttgcctttgcttagcttcaattgatatatgagaataatagtacacattgatgtcatagaagaaagccattaggttgtgtagcaatgaaaatattactgctacactaatctggtgaaaatgagcggcatcaacatcaccgataacctttttttttttaaaagggtgtaccccatttcattaggaaataggaaacagaagtcaagtaacttacagaaccaacggacatgtcttaagcagaacgaccctattcagaccatgggctacccctgatgaggccaagttctacaactaagacaaataacctatggacctgtttttcttctttctcctacagtgcatggtgcacgattgctgtagcttgtaacaacattgctccaaaccctaaaaagtacagcttgatgctaatcaggaagtgtgtttttttactgtgagatatacctgggttgatacaacgcatttaagcaaatgtgattgctgacatgtacacacgcaacatgagacaactgtaattcactataaataaattagagtgaaatgtaccagaagtccatttactagtgaggaggtttcagttagctccatcaacttagaaagtgaatgtttggtccataaactttttaaatcttatcacttaggtctcgcgttgacgtgacctactgacttgttcaaaaaatatatattttgcatttcaggttatggatcatgcacctacccttcatctccaagcactgccgggcaaacaggatcacctggttcaacgtccatgccagggactcccacgtccttgtcgccaaaaggcaccgggagcactggaggattaaatccacctgacgtcgattcgaccgactccaatgctaaacctctggcgaccacatccctcccatctcttgctctgtcctgtttcatgtatattttcttgcagttgtggtgatgcatggatgatctagttaggttcagtagagcattgagatgcagcattgttgcatcgtgatctaagagacaccacaacagttttgtttcagggaattggttggttggtggtagccgttgtaacctgccgttcaagtgaaaggcaagagtgcccgtcagttggattctctcaacacattatgcttcttttggtctaaaaaaatcattatgcttcttttt

SEQ ID NO: 6213 - DNA, 5016 bp, Zea Mays
taagcgctcacctcgtccttgctgcaaaaacatcatcttttatacagtcattgtgcgcactggcccctttccactggcaagaagaccctgaagtcatcgatgtgcggtattgcccttgtcctcgccagtgaccgccttgtcatcgttccctgtgccactgcaactactgccgcattggagacccagcactcctgcaagaggaagggcgtgccagatgagctgaaggaggccctgcgccggcggggccctgatagcctaggctacagaagtcgctgccttcttgctgatggcacggttgttgttggtgatggttgcaatgatggagtagagggtaaaatcggtgtgagtgactctagtgttgctgatttgttcttcatcggagcaacactgcatcttaggggagctaagctggtttcgcagccgctggtggcccccagtggaagtgtctttctgtataatggtgagatatatggaggaattcaggttgcggatgatgaaaatgacacccaagctcttttcaactctctggaatcttgttgttcatgtgattgccatgctcttggtagagataaaacatgtacttgttgtggtactgggagtggtgccaaatcagttttgcaagttctttccacaatcaaaggtccatgggctttgatatactggcagatgaagtcaaatacgatttggtttggccgggatgcatttgggagaagaagcctcttggtacattggcccacagctgatgattctcacttcatattatcatcagtatcacccccttcatttgcaaagattcactctgatcaaacagtgtcagatcgtgacatgtctaaccatactaaagctagctactgggaagagcttccttgtgggatatacagcatgcatatgaaagacattggaaagcatggtgcatgcatgaaggaagggtggattgtggaagttaacacacataaatggatggcttcttcattgaatggattgatcaaatgggagaggaaactcacagttcctaccatggagaacattcctgttgacagagggaaccatcagttgtctcagagcttcataagctcaagagaacctgaagaaaatacgaataatgggatcacaaaggcagattttctgtcagattctagtttatgtgatgcaaattgcataacacagtcagcacatagagtattggttgcattaagggaatctgtaatgctgcggactaaaatgaacacactctttcagggtactctggatagatctgaggacggagagtcagccccaatagcagtcctcttctccggtggcttagactccatgctacttgcagcactgctagaccagtgcattgattccaaatggataattgatttgttaaatgtcagttttgatgggcaacttgcccctgataggatttctgcaatagctggactgaaggagcttcagaggatatctccgtgccggagatggcgtcttattgagattgacactgctttgacagacttgaacggggaaagtgaacatgtgatgtcactcatacacccttcaaatacctttatggtggaacgcattggatcaggagatgagactagatgtgcagagaatatggaaaaggaatatgggaagagatgataggtgcatctctgatcatggcaaggaggcccgtttcccatttcttgacgagaacgtgataaaaactttgttggaaattccgttatgggaaattgctaagcttgatgaacctgttggaaggggtgacaagaagatcttgagagaggttgcaaggctgctgggcctacaagaagctgctcttcagccaaagcgcgcgatccagttcggttcaaggatagcgagggagtcgaaccgcaagaacttcggcagcaacagagccgcgaaccaggcatcagcaggcagcgtgcagattcaccagagtccagcttctccagtggcgtcggccacacgccagccatttcttaccaacaatcagccatgaacacgcttagctgtgacaagtgccgcatggtttggttgatggagcatcattatcagttgttacggttcatcacaaattttcaaacgattcattgtcagctggatggagcatccatcatttgttatgtatactagccctgaatcctgatcatgtaacagcaacttggacgtggttgaaacctaaaagtggccggctgctttgtgtcaggctgatgtggcgcctgcgttgggccggtttagacgagtaggtccaacctggatctgaccccacatgtcagtgactcaactgcaggggatctttctccggtctggacctgaccaaacaatgctggatgtaaagcagtcgtcggtgtcaatattttttaaaaaatcctatatttctttagaatcagctcgtacttctataatctcttatctactactataataaaaatatttatataaaaaataagtatataaaaataagtatttaaacattgatggttggctccatatttatacacttaatcaatagaaaatatatattttgtgttaatgttataccccggagtcgagtggcgagtccaatctcagactagccacgtgtacggcgtgcagtccttgctacgcgcacccctcctaccgcacacgcgaatccagccagcccacccaccgccgccgcctgctcgtccgcctctataagatgagacctgcccaccgccatggcgccatcccctccgtctctgacccgcctacccatccccaccatttgccgcccaatccgccccgccgcgctccgccttgcctcgactcgaattcttaccaaccgtttgtggcttgaatttgaattccagctcgaatcactcaggcggccagccgggagcgagagcgagctggaggagctcgattcgatgcgttgctgagcgtgggtcaatcgattcgggtcgggcggtggcgcagtccgagagatctgaaccctagcggccgtctgcccgtccggatctgtgaccagccctgctcggtgcttcggcggcatgagtgcctggaaggcgtggggaggagaagcggcggagatatgagcggaggaggcagcggcagcggggacgagttcgggcgggcggtggcacgcgccgcggttgcgcaggcgctggaggccgcggggttcgactgcgcgcaccgctccgcggtggacgcggtcgtcgacgtcctcttgcgctacatcacccacctgggccggtccgccgccttcaacgccaacctcgccggccgcgcgctcgccaacgaactcgacgtcatccaggtgctcgaggaggtcggcgccgacacggacggcttcgcgggcgcggcggacacgggccgctgcctcgttggttccggcgtcgtcagggacctcatggcgttcgtcgactccaaggacgaggtgccgttcgcgcggccgctgcctaggttccccgtccagcgcgtgcagccgcagccctctgccagcccggctgcggcggcggcggggagggagactgggttgaagcacgtgccggagtggctgcctgcgttcccggatccgcacacctatgtgagcacggaggtgtgggatgagccttcggcgaccaaggacagggtggacaaggtggagcaggtgcggcaacggaggaaggccgagaaatccctgctcagcttgcagcgaaggctggctatggcaggcgcggatgggtttcatccagcggttgcattggcggaggatagcgcagagaaggggaaggagatacaggcagctgggacaaagagaaacccgtttcttgagccagcattgccgcctggggagaaggatgtatctgaggttggtatgcctccggaaaagaagaaactatctgtcctcgaggcatttgcgccagctatgcaatctagaaccatcgtcagggatgttgatgctggggcaggattggatgaaaaccaaaggagcattgttcccaaagagagggctccggtgcaccttaagattggatttggaaagaagccgttggcagcagctctgaattcaagaaccctggacctgagagaagatccatccttcttgaaagaggaagcaaaggatgacaagaagcggagagcaggcatgatattaagggcatcaatggagaacccacaagagcttcctcagctctaaagttgtttgcggaggaagtgccgtacccagagtggagttgcatcatggtgtaattgtggaacttcagtttccagaatcttgaggccatgttccctgatacaaccttctcaggatcaccatgccctgatacaacctgcaccggactctcctgcctccacctaccgttttcctaaaacaccatgcgctgatagattctgcagcactgtaactgaagttggaagttccaccatctcactgcgttgaagttggtggttgtgctggtatttcacctttaactgtaaggactaatttgggaacccaatttttccactggattttcattttcctaaggaaaattagttcattttcccttgagaaaataggaatcccttagaaaaatatagtttccaaactagccctaaaattaaaagtgggttgtggttcaaacggagctgatttttgtgaggccatgttcctcatccccagacatggcatccaaaagaaagtttagttcttgtagctgtactccctggtagaatgagagaggtttgtacaaaaggtaacctgattgttcttaccaagacttgtcatagaaaggattgatgtatctagtggctactcaagggacagcttcataatgccgtatgtgttggcacgcgcacgcaccccgccgttgtgtttgggacgaaaacacttcctagaattcctagataactgttgaaggacttttatgaggatttattgattgattcgagttcatgtccttaatgacttgatgtagtgcttcatagttggaggctggggttgtataacagtgtaccatatggttctttcgacttttgcccccatctaacttgagtatttaagattgaacttgtaaagattttattttaaaaggaagcatgttgaaa

SEQ ID NO: 6214 - DNA, 1497 bp, Zea Mays
ggcgcgactcctcaactgaaactgtgtcattgtctgtcagtgctcgccgcgcggatctagggggaggggggccgtgcccggcgcggacgccgggatgccgatctgcgcgccgtcgtccgactcctcggcctcggcctcgtcgggcttgggcgcccgcgtctgggtgctccacgggctagcgctcggcgcggcggccgcggccgctgccgttgcgtacctgtaccggcggccgaccgggttccgcagccgcgcggtggggatcatacccgcgcgcttcgcctccacgcgcttcgagggcaagccgctcgttcccatcctcggcaagcccatgatccagagaacatgggaaagagttatgctagcttcttcgttggaccatttgtggcaacggatgatgagagaattgcagaatgctgtcgaggatttggagctgatgttataatgacatcagcatcttgcaaaaacggatctgaacgctgctgtgaggcactaaagaagcttgataagcactatgatattgttgtcaatattcaaggagatgagcctctcattgaaccagagataatagatggtgtagttatgtcactgcagcgagctcctgatgcagtcttcagcacagctgttacttcactgaaaccagaagatgcattcgatacaaacagggtgaagtgtgttgtggataatctgggctacgcaatatacttttcaagagggctgattccattcaataaatcagggaacgccaatccaaaatatccatatcttcttcatcttggaatcgcgggctttgattcaaaatttttgaagatatatccagaacttccaccaacaccattacaaatggaagaggacctagagcaactaaaagttcttgaaaatggctataggatgaagcagcatatctttttgtatggtgatcaaagtggaccatgatgcccatggtgtggatgcacccgaggacgttgagaaaatcgaagcactgatgcgaacgagaaacattcagtagaaaacgaagagaaagcaagtgctttgcattgctatcggcgttggcttggtgggatacttttggttgtgctttcccgtcttctgaatagcatgataccaagtgaagttggtgcatcacttcttgaagttttgtgcttgctaaaacgttcagtgattggatatgtcacttgcattagtcctcaatcagcagttcagcgcgcaggtggattgtatctgtacttcagtagttagtagcattactttcagtcttctttacattgaaaaacaaatcgtttctggagatgaagcaattggacagtgtaaaacaaaaggctaaagacccatccatgccgcgaggcgtgattgatataaggccagactcatcggaactttcattagacttccatttacatgtaataagttttcatatatacaatgttgatgatgtatacaattttaatgacgtgacggtgtttttttttaaaaagtgaaaattggttttatgagtatgaa

SEQ ID NO: 6215 - DNA, 2077 bp, Zea Mays
caggtctcggtagtaaaccacgcaagagaaaataaaatgacagagagttgtatgttgtagacgggcgagtgcgacgagcggagaacgtaatgccagcgctacaccgctgacgtgtccgccccggctccgggtgaaggtcaaaaggggcaaagggcggggggaaaccgtgggccctatatagcgggccttctcgctggagctaggagaaatcgccaagccaagccaagccagaagcggcagcctcgcgcagcggtctggtctctctggtgggtgcccctcttcgccggtggccggaaagggtagtggagtgggaccgctcaaggagaggccggcgtccccaagtctcacttccgccgtccgcttcccccctgttggtcccgattttgtttagccttcctaggcgcgtgagatcaaaaatccatcggttccggttgccgccatagggttcggcactcggggcgcgcggggggagctttatttgtaccgaactaattcgaagggttcgggatcgagggaggaaggaaaggaggtgcttcacaatgaaggccctcattcttgtcgggggtttcggaacccgccttcggcctttgactctgagcttcccgaaacccctcgtggattttgcaaacaagcccatgattctgcaccagatcgaagctttgaaagaagttggggtcacagaggtggttttggctatcaactaccgcccagaggtaatgattaatttcttgaaggactttgaggataagcttggcatcacaattacatgctcccaagagactgagcccttaggaaccgctggccctcttgctctagcaagggacaagcttgcggatggatctggccagccattctttgtcctcaacagtgatgtcataagcgaatacccatttgctgaactcatcaaatttcacaagtgtcatggtggtgaggcaacaattatggtcactaaggtggatgaaccatcaaaatacggtgttgtggttatggaggaggcaactggcagggtggaaaggtttgttgagaagccaaaaatatttgtgggtaacaagatcaatgctgggatttacttactgaacccatctgtccttgaccgcattgagctgaggccaacatcaattgagaaagaggtcttccctcaaattgcagctgatcaacagctctatgcaatggtccttccaggtttttggatggatgttggtcagcctagggactacattactggcttgcgtctttatctagactcgattaggaagaaatcagctgccaagctagctactggagcacatgttgttggcaatgtgctggtgcatgagagcgccaagattggagaaggttgtctgattggtcctgatgtcgccattggacctgggtgtgttgtggaggacggcgtgaggctttcccgctgcactgtcatgcgcggcgtgcgtatcaagaagcatgcttgcatctcaaacagcattatcggttggcactcaactgttggtcaatgggcacggatagagaatatgactatcctgggggaggatgttcatgtgtgtgatgaggtgtacagcaatggcggtgttgttctcccacataaagagatcaagtcaagcattctgaagcctgagatcgtcatgtgagctctccagttttagctacagtacattcttaacttctttgacgaagggaggattgcagatccccttttataaacgatattgcttggtatcttcgatctaatgcaaacagcttcatacttggtctcttgttaaactattgacaatgtatcttgttttttgttgaaaagtttagtacttgagtgtcaatcatacgtattcgcttgctaaaaactattgacaatgtatcttgttctttgttgaaaagtttagtacttgagtgtcaatcatatttcagagtcattgtgatatactgagcttggaggttttggaccattgatctgcagaagttcaatacaataggaagaataagttaaaaaaacgtggtccaaagtaaccttcagcagtaatgtttgtgtgctaaatgctcttccggagaattgtggtgatgcaaaccttgtaccaatgaatatact

SEQ ID NO: 6216 - DNA, 3653 bp, Zea Mays
agaagccctatcacgcttcagatattcttgtacacatggttttaatctacatatgtatttggcaccatttgctaggattttgttatggtgtttattaggcagccatgaaaagtctgatatgcttcgaacagaagatggacatcagacacaatgggaaatgggtgcaactgcaaggagaacagattaacatcacatcagtggtcagcaacaagatccattaacaccacgcaaggtccacaaaagcctttaggtgcagcttactactctccatctcactatttacgtttcactacattatgtacagtcatccaactgttgccatgcgcccatacttgcctgctccaccaactgatgctccaatctcatccttgcacctcccagacgcagtaacctccattgttccaccaccgttgctacccccacccccacgtccgtctcccttgcgtggactagcacactttctgcagatgaaattttcagggacttcctcaaaatcacttatcccagagcacctggtatgctgccagactccacatatgtcacaagctagcatccgttccccatcatcatccttggccccacatgagcagtccaccgtccagttctccaaacccctctccatcctgaactgtacaattctcctgtaatccccagtgcaacgtccccttactcgaagcaactggcctgatccaagcacatgcttcacgggggttgtatcactgaagtttggaaagtcagggagctgttcagtctggaagctttggaacatcaggtacgtttcttggaaagcctttgaagcctgtactttcagatcacctagggtagcacttgctggtagaagtacaagttcttctggaggtgtcgtgtaatcttttgggtgatcaagcagttcaatggagcacctcacacagagcaggaatggatttgaaggagtccgcagagcatgctcatcataatgtttgatgaactgcttgcaatcaattatctttgctgctgcgctgtgtgctgatgcaccaaccacctctggttgtgaagacaacatggactccgggttcagcaaagcatcgtagaggaaccttagatcatgcaacagttggtcaacagaaggtccaaatgtagctgcatttgctggagaccgaacggaggaagattccagcctgattgtcatgaaacaatttagccaggaaagtttccggatcaagttcatcaattttatgaagggaaagcaatcagtgctcacctgtactcgattgcactagtaccggcattgcaacggacagcaacacaaaggccattatccagttgtttcccacccagtcctcggagagaataatcaagcagctcttgcgaatcaacagccttcgacgcagcacccctcagtgcccgccaagatacccactgtccagtttggacgacctggagaaccttgagcattgcaccttctgctctatgtagatcttctttagtccatgcacacagctcattagatgtaagctccttgtgcttgtctgctgagggttttgacatcttttgaccttgatggaggaggtgcataatgaagcggaaaagatcccggagggttactagttggcgattagagagcgcccaataaagagcgattgtgttctgcaatggagtcctaatttggctgcggtgcgagaagtacagcgccaggtttatgctggaaagcatgtctactgcatttcggtaggtgtctgaggtgagagcaaagctgccggcaccaaacttgtatccccattggccgtaccaagggtgcccacttatgactgcatgaagaagtctgtagtccattccatgtttcttggatatatccatgacagttaccttcctgcagtaatggaaatgatagttattaggttggagaaaggcatcatggaaagagaccaatcccaatcaaacaactgttatgttctttgggccagcggaaattccatttacctcacatgtaacaccttgcacaggcgatcccacaggctcattatgtcacggccagtgaggaatcttgagccaccttcacgcccatttaccctgagaagatgcccataaccatttgcatgcaccacagcgtgcagcaagtgggtggggtcatccagatgcagcggccatgggtgttccgcagcggaggcagcaggtgcgccggcggccagaaaggtggctactgtcgttctcgatgatgaaatggtaccgcttcacgcagaccgggtgtccactccagcctacaaccaaacaaacaaatcagacgcatgattccattgcagatgccgtgttgttgtatgtaacagtgtgcaagtatatgacaattcaatcaatcattctaacgggcggttgcacactgaaagcaacagcctaacgattgggattggctgatacgacgaaaactagcagatatttcagtgggaaaaaaactgcccgcaaaaatcaataaaatttctaagaaataagacagtcgttggatttcaaaaacttaaatcgacgacaagaaaacagtaacagaggagcagatcgtaagaagaaaaaaacgaacgggttcgtccattgaatccaaaacaaaaaaaaatcggaggaaaaaaggacgaaaaagtgaggaaagcaactcacccacgactctgcactggtcacaatacacagatcgggatcggagcacatcctcctcaacgacgttgagctctaccccgccgccgctctcttcctccccggcctccccgacccttagggacaccctccagatcagcaggtgcggcggggcggccgcggccgccggagagaagatggacggcaacgggagcagcctcgcatgctttgcgaggaaccctctcaccgcctccctgaacgtcccggccgccccgcagtctccggccgccgggaacctcgcgaagtccctggcctcgacccgcgccctcgccctcttcagcggccggccgttgaccaccatctccccctccgccgccgtcgtcagatcccctcagatctgcaacgcaccgtcgtcttcctcgtcgtcgattaaccggatcggaactcaggttagggtttgcggcggcggcggtagctgcgagataacgaggaggatggtgatggggtcgattccttcgaggtgaagcacgatcaggtgcgcctggtctttgtgcaccagaggggacggagcaaatgtcgggcccacgtaatcgtgcgtggcgtacagtggagtgggtctatgcatgctatggtggaatgggctcgtcaggtcgtggcagagcgctaaccagggttaatcgtgggtggggtgggtggttgggttcgagagctttccgaaaaggaggcgcgagaaatgggagggaataaaggatcggggcagtgtcgtcattttgtatccatggctcgatgagaggtccagtacggcacatcaaagtgatcctgtgtagggacaaattacacaactgccctcatagtccgtggaccctagaatgcttttatttcgattcgttgtgtacagaccacagaatccctccactcgaaacgtgtccactgtaatctttataggcgactttctcaagtcacagagacaagtgatacggtattttttaagtatacccttctgcaaacatgttgtcgtattgggtagttgccacaaatttgatttttttctataaatctgc

SEQ ID NO: 6217 - DNA, 1270 bp, Zea Mays
ctggaaaggaacaaaaatgaatctgtttgatggaagcaggaccaagggagctcactggtgctgttgatttgatcagccactacaaactgctgccacaccatgatttcttttgcaagaaacctttgccgctggcaatatcagatacacattatcttcacaatgttgtgggagacactgaaattcgcaaaggagaaggaatggagttagatcaacttgttcataatgcatatctgagggataaacctgcttatattcagccctttgatatggaaactctggggcaagcgttccaacttcgagaaacagctcttgtggatttgccttctactgaaaaaggtataccgactatttcgggtaaaccaaaaagtgagtccaaggacaaagagaagaagcataaaaggcacaaagacaaagacaaggaacacaagaagcacaaacatcggcataaggatcggagtaaggacaaagataaagacaaagacaaggataagaaaaaagataaaagtggccatcatgaaaagaagaggaagcatgagggaacagaagattcagtagatgtgcataagcacaagaagagtaagcacaagagctccaaaaccgatgagatggggaatggagttagttaacacttcctagctctacctccaatccttgtaatttgctgttaaaacttaaaaggagacagacggtctctgctatcaaaaccctgtgcagaatagtgggtatcatgaatgggagctcttatttttgcagagtccattgtgaagagaattgaatttgttaatataggtctaatccttccaactgtgcaaatcaactgtgttcctccctgaagcattggttgtagggtgcgcttgaaaggatgtgcaatgagattgtttcgatgtagcgtgcatgagtaccctgagtagctgtggatggttatacagtttgtggtctagggatgtgcagtgagggcagggaattgggaataatttcgtgcccccatcgaccttgatttgtagggtaggatgatttactgtttaaccactagcaaatgttagtagccagttccatgttcatttactccacggcaactgtgctttcgtgtgccaataaccggagttgatccacatgtaatgaattggtgtcaaattgacgatcctgtgtttcaaagtatggttattggatcgtgttgccagcttttgcgtgatttgtcacacgtataatcactatagctgacttgctggtacaaatagcaatgggtaaaaatagggtgggtatatgcctg

SEQ ID NO: 6218 - DNA, 1301 bp, Zea Mays
ccgatccttcctttcccacttccccttttttgcccgcccgctacccaaccgccgccgcggttctcgctgccagcgacggacgggccacaccgcgcaggggctcagccccgccacccaccttaaccccgccgtcgggaggcgtcgtccccggcccggcccggcccggccctcgccctctactgcaactggactggcgcgtagacctgtccccgccacgagatcgttccgccctatgtcggtgaagatgctctttgcatagctcaagctgcaatctgatggaccctgatgacaagaagtttggaaatggaccaagggagctcactggtgctgttgatttgatcagccactacaaactgctgccacaccatgatttcttttgcaagaaacctttgccgctggcaatatcagatacacattatcttcacaatgttgtgggagacactgaaattcgcaaaggagaaggaatggagttagatcaacttgttcataatgcatatctgagggataaacctgcttatattcagccctttgatatggaaactctggggcaagcgttccaacttcgagaaacagctcttgtggatttgccttctactgaaaaaggtataccgactatttcgggtaaaccaaaaagtgagtccaaggacaaagagaagaagcataaaaggcacaaagacaaagacaaggaacacaagaagcacaaacatcggcataaggatcggagtaaggacaaagataaagacaaagacaaggataagaaaaaagataaaagtggccatcatgaaaagaagaggaagcatgagggaacagaagattcagtagatgtgcataagcacaagaagagtaagcacaagagctccaaaaccgatgagatggggaatggagttagttaacacttcctagctctacctccaatccttgtaatttgctgttaaaacttaaaaggagacagacggtctctgctatcaaaaccctgtgcagaatagtggtcctgtgagaagaaacatcttcgaaaggccaaaaacacaatgccgaagctaccaatcagggagcttcgtagcgtatctccagatgcaccgacttaaagatgaaatgaccaatcggcccatgacaacttgtgttatgattgtaaccatttgtaaagggcatgaatgtaatttctcacaggctgcgtcctgtgcctataaatagatgaacagtaccctcgtacttttcacgctttttcacatcttacttttgcccttgccttctgtcgcgctcaaggtacaactgtaatttgatattgttttcatgtattcgtg

SEQ ID NO: 6219 - DNA, 4398 bp, Zea Mays
gactgccctcctcccttcgtccattaattaatggccgccaccaagaaccctccaacccccacctgaccttctcttcctccctcccccgaccgcctgtctgtcctccgcgcatccgttctctatcgaaagggaggaggaggagcgcgcgggagtgggctgggggcccaccgatgctgagctcggcgtcctcggccggggcggccatggggatgggcggcgggtaccaacaccagccgctgccactgccgcagcgcggggcggcggccgcggtcttcaccgccgcgcagtgggcggagctggagcagcaggcgctcatctacaagtacctcatggccggcgtccccgtcccgcccgatatcctccgccccgccccccacgccgccgccttctccttcgccagccccgccgcgtcgcccttctactttcccccaccaccacccgtccctgagttactacgcctactacgggaagaagctggacccggagccgtggcggtgccgccgcaccgacggcaagaagtggcggtgctccaaggaggcgcaccccgactccaagtactgcgagcgccacatgcaccgtggccgcaaccgttcaagaaagcctgtggaatccaagaccgcctcctcgccgccccagctgtccaccgtcgtcaccaccaccaccacccgggaggccgccgccgcgacgccccttgagtccctcgcgggggcggggggtaaggctcacggcctgtccctcggcggcggggctggctcgtcgcacctcagcgtcgacgcttcgaacgctcactttcgctatggcagcaagtaccctcttggagctaaatccgatgctggcgagctgagcttcttctcaggagcaccagggaactccaggggcttcaccattgattctccagcagataactcttggcactccctgccatccaacgtgctcggccaggtcaccatcgcctcgctgtcacaggaccaggagcgccaccagtcgtcgttcagcagcggcggggccggcgctggtggattgctggggagcgtgaagcaggagaaccagccgctgaggcccttcttcgacgagtggcctgggacgcgggactcgtggtcggagatggacgacgcgaggtccagtaggacctccttctcgacgacccagctctccatctccattccgatgcccagatgtgattgagaacgaagctcgtgcgcggccagtaggtggcgttgtcgcatgacgcgcacccagcatcgcgctcgctgctagcgagccaccgtcacccggtgattgatgccctcatcctagctatttgtttcgctgaatcgcattaagaacagaactctataccgagaatgaaaaccgcccagtcgtcaggcgttgtcgtcgctgcatcagatgatccaagtgtattgtgtgctttccaggctgtattatcagaatgcctcgaggacaaggctcttctgtgtcaacccgtgagaatcccaaagttgatcgggcaactgattcaaatgatgacagccgcaagaataggaggggtgcttatttgctactgggattgctgatagtgttccttcatggatcatggtctgtttatcagatccagtttggaagccttcctttgccccttgatgctgagcaggctggaaagaggggtttctcggaagcttcggcgctgaagcatgtaaagtatttgacaggcttgggtcctcacccagtcggttcagatcccctcgatcatgctattcagtatgtatatgcagtagcagaaaaaataaagaagacagctcattgggaggttgatgttcaattggagttgtttcacacagatataggcgcaaatcgtctatctggtggtcttttcaagggaaagactctcttgtattcagacttaaagcatgtgctattgagagttactcccaaatatttaccagaagctgaggaaaacttgattctggtttcttctcatattgacactgtttcgacaacggaaggagctggagattgcagttcatgtgtgggagtcatgttagagcttgcacggggagtggcccagtgggcacatgggtttaagagtggtatcttgtttttatttaatactggagaagaagagggtcttgatggcgcccatagttttataactcagcaccactggagaaattcagtaatatttgcggttgatctggaagctatgggtatcagtgggaaatccacactcttccagggtactgaccattgggcattggaaagctttgcagctgtagccaaatacccatctgctcagatagcttcacaggatgtttttagttctggcgcaataaaatctgctactgattttcaaatatatgaggaagttggccgtcttcctggacttgattttgcatataccgatacaacatctgtgtatcatacgaagaatgacaagatggcgcttctgaaaccagggtctcttcagcatattggagataacatgcttgctttcctactccattctgcagcatctccaaaatttttgaaagatgcacaacaaaggaagcaaggaaagacagagcaggatagagctgtttacttcgatatcctgggaaagtacatggtggtctatccgctgcgacttgctaccatgtttcacaactcaatcatattgcagtcacttctaatatggggaacatcattgcttatgggtggacaccctgcactggtgtcctttgcaatatcatgtttgagcatcattctaatgtggatattttctatctgcttaccagttgtggtagcatttgctctgccctatatgtgtccgtttcctattccatatgttgcaaatccatggttaactattggcttatttggttcacctgcactgcttggagcatttattggtcagcatattggatttattctcctgaagaggcatcttcgacgcgtgcattccaaagcaaaaacaggcataactcctagcatgatagaaaatgttactgacctggaagctgagaggtggatttttaaatctggttttgtccagtggttaatagctctgatactaggaacatatttcaaggttggatcatcgtatatagcactcatctggcttgtttctcctgcttttgcatatggttttttggaagctactctctcccctgttcggctacctaaacagcttaaggttgtcacgttggttgtgggtttggttgcaccagttgtgtcttctgctggtttggctgttcgtatggcggatgtaattgttggaagtatagtacgtattgacaggaatcctggcggactaccagactggcttggaaatgtaatagtttcggttgccattgctgttgtcgtttgttccacgtttgtgtatctgctttcatacattcatatctcaggtgataaaagaattctgggtttgctattatccttatcctttggtctttcaattgctttggcatcaagtggcattgtgccagcatttacggaggatgtcgctcgatctgtaaacgttgtacatgtcgtcgataccacaggagtacatggcgggcatatagaaccagtatcctatatctctttgttttccaatacacctggaaagctgacgaatgaattagtggaccttggaggcgaagaattttcttgcggaaggaacatgactactgacttggtaacatttacagtgaagtatggctgttggagttacaaagagagcagtaccggatggagcaggtctgaggttcctgtgctccttgtagaaagtgattcggttataggtggtgctcgacagacagtagtatcagtggataccaagtcatcgacgcgttggacgcttggaatcaacaaagatggaatcgatgacttcacagttcaagtggattcggagaagatagtcctacctggtgataagagcgagatagatgggtggcatacaatccagtttgcagggggcaagaactcgccgacgaagttccagctgacgctatactggtcgtctagcaaaccatctgagagagaagctaaacaagcagcggacgctcctttgctggtgaaactaagaacagatgtgaatagagtcacaccgcaggtggcaagggtggtggagaagctgccacggtggtgcacgcccttcggcaagtccacctctccgtacacgctagctttcttgacggccctccgtgtcgatatttagtcagtcagcagcatttgtttcccatacataggcgtccagtccagcacctttcgttttgaactgtattttagtttgatagtagcaagttataggcccatagaattgtacacaaaagctgccaagggcggtctggtgtaaacgtgctttgcacttgctctaatttgtcctgtatcaaagtttcagattagtttgtggtatttgtgtgtaccattcctgcccccatccttcaagctacgttttct

SEQ ID NO: 6220 - DNA, 663 bp, Zea Mays
atgtttatctcttgcgcgctcctcttcttcctccctggcgctcggtcgcttctctctggtctccacgcgcaccgcgtccagctccctcctccagctgtgtctgctgctcgccccagcctggagcttcgctcggcttccaactccggcgcccggccgagctccctgattcttctgtacaacttcgatggtggtacaatttgttcagtggttattttgaaagaatggcttggcatccatcgcgtcgctgctgctgaaatatctaaaggtctcccaatttttggcattggtgttgggcatagcacatatgacaaagcttcggtaattactctgatgcttgctatttgtttggtaggctatagctacagccaaaatcataaaagtgcctggtttgaagctatcagcactaagccaaataaaggattccggctctcatcaagtgactccccctcatgttgactttgcggatgtctcaattctagtggtggagctacgaacaacaatccgatgtcctgatcgagagcgatggagttaatgtttgaacttgtgtgtttgaacttgtgaactaaaaatgtgaactatggatgtgaacttaacttgtgtgtttgaacttgtgaactaaaaatgtgaactatggatgtgaacttgtgtgaatttgtgaactta

SEQ ID NO: 6221 - DNA, 3450 bp, Zea Mays
aaaagcttcataattatagcaaagagtcggaagaggtgggcccttccctccggcgtccgccgccgtcaccactcgtcgttttcctagttcgcacacccatccgccggcggcctccccccgtctcgatagtcgataccaggttctaaatggcgatggcgatgatggctatgcgacgcgcggtggcgctcggcgctcgccacatccccgccgccgcagcctcttcgttccgagtcgtctccctccgccacatgagcgcggacgcgggcgccgcgatggagaagatccgcgccgccgggctgctcaggacgcaggggcttatcgctgggcagtgggtggacgcctacgacggaaagaccattgaggtgcaaaatccagcaactggtgaggtcctggcaaacgtgtcctgtatgggcagcagagaaacatctgatgctattgcttctgctcacagtacattctattcttggagtaaactcactgcaagtgagaggagcaaggcactaagaaaatggtacgatctaattatttcacacaaggaagagcttgcacttctcatgacactggagcaggggaaacctatgaaagaagcccttggtgaggtcaattatggtgcaagtttcatagaatattttgcagaggaagcaaagcgtatatatggtgacatcattcccccaactttatctgatcgcagattgttggttttgaagcagcctgttggggtagttggagctattacaccatggaattttccattagcaatgataacccggaaggttggaccagctttggcctgtggctgtactgttgttgtcaagccatcggagttcacacctctgacagcattagctgcagcagatcttgctcttcaagcgggaataccagcgggtgcattgaatgttgtgatgggtaatgctgctgagataggtgatgcgttgctgcagagtacacaggtcagaaagattacattcactggatcaacagctgttgggaaaaaactgatggctggatctgcaaatactgtgaaaaaggtctccttggaacttggtgggaatgcaccttgcattgttttcgatgatgcggacattgatgttgctgttaaaggcagtcttgctgccaagtttcgtaacagtggacagacatgtgtttgtgcaaacaggatattggtgcaagaaggtatctacgaaaagtttgcaaaagcattcatccaggctgttcagagtttgaaggttggtaacggtctagaagagagtacatctcagggtcctctgattaacgaagctgctgttcaaaaggtggagaagttcataaatgacgcgacttcaaagggagcaaatgtcatgctaggtggtaaaagacacagcctgggaatgtcattttatgagccaactgtagtagggaatgtcagcaatgatatgcttcttttcagagaagaagtttttggtccagttgcaccccttataccgttcaaaactgaggaagaagcagttcatatggccaacgatacaaacgcaggcttagctgcatacatatttaccaagagcatacctcgttcatggcgtgtatctgaatctcttgagtacggcttagttggggtaaacgagggaattatttcaacggaggtggcgccatttggcggagtaaagcagtctggtctagggagagaaggatcgaagtacggcattgacgagtacttggagctcaagtacatctgcatgggcaacttgggttgagtcctgaagtcggcctctagctcgaaacactcggcagatgatgaacggagaaaccaggcgtgcttagaagggcgtgagttgcgtttagctgcaagatcggtcatgatggattgatggctgtgggagagcagttttagaataaatcgaataagccgcggagcattaaataaaagaagtggaaatgagatgtaaatggcgtggaactataaagtatggcttcaccttcgaacctgtatacggcctgtttggattctcttctaccgtcgcttcagccaccaggcttcccaccgaagccacccccgcaacggtccgatagaagcgggcttccgtagaaagctgggctagctgggcatctgtccagtccttggctctcgccacgctagggtttctttggtccccgctgcctcgcatcgctcctgtctcgccttctaggcggagctgggattcttctcaatgacgacaacgagattctaagttcttcacgacgattctgatcccttcaaacttcatcgatagttagcatttgttatccatgatttgtcgtagtgaattgaagtttttggatcgagttcatcggattccagccgatgtacaccgagagatcccctttcatactttccagcataggtacttctccaaagatccagttcaagttggtgtccccgcacaatcgagttaaccaagatttcatgccctgtcagagtttgatcagaagaagaggagctgcaggaggcgtctgtctgatcacaatgcccgccgccggaagcctcagccagatgcattcgcctttgcctctgcaaggctgccttcgtcgtcgttcgatgataggaggcaaataagttttgtctggaataaagctcctgttagccatcctttcacttctccatgggacagctcatctgagctccctcatgcaaaggaaataagagaggtgtcaacgaaagttgggacaattactggacaagttcatttggataaatcttacgtgtccaatgctgttccatcacttacccatggcaaagatgagccttggccaatgaaaggtccggacatgtctatagctgcttcaaaattcgatggagcaccggatcttcagcgtgctctctctcttctgtcagttggcgcctgcggattgcccgatcctgtacaccaaacatcttgcgtcatccaattcactagtgccagcgagaacagtggcgaccttcatctatcacatggagcgaactctggtctagcgtcatgcggtgatggacagcatatagcttctcagcctcaggctcagctggttcggtttaccatggataccagcaacagtgtctatgagcccagtttcttcagtgtaaaccagataaattaagcgttgaagacacacgccacttggtcatttggataaatagccctgaagatggcctgagcttgtgcaagaagttcttcaaccaaccaccggacataaggatctatctgttaatgttatctgtgtatttattagccatacctgaattaagttgaacccaatctaggccagcttatgtgcaatatgcagttccaacctgtgattgacccattttttctgttgtttctttgcccgtgatgtgactgctctggaacttaagtgtgatactgttgtagttacactttactgccctgacaatcatgtcaaacggctggatatctttgaaactgtccttgatgaatctggacgtgtattttgtgtgtgtgt

SEQ ID NO: 6222 - DNA, 722 bp, Zea Mays
acccatctgcccggtcgccgaaacctagctcctctcaaagtctcgattctcctcgctcctcggccctcgcccacctctcgctagtcgctccccacttcccagtctctgtggccggacgccgcggcgagatggcctcgacctgcttccgcgccgccgcccgcgtggcctccgccgccagtcgctcggcggcggcctaccgctccgctccctccgcggcacgcgccggtgccggtggagctcgggtgctgcgcgggattgtcactgctgccgctgcacagtgcggtggcgtcagccaggctgacgtcgcggctgagcacggcgtcgagctgccgtgctctctctcagcagatgggtcaatccgttcgaaggtgataaatggtcaaatggatggacgacctgctcatgtcatgctatcggactgaaatgatttatgtagagtagttatcgaattgaacatctggagcatgacttttcattacccgatctacaatcatggattttttttttcaaggtttgagttcgtgcctcctggtatccatgaaaaaaaaaacatgaagcacggtttgccgacgtctgggttatattcgtccagtgcaaatccgaatgctatctgtgataataacagcgaggaacaatttaaggtcaccatgtgattttgaaagttgtcgatatgattacgttagtacacttgctaccgttttcttcaatttttaaggaaaaaa

SEQ ID NO: 6223 - DNA, 774 bp, Zea Mays
cgccactgccacccatctgcccggtcgccgaaacctagctcctctcaaagtctcgattctcctcgctcctcggccctcgcccacctctcgctagtcgctccccacttcccagtctctgtggccggacgccgcggcgagatggcctcgacctgcttccgcgccgccgcccgcgtggcctccgccgccagtcgctcggcggcggcctaccgctccgctccctccgcggcacgcgccggtgccggtggagctcgggtgctgcgcgggattgtcactgctgccgctgcacagtgcggtggcgtcagccaggctgacgtcgcggctgagcacggcgtcgagctgccgtgctctctctcagcatgaaaatgatggtacgtgaaacatttgcccagtgccttaagagatgggtcaatccgttcgaaggtgataaatggtcaaatggatggacgacctgctcatgtcatgctatcggactgaaatgatttatgtagagtagttatcgaattgaacatctggagcatgacttttcattacccgatctacaatcatggattttttttttcaaggtttgagttcgtgcctcctggtatccatgaaaaaaaaaacatgaagcacggtttgccgacgtctgggttatattcgtccagtgcaaatccgaatgctatctgtgataataacagcgaggaacaatttaaggtcaccatgtgattttgaaagttgtcgatatgattacgttagtacacttgctaccgttttcttcaatttttaaggaaaaaa

SEQ ID NO: 6224 - DNA, 1175 bp, Zea Mays
ccactgccacccatctgcccggtcgccgaaacctagctcctctcaaagtctcgattctcctcgctcctcggccctcgcccacctctcgctagtcgctccccacttcccagtctctgtggccggacgccgcggcgagatggcctcgacctgcttccgcgccgccgcccgcgtggcctccgccgccagtcgctcggcggcggcctaccgctccgctccctccgcggcacgcgccggtgccggtggagctcgggtgctgcgcgggattgtcactgctgccgctgcacagtgcggtggcgtcagccaggctgacgtcgcggctgagcacggcgtcgagctgccgtgctctctctcagcgcgctgctgcaggcacatgactttgatagttcttgaaagatattactgggagcttgctgttttgcctcatacaatcatgaagaatgagtactttaacactgaaattgtactggaagactagagttatgttatttacctagaatggctagctacctctgttgaggaataccttgatgcaataatgtggcatcctttttcaacgttttccacattaattgattgtttacttgactcaatatgtctgtttacagtgcttaaattattatttatgcaagtctgctctctctctctcttgcattttttagactcccggttgcatcttggtgcgtgctttctttaatttttgtattcagcagagtttttgccgttgtagtttaccatatgattactcttcttttctcagatgaaaatgatggtacgtgaaacatttgcccagtgccttaagagatgggtcaatccgttcgaaggtgataaatggtcaaatggatggacgacctgctcatgtcatgctatcggactgaaatgatttatgtagagtagttatcgaattgaacatctggagcatgacttttcattacccgatctacaatcatggattttttttttcaaggtttgagttcgtgcctcctggtatccatgaaaaaaaaaacatgaagcacggtttgccgacgtctgggttatattcgtccagtgcaaatccgaatgctatctgtgataataacagcgaggaacaatttaaggtcaccatgtgattttgaaagttgtcgatatgattacgttagtacacttgctaccgttttcttcaatttttaaggaaaaaa

SEQ ID NO: 6225 - DNA, 1849 bp, Zea Mays
attgataccagcagaaaaaaacaactcaagcctcgcccggtcgcccctccctccctccctctgccccgggtttccagggaaacccacccccagatccaaatccagcgaagcgacagagatcaaggatggagctggaggtgggtgcgccttcgccggcgaggtacctggtgggggcagcgatcatgatggccggcgtggtgctcccgctggcgtacatgatcttccgcagcaagcgttcgccttcctccgcctccgccgcggggccctcctccttctccaagcagacgaacaaagggctcatctgatctgagcgagtgggtgaatcgatcgccttcccctgatgcttgtcattctgtctgttttggcaccgcgagatcctccaactgcttctcgagactgggcatcatcacgtcaaatactagctgattagtagtcagttccttttgtaccttgtgtagatcagatcgattgcttatttggctgatttgatacaattataaacaatgggtttacttttgagtgcactacttacaagcatcattcatacggatttcagtttacctaaacaaaccacttgccctcttctgctgcttggctggtttattacgataactgtgcagaatttctctctatgctagttctccctcaattccaaaatgtaagttgttttagttttgtctgagttaagcttctctaagactaagtttatagaacatcaaattggtttcgctgagaccaccaggaaatatgtcttgccacttgacagtgcatttatttggtattgtagacgttaatatattttctatagacttcatcagaattagagaattttgacttaggacatgaaaacggcctatgttttggaaacatagggaatactatgtttgtggtttaataaggagcacacttgttgtgccattcatccttttgcatcatcagctgttgatggtctagttgttgcattgtcagatctaacagcattgggattgaattcggcactgatcctgcccttctgtgtagttgtgattcctatgcgatattttcttcagtgcttccctcttcaaagtttggtttgctctcttcagtccccttctttattctattctaacggaggcctttcatgtcattcgcttccaggagctgacacatacattgttgctaagtgcattagtttgttatctgataatccacacctccagatgtgccctgtatgtttgtgttcttataagttggctcctattgaattgtctgtgttcctgcacatgaaggtagtaaacaaatcagtgtgctgccccagaaaagtcagatggatcgattgtttttgtggctacatgaagggcttgcggcttgccttgtggcttgtgatcaagatggtaattctcatggaggctactgggtattcagggcctacccttcctcagtattgaatcaaaccccgatatttaagactgtcccttctgaagttgacgtgacatgctcgagcgctggagcgcgtcgacatcaccggtttctaccctgagtgtgtcctattaaagtgagaagtacctgctggacctagcatgatgtatgtgtccttgagtcttgagaccgcaacatatcaacatcactcgaagaggctgggcacctactgatcagtgatcacataacacagatggagagaaatatatgtgttcctgttttttattttgtattctagtaaaaaaaatactagcttctacagtttccatcatcaaacgcttatcccacttttctgcctcctggatactttgtgtcacgtacgttctctattgccacttggtgatgctgcttgtgtatctcatgcatatctgaatcccaggagatatcgtcc

SEQ ID NO: 6226 - DNA, 1672 bp, Zea Mays
gccaaatccgataatctaccagtgggccctggttgacagcccaacgcacggctctcctgtgcgcctccgatgccgtttccccgaagcaaagggagacgaaagctcaaaaggtccccccgcttcctgtggtccacgcacgcacgcaggcggcggtggtgcccatggcttcgtggctgttgctccccttctcctccttcccgtggcctcccccgcccccaccaggctcctcctccggccgcggcggcgatggcggcggagacggcggcgattggaggccgaccgtcgtcgcagccttcgcaggcgtgcaagtcggccgcgctctccgccgccgcttcgccggcctcctccgctcaccgtgggaacgggtcagggggtagatacatcagcaacgggaagttgttgtccagacggcctcgtggaatcgattccaagaagaggctctggactaatgtccttcttgctcttaatgtcctggcttatgtcgctcaggtagcatcacaaggaaagcttctcatgtggggagccaagatcaacagtctgattgatagagggcaattttggcgtttggcaacatcatctctacttcatgcaaatctcacccaccttgcattcaattgtttctctttgaactctattgggcccatggttgaaatgttaagtggtcctagaagatatctagctgtttatttcagttcggcgctggcaggttcactgatgagctaccgttttagtgcgtcacctgctgttggtgcgtcaggtgccatttttggattggttggagcctatgcagtttatatgtggaggcatagaagattttttgggaattctagagagagtttagaacatattgggcgtgtggttgtcctgaatatgggtatgggcctcctttcaaggggaattgataactggggccatctgggaggcttgcttgggggagttgccatggcatggttcctaggtccggcatggcaatatcagtacgtggcaaaggatggtagagcggttttcaaagacagggctccagtcctccgactaataaaggggtagacctgtgggtattcgtggaaatagcgtggaagaggatgaaaaggggaaagggggtgaagattcagacatgcgccgagcaaagggagtggcgaaaaaacaattaggccctctttggaatgaaagaatttcagagaaatcatacatgaatcagttcatttttcatagaaaaaacacatgaaccttaacatgtaactagttttggtgtcgaaacatttcactgcagagctaattgctgaggaaacacacacgagaatcatattgctttgttcgaatcgtggcaattgttaaatcttcaaagctaagacgagttgtggactgtcagttgtatttccaggtatcaatagccctttttgtactaaccataggatctgctgtcaagttcctacgttggacattgttacgcaaccggatcctctacagtaacttgaagtagctgctgataggtcaggtcattgacgtgcggggttggccttgtctggcccatgcacttaagttgtcggatattactgcagatgaatggcttccgactgttactacgtttcttcttgtccagtactgcaagagatgataaaatatgtaataatgtcctcagtgatctgttaagtgattatgggggtgtttgttt

SEQ ID NO: 6227 - DNA, 1869 bp, Zea Mays
gccaaatccgataatctaccagtgggccctggttgacagcccaacgcacggctctcctgtgcgcctccgatgccgtttccccgaagcaaagggagacgaaagctcaaaaggtccccccgcttcctgtggtccacgcacgcacgcaggcggcggtggtgcccatggcttcgtggctgttgctccccttctcctccttcccgtggcctcccccgcccccaccaggctcctcctccggccgcggcggcgatggcggcggagacggcggcgattggaggccgaccgtcgtcgcagccttcgcaggcgtgcaagtcggccgcgctctccgccgccgcttcgccggcctcctccgctcaccgctctgctctgttcagtgggaacgggtcagggggtagatacatcagcaacgggaagttgttgtccagacggcctcgtggaatcgattccaagaagaggctctggactaatgtccttcttgctcttaatgtcctgtaagtcggtggacaatttgagtttatgtgatagtagctccaatcctttggtacatttgttgtttaacacccttccttttgctctcaacgaagggcttatgtcgctcaggtagcatcacaaggaaagcttctcatgtggggagccaaggtttgtgtcttggttggaatttctgtttcagttatgcgctgttgattttgttaacctaatacagttatgaccatcatttgcaatgaaagatcaacagtctgattgatagagggcaattttggcgtttggcaacatcatctctacttcatgcaaatctcacccaccttgcattcaattgtttctctttgaactctattgggcccatggttgaaatgttaagtggtcctagaagatatctagctgtttatttcagttcggcgctggcaggttcactgatgagctaccgttttagtgcgtcacctgctgttggtgcgtcaggtgccatttttggattggttggagcctatgcagtttatatgtggaggcatagaagattttttgggaattctagagagagtttagaacatattgggcgtgtggttgtcctgaatatgggtatgggcctcctttcaaggggaattgataactggggccatctgggaggcttgcttgggggagttgccatggcatggttcctaggtccggcatggcaatatcagtacgtggcaaaggatggtagagcggttttcaaagacagggctccagtcctccgactaataaaggggtagacctgtgggtattcgtggaaatagcgtggaagaggatgaaaaggggaaagggggtgaagattcagacatgcgccgagcaaagggagtggcgaaaaaacaattaggccctctttggaatgaaagaatttcagagaaatcatacatgaatcagttcatttttcatagaaaaaacacatgaaccttaacatgtaactagttttggtgtcgaaacatttcactgcagagctaattgctgaggaaacacacacgagaatcatattgctttgttcgaatcgtggcaattgttaaatcttcaaagctaagacgagttgtggactgtcagttgtatttccaggtatcaatagccctttttgtactaaccataggatctgctgtcaagttcctacgttggacattgttacgcaaccggatcctctacagtaacttgaagtagctgctgataggtcaggtcattgacgtgcggggttggccttgtctggcccatgcacttaagttgtcggatattactgcagatgaatggcttccgactgttactacgtttcttcttgtccagtactgcaagagatgataaaatatgtaataatgtcctcagtgatctgttaagtgattatgggggtgtttgttt

SEQ ID NO: 6228 - DNA, 2124 bp, Zea Mays
gggaggggggagaaaggtgtccaaccaaccttggttgaaatcgttttgtgacacctagcattttacatagcctatataatataacagcccctagaggagggggaggacagacggtgtgtggcatggcataagctatagcggcatcaagtggtgggcacacggagagctggtgactggttatctgaggcgcagagctcagggtgaaagaagaatctagtgaaagtggaaggatccgcgcacgggctccgtccgaagatgctgccctactttgatccggagtacgagaacttcaaccagcgcatcaaccccccaagggtttgcatcgacaacaccacatgcagcgactgcaccttggtgaaggttgacagcatgaacaagaatggcattctgctggaggtgctgcaggtcctgagcgatctggaccttcacatcttcaaagcctacatcacctctgatggtgggtggttcatggatgtgttccatgtcgttgataagcaagggcagaagatcactgatgacaagaccatcaagtacattgagaaggctttaggtccggagagcaatttgctgggcgcaaagggcagcaactcagcggggaggtcggtggggctgcactccatcggcgaccacaccgccatcgagctcaaggggcccgacaggaggggcctcctctcggagatcttcgcggtcctcgccgacctccagtgcaacgtgctggccgccgaggtgtggacgcaccgcatgcgcgtggcctgcgtcgtgtacgtgaacgacgtggccacggggcaggccatcgacgacccggaccgcgtggcccgggtcgaggaccggctgcgccacgtgctccgcgggtacggcggcggcggcggcgcgggggacgacgacgacggcagcggcgcgcacgccaacttcgcggccgcctcttcgacgccgcaccacgtggaccggcggctgcaccagctcatgcacgccgacgtggacgccgtccacggcgacggcgcgcacgcggcggccggcggcgagggcgaccggccggccgtgacggtggagcactgcgaggagaagtcctactccgtggtgaacgtcaagtgcaaggaccggtccaagctgctgttcgacatcgtgtgcacgctcacggacatggagtacgtcgtgttccatgccgccgtgtcgtccgaagccaactacggcatccaggagctgtacatccgccgcaaggacggcaaaacgcttctgaaagacgaagcagagaaggtgatcaggtgcctggaagcagccatctccagaagagtatccgagggattcacgctggaggtgtgcggccgggaccgggtgggcttgctgtcggacgtgacgagggtgctccgggagcacgggctcacggtgagccgcgccgacgtgacgacggcgggcgggcaggccacaaacgtcttctacgtccggaacccctcgggccagccagtggacatgaagaccgtcgaggggctcaggggccagtttggccagaccgccatgctcaacgtcaagagcgtgggcgtgcctgctgcggtggccaaagcggcggagccaagctccggcagcatggtcaggagcagcttcttctccttcggcagcctcttcgcgaagctccgggcctgacaactggtcaggcgattcgaactccagctgtgtgtagaagaaatgaactcagaactagggtagtggactagcgggggtgggcgggggagagaaacagggagcaactgtatctctatgtggcagctgtggttgttgtacagttcataaggagcctctaccagaagaatggtagttctgtggaatgcaggctgcggactgcttgttaaggtaagggtttatcccatctgcgcagaatttaaaaaaaaaacatcgatcctgtcatctgtcgaaactgtctctgattgttcagccccacacaacattccagcatttgcctctgcgtcactgcatgacttgtaacttcatccaaccattctctaatggctaatgctaaaaagtcttagtaatgagagcaagcaactattctccgtatattctgacaaaaggggcagccgtgtatgaacttgcaaactatttgcagacagaatgcaggcaatacgccggcaa

SEQ ID NO: 6229 - DNA, 2323 bp, Zea Mays
agggggtgaaggttgtttcttccatgtagacttgagtgtgtgtggggttgggggggaggggggagaaaggtgtccaaccaaccttggttgaaatcgttttgtgacacctagcattttacatagcctatataatataacagcccctagaggagggggaggacagacggtgtgtggcatggcataagctatagcggcatcaagtggtgggcacacggagagctggtgactggaacagggcatcggaaccgagcaagcaagcaagcagaagcaggattccggcagagggaggaggaaggaggaaggaaggcggtcgatcgatcggaagcgccggcgccggcgccgccgcaaaggatcgggcagacgagacgacacgaggttatctgaggcgcagagctcagggtgaaagaagaatctagtgaaagtggaaggatccgcgcacgggctccgtccgaagatgctgccctactttgatccggagtacgagaacttcaaccagcgcatcaaccccccaagggtttgcatcgacaacaccacatgcagcgactgcaccttggtgaaggttgacagcatgaacaagaatggcattctgctggaggtgctgcaggtcctgagcgatctggaccttcacatcttcaaagcctacatcacctctgatggtgggtggttcatggatgtgttccatgtcgttgataagcaagggcagaagatcactgatgacaagaccatcaagtacattgagaaggctttaggtccggagagcaatttgctgggcgcaaagggcagcaactcagcggggaggtcggtggggctgcactccatcggcgaccacaccgccatcgagctcaaggggcccgacaggaggggcctcctctcggagatcttcgcggtcctcgccgacctccagtgcaacgtgctggccgccgaggtgtggacgcaccgcatgcgcgtggcctgcgtcgtgtacgtgaacgacgtggccacggggcaggccatcgacgacccggaccgcgtggcccgggtcgaggaccggctgcgccacgtgctccgcgggtacggcggcggcggcggcgcgggggacgacgacgacggcagcggcgcgcacgccaacttcgcggccgcctcttcgacgccgcaccacgtggaccggcggctgcaccagctcatgcacgccgacgtggacgccgtccacggcgacggcgcgcacgcggcggccggcggcgagggcgaccggccggccgtgacggtggagcactgcgaggagaagtcctactccgtggtgaacgtcaagtgcaaggaccggtccaagctgctgttcgacatcgtgtgcacgctcacggacatggagtacgtcgtgttccatgccgccgtgtcgtccgaagccaactacggcatccaggagctgtacatccgccgcaaggacggcaaaacgcttctgaaagacgaagcagagaaggtgatcaggtgcctggaagcagccatctccagaagagtatccgagggattcacgctggaggtgtgcggccgggaccgggtgggcttgctgtcggacgtgacgagggtgctccgggagcacgggctcacggtgagccgcgccgacgtgacgacggcgggcgggcaggccacaaacgtcttctacgtccggaacccctcgggccagccagtggacatgaagaccgtcgaggggctcaggggccagtttggccagaccgccatgctcaacgtcaagagcgtgggcgtgcctgctgcggtggccaaagcggcggagccaagctccggcagcatggtcaggagcagcttcttctccttcggcagcctcttcgcgaagctccgggcctgacaactggtcaggcgattcgaactccagctgtgtgtagaagaaatgaactcagaactagggtagtggactagcgggggtgggcgggggagagaaacagggagcaactgtatctctatgtggcagctgtggttgttgtacagttcataaggagcctctaccagaagaatggtagttctgtggaatgcaggctgcggactgcttgttaaggtaagggtttatcccatctgcgcagaatttaaaaaaaaaacatcgatcctgtcatctgtcgaaactgtctctgattgttcagccccacacaacattccagcatttgcctctgcgtcactgcatgacttgtaacttcatccaaccattctctaatggctaatgctaaaaagtcttagtaatgagagcaagcaactattctccgtatattctgacaaaaggggcagccgtgtatgaacttgcaaactatttgcagacagaatgcaggcaatacgccggcaa

SEQ ID NO: 6230 - DNA, 2082 bp, Zea Mays
ttgaaggcctggctcacgaaagcaccttatccatttcgtctcccgcgccgcgcgtctcccttcccggctgtcgacggcgccttgcaggcttgcaccgacccgcggtcatggcgccgtccgtgtccaagatgctctcgacgcctccgtaccacgcatattacacctggcgtcgccgcctccttccccaagaaacagccgcgtcgcccaatccgagcccggcgagccgtcgaatcgcgccgccgctcaggtgttgccgttgcgcgtgcagccggagtccagcgaggcgcttcgtcccgatctgcgcctcggcatcagaccgcgcaggcgcgacgacggcggccctggtcgaagccgaggaggaagcagagctcgacggcccgccgatggtccagctgtcttcagacatcctccgtacggagcttagtttgctcaaggccgacgcgcccccggccggtggcgactcgtctctcggcatcaccgcccttgaggaccaagacagcgaggatggccgccactcgggaggaagagaaaccgctgcttacccagctgccatgaacgcgttgtacgcggcctgcctcgctgggattctgggaacgtgaccgagcagctgtggaacttcacctggcccgccgccatcgccacgctgcaccccagcctcctccccgtcgccgtcctcggcttcttctcaaagctcgtggtgttcgcggtgggcccgctggtgggggatcttgtgagctcgctcccccggatcccagcgtaccgatcactaacggtgatccagacggcggcgcacctggtgtccgcggcgatggtcacgtacgccttcaccgtcccccgggctccagctgcatcggcgctgctcctgcggccgtggttcgccacgctggtggcgtccacagccgtcgaccgcctctcctgcgtctccctcggcgtcatcgcagagcgcgacttcgtcgtccagcaggggaaggcaggccgatcgcgctggcgcgggcgaacgcggcgctcagcagggtcgatctcctctgcgagacggcgggagcgtccatcttcgccgtgctgctctccaggaaccacccgctgacctgcgtcaggctctcctgcgccgtctcgctctgctccctgccccttctgttttttctaggcggcgcgatgaatcgtctcgctgacggcatcttggaccgctctgctagtgccggtccggccccgctggagcgcccaggacgacatgggagcgcggcggttggcaaagcctgggagaccatcaggcacggctggacagagtacctccggcagcctgtgctaccggcgagcctcgcctacgtgctcgtctgcttcaacgtcgcgctcgcgcccggcgctctcatgaccaccttcctcatccacctcggcgtgagcgcgtcggtgctcggtgcgttcggcgggtcgtcggcggtggtggggattctggccacgttcgtgactccatatcttgtcaaggagctgggcattctcaaggccggagcggcagggctggtcgcgcagagcgcgctcctcggcgcggcagtcgtggtcttcgtcactggccccgtctcacggcgcggcgctctcttcgcctttcttggcttcatcgtggcttcgcggctggggcacatggcgtacagcgtcatcggactgcaggtggtgcagacgggaaaccccatggggaaggccaagctgatcggcgccacggagatcgcggtggccagcctcgccgagctcgccatgatggccgtcgccgtcgtcgctggggacgccgcgcacttcggctgcctggccgcgctctcggccgcatcggtcgccgccgccgcttgcctgttctgcgcgtggctggccaaccccaccgacgacctcaggaggctcttcccatgttgatacaggaataggactaggagacgcaaatttttggagaatagccaattcgtgtacctagctccaaatgttttgcaggtataagctccaattttttttccgtgttctgcatccactttgatttttgaaatcaatattagaggaaggacataaacttgcaataaactttatccaaaaataattaagtggcag

SEQ ID NO: 6231 - DNA, 1186 bp, Zea Mays
ttatagtgcatgtttatcaggcttaaacccttgacaacatttcccacaaggtatggcttctatgatgaatgcttgcggaaatatggaaatgcaaatgtgtggaagtactttacagacttgtttgattatttgcctctcacagctcttatagaaaatcagatcttctgcctacatggtggtctctctccatcactggatactttggataatgtccgctcccttgatcgcatacaagaggtcccgcatgaaggacctatgtgtgatcttttgtggtctgacccggatgacagatgtggatggggaatttcaccaaggggtgctggatacacatttggccaagatattgcacaacaattcaaccatacaaatgggctaagtcttatttcaagagctcatcaacttgtaatggaagggttcaattggtgccagaaacaccaaatgtgccgtgcaaggctgcacaagactctgggcaaccaaacacaggttggctgcattgcactagcctagatacaggataagaacgttgtgacagtgttcagcgcgcctaactattgctaccgatgcgggaacatggctgcgatcctcgaaattggcgagaacatggatcagaacttcctccaattcgacccagctccgcggcagattgagccggacatgacgcgcaagaccccagactactttttgtaatcagcatgctggctttctttcaacttgtctactgcagcgccagcacctgtagatctccttagaaaatggtgtttcctctagccgccttgtacccccatcattcttttggtgtggagattttattgccgcttctcagaacattgaggttgttgaaagtacatggcattgggtcttcctttttttttgccgtcttgtatctccattttgtatgattctgagacaaaagagaagagaagctgcaatagaattgtctcgaaatatattgtcctgtccagaagaacaggtgtggctccaaaaaaaaaagggaaaaaataaaagagagacaacaaggaaagatgcaggaaatggacccgatgttccgttgtgtctgttgtgatgcttcatgcttggctaggggagttctttcagtgctgtttgactccgaattgaaggaaccttggttgttcaacctacatcatcagctcaccgtcgaatgtctgcccagaccgatgaggacagg

SEQ ID NO: 6232 - DNA, 1190 bp, Zea Mays
caggcttaaacccttgacaacatttcccacaaggtatggcttctatgatgaatgcttgcggaaatatggaaatgcaaatgtgtggaagtactttacagacttgtttgattatttgcctctcacagctcttatagaaaatcagatcttctgcctacatggtggtctctctccatcactggatactttggataatgtccgctcccttgatcgcatacaagagactattctgtggacatctttcttgtgaattggggacttggtgttagagatccaatttcttttgagatatctatgttgatcgttgaagtctgcatagacataacaggtcccgcatgaaggacctatgtgtgatcttttgtggtctgacccggatgacagatgtggatggggaatttcaccaaggggtgctggatacacatttggccaagatattgcacaacaattcaaccatacaaatgggctaagtcttatttcaagagctcatcaacttgtaatggaagggttcaattggtgccaggataagaacgttgtgacagtgttcagcgcgcctaactattgctaccgatgcgggaacatggctgcgatcctcgaaattggcgagaacatggatcagaacttcctccaattcgacccagctccgcggcagattgagccggacatgacgcgcaagaccccagactactttttgtaatcagcatgctggctttctttcaacttgtctactgcagcgccagcacctgtagatctccttagaaaatggtgtttcctctagccgccttgtacccccatcattcttttggtgtggagattttattgccgcttctcagaacattgaggttgttgaaagtacatggcattgggtcttcctttttttttgccgtcttgtatctccattttgtatgattctgagacaaaagagaagagaagctgcaatagaattgtctcgaaatatattgtcctgtccagaagaacaggtgtggctccaaaaaaaaaagggaaaaaataaaagagagacaacaaggaaagatgcaggaaatggacccgatgttccgttgtgtctgttgtgatgcttcatgcttggctaggggagttctttcagtgctgtttgactccgaattgaaggaaccttggttgttcaacctacatcatcagctcaccgtcgaatgtctgcccagaccgatgaggacagg

SEQ ID NO: 6233 - DNA, 1417 bp, Zea Mays
aaatcccccacagttccctttccctccgtccacccgcccttctccttcgttcccggctaagtggccaacggacgtgcgatccggcgcgcttcctcgccgtcgatcggaggccgagaggaatgtcaggggcggcatccgtgaaggaccgggccaccggcctcatcgacaagttcgtgctccgcgaggcccgcggcagctccgtcgaggtatatttatacggaggccaagtgacattttggaaaaacaacttcggtcagcaactgctttttatcagtaacaaggctacttttaaaccgccaaaagcagttcgtggtggtatccaaatttgcttccctcaactaggtaaccatggagttcttgaacagcatggatttgcaaggaaccggttttggagtgtcgatgaaagcccacctccttttccagttgctacttccaattgtcatgttgacttgatactcaagtcatctcccgaggatttgaagatctggccacatagttacgaatttcgtctgagagttgctctgagtccaaggggagatcttattcttacatctcgcataaaaaacatcagctcagacagcaagccattccaatttacatttgcataccacacctacttttcggtgtctgacatcagtgaagtgagggttgaaggtctggagaccttggactatcttgacaacctgcactccaagaaacgttttactgaacaaggagatgcggttgtattcgagtccgaagtggacaaggtgtatttgagtgctccgccgaaggttgcgatcatcgaccacgagaagaaaagaacgtttgtgttgagaaaagagggccttcctgacgttgtcgtttggaacccctgggacaagaaggacgaggggtacaagagcatgctgtgcgtcggggctgcggctattgagaagtcagtcactttaaagccaggcgaagagtggacagggaagcaggaaatttctgctgtgccgtccagttacagcagcgggcagttggaccctgaactgattcgtcgaatgcacacaatataaagtttacctgcgattgcatcctacgttccaaactagcctgtggttttttttttattattattattctgaagcagcactgggattggaatcatcaccctgttaattactagacaaattgggccgggggagtttttcatccatagctggggccggaggtgccattccgatccgtatacaatattctttttctctgtgtttttttggtattgtattgtaccactagtccgctgcaaaaggaagccccaagtttgtactgcatgtggcaaacaaaactaccaagatatactaattgagttgtataataaagcgtcacacgtttctttctgtgttgtctggagagaatggggattgtcacgctactgttagaacgctgaccagga

SEQ ID NO: 6234 - DNA, 1803 bp, Zea Mays
gcacctactactcggctactccgtctcacttctatgcgggcccgaccgacgcaatcgcacatttctgacagagtgaatgactggtatctttcccggaaccctactccgaaacgcaacacacgtttccgtctaaaaatccccaacgcaaccagacgctggtggcgtcccgcacgcccccccccccccccccccccaaactccgatctgccatggcctcgctccagtcctttctcgccgtcaaaccggccgccggctgggccgctccgtcccgccgcgcgcgcgtcgcggccttcctcgctccgccgcccccgaccaccgcggccgccgtgggggcggcgcggcgggagctgtcggccgcgagcctggccgtcgtggacggcgaggcgcggtacctcgtcggcacctacaagcggtcccgcgtcgtcttcgagcacggccgcgggtgcaagctctacgataccgacggccgcgagtacctcgacatggccgccggcatcgccgtcacggcgctcggccacgcggacccagacgtgtgcgccaccatcgcggagcaggccggtaaggtcgtccacgtcagcaacgtcttctacaccaaaccccagaagcgcctcgctgtcgcaggtggagctagccaagcggctcgttgaggtgtcgttcgcggaccgcgccttcttcgccagcactggcacggaggccaacgaggcggccatcaaattctcccgcaagttccagcgggccgcacacccggagagcggcgacccgcccacggagttcctggcgttcagcagcagcttccacggccggaccatgggcgccgtcgcgctcaccagcaagtcgcagtaccgggagcccttcgcgcccgtcatgcctggggtgaccttcgtggattacggcgatctggaggcggccaagaagttcgtacggtccggcagggtcgctgctgtcttcgtcgagcccgtgcagggtgagggtggcattcacagtgccaccagggagttcttgcaggggctgcgggacgcctgtgacgaggcgggagccctcttggtctttgatgaggtgcagtgtggtttcgggcgcacaggccacctctgggcgcatgaggcgtacggagtggaaccagacataatgaccttagcgaagccactggccaacggcattcccatcggcgttgtcctggtgaaggagaagatcgccgcagccataaactacggcgaccacggcacgacgtttggcggcgggcctctcgcctgccagaccgcgataacggtgttcgacaagatcacgagacccggtttcctggccgaggtgtcgaggaaaggggagagcttcaagcagctgctccgcgccaagctgagcgggaacccgcacgtgagggaggtccgcggggtcggccttctcgtcggcgtcgagctggacgtgccagctggtcctctggtcgacgcgtgcttggacgccggcgtcgtcgtgctgactgccggtaagggcaatgtggtgaggctggtgccgccgctcatcgtctcggagaaggagctggagcatgccgcggatgtcataagggactgtctaccggcgctcgatgtcgttgctgctgcctaatgtatatggtggtgcaataggtccggatatgaaacctgattccaaattttggaatcgaataaatttcatgtcgggccaatgttgttgtgttcattgaaacaaactctttttttttttggaatcgaataattattacatgtcagaccgatgctagctgttccgagagcaaagtggttttattatacaaaatggtctgaagtgttaagg

SEQ ID NO: 6235 - DNA, 1980 bp, Zea Mays
gcactcctcaggtcctaggttcgactccccgttggggcgaatttcgggctatggttaaaaaaccccctcgtctgtcccacgccaaagcacatgtgtaaggcccggtcgcggtcgtttctcacatgggctacggtgccgctgtgtatgggtggggcaggggtttggggttttctcgacctgtgtgagaaggtcttcttcttaatataatgcccgagggctatctaccccccctccccgcaggtcgatttttgtttttaaattatgaagtttggaactcaaataactaaaaatatttaacattgaatattatgttaaagcatcctctctgaaaccattattttcatatttttgcaaactcacagttgtggcatttattcaccatactattcactgtattggcatatgcatgtaagatgtgcccctagagaacatgcaagcacattttatgtcaacgattactaagttcatgatgtggtatctgtttgtggttatctaatgtgtccaattctaatgcacttcttaaaaaaacaaccaaatctgcttgttacaaatataattgcttattctgataaaatattctgaatagaataagttacatacctctgaactcttatcttactgattttttgggttcccaataaatatgtgaaatatggaacatattgatattgtagcttacttttccactctctctcagtgaaatgaggcatgataagaagcctgatgatggagaaactaactcatctaggagtctcagtgtctctgacaataatgatgatagaaaaaaggagacactgttaagtggtgatgataaagaggatcacgaaatacagctcaaacaaataagacaggacatggaacttttgcgtgatgataaatctctcttggagataattttggatgagaagaatgctgaagtgcgcaagatttctagcagattaaatgatcttgatctgcagttaaggaaggagaaagaggaatgccacaggatgacctcaaaaattaaaaagttccttaaagcccatgctcgctttttgaaagcacaggaagaattaaaaagatattctgaagcgtggtgctaatgaagaagtttctagtatcaatgttgatgaagatccaaatgttccttatgaaaggagcccaaatgctgctatagctaagaagagatcaataccatactcaacaagtgaagaagcgaaagccgtgaagaaaagaagagagcgggactctgacacaactaggccagataaatataggtttgaaggtactattgcaggatttgaaaaactaagcaagggaaccgagccaacaaaatctttatatttgaagaagaaactgtgggaagatgaaaaggataagataggcaactttgtctcctcagccaacaccgacaaggtcaaagaatctccggtcaaacatgttttgccctccactggtatggctgctcatgctttggacgatctgtttgaagctgttgaactggaggatagacgtgacacatcaatagaaaatgatgctgatgacgaaactaggtcgcctgttatgcccccacaaccaccaccggtggttaatacttacgagcagtacgaggctgatgacgaggaagtcgacgtggaatgattagaatgccgagatggtactggaatgagctatatagctctcgcgcctgtgtaaagcattatgtaatatgtatttgatgctggagtttaccttgcataaaaagaatcgtcattaatgatccttggtggatgcggtttaagcactcaacttttttgttaatttgatgaaggcaacatgccctgttacctgtacctaatataccacgtggtggctagctagccagccttgtcagtgccctggtacttttgggtggtcttgctgtgctgttcgcggcacttgaaaactgatgttttgtaggactgatgttttgtaggagtattatttgaatggtagccgttgatcttcggctgttgatgcgct

SEQ ID NO: 6236 - DNA, 2024 bp, Zea Mays
gcactcctcaggtcctaggttcgactccccgttggggcgaatttcgggctatggttaaaaaaccccctcgtctgtcccacgccaaagcacatgtgtaaggcccggtcgcggtcgtttctcacatgggctacggtgccgctgtgtatgggtggggcaggggtttggggttttctcgacctgtgtgagaaggtcttcttcttaatataatgcccgagggctatctaccccccctccccgcaggtcgatttttgtttttaaattatgaagtttggaactcaaataactaaaaatatttaacattgaatattatgttaaagcatcctctctgaaaccattattttcatatttttgcaaactcacagttgtggcatttattcaccatactattcactgtattggcatatgcatgtaagatgtgcccctagagaacatgcaagcacattttatgtcaacgattactaagttcatgatgtggtatctgtttgtggttatctaatgtgtccaattctaatgcacttcttaaaaaaacaaccaaatctgcttgttacaaatataattgcttattctgataaaatattctgaatagaataagttacatacctctgaactcttatcttactgattttttgggttcccaataaatatgtgaaatatggaacatattgatattgtagcttacttttccactctctctcagtgaaatgaggcatgataagaagcctgatgatggagaaactaactcatctaggagtctcagtgtctctgacaataatgatgatagaaaaaaggagacactgttaagtggtgatgataaagaggatcacgaaatacagctcaaacaaataagacaggacatggaacttttgcgtgatgataaatctctcttggagataattttggatgagaagaatgctgaagtgcgcaagatttctagcagattaaatgatcttgatctgcagttaaggaaggagaaagaggaatgccacaggatgacctcaaaaattaaaaagttccttaaagcccatgctcgctttttgaaagcacaggaagaattaaaaaggtcacaagctcgttttgagagactcggtgatttacttgcttcagatattctgaagcgtggtgctaatgaagaagtttctagtatcaatgttgatgaagatccaaatgttccttatgaaaggagcccaaatgctgctatagctaagaagagatcaataccatactcaacaagtgaagaagcgaaagccgtgaagaaaagaagagagcgggactctgacacaactaggccagataaatataggtttgaaggtactattgcaggatttgaaaaactaagcaagggaaccgagccaacaaaatctttatatttgaagaagaaactgtgggaagatgaaaaggataagataggcaactttgtctcctcagccaacaccgacaaggtcaaagaatctccggtcaaacatgttttgccctccactggtatggctgctcatgctttggacgatctgtttgaagctgttgaactggaggatagacgtgacacatcaatagaaaatgatgctgatgacgaaactaggtcgcctgttatgcccccacaaccaccaccggtggttaatacttacgagcagtacgaggctgatgacgaggaagtcgacgtggaatgattagaatgccgagatggtactggaatgagctatatagctctcgcgcctgtgtaaagcattatgtaatatgtatttgatgctggagtttaccttgcataaaaagaatcgtcattaatgatccttggtggatgcggtttaagcactcaacttttttgttaatttgatgaaggcaacatgccctgttacctgtacctaatataccacgtggtggctagctagccagccttgtcagtgccctggtacttttgggtggtcttgctgtgctgttcgcggcacttgaaaactgatgttttgtaggactgatgttttgtaggagtattatttgaatggtagccgttgatcttcggctgttgatgcgct

SEQ ID NO: 6237 - DNA, 2523 bp, Zea Mays
gacggcattacctaaaccataccatagaccatcaatcacttctaacacttttcccgtctcccccttcctcgccgcctccactacagggctttgctcctcccaactctcgaaaccctacccacgcgatgagagatcgatcggtcgagcgcgaattccccagccgcgagcggggggatcggccgccgcccggggtgctgggtcccccgcgccgcgggccggcttacaagacgaagttgtgcgcgctgtggcagcgcggcggctgttcccgcgacacatgcagcttcgcgcacggacacgccgagctccgccggttccccggatcgcgcacctcgttcccaccccgcgccgtctgcagaattaggcggcattcttactggttgccttttgatttaactaccattcaaattagcagactcctgagcagatttattagattcaactgctgccagaggataagatgacttttatatagattcttcagttggcatttcaacgatttattgtgacctgtaatgcttgtccctacatcaagaaggtgggcatatcagtatcttggatgatgactccactgaatgatgtccataatacatttgatgtgctatggtcatgtgcttagcagctttaacggttaattgcacatacccttgaatattgtgcatcagttagatcattgggaagtgttattctcactggtaattgcaagttattgtaattcttgcaagtcgccgcggaagatatctggacaaatgatagtagatttatattgtgatattgggattatagaagacatcaacttgtcataattgttatgtgatgttgttcatggtcttcatcaatttgattttcaacaatcaacattatgagtttggtatcatcttaatgggtatgtcagtggtttcataccatactttggtatctacccatggcattaatttttggctctactttgttgtggctaatgatattatcctggagacccttctacttattgtgcattgaattatcttatagctcaaaggctgtgggagaagagattatagaggtggtgactttagagataggtttgataggaggcgctcacctcataggaggcattcccctgatggagattccaggggccatcgctcccttcgtgaccgacgaccaaattcccaagaaagggaatctagctattcacggtctcccagtaggaagagtgaaatgaggcatgataagaagcctgatgatggagaaactaactcatctaggagtctcagtgtctctgacaataatgatgatagaaaaaaggagacactgttaagtggtgatgataaagaggatcacgaaatacagctcaaacaaataagacaggacatggaacttttgcgtgatgataaatctctcttggagataattttggatgagaagaatgctgaagtgcgcaagatttctagcagattaaatgatcttgatctgcagttaaggaaggagaaagaggaatgccacaggatgacctcaaaaattaaaaagttccttaaagcccatgctcgctttttgaaagcacaggaagaattaaaaaggtcacaagctcgttttgagagactcggtgatttacttgcttcagatattctgaagcgtggtgctaatgaagaagtttctagtatcaatgttgatgaagatccaaatgttccttatgaaaggagcccaaatgctgctatagctaagaagagatcaataccatactcaacaagtgaagaagcgaaagccgtgaagaaaagaagagagcgggactctgacacaactaggccagataaatataggtttgaaggtactattgcaggatttgaaaaactaagcaagggaaccgagccaacaaaatctttatatttgaagaagaaactgtgggaagatgaaaaggataagataggcaactttgtctcctcagccaacaccgacaaggtcaaagaatctccggtcaaacatgttttgccctccactggtatggctgctcatgctttggacgatctgtttgaagctgttgaactggaggatagacgtgacacatcaatagaaaatgatgctgatgacgaaactaggtcgcctgttatgcccccacaaccaccaccggtggttaatacttacgagcagtacgaggctgatgacgaggaagtcgacgtggaatgattagaatgccgagatggtactggaatgagctatatagctctcgcgcctgtgtaaagcattatgtaatatgtatttgatgctggagtttaccttgcataaaaagaatcgtcattaatgatccttggtggatgcggtttaagcactcaacttttttgttaatttgatgaaggcaacatgccctgttacctgtacctaatataccacgtggtggctagctagccagccttgtcagtgccctggtacttttgggtggtcttgctgtgctgttcgcggcacttgaaaactgatgttttgtaggactgatgttttgtaggagtattatttgaatggtagccgttgatcttcggctgttgatgcgct

SEQ ID NO: 6238 - DNA, 1906 bp, Zea Mays
gacattactgggggacagtacacaccgtcgatcttacggtcgtttgatccgtgccgtccaacccgatccagagcattccccagtcctcaccccacgtccccacccttgtcgccctttcgcttccgtctcgtttggacctccatccgcggccgccgccgccgcgctgagtttgggccgggctctgttaatctgggcgactttgattttctctgctcccgctgccacggccgtcaggagtgaagcgatgctggagaaagaccggatatcctacttctacgacggagatgttggcaatgtctactttgggccaaatcaccccatgaagccacatcgtctctgtatgacacatcaccttgttctttcatatggacttcatcaaaagatggagatatatagaccacacaaagcatatccaatagagcttgcccaattccattctgctgattatgtggaattcttgcaccggataactcctgattcccagcacctatatgcaagtgaactaactagatacaatcttggagaagactgtccggtctttgataatttgtttgagttctgccaaatctatgcgggaggaactttagatgctgctcgcagattaaatcataaaatatgtgacattgccattaattgggctggtgggctacatcatgccaaaaagtgtgaggcttcaggcttctgttacattaatgatctagtattaggaattctggagcttctcaagtaccatgccagggttctttatattgacattgatgtccatcatggagatggagttgaagaagccttttatttcactgacagggtaatgactgtgagtttccacaagtatggtgacctgttctttcctggaacaggtgatattaaagatataggagaaagggaaggaaaatattatgccatcaacattccacttaaagatgggatagatgacactagctttactcggctttttaaaacaattattgccaaagttgttgagacatatctgcctggtgctattgttcttcaatgtggggctgattcattggcgagggatcgtttaggctgcttcaatctctctattgaaggtcatgctgaatgtgtaaagtttgtcaagaaattcaatattccccttctggtaactggaggtggtggatacaccaaggagaatgtagcacggtgttgggctgttgaaactggggtccttttagacacagaactcccaaatgagattccaaaaaatgaatatattgagtactttgctccagattatacattgaaagttccaaatttgaacatggacaatttgaacagtaagacctatctcagttcaatcaaagtgcaagtgatggagagtttgcggtacatacagcatgctcctggtgttcaaatgcaagaggttcctcccgatttttatatcccggactttgatgaagatgaattggatcctgatgaacgtgttgaccagcacactcaagacaagcagattcaccgtgatgatgagtactatgaaggtgacaatgacaacgatcacgacgacggcacacgctaatctgcttcttctgaggccctggtgtaaatggaaacctgagattcttcactgttgtgtgtagttcagcagccttgagatgtaatagtttgtcagttgacagcagggatctaatttagcaggtcaaagtggtttagacttttataagggattctgacccctcctgaattacacattgtagtacaagtctgcatatttttaagcatgcaaaaattcaaatttctcagtggtattagtatctcaagaaaatacaaattcctcgctcagtaacattgctgatatgtggtgaatttgattatatctagaaccccaaggcctagtttgagtattctagtattgaccttaatctacatgtattgaactggattggat

SEQ ID NO: 6239 - DNA, 1405 bp, Zea Mays
aaaccggagcattccattgtaccccgcggtgacgcgtcccggccccggcggccggcgggtctgcctaccggtaccggccccgctcgctcgccgagtcaacggcttgactgcgcccgcccgccacgttcgtagtactatacaagtacatgcctttgccttccctttcctctcctctcctcctctcccacagtcccacccgtttcgcagtgcagaagccggcgaaacttccaagcccaaggaaggaaaaaaaaactgtcacctttaactcgatcccctcttccccgcccgagtcagagcggcggcgccggagccggagccgacagcttccggcaagcgggggctacttggtgcggcgggctatttccgcggttttgtgccacagcgggactgaactgcccgcccaggctgccctatcagggtcaccaagattgaacaagactgaactgccgcgcttcaggatactgaactgccatctcagttaaatgatatactgcacaacagtgggcagcgatagtttgagacacattagcaatgagttgtttttctcaccttttcaagagaaaaagggggccacaacaacaagacgatccatctgacaattatttcactggttctgagaatataacaagattcagctacagggaactggttagagccacatcaaattttgaccaaggcaataagattggtgagggcggctatggacctgtctacaaggtagtagcacagccattttcaatttgatgaaggaccagaatgcactagtggtgtttgaaacctttctaacttacaacttcagggaacactcaaggatgggacacttattgccgtgaaggttctgtctttacattctagacaaggggcaaaggagtttcttaatgagcttcttgcaatctctgatgtaacacatgagaatcttgtcaaactctatggctgctgtgtagaaggaaaccacaggatccttgtctacaattatcttgaaaataatagtcttgcacatacccttctagattcgcgacacagcaacatccagttcaactggagaactcgggtaaatatctgcatcggtgttgcccaaggattagctttcctccatggcagtgtcagccctcacattgttcaccgtgacatcaaggcgagcaatatacttcttgataaggatatgacgccaaaaatatctgattttggtctggcaaagcttctacctccggatgtatcacatgttagcacaagagtcgcagggaccctaggttacttggctcctgaatatgcaattcgaggacatgttacacggaaggcagatgtctacagctatggcgttctgcttatcgaaattgtgagcggaagatgcaacactgatacgaaattgccctatgatgaccagattctccttgagaaggcatct

SEQ ID NO: 6240 - DNA, 2055 bp, Zea Mays
catctttgtggctcttgggttgcatttattctgagaactataatgctgttattggacaggatactgaactgccatctcagttaaatgatatactgcacaacagtgggcagcgatagtttgagacacattagcaatgagttgtttttctcaccttttcaagagaaaaagggggccacaacaacaagacgatccatctgacaattatttcactggttctgagaatataacaagattcagctacagggaactggttagagccacatcaaattttgaccaaggcaataagattggtgagggcggctatggacctgtctacaagggaacactcaaggatgggacacttattgccgtgaaggttctgtctttacattctagacaaggggcaaaggagtttcttaatgagcttcttgcaatctctgatgtaacacatgagaatcttgtcaaactctatggctgctgtgtagaaggaaaccacaggatccttgtctacaattatcttgaaaataatagtcttgcacatacccttctagattcgcgacacagcaacatccagttcaactggagaactcgggtaaatatctgcatcggtgttgcccaaggattagctttcctccatggcagtgtcagccctcacattgttcaccgtgacatcaaggcgagcaatatacttcttgataaggatatgacgccaaaaatatctgattttggtctggcaaagcttctacctccggatgtatcacatgttagcacaagagtcgcagggaccctaggttacttggctcctgaatatgcaattcgaggacatgttacacggaaggcagatgtctacagctatggcgttctgcttatcgaaattgtgagcggaagatgcaacactgatacgaaattgccctatgatgaccagattctccttgagaagacatggagatactatggtcgcgggaatctggagaagatcatagacagctcccttggcgacgacctggacgttgacgaagcctgcaggtttctgaagatcgggctcctctgcacccaagacggcacgaaacgccggccgggcatgtctgcggtggtggccatgctgagaggcgaggcggacgtggacacggagacgatcagcaagcccgacgtgatcagggatttcggagacctgaagctgcggagcagggccacgtcgtccacgctgctgacctcgatcatggcgcggtcgtccccgctgtcgtctgaggagacgacgcgcacctccatcaccttcaccgagatatcggagcgcgactgactgacgatcgccgttaattcgccgacaagaagtgggctgtgagcctgtgaccgtgtagctggaggagcggaaagtgtacgtagcataggccggggagaattctttttgctggttttatgtgatctgtgtgcgtatttctatattacaatcgcggtaggaaacggcgcttcaaagactatccacgtcagcttctaatttatcatccgttggatactacatcaacggcaaagcgcagcagccaaaaaaccaagtgctgaccatcagtctggagacttccacaagctccacgaaacaaaccttcggacccttcatcctcgccttttcacgcgctcagatccccgatgacgcgttacaatgcatccttgtgctcctcgcgtccctcgccgctgccgtcgccgcagcatcctcgcacactcactcgctctcgcgctctgcctcggcctgccaccaccaccaccatctcgcctgctactcgccaatggcccctgcctcgtcgccggttgcaggctcctccactcgctccgtcgcctccgccacatccggctagccgtcgccggggacacaaccaagcttggcctgggcgcgacaaccaggtccaaccgagccagcggccggggagatctgaaggggtgagggggtggggggacgcgagcgtgcactctcggctcccgccccgcgggggaagcggagacgggcggcgaaggcggaaggccacgaggtgttgggatttgggaggggtcaggtcaggagtggccgtcccgctcgtgaactcctgc

SEQ ID NO: 6241 - DNA, 2287 bp, Zea Mays
tgaatgattgcttgccatgtgtgggacaaccagatcctgtgctgcgcccagctcaacaatcccaaattccattactgcccacctgcatcgtcctctctgtaggctgcggtgtttgcatcgtccaaaactccaaatacatacatacaacatgctagcctagtcctcttctagtcgcctctacccagttacttgcatcgccccgtcaagcacgccgccggcacgcggccctcggtctccccgccgcgccctctgcctccgcccgaacaaagccgtctcgccgtcgcgttgccttccttaccgtccaccgcgggcagccgtcctagtactcggttggtcctcccctgctgcccttctacggtggaggagcggagatcctgccgttttccggctgatttcttctaattgttcctatggcaaagcctctcaatggcagtggccgtagcatgccaagatcgaatgagggaatgcggctcatattttcggcagttgtaggtgtcatgctgggttacctgtttgggatctccttccctacagtcaacataaccaagcttcacttcccttcgagtatcatctcttatatcgaagataggaactctggcatcacaacccagacattgttgaaccatgcttgggcatctgcaaacaatcataaaaagaatagttctgaatctaacactgatgaaattcccgagatttatgttcctacaaacccaaaaggtgctgagagacttccaccaggcattgtagtgtctgaaacagatctttatccccgaagactatggggtgatcctagtgaggaccttactagcgagccgaggtatcttgttacttttactgttggtattgggcaaaaggcaaatattgatgcagcggtcagaaagttttcagacaaattcaccattatgttgttccattatgatggtcggactacagagtgggatgaatttgagtggtctaaaagagcaatccatgtgagtgccaggaagcagacaaaatggtggtatgcaaaacgatttttgcatcccgatgttgttgccagatatgattacattttcatctgggatgaggatctaggtgtagagcatttcaacgcagagaagtacattgagcttgttagaaagcatgggttggaaatctctcagcctggtttgcaacctgatagaggactaacatggcaaatgactaaacggcgtggtgaccaggaagttcacaaagtaactgaggagagaccaggctggtgcactgatccacatctaccaccatgtgcagcgtagggccaaatgtttgttgtgtatttagttttcattgtctaattatcattttaaaagaagggcaggcctggtcaagtggtgagagctctcacttagtcaccatgtcccaggttcgaagcagcctctccgcatttgcgccgagaaggcttgcctcgatttatcccttctgtagaccccactcatgtttgacctccaacactaggtcttccttttttttaattatcattctaaaagttcgattttgatgtgcagatttgttgagattatggcaacagtgttctccagaaatgcatggcgctgtgtatggcatatgattcagaatgacttggtccatggatggggtcttgactttgctcttagaaaatgtgtggagccggctcatgagaaaattggagttgttgatgctcaatggattgttcatcaatcagttccttcacttggcaaccagggcaagtcagataatggaagaccaccatgggaaggggtaagagcacgctgcagaaaagaatgggggatatttcagacaaggctggctgatgcggagaaggcttattacttggagcgaggcatcacacccccgaactcaacatcagtttagatgaacacatgctcctcagatgccacggcaaggtttctgttgggggaacctgctgcaaactggcatgttcatcgaagctgctgcagcccagggcaaatccatatatttgtacattagaggtcccacgaatcgccatgattaatctttagtgtcgctcacctggttttaatgtcatttcttttgttagtgatactagctgcgatgtaagtaggaggatacagcagagaccgtgatgatacccatttgtgtattaatgacctgatgcaatatggatgttgataatcctttcctcagtttcagcatgtaaattgtttgttctagaccagctgtatgcaactgggtcaaatactacattgatgtaaggcccaaaatttgtataagaaaaaaataataaaataaatatatgaagaaataaaat

SEQ ID NO: 6242 - DNA, 1732 bp, Zea Mays
gattcctccactccggccttgcccgacgatctccagctgtccttcaatcaaattatcaacccaacgccatttcggcgctcccgcttcccacaggagtcacagctcaacaaatccctacccaaatccacctccccgccccccaccgccatggctcccccaccaacctcgcgctgcctcgccctcgctctcatcctcatcgccgtcctccccgacggccgccgcttcgtgccggactctggctgcgcatccacccgcctccggtcatcctccccgtccctctcctccgcggcgccgcccggctccccgccgccgccgtcctcgctcctcgcctccgctcgggtcttctcctgccgcgcgtcctacgacctcgatgtccgccgccgcgggcaccacatcctccgcctccatttctaccccttcgtccccgccctcgccgcggcccgcttccacgtcggcgccggggggctcctcctcctccacaacttcacgagctgtcgtctcaggtgtttgagactctctacaggatcaacgtcgcggggcgcaaggtcacgccattcaacgacacactgtggcggacatgggttaacgatgagaaattcctcatcgacaccgactcctccaactacatggtgtggtcgtccagtggccggattgcttatcccaagggtagcaagcagatgacaagagaagtggctcctgacaatgtctacaactctgcaagatccgtgaggccaggggtgaatgtgacttggggtttccctgtgcctgctagcagccggtaccttgtgcgtatgcacttctgtgacattgctagcaaggctctgtatgagctctacttcaatatctacgtcaatggtgatcttgcagtcaaggatttcgatctctccagtgcaactggattcttggcctatccttattacattgactttatcgtcgatgtgaaggatgaggggatactgaaattggcgattggtggcttaaagaagagtcgatctgatgaagtaagtggtatccttaatgcactggagataatgaggatgaacaagaccagtggaggtatggatggagacttcccaattgatctacacatggaatatgtggtgagtaaggggattggagaatttgcccgctccctgctctgtggtttcatctttgttgggttgtttgtggctttggtcacgctgatggtgaggttgaggaccgagttgaggaataacggcacagcttggtcctggagacagatgaactccgatgaagggaaactggccagaacatatcagcttgtgcccagtaagacggactattgaatattgcaggctgggcatctttgaggagtgacaacctgcggctgttgtgtgcatctaatcacatcatactttttattaagttgtaagtactgtagttttatcacctctctaaaagtattgtagttttgtatcatcactcctttcatgcttggactttgcattctccatgctttgtcaatggtcaatggaggacatgctcatgatgctgtaaaagtactctaccctagatgtggctgtattgctattgcctcatttattcagtttgacttctgaaacatggattcacagctgaattgcatttgaatataattagttgtagtggagacatttgattataaaaaaataagtcaaatagctgcagaagccatcatgccattgtatttgtaacatgatttggctgttgctgacttactgttttcttctcc

SEQ ID NO: 6243 - DNA, 2494 bp, Zea Mays
gaactaatctaagtgcctcctagaaaaagcttaaccaaagcaaacccctcgcccccacgcaaaccccgataccttcgccttttccgcccgcgccgtccgtctccgtcgatggcgatggagattccggcgcaggtgcgccgctactggctgccgatactcctattcaccgccggattcctgttccaggtcctcgtcctgccccgccacttcccgcccactcactacgacggctatctgaaacgagtcaccaaccaactgttgatattataaagatccgttatgcatatgagctgttgacaaatccagttttaaagagggactatgatctttttggactggatgagcataaggatgtccttgagagagtcaaagaacaatatcaaatggtgcactttctcaaaattgatcttccattgttaaaagactctgtagtcagtttgatcgatgatgccttcaatgtactcacacatgagtcgttcatgtctgctattagtgaagaatacccgttaatcatacttgtatattcaaaggggagtcctcggtgtgctcaatttattgagtactggaagcaaattggcactcaattggatggaattgtcagaactgctatggtagaagttggtgattcacaagtggctggttatttcgccgaaaaacggttctcgaaacggccatttttccgtaatggtgtaccaacacttgttgcataccctgctaactgcaaaagtccatcctgttacatgaggtacccaggtgggctttttgtggattctgttgttgattgggttgcaacatcagttgtaggattgcctcggatcttgtactattcaaaggagacattgggcccccaattcattgggaagagtggcaatcataaggtcaaaactatctttttctcaagtactggagagcgtgctgctccattcgttcgccaagctgcccaagagtattcaagttattcatcatttggatttgtcctatggagagaagacgaatcccagatttggtggaattcgttaggggtggaatcggctccagcacttgttttcttgaaggggccaggcacaacgccttttgtacaccatggaatttttagcaagtcagagttcatagagatgatggaggagcacaagcaccatgaactgcgacagctaagaagtgacacatctttggaactgggttgtgatgctagaggtcattcacgtgctggcaatgatgcagcaatttggtattgtgtaattgttgctggtcgtccaggtgcagaattaagcaagaagagacaaattttgcggaaggctcaagacaaattgttaggtgatgttgacagaagtgctgggaacgttgacaattcagtagagacatcaagtgctgcaactgccttcaaagatgataggttaacctttgtttggttagatggagaagtacaaaagcaaatttgtgccttctaccttgccactgattatactggagcctgtggccctcgagactttggagatgacaatgataaacctgaaatttttattgttcgattccaaagaaatgcaacatatgaggcactgaaagctgaaaaaaagaacaatcttgtggatgttctccagggacagcatgctgatgcgtcccagttagtggcaaggtacaagggcccagttgaaattgaagagataaataggtggatctctcagattatcaaagatggagatactagagaaattccttactttacttcaaaggtgccagatcttgtaccagaggaaacaagcaaagcatggaattctaaaagtatccgctcagcagggaaaagtctaaaagagaacatcggtttccatttccaagattacctaacccacccaatgattggttcaactttgcttatgtgcggatgtatttctatgggaatattatggttcaggaacaacacacccactcaaagtactcgacaggagaaagctcggaaagacaaggcaaagaggccccgtccgaagcttagcacgtcgctcttcggtgaaccttctgtcccagacgtcgacccaaaagatgctcgtcagtgggaaatgtcaagctcggattcagactaatgactcgcttcttacatttggacctgacgtactgcaaagacgttttaaaattaagtaaactacatagtagtgcggtggccttagttttgggaaatggaacagagtataaccgatgtagtgaaaacagttggaccactgaagtaatccagttgccatctttccgatgcttcagctgccctgtgacgtgactccagggacgtatttgttgacacctgcttgaaaactgacaagcctctctattagacagagtgttaacctgtggtctcagaatggagtaaacaatggtagacagagtgttaacgtacatcatgtctgatgtaagccggcaggtattttcgtcgtgagccaaaactcggctaacgtcgtgacacggactattatttttatttttcttaaataataatcccttttcagacata

SEQ ID NO: 6244 - DNA, 1469 bp, Zea Mays
tacattgctggagcctggagcgtggtctttctcagccgggttctcgaggcaccgaacgccaacaacgaaaaactccgcagcagtccacccagtccaccagacatccgacagggaattgggagtcttcttgcgggccagaaacgcgaatcacgatggttccaggaatcgccaccaagacggcggcgcgaccggtggcctgggcacctcagcctcggaacatgttcgtgttcggcgcaggtttcgtcggccgctacgtctcggagcgcctcctcgcgcagggctggcaggtctccgggacgtgcaccactgtcaccacgaagagggagctagagatgctgggcatgaatgcttccgttttcgatggcacagaggacagcctggaaaatattcacagtttacgacaagcaactcacttgctcatctccatcccacccatccctggagttggtgatcctctacttattaatttagatgaagatctgaggagaatactcggccatggtaatcttgaatggctatgctacctttcgtcaacaagtgtgtatggtgattgtggtggtgtattggttgatgaggatcatacagtaaacccaaagagcgagtctgccaaattaagatataacgcagaaaaaggatggctgaatcttattgatgatccaaaactgtcagcttttgtattccgtttaggtggaatatatgggcctggaagaagtgctttggacaccttagcgaagagcaaatctttgtcacggaaacagaagttgcgagaatctaagcaatatactgcacgaatccacgtggctgacatctaccaggctgtcttggctagcatgagcatcagatgtgcaaggaaaatatttaatgtggtggatgacgaccctgccccaagagctgaagtttttgcgtttgctacgagtttgatacagaggagatatcctgatatgataactgaaaccattgatgccaagcctgcaggcttagattatcaagagatgatcgtacctgcagagaaacgggtttctaatgctcggatgaagcaggaacttggtgttaatctgcttcatccaacttatagatctggtctgcagagtatccttgatgcttggcaaattcagcctccacttcccaatacaagtcaatgatgatttagttttgaaaggcatataggtgtatgtaagtgtatttgtgcttgatttggttcagatatactacctccgttctaatatttgtataaaaaagaacggagcgaataataatttagtgacattgtagcctttttggctgagttggactggtgctcgtgttatttttagcattgtttacgaatcatatagtacaatctagtcgccatggatctgactagacgattaatcgtgatgagattgattagtggagcctatttggaatcatatagttgaccgacatatttcaagacatatacgtattatatagtagtaatagatatttat

SEQ ID NO: 6245 - DNA, 1971 bp, Zea Mays
tagatgtcgccactacttaatactggtcagtgggtttggtttagacttcacaacgataagaccaacaacattttgtacttgcccactaggaagctgtcaaactcatctctcaagggattcatcgcacctgaacttgggcggcttagtttcttgcaagagctgtatttggaccataacctgctctttggtacaattccaaaactaattggctcactgaagaacctgagggttctggacttgagcgtcaatcgactcactggaccgatcccttccgaattaggtggcttgagcagtgtgagcatagtatccacagctcacaatggactatgcccttcttcccgattatatgttgcggatttttcttacaactttcttgtcggaaaaattccatcctgcttgaaatatcttccaaggtcaagtttccaagggaactgcttccaggatgagtactctgtccaacaacgacctttgcaaatttgtacaagtggttctactggccagcaaggtgtcatatacggatccaaacatcctggccataaacatgaaaaaatggagcaaccaatttggcttcttgctttagaaatcgcaactggtgttcttctggttgtttttgtgattactggtatagttactgcttccagaagttgcaagctgaagccttctataagaatatcatcatggaatcgatcgaaaagttggagcgacgagataacagtgttgattgattctgatatgctgaaaagtctaccaaaattaagtcgccaggagcttgaagtggcctgtgaggattttagcaacatcattggctcaactccagagacggtagtctacaaaggaaccatgaaggatggacctgaagtttctgtgatatcgttgtgcgccttcgaaggtcattggactagccaccatgaactcttttaccaaaacaaggtcattgatctggcaagattgaatcatgagaacatagcaaagttcttagggtactgcagggagagtgatccattctctcggatgctagtcttcgagtacgcaccaaatgggacgttatttgagcatctacattatggagagggaggccaattttcttggctcaggcgaatgaagatagccattggaattgcccaggggttaagatacctgcacacggagctgcagcccccatttgctatatctgagctgaattcgaactccgtgtatgttacggaagattttactccaaagctggtggattttgaatgctggaaaatgatgttctcgagacactccatctcgagagacgagaaggctcgtgggcacttgaacagcaaatcctcttttcccggccacggggattctgcagcggatagacaagccgatgatatccaggccaacaccttcgctttcggagtgattttactggagatcatcagcgggcggcttccatactgcaaggataaaggctatttggtcgactgggcgagcaagtacctccagcaggcagaggagatcgggaagctggtggacccggagctgggcagcgtgcggagcgaggacctggcggtgctgtgcagcgtggtgagccggtgcatcgacccggacccgtcgaagcggccgtcgatgcagatcatcacgggcgtgctggagaacgggatcgacctgtcggcggccgccatcctcaaggagtcgtcgctggcgtgggccgagctcgccctcgccttgtgacacgctctactcccaccacctttgtgaatccatacggctgctgattgatttccttgactggcgtagggtttgctgccggtctcaactgagcagccgtttcgtatgaatgaatgaaacctgaaaggccatatgtatgttcttttcatccatccgttcgttctacacatccatcccgcacagatcatttgttttttttttttttgctccaatctattttaggttcagaaaacagtgtcggcaaaagaattatccggtaaaacgacagacgcc

SEQ ID NO: 6246 - DNA, 2052 bp, Zea Mays
cattttgtacttgcccactaggaagctgtcaaactcatctctcaagggattcatcgcacctgaacttgggcggcttagtttcttgcaagagctgtatttggaccataacctgctctttggtacaattccaaaactaattggctcactgaagaacctgagggttctggacttgagcgtcaatcgactcactggaccgatcccttccgaattaggtggcttgagcagtgtgagcatagtaaatttccattccaatgggttgactgggaatataccgtcggagctgggaaaattacagaatctcgtcgaacttaggttggataggaatagattgaagggatcaattccaggaagcaatactgccagtttttctcctgcttcaaatattggatccacagctcacaatggactatgcccttcttcccgattatatgttgcggatttttcttacaactttcttgtcggaaaaattccatcctgcttgaaatatcttccaaggtcaagtttccaagggaactgcttccaggatgagtactctgtccaacaacgacctttgcaaatttgtacaagtggttctactggccagcaaggtgtcatatacggatccaaacatcctggccataaacatgaaaaaatggagcaaccaatttggcttcttgctttagaaatcgcaactggtgttcttctggttgtttttgtgattactggtatagttactgcttccagaagttgcaagctgaagccttctataagaatatcatcatggaatcgatcgaaaagttggagcgacgagataacagtgttgattgattctgatatgctgaaaagtctaccaaaattaagtcgccaggagcttgaagtggcctgtgaggattttagcaacatcattggctcaactccagagacggtagtctacaaaggaaccatgaaggatggacctgaagtttctgtgatatcgttgtgcgccttcgaaggtcattggactagccaccatgaactcttttaccaaaacaaggtcattgatctggcaagattgaatcatgagaacatagcaaagttcttagggtactgcagggagagtgatccattctctcggatgctagtcttcgagtacgcaccaaatgggacgttatttgagcatctacatatggagagggaggccaattttcttggctcaggcgaatgaagatagccattggaattgcccaggggttaagatacctgcacacggagctgcagcccccatttgctatatctgagctgaattcgaactccgtgtatgttacggaagattttactccaaagctggtggattttgaatgctggaaaatgatgttctcgagacactccatctcgagagacgagaaggctcgtgggcacttgaacagcaaatcctcttttcccggccacggggattctgcagcggatagacaagccgatgatatccaggccaacaccttcgctttcggagtgattttactggagatcatcagcgggcggcttccatactgcaaggataaaggctatttggtcgactgggcgagcaagtacctccagcaggcagaggagatcgggaagctggtggacccggagctgggcagcgtgcggagcgaggacctggcggtgctgtgcagcgtggtgagccggtgcatcgacccggacccgtcgaagcggccgtcgatgcagatcatcacgggcgtgctggagaacgggatcgacctgtcggcggccgccatcctcaaggagtcgtcgctggcgtgggccgagctcgccctcgccttgtgacacgctctactcccaccacctttgtgaatccatacggctgctgattgatttccttgactggcgtagggtttgctgccggtctcaactgagcagccgtttcgtatgaatgaatgaaacctgaaaggccatatgtatgttcttttcatccatccgttcgttctacacatccatcccgcacagatcatttgttttttttttttttgctccaatctattttaggttcagaaaacagtgtcggcaaaagaattatccggtaaaacgacagacgcc

SEQ ID NO: 6247 - DNA, 971 bp, Zea Mays
cgatccgtcaaccgacgggaggagtacgccgtttgcgccatcgttacgtccaccagaaggaaaacccaagccaacgacgacggcacggccaagaaacggggagtgccttccaaggcgaccgccccctctcgcgctccatacgtccatccgtcggcccagagccacaagataacgcagccaagaacaagagacaccgccgagcgagcgaggcggggagaagcaggtccaggaccaggagaaaggaaaaggaagcccagctctctctagcctggagccgagaagccgagggggcgaaggagcagcaaggcatggaggagcccgttccggctgatccccccaggattttctggaagtcaaggagttcaggttcaggaccgtgagatcaatgggctgaacgagcagctagaggaagactcccgcgtgctggagcttctgcagaagcagctggctgacgagcgcaggaagcggacagagatcgagaaggagaactccatgctccatgagcaggtcaccatgctgatgaacatgctcgacgagaacgagggtttcgacgaggacggagaggccccgccgcccgattccttcgattaagcgttgttacagtactatatccgttttctttttcccgtcagtgtgaaatcatacgtctctaggtgctggtttcagagtatccgagagatatgggctagctgtgtagtaggatttcattggtggtcgtattccattacatggctttggcttctgtagataaagggtgcattgcatgtctgttgtactgtactgtacctactccttttctaggcttcaaaagtgtatgtgagaaactagcaacatgttatgtttgaatcgaagtgtatgtacatgttacttaaaattcttccttgctatgccaaaattgcaggaaatgtaaacaagatgtgatttcccaatgttgcatgcgtgtggtgtttctcgatcggcgcggatgaggc

SEQ ID NO: 6248 - DNA, 3923 bp, Zea Mays
ttccactcctcgctctttctccctcgcagcggtccagcctcagcccactctccgttgctccctgcctccctcggtccctcccggctcccactctcgcccctcctcccctctccctgcctgcattcttcaatgaagttttccggcgagtcggcaccggcggcagcgacgtagacgggtgcatcctggctcggcaggaaggaagagagagaaccatttgaagcttcgaggtcgtcacgcacagatttaagtgagcccaaacccgcggagtctcatccgttcatcccaccggttcgttcgtcttcctgcatcagccctgagcgtttaattgcgccgccgcctccttgtccttcgcccaagtctcgccgagcaatgcggcctctcgcgctgctcgttctcgcccacctcgccgccctcgcggcggcggcggaggccaagggcggcgtggcgggggcggggctgggcgacgacgtgctggggctgatcgtgttcaaggccgacgtgtcggaccccgacggccgcctcgcgacgtggagcgaggacgacgagcggccctgcgcctgggacggcgtcacctgcgacgcgcgcaccggccgcgtctccgcgctctccctcgccggcttcggcctctccggcaagctcggccggggcctcctccgcctcgaggcgctccagtcgctctccctcgcccgcaacaacctctccggcgacgtccccgccgacctcgcccgcctcccggcgctccagacgctggacctcagcgccaacgcattcgccggcgccgtcccggaggggctcttcggccggtgccgctccctccgcgacgtctcgctcgccaacaacgccttctccggcggcatcccgcgggacgtcgccgcgtgcgccacgctcgcgtcgctcaacctctcctccaaccgcctggacggcgcgctgcccagcgacatttggtccctcaacgcgctgcgcacgctggacatctcgggcaatgccgtcaccggcgacctcccgatcggtgtcagcaggatgtttaaccttcgggagcttaatctgcgaggcaaccgtctcactggtagcctcccggacgacattggggactgcccgctgctcaggtcagtggatcttgggtccaactcgctgtccggcaacttacctgagtccctgaggaggctctccacctgcacataccttgatttgagctcaaatgagttcactgggagtgtcccgacatggtttggagaaatgacaagcctggaaatgctggatttgtcggggaacaggttgtctggcgagatccctgggtctattggtgagttgatgtcactgagggagctgaggttgtcagggaatgggttcaccggagccttacctgaatcaattggtggatgcaagagcctgatgcatgttgatgtcagctggaattctcttacgggtgcactgcctacctgggttctcagttccagtgtgcaatgggtgtcggtgtcgcagaacacattgagcggggacctaaaagtgcctgcaaatgcttcttcagtgcttcaaggagtggacttgtcaaacaatgccttctctggagttataccatcggaaatctcgaagctgcagaacttgcagtcattgaacatgtcatggaactcaatgtatggaagtattccggccagcattttggagatgaagtcactggaggttcttgattttactgccaaccggctaaatgggtgcattccagcttcaaaaggaggggagtcattgaaggagttgaggctggggaagaacttcctgactggcaacatcccagctcagattggcaattgctctgccctcgcatcactggatctttctcataacagtttaacaggagtgattccggaagcactatctaaccttaccaatctcgagattgtggatctttctcagaacaagcttactggtgttctaccaaagcagctttctaatctcccccacctcttgcaattcaatgtttcacataaccagctctctggggatctccctcccggtagcttctttgacaccatccccctatcttgtgtgtcggataatcctggcctttgtggcgcgaagctcaattcatcttgtcctggtgtgctaccaaaaccaatcgtgctgaacccaaacacttcttccgatccaatatcaccaaccgagcttgtgcctgatggtggtcgccatcataagaaaaccatactcagcatctcggcccttgttgcaattggtgctgctgttctaattgctgttggtgtcattaccatcactgttcttaaccttcgagtgcgtgcccctggatctcattctggtgctgtcctggaactctcagatggatatctcagccagtcgccaacaaccgacatgaacgcagggaagcttgtcatgtttggaggaggaaatccggagttcagtgccagcacccatgctcttctgaacaaggattgcgagcttgggcgtggtggttttggcactgtctacaagaccactcttcgagatggacaacctgttgccatcaagaagctcactgtgtcaagcttggttaaatctcaagttgaatttgagagagaagtgaagatgctgggtaagctacgccatcgcaacctagttgcgctaaagggatattactggacgccgtcgcttcagcttctcatttatgagtttgtctccgggggcaacctgcacaaacaattgcatgagtcatccaccacaaactgcctgccatggaaggagaggtttgacatagtcctcggtatagcgagaagccttgctcatctccacaggcatgatattatccactacaatctgaaatcaagcaacatcctgctcgacggatcaggcgaggcaaaggtaggagattatgggctagcgaagctgcttccaatgctggaccgctacgtcttaagtagcaaggtgcagagcgcgcttggatacatggctccagagtttgcgtgcaggaccgtgaagatcacggagaaatgcgatgtgtacgggttcggcgtccttatcctcgagatcctgacagggaggacgcccgtggagtacatggaggacgacgtggtcgtgctctgcgatgtggtgagggcggctctggacgaaggcaaggtggaagagtgcgtcgacgagaggctctgcggcaagtttccgctggaggaggccgttccgatcatgaagctgggtctggtctgcacttcccaggttccgtctaacaggccagacatgggtgaggtggtgaacatactggagctgatcagatgcccccaggacagcccggagactgaactgggttaacctcctctactacctacactggatcccggactgtttgttggtttcacttttgagatccttctttgcttggtaactgaccggacgatgaaaggtgaagcaagcgagttctactctatccagtgtgccgtcgccgaagtgtctagctagtcttctgatggttagggagttattatggaacgcctacagtagtttggtcgcctcccggggtgttgatgtgtttgacttagatcctcaccagtaaggccaagatgtatggtgtggatcctctcacatcaatcctggtggcctgtaatttcaatttattttttttagctatgcaatgtggtgcaacttgccctttttctagaccatgttatgaaagcttgccacattttggatccttgctgtctaaccacccatttaattaacttggaaatgtgtaccactaaaccgagtactgctgggcggtactcaccatggcaagtgccagtaccagccagtcaagagagtgttgtgtttatatttgtctatctacatgacttgctctgaatactgaatccaccccttggccactgaatctcttcccagggattcccccaataggaaccttcttctcctcactcctcggccattttctttcgggttcagaaggtggg

SEQ ID NO: 6249 - DNA, 1592 bp, Zea Mays
atctgctgcacctgcacctggactaccgcagacagccagacacccaggcgctttatttctttgcgtctacagccacagacaggagacggcatccaagcattatttccaggcagagtgtcccggccgctctgtgcctgtgttcaaggcgtggtcgcgtggaggaagaggatgagaatggcggcgtaatacgatggccttccagtctccgtcgaaactcgagttgtcgaccaatttcttcccagcacattctgcttagcctgatgggagaggtggaggctggacaatcagaaggtggttcatacttcacgaacttgctgaatgaaggccaatatgatgcatgttttgaagaatatggaactataccatttgagtcacagcactcttgccgcctgaaaaggagagaaatccctcatcaaagccatcacaaaagcaaaaagggaaaaattttagcgtggatgaagataggcttattgtgtcagcatggttaaatgtcagtatggatccaacacaaggaacaaatcaaacaaaagatacattttggagaagaatccacaagtactatgagagcaatagaggaactttaccagaacgtagtcagaattcgttgttgcatcgttggagttctattaatgatgctgttagtaagttttgtgcttgtgtaacccaaatacacaatagaaaccagagtgggatgactattcatgacagggtggaggaggctgaaaagcttttccagtctctagacccccaaaaaaagtcttttcagtttaggcattgttggctccagctcagaaatcagccaaaatggcatgacaagctgcagcaaatggcagctgtaaaaacaagcaacaaaaaacagaaggtagccaaagatttgagtccgggattagttgatcttactactcaagttgggaatgaagtttctcctgtacagattgtccctccaaatatagctgcaccagaaagaccaatgggtaagaagaggtcaaaagaagcaatgtgtaaagggggttttgatgcatgttctgatgcattggacattttgtgggaaaagaagagacaggctgatgtagagaaggagttaaagagagaggagaggtatgcacaagcatatgctctagataaagagaggcttgagctggaacacaagaggcttacaattgaagaacagaagcatacaaatgaacaaaaaaggcttgatcaagagaaagagcgcctagccaatgaagcaaacaacctttacattaagcggattgaagaagaacagaaaattatgagtatagaccttactactatgagtgaattgcaaagacaatactatatgtgtttgcaggctgatatcgttgcacgtcgcatgaattagttgtttttttcaaattttggtcagatcacagatgcgactttagattattttgtttcattagttgtttttttcttcaaattttggtcagatcatagatgctactttagattattttgtttcactgagtacacatagagatgaacaatctatggatttttagttgcatgtgctactcttatatactgttttccgtttagttttatgtgcatctgtggatttttgtactgaa

SEQ ID NO: 6250 - DNA, 4642 bp, Zea Mays
cgatcgccatctgctcagctgtgatttgtgagcgcaaagcccgacatctataaatatcccgcatccatccatccagccagccattgcaaccaccggccgggctgggagcactcagcactgcgacgaggagagaggagacggagacggatgcttattcctgtgcctgccttggtgagtagtggccttcgccttggcctccgcgagcgcatttttatatgcttgctcgcccgcgatggataccaaaaccaccgcagcggcgccgctgcggtctcccacctttaatcactatacaagcttgcttttttctctttccccggtggtgcgggtgctggactgctggcctctgcgtccgcgtccggcggcaagtgagtgaggcgctgctggtatgcatgagctaggaggtaaggaacaaccatacgagggcgagcagagcagagagcacacggcgcgccgagctagcagcattgcccaatctcgcggcggggagagattcgtgagcgcggaggcgcgaatcttcgacgcagcgacggcagccatgccggagtcctggagacccgccgaggcgaatgcctcgtcgcagccggcggcaggcacgtccggcccctcggctcagagccctggcaatgacgccaagggacgcgcggcgggggaaacccccggcgcggcggaggcggcggcgacgcgagtgccgttccacaagctgttcgcgttcgccgactccaccgacgtggcgctcatgctcctgggcgcgctcggggccgtggccaacggcgccgcgatgcccttcatgaccgtgctcttcggcaacctcatcgacgccttcggcggcgcgctcagcatccacgacgtcgtcaaccgggtgtccatggtctctctcgatttcgtctacctcgccatcgcctccgccgtcgcttccttcgtccaggtgacctgctggatgatcaccggcgagcgccaggcggcgcggatacggaacctgtacctcaagacgatcctgaggcaagagatcgccttcttcgacaagtacaccagcaccggcgaggtggtgggcaggatgtcgggcgacaccgtgctgatccaggacgccatgggcgagaaggtcggcaagttcatccagctggtggtgaccttcttcggcggcttcatcgtcgccttcgcgcagggctggctgctgaccctggtcatgatggcgaccatcccgccgctcgtcgtggccggcgcggtcatgtccaacgtcgtcaccaagatggcgtccctgggccaggcggcgtacgcggagtcgtcggtggtggtggagcagaccatcggttccatcaggacggttgcgtctttcaccggcgagaaacgggcggtggagaagtacaacaagtccctgaagagcgcgtacaagtccagcgtccgggaggggctcgccactgggcttggcatgggcacggtcatgctgctcctcttctgcggctactcgctggggatttggtctggcgctaagctgatcctggagaaggggtacaccggagccaaggtcatgaacgtgatctttgcggtcctcactggctctctggctctaggtcaagcgtctccaagcatgaaagcgtttgccggcgggcaggccgctgcatacaagatgttcgagacgatcaacagagcgccggaaatcgacgcgtacagcaccacaggaaggaagctggaggacatccggggggaaatcgagttcagggacgtccatttctcctatccgacgaggcctgacgagccgatattcaggggtttctccctcgccatacccagcggcacgacgatcgcgctggtaggccagagcgggagcggtaaatccactgtcatcagcctgatcgagcggttctacgaccctcagctcggcgacgttctgatagatggcgtcaatctcaaggagttccagctgaggtggatcagaagcaaaatcggccttgtcagccaggaaccagtccttttcgctgccagcataaaggagaacatagcctacggcaaagccagcgcgacagatcaggaagtcagagctgccgctgagcttgccaatgctgccaagttcatagataaaatgcctcagggtttcgatacctcggttggcgagcatgggacacagctctctggtggacagaagcagaggatcgccatcgcaagggctattctgaaagatccaagaattctactgttagatgaagctacaagtgcgctggacgccgagtctgaaaggatcgtgcaggaagctcttgacagggtcatgtcgaataggacgactgtcatagtcgcacaccgtctgagcaccgttagaaacgctgacaccattgccgtcattcatcaaggaacactagttgaaaagggcccacacaatgagcttctaagagatccagaaggagcttacagccaactgataaagctacaggaagcaaaccagcagaacaaccggaagggtgatggcaatgctcgtctaggcaaacagatgtcgatgaacaagtcagctagcaggaggttgtcccgtgataacagtagccaccattcgttctcggtgccgttcggtatgcctcttgggattgaaattcaggatggttcatccaacaaactgtgcgacgagatgccacaggaagtgcctctcagccggctcgcgtctcttaacaagccagagatcccggtcctcgtactaggttccattgcctcggtcatcagcggagttatcttcccgatcttcgcgatactcctgtcaaatgtgataaaggcgttctatgagcccccacatctcctaaggagggactcacagttctgggcttccatgttcctggtgtttggtgcggtgtacttcctgtcgctccccgtcagttcctaccttttctccatagcggggtgcaggctgatcagaaggatccggctgatgacgtttgagaaggtggtgaatatggaggtcgaatggtttgatcacccagaaaactcgagcggagcgatcggtgcaaggctgtcagctgatgcggccaaagttagaggacttgtgggagacgcgctccaattggttgtgcagaactcttcgacactagttgctggtttggtaattgcattcgtatcaaactgggagctatctctaatcatcttagctttgataccactcattggcctaaatggatggatccagatgaagtttattcagggcttcagcgcagactcaaagatgatgtatgaggaggcaagccaggtggctaatgatgcagtaagcagcataagaacagtggcctcattctcagctgaagagaaggtcatggatttgtacaagaagaaatgtgaaggtcccctaagaacaggaatcaggacagggattataagtggcatcggttttggagtttcctttttcttgctgtttggggtctatgcagctagcttctatgccggtgctcggcttgtcgaggacaggaagacaacctttcctaaagttttcagggtttttcttgctcttgcaatggcggcaattggagtgtcgcaatcaagtacccttacatcggattcttccaaagcaaaatcagcggcgtcctctatatttgcaatcgtagaccgaaaatcaaggatagacccaagtgaggatgcaggggtgactgctgagacactacgaggaaatatcgaattccagcacgttagcttcaggtatcctaccaggccagatgtccagatcttccgggacctttgcctgacaattcatgctggaaagactgttgcgcttgttggggagagtgggagtggcaaatcaacggcaatttcattgctccagaggttctatgacccagatgtaggccacatactactagatggcgtggacatacgcaagttccagcttcggtggttaaggcagcaaatgggcctggtcagtcaagaaccggccttgtttaacgacacgataagggcaaacattgcctatggaaaagatggacaggcaacagaatctgagatcgtatctgccgcacaactggcaaacgctcacaagttcatcagctcggcgctccagggatatgacacaatggttggagagcgtggagctcagctgtcaggagggcagaagcagcgcgtggccatcgcccgtgcgatcgtgaaggaccctcggatcctgcttctggacgaagcgaccagcgcactggatgccgagtccgagcggatcgtccaggacgcgctggacagggtgatggtgaaccggacaacagtggtcgtcgcccaccgtctgtcgacgatacagaatgcggatctgatcgccgtcgtcaggaacggggttatcatcgagaagggaaagcacgacgccttggtcaacgtcaaggatggcgcgtacgcgtccctcgtcgcccttcactcggcagcctcttcatagctgcaggtggtaggtagcatgggatcctgcaaacgtctgctgaaacatatatatatatatggacagaggcacagagctgccacaacctgtgtagcaagtcaggtgctagtatctgttcctctatttgatgacacacataattgcttattatacctaagcggggaaatggtacaaatagcaagggccaaatgtaaatgcaaggagctggtccttaagatagttaatatatatatatatatatatataatttatattattatttttgaa

SEQ ID NO: 6251 - DNA, 594 bp, Zea Mays
tgctgcgcacccgccctgattcccaatctgccccctcctctcttcgacccatccacacacccccacgttcgcaggaaggtttggaggccaaccaggacaagaccaagtgccagcagcagttcgacgattacaaggaatgcaagaagaaagagagggaggctcggctggaacggaataaaaccagatcactctttgggtgaacaatggcgtcccacctgagcaatatgctggcggtgcaataagtctcctgctgatgtgagcgaaatcacggcttttttctttggtttcatgatgatcctctgcaacttgtgcaaggtagggaatagaaataccgatctcgagattgagggagatgtaagggcgtctgggaacagctcattaacacaatggctacggtgaatgaatcgaatgagcgaggatgtattttgagaacaaccaggcgtcatgaaacgacagtttgttcaataaatttgtattccacccctgtaacgattgtacttcaaaatatttccatgtgttcttagctgccttgcatccagctttttcgacctgccgtcctatgtggaagtggaagctcccctttcgaacttgttt

SEQ ID NO: 6252 - DNA, 1764 bp, Zea Mays
cggagagttcggatcgtttcgattgcagttgggtttgttccgggaagcgggtcgtctggggtttggttcccggagaattcgggtccttgtgggctgtgatacagttgcaatggcatctgtaactgatgagacagctaagattgagggtttgacatctgctgcagcctttgtggagggtggcattcaggacgcatgtgatgatgcatgcagcatttgccttgaggctttctgtgagagtgacccttctgcattgactggctgcaaacatgagttccatctccaatgcattcttgaatggtgccagagaagttcacagtgcccaatgtgttggcagcctattactatgaaggatcctaccagtcaggagctgcttgaggcagtagagcgtgagaggaatataagaactaatcaaactcggaacacaactatatttcatcatcctgctcttggggattttgagctgcagcatctgcctgttggtaatgatgctgagcttgaagagcgtatactgcagcatctagctgctgctgctgcaatgggaagggcacaccatcttggaagaagggaggggcacaggggacgatctggctctcatggtcgtccacatttcctagttttctctacacaaccaaattcaccttctgctggcacaatctcttcatcttctgctcatatggagggagaaaatgattcaaatcctgccacacctagagctagcgagtcatctccacgagctattcgcattggagaagtgggaaaccaaagtcctgggatgcttacctacgatgctgaacaggatgctgtcgtttcttccggaaatagcactcctgtatcgagtcctaggttttttaacaggagacactccactggacagtcaactccagacagggctgggccatcggatattcagtctttctcagactccctgaagtcccgcttaaatgccgtctctatgaagtacaaagaatctattacaaagagtactcgagggtggaaggagagattgttttcacgtaattcatccgtggcggatcttggttctgaagtgagaagagaagttaatgctggaattgcgtccgtatcacggatgatggagcgtctggaaactagaggaaatagcagaacaagtgatagcccggcagcatccacttctgaagttccctctgctacagaatcaagcaatgaaagggttacagagagcaactctgctgctgctgctgctggtggtggtactaccactacgggtaccagcgctagcaacgcctccgccccttgtgttgcgacatccggttcaaattaggacatgtttgtgagcctggcggcagagcagaagtgcagtaacatgatgccgtcatttttttctcaaccactgcataaacggctgcaaggggaaaaaaaccaaacggtgatttgatgtattggctcgataaaatggtggtgcgtgtggcctaggagaagtcggatttcatcttctgttttcgtctctttgtaaaaaaaatcgtctgagggcagatgtttaccggtataaataacggatatgtcatcttcatagtacgtggatcagttataaatatgattggaacagcaaagcttgctgctgttataaagttgtaccgtggcacgatttcctgttctgttctgtgtgggtgaattgatggattttgctgtacacaagatatgcatctttccaggtctcatgcctatgtatacatatacatattacacgaacctaccttgaatccatatctctgaaacttgtttgtg

SEQ ID NO: 6253 - DNA, 1887 bp, Zea Mays
aacgactcgactgtccccaatccagtatcgcgagaagcgctacgcggccggcgaggcgctccccccaatatggtgcgcgtcgtcgtctccaccctccccgccctccgtccgcttctccgccgtggctctctgctaaaccataaacccctgccccgctcacgccttcagccgtggccgttctgcacgctctcgtcctcgcccgccgccggcgcgcccagcgccgcggtgaagggggaggaggttgcgttggacaagcaccttacccggtgcgcggcggcaggcatagcaccgttgcgggtggcggtgctggtgagcggcggggtggatagcagcgtggcgcttcgcctcctccacgccgccggccatcgctgcaccgcgttctacctgaagatttggttccaggaagatttcaggaatttctggtccgagtgcccatgggacgaggatttgaagtatgcacaagctgtttgtgacaagattgatgtgccattggaggtggtccacctatccgatgaatactggaaccatgtgggtctttcttagaagccattgaaaatttaggatttgactacatagcttcaggacactatgcacacgtagtacatccttccgctgaaaataccgaagcgccatccgtactacaattatcaaaggacaagatcaaggatcaaacctatttcctctcacatctatctcaatctcagcttagaaggcttcttttcccactaggatgtattacaaaggatgaggttcgcagactggctactcaaatgggccttcctaaccaaggtaggaaagactcacaagggatatgctttcttggaaaggagaaaaggaaggaatcatactggaagctgagtccggagattacctagggatacaccgtgggttttggttttatacaattggtcagcggcaaggattacggcttcctggaggaccttggtacgttgtagagaaagatgttcaaaacaatgtggtttttgtatcaaggaattattattcattggataagcggaggcgcacatttcgtgttggatcactaaactggtttgataattgtggacctggaaacaatgagcaactcaaatgcaaggtgcgacatagccctgaatttcatgattgcactttggtaaaagagcgtagtgaagaaaatggggatgctttggtggtgcatctggctgaagatgaccagggcttggcagctggtcagtttgcagcgttctatagtgaaaatgtatgcctggggtcaggcataattttggattcatgggacaagatgagcttccctgtctgctcaagggcactcgaaatcgcaaagttggcggacaagtcgagcttagggaagccaataagaatcgtgaacctggaacatatcgtgaaacctgaacaacaggaggaaatcaaagttgcctgacagattggtgccgtaaccttctcctagctccgccagctgcccccttcaaatcaattcatcaatcaaccgtatcgcaggccctggaaatcgaaggatgaggggtcttctagaatctaccgatatatacccccagttggaaactccaggtccttcttggaaggatgatatagtggaatatggcatgacttggtgcgctcgtgttgcagaggaacgatgaagcttcgtgcgtggatagggttgatctgaattaactgttgacagtgattttacgatctcgcgggaaagcaacacaatagtttgggcacgtcctctcctgagtggaatgatctggattcagtagtagtcagtggcacttcattaaaactaatacagggaaatcgtgacgttgtatgatagtggtaagatattgtattgtgaattttgacgataatatcggtgcgtgattgtgccactggatttgttcatcagta

SEQ ID NO: 6254 - DNA, 977 bp, Zea Mays
tttcttccgatcccaaaagatcgtgatcaagctgggcgtacccaacgccaagaaccggtctaaggccatgcagctggcatccaaatttgtcggggtgagcaaggtggggatcaccggcgacggcaaggaccggctggaggtggaaggagaaggcgtggacaccgtcctcctggtcaactacctgcgcaagaaggtctgccgcagcgctgacatcgttaaggtggaagtgaaggacaagaaggacgagaagaaaccggaagagccgccgtattattgctggcccaattactactactgtccgccgccgccgccgccgctgcccatggtcgagcgagccgacgacagttgccacgtcatgtgataaagctacttactattcgagatatatgtttcggtagacgtattacgtatactatatcatatgagcataataatgaagtactcatatcatcacttagcttgctatatatatatgcatgcatgtatcgtctacgcacgtaaagccatcgttgcatgacatatcatgcagttcatatttgccaatgtaatcacacacgtatatatatactcccactgttaagaggtaaaatttccattttttttaatctggtcatcagtgcaatctgcatggtctaatgtcatcctgtccactctcgctcaccaccacccgctccacgggcgccgactccccggtcttcccgcacactcgaatcagagggcaacgaaggcgacgcaggagctcccgagaggccggcgaggaaatctccgaacacgtcgtcaaggacggccagtcggaatcagaatcaaacccaaattaaagccaagaccccagctcggtcggacctgcaggaaagttcctctggtaggtttgaatgacacgaactcctttctctctttgtttttatcatttttatatctgaaacttaaattaaaagatgtcactgtgagcacctgaactcgccggacatgaaactgta

SEQ ID NO: 6255 - DNA, 3793 bp, Zea Mays
ctaatcagcgtgttttgttttgtttcgtctcgtcgaccgagccgtccgtcgtcctccctggcggtctggccgcctccgccttcctccccgtgcgtctcacccttttcctctacagcttcctctgcccaatcagctcgtcctctcccctcctctccctcccgtgaactgctaaaatccctcgccaagcatttccgtcgggttaggtggtagataagccgaaaatcgagtggaaaagcatcaatcgagtgctgcgctagttgcctggttcgtcccaacaaattccaccgggaatcagggtcgtccggcagcggctgaggcgtctgggttctggaggagcggccgtcggtgaggggggatggggggcggcggcggatcctccgggccggagctgtcgacggacaacatgaaggggatagtcctggcgctgctctccagcggcttcatcggcgccagcttcatcatcaagaagaagggtctccgccgggccgctgtcgcctccggcgtccgtgcaggtgtaggcgggtactcatacctcatggagcccctgtggtgggttggcatgatcattagtaaggtttcctcgtgcaatttcagtagagaattgggcatggtgcttagatgctaataggtgtttctgagcgaaggttttcctctttcagtgattgtaggtgagattgccaatttcgtggcatatgctttcgcccccgctgttctggttactccccttggagcactcagcataattgttaggttagctagctcaaatttctccttgcattctgacagttctatttatctttttagtcaagctataatttgacgttgagggtgtcttcacccttcagtgcagtgctggctcatttcattctgaacgagaggctgcatgccctcggggtgctcggctgcgtgatgtgcattgcagggtctgtggtcattgttatccacgctccacaggagcaggagattacttcagttaaggaaatatggaacatggcgacacaacctgctttcttgttatatgttgcgtcagttattgtgattgtttttgtcctggtgttctatttctcccctctctatgggcagtccaatgtgttgatctacactgccatttgctctttgatgggctctctttcggttatgagtgttaaagctcttggtacatcactaaagcttacttttgagggaacaaaccaattaatatatccagagacttggttctttatgcttgttgtggctacttgtgtgttgactcagatgaattatctgaacaaggtttgttcaacttgttacacattgctttcattcagtaaccttagttctatgacataactatgtacattctagctgcaaaaatggtatgttgatagagaagaactaactgaatgcaatttgagagttgaacctttgcaaatttatcagcaaaaataagtgttgtgtttgtaagtcgcgtaagctttaaaggattcaaaagggaagtaagcaataaagtttgttgggaatagtttaagaccaaatacaacatcatcatcatcatcatcaacaaagccttttagtcccaagcaagttggatagactagagttaaaaccaacataagccgcaaatcaaggttcaaccacgtggttagctgtttttcatatgctcatattcaaagctaaattttttggtatattctatcctttcaagcctctttttgcttcaattatcaacgtcggtcttcccctttctctcttactatcgtgtctttagatcccactatgtgctgatgcttctgaaggcctctgttggatatgtccaaaccatctcaatcggtgttggataagcttttcttcaatggtgctatccctagcctatcatgtatcatcatttcggactctatcccttacattgttacaaattcaacataacatgtattttcgcaacacttatctgttgaatgtgatgtatttttataggccaatattcaacgccatacaacatagcaattctaatcgttgacctataaaacttgccttttagcttatgtggtacccttttgtcacatacaatgctagatatttgacgccacttcctccactcagctttgattctaagaataacatcatcgatatccccatctctttgtagcattgatcctaaatattgaaaggtatccttcctatgcactacttaaccttccaaactaacatgttcatccatgccgaagtcacattccacggatttggttttagttgtaccgagtctaaaacctctgaactctcacaatctttctcctttacccgggcgtatgaactgctatgttgagacaacataggcggagttttaactccaaatgactaacaaatatatggacatcgatcaaattagtgagaattaagaacggaatggaacacaagaaattccatgtagatgtgatcttattgtttcattttttttctgatattaacttcacattcaaggggtttggattttttaaatgacagacctagtgctggtggttcccacatgagtggggtttggggaaagaataaccgatgcaagtcttacccacatgattgaggtctagggaagtaataaccgaggcaagccttactcttgtatttttgtagaggctgcatcgaatctaagacctttggctcagtgtaaaggcttctcaccactgggtgggtttttaagtgattgaaatcaaattatggttaggtttgcattgcttgttatcttgacaagtatcatgttctattctcatcaaatcattactatgcatgcatatatatattaatctggttgtcatcactttttccaacaactagaataaaattcacaaaactaccacattcgtgtcctaattatcccaaaactaccacttctagtgcctatttcatgaaagtgtcactataggtttcctcttcacagacttactatttttcctccagttttttaagcgtgtggacccactcatcagcgttacatagtgcagaacagaatggctccgctgttttgcactgtataattctgacaagtgagcctgagtgcttaggaaatggcacttgacacgttcaacacggcaattgtatctccaatatattatgtaatgttcacaactcttacaatacttgccagcgtcataatgttcaaggattggtctggtcaaagccctggaagcgtcatttctgaaatttgtggcttggttgtggtgttgtctggtaccattttgttgcatgtgacgaaggattatgaaaggatcccacaatcaagaaattaaatggagaattgttgaagcatgtcgtggatgagaggacttcggacgaagaaaaggccttgagaagacaggagatgtattagcgtgcgtcagaatatcaaaggaaatataggttactctgatggattctccggcaggggcttgtacatggcgtagtgataaccttcccatagcgattgttgattcctccattacagtttgttggtttgtgtatataactgcagcaatttgtggctaccgagtgattgcaaatctgccgaggtggtggaaggctgcagagttccaccaaaaagaatctaagtcgggtgcatagattcttatcgaattcccttcttcctttcgtaacttcctcagttttgtccacggcatttgttccatgtgagttttagagtgaatcacggaccctatgcaactgatgtacattattattgtcatagtgaagttcgtgcaactgtgaatgatgtacattattattgtcattgatgcttctgcgaaattctggtaccatggcatctctgccatttatctagtatggc

SEQ ID NO: 6256 - DNA, 936 bp, Zea Mays
aatatgttgatatgtggtaaagttctcaacactccaaaaccggagagcgtcgggcccatttcactcagtgctcccccacgcgcccgccctgagcacccgatccaccaccgcgacggcgatgagcaccgcctccggcgatggcacggacgccggcggcgacgaggcctcgtctgcggccgccgggaggcggatcccacctgcctcttccatgtcgtgggtacgcaacctccgccgcttcgtcggcatgggcgccggcctcggatccgaggccctcatggaactggagactaaaaggatattgcttgagattttcaaggagcggcagcggaagagtgctgaagctggttccatcccaagtttctacaagaagaatcttgcaccttagttgtggatactaatctccatcatgtgtccagaaacctgaagaaggatctattagctctagagttcaaaggttggccaagtataggtttttaaagaaacaatcagagatgctgctgaatgctgatgatcttgatgccatgtgggtttgtctcagagaaaattgtgtaatcgatgatgctactggtgctgaaaagatgaattatgaagatttctgccatatcgctacagtctgcacggagcagattggtcagaaatgcaaacgcttcttcagcccttcaaacttcatgaagtttgagaaggatgactctgggaggattgctatcctaccattttatctttatgtcatgcgaacagtgagttattttctgcgagaaagagcagttaaacttgccagctagttttgtcccagatgcttcattttgtttctaatagattgtgggttggttaaaatccacattattagcgattctgttctctattcttatctgaagtaatttttactccattagttataccgtttcgttatttataccaagtttgtctaaataacgg

SEQ ID NO: 6257 - DNA, 483 bp, Zea Mays
ctcccagcctcgccctcccaccgtcccacgttgttcctcccgaccctcgccgtccctcccgccgcgacccgccctcctcctcccgaccacgccgcccagcccgtgtaccactccctcccagcctcgccctcccacgccgtccctcccgccgtgacccttcctcctcctcccgacctcgccgcctagcccgtgtcgccgccgtcgcccgtgccactctgctgctgcgaccacgacaatggggatgtggaaggtggtgtgcgtcaccgacgcatcagcgtacatcgcgtcctggatcgtcaggctcctcctcgaccgtggctacaccgtccgcgccaccgtgcgagacacagatggtactacatcgcaacttacacatcctttggaaatgtagagcccacctcagttgatctattcaagaacttccattatagcaaaaacaatggatttaccgagtttgtacagaaagcaattgtgtttgttcgg

SEQ ID NO: 6258 - DNA, 1724 bp, Zea Mays
gttactgcttctataacacgcgatcccgcttccactcggcgaccaccgggcaccgccgccggtacaccgcgcatcgaatcgccaccagtgccgattctgctgacccctcgccatcgctggcgggcgaatcgacgccatggccgccgcgcgccggggccgcgccgacggtgccaacggcgtcgtccgtccccgcccccgcgaccgtgtcgtcggcgtcagcggaagcatggcggggcgcgtggcggtcctcgctttctgtgtcgccgggatctggtccgcctacatctaccagggcgtcctccaggagactctatccacgaagcggttcaggccggaggcgcggcggttcgaggcttcgagcaccttgcgttcctcaacttcgcgcagaatgtcgtatgcttcgtctggtccttcctaatgattaagttgtggtcgagcgggagcgggagtagctccgacggccgtgcgccgctatcgaagtactggggcgtcagcgtaaccaataccatcgggccgaccatggggatcgaggcgctcaagtacattaactatccggctcaggtttggttccgcctgctattgccgtctcaccttggttgttatatgcactgtcccggacattgtgtcatgttaatgttaggttcctgtcgcgggcacatgggtaatattgtcactgacgcttatggattgagatgttccgatagagttaattgactatatagggagctctttggaagtgcttcctcaagtgaacatttaggaagaacattgcatagattggattgtatgcgatatggcgactggcgagcgtgtgcggtatcgaccatcggcaatccatctctaggtgttggcaaaatcttctaagatgatccccgtaatgctgatgggaaccctgctctatggtgtgaagtacacacttccagagtatttttgtacctttcttgttgctggcggtgtgtcctcctttgcgttgttgaagacaagctccaagagaccaagacagttaagaagcttgccaaccctaatgcacctcttggctatacattgtgcttcctcaacttagcttttgatgggtatactaactcgacccaagatttaataaagtcaaggtacccaaagactaatccatgggatataatgcttggcatgaacctctgggggaccatatataatgctgtagttatgtttgttgcgccattactattcagtaactggccatatgcagatggtttcgaggcattgagattttgccaggagaacccagaggtggcctgggacatttttctgttctgcctatgtggcgccgtgggtcagaattatatcttcttaaccatcagcaggttcggcgctcttactaacacaacgatcactaccactgtatttttgttctactgtcccgaaagtaacctgttatagaattagaatcaaggtttttattcacgtatacctcttatattgtgtttggaagagcagtgatgtcttggacattttggagacgacttaaattttactaagccacaggccacaggttatttggatgagtaaaattggtctaggaatgtttatagtaaggatttaggttatgttcccaatcgtaatgaatatttgttgtcaggagatgttatgagaccattattcatgtagatatacgaatacaacgggtgctcaatgctccattacgaaatgtaaatgacagactgatactggtaaattccatattttcg

SEQ ID NO: 6259 - DNA, 1462 bp, Zea Mays
accactatccattttcattcaatgcgtccgcgccgcgcgcctccattcctctcgattccctccctccttccttgttcgaggacctccgcgaccgtggccgagggattgaggacggaaagcgaaaatgatgctgacgcgggcgtcgatgggggtgatggatgcggcggcggtggacgaggtggtgcgtcgcctcgtcgagggcggccgcgggggccggcaggtgcagatgtccgaggccgagatccgccagctctgcgtcgaggccaaacaggtgctgctttcgcagcccaacctcctccgcatccacgcgcccgtcaagatctgcggtgatatccatggacaatttgttgatctcttgaggctctttgatttgggtggttatcctccaacttcaacttatattttccttggagactatgtggatagaggcaaacaaagcttagaaaccatatgtctgcttctggcatacaagttgaagtaccctgataatatataccttttaaggggaaaccatgaagatgcaaaaattaacagagtttatggtttctatgatgaatgtaaaaggagattcaatgttcgactatggaagatattctgtgattgcttcaactgcttgcctatggcagcacttattgatgacaaaatattatgcatgcatggtggcctctcacctgaattgactagcttggatcaaataaaagatattgagaggcctaccgaaattccagactatggtcttctgtgcgatctcctttggtctgatcccagtcatgatacagaaggttggggggagagtgatagaggtgtttcttgcacttttggcgcagataagcttgttgaatttttggagaagaatgatcttgaccttgtgtgcagagctcatcagatcttgaaaccaaatgaaacaggtgcaccacattcaaggaaacctcttccaagcaaggcaccaaaaggagagaacgtctaatttgtatccagtgacctaatcacaatcgatgtcagctcgaagggggcgatctcgttgtctcggatccaccagggcatggcattagcgttctacacttgctgaatttgtgtggactcaatcggcagcgcttacattcttctgtacagcagcagtgtttctaacttggcatatcgtccgttctgatagtgacattgccacagctgcaatattttagtcgggtggacaaggcattttgttgggtacagtagctgttgttttgttagcctttttttggtaatgtttgtttggttgattgaacgctgtgagttttgtttgccgcgtatcttcgtcaggctcgggtatttacatcctgcaactgtgtaaatgattttgtctaacgaatgtctgttgacataaagattgctgcttacagtaacaaccacactaggtggcacaactgggcctgtatgtgtccgtcctccatggtcacgtgaatcctactcctttaaatcggca

SEQ ID NO: 6260 - DNA, 1300 bp, Zea Mays
ccacgacggcggtgccaaatatttgaagcccgcccacggcggtgtcatgtttgcaaaattctctccattcgccggttttgcgcatcccctccctccctccatctctctctgcgttcgtggtgctcggccatggcggactaccacttcgtgtacaaggacgttgagggggcgagcacacagtgggacgatatccagcgccgcctcgggaacctgcccccgaagccggagcccttcaagccgccgcccttcgcccccaaggtcgacgccggcgagcagcccaagtccaaggaatggctcgacgagcgcgaggccgaagagctcgaggaactcgaggacgaccttgatgacgaccgcttcctcgagcagtacaggaagatgaggcttgccgagctgagggaggccgcaaaagccgcgcgatttggtagtatagttcccatcactggctcggacttcgtgcgggaggtgtctcaggcaccatcagaagtttgggttgtggtcttcctctacaaggatggaattgtttggaggaattggctacaagatacccagcgacaaagtttgttaaaattatctccacggactgcatccccaactacccagataggaatgttcctacaatactggtgtataacaacagtgctgtcaaagggacttatgttggtttgcagaagtttggtggaaagagatgcacacctgaatctgttgcattagccctttgccagtcagacccggtactgaatgatgggcatggtggcagccattcatctcgggacaatgtcatagaaggtgttcgcaggaagttcatagagaaggttgtagcccagcatgaagagcgggaagaagaggatagtgactaagcgtatattgtttgtgtttgttttcctcagctggcagatccaatttggttccaacgttcactgatcttatgtgattttgtgggtgaaatttgccagggttttctgattacctggttgtgcgggtgaagcttttaacagtttatggatcatattgcgttacagttagagatgtctgtgggtcagcaaaatcttggtgttagtaaccttttgagctgtaacataacttctttatcttatttaagagatcaaagatgattagtgcacttatatagttgcatgagaaaagatccacccatacctttgaatccacagtatttcactatcatgaagatttctcaacacaaaacatcactactgaaatgatctaatttgtgtatatgtatgtttatgataatttgtgaattagtaaaagtgcaacttgtgatgtatatatcgataagaaa

SEQ ID NO: 6261 - DNA, 2426 bp, Zea Mays
ggaacccctccgccgcccccgaaaaaacatataaaacagaaccctcgcatcctgtaaatggcgacacgcctcgcctccatcttctctgccgtgcgcagccccacctcagccccgccccacactctccgccgcgctctcccaagcttcagctaccggcgagcgcatccatctcagccccgcatgtcctcctcttcagccgcctcctccgcgccgccggccgccgagaagcctacagtggcgccgttcgggtcctggaggtcgcccatcactgcggacgtcgtatctggcgcggataggcgcctcggcggtatcgctctcgctggagatggacgccttctctggatcgagggccgccccgaggagaaagggaatttgcagcacgcacactggctcaagaatatggaggtggtgcatttgcagtcgacaagagtgttgttgtgttctcaaattacaaggatcaacgtctatacaagcaaacaataggaactggtggtccacctgtgcctcttacacccgattatggtgcgccaaatgtcagttatgctgatggtgtatttgatcctcacttcgaccgttatgttactgtgatggaagatcgtcgaaaggatagcttgaatcccaccacaacaattgctgctataaacttgagtggcagtgatgttcatgaaccaaaggtgctgatcagcggcaacgatttctatgcatttcctcgcattgatcaaaataaaaagcggatagcatggattgaatggagccatccaaacatgccctgggataaatcagaactctgggttggttacttcgccgaaagcggagacttgaccaaacgggtctgtattgccggtggcaatcggctgctgattgaatctcctagtgaacctaaatggtcaccgaaaggagaactgttttttgttactgacagagggagtggattttggaatatttataaatgggttgaacaaaccaatgaaattgttccagtgtattcactagatgctgaatttacgagaccattgtgggtttttggcatcagctcgtatgattttcttggaaacagcgaccacattgttttcagttatagacagcaaggaaagtcacatcttggtgtgcttgattgtgattcaggttctatttcattgcttgacatccctttctctgatttatctgatgtggttgctgcagatgattacttctatattgaaggtgcttccgcgagtattccacggtcgattgctaaggtgacattaaatgaaagcaaaaccaaagtagtcaatttctcaatagcctggtcgtcctcaccagacctcgtacaatatagacctttcttcagcacaccagaacttgttgagttccctacatccaagtctggccagaaagcttatgcctatttctacccaccatcaaatcccaattttcaaggtttgcctgatgaaaagcctcctttgcttgtcaaaacacatggaggaccaactgctgaaacacgtgcaattctggacctcagtgtccagtattggacaagtagagggtgggcatatgtcgatgtcaactatggaggaagcactggttatggaagagagtatcgggagagactattgaacaaatggggtattgttgatgttgatgattgctgcggctgtgcgagattcctggtggagagtgggaaagtagatgggcagcgcctttgtattactggtagatcagcaggtggatacactactttagcttcacttgcattcagagacacgttcaaggctggagcttctctctatggtgttggggacttgactctgttgagagcggagacgcacaaatttgagtctcattatatggacaatcttgtaggaaatgaaagagcttactacgagagatcaccaatcaactttgtcaaccagtttacttgtccagtcattttgtttcaagggttggaggataaggttgtgccaccagatcaggcacgcaaaatatacagtgccttgaaagagaaaggtttgcctgttgctttggttgaatatgaaggagagcagcatgggttccgtaaggcggagaacatcaagttcaccttggagcagcagatgttgttctttgcaagattagttgggaagtttgaggtggcagatgatataactccaatcaagattgagaacttcgattgatctcttggagagtggtgtccggttcgaagttttgttcacgtaacccgattatatgttcagtacattagccgttgcagtaccttttaggaatacgacttcatcttatttttgagggttgatggaaatctcttttttgcgctgtaacgatgaagtcaccttgttttctgttcggttctagaatgaaatagaacggaatgacactatcctttatttggttgatgagtgaaaatagataatttcataactataatacattcatacaaccatatatat

SEQ ID NO: 6262 - DNA, 2706 bp, Zea Mays
aacccctccgccgcccccgaaaaaacatataaaacagaaccctcgcatcctgtaaatggcgacacgcctcgcctccatcttctctgccgtgcgcagccccacctcagccccgccccacactctccgccgcgctctcccaagcttcagctaccggcgagcgcatccatctcagccccgcatgtcctcctcttcagccgcctcctccgcgccgccggccgccgagaagcctacagtggcgccgttcgggtcctggaggtcgcccatcactgcggacgtcgtatctggcgcggataggcgcctcggcggtatcgctctcgctggagatggacgccttctctggatcgagggccgccccgaggagaaagggcgtatggttattgtaaaggaggaggataatcctgtggatgtcatacctcaggaatttgcagcacgcacactggctcaagaatatggaggtggtgcatttgcagtcgacaagagtgttgttgtgttctcaaattacaaggatcaacgtctatacaagcaaacaataggaactggtggtccacctgtgcctcttacacccgattatggtgcgccaaatgtcagttatgctgatggtgtatttgatcctcacttcgaccgttatgttactgtgatggaagatcgtcgaaaggatagcttgaatcccaccacaacaattgctgctataaacttgagtggcagtgatgttcatgaaccaaaggtgctgatcagcggcaacgatttctatgcatttcctcgcattgatcaaaataaaaagcggatagcatggattgaatggagccatccaaacatgccctgggataaatcagaactctgggttggttacttcgccgaaagcggccctgcagtaagatcatgacatctgtgcaagaagccatgaagctgtcagcctccagcatgtcgtcgtcgacaagcatgtggcgtgagatcctgctccggttggcgctgagtattcgacatgtacgtgacattgggcatcctaggacgacaaggcgtgcgacatggtggccatggtcctgtatgtgtcgtaggtgttcagacacgtcaagatgacctcaaagcgtgccgctcggtgccaccatccgtcctcgaagctgccaagatggtggcaaatagacttgaccaaacgggtctgtattgccggtggcaatcggctgctgattgaatctcctagtgaacctaaatggtcaccgaaaggagaactgttttttgttactgacagagggagtggattttggaatatttataaatgggttgaacaaaccaatgaaattgttccagtgtattcactagatgctgaatttacgagaccattgtgggtttttggcatcagctcgtatgattttcttggaaacagcgaccacattgttttcagttataggttctatttcattgcttgacatccctttctctgatttatctgatgtggttgctgcagatgattacttctatattgaaggtgcttccgcgagtattccacggtcgattgctaaggtgacattaaatgaaagcaaaaccaaagtagtcaatttctcaatagcctggtcgtcctcaccagacctcgtacaatatagacctttcttcagcacaccagaacttgttgagttccctacatccaagtctggccagaaagcttatgcctatttctacccaccatcaaatcccaattttcaaggtttgcctgatgaaaagcctcctttgcttgtcaaaacacatggaggaccaactgctgaaacacgtgcaattctggacctcagtgtccagtattggacaagtagagggtgggcatatgtcgatgtcaactatggaggaagcactggttatggaagagagtatcgggagagactattgaacaaatggggtattgttgatgttgatgattgctgcggctgtgcgagattcctggtggagagtgggaaagtagatgggcagcgcctttgtattactggtagatcagcaggtggatacactactttagcttcacttgcattcagagacacgttcaaggctggagcttctctctatggtgttggggacttgactctgttgagagcggagacgcacaaatttgagtctcattatatggacaatcttgtaggaaatgaaagagcttactacgagagatcaccaatcaactttgtcaaccagtttacttgtccagtcattttgtttcaagggttggaggataaggttgtgccaccagatcaggcacgcaaaatatacagtgccttgaaagagaaaggtttgcctgttgctttggttgaatatgaaggagagcagcatgggttccgtaaggcggagaacatcaagttcaccttggagcagcagatgttgttctttgcaagattagttgggaagtttgaggtggcagatgatataactccaatcaagattgagaacttcgattgatctcttggagagtggtgtccggttcgaagttttgttcacgtaacccgattatatgttcagtacattagccgttgcagtaccttttaggaatacgacttcatcttatttttgagggttgatggaaatctcttttttgcgctgtaacgatgaagtcaccttgttttctgttcggttctagaatgaaatagaacggaatgacactatcctttatttggttgatgagtgaaaatagataatttcataactataatacattcatacaaccatatatat

SEQ ID NO: 6263 - DNA, 3006 bp, Zea Mays
caacagggcttcagcagggacgctggtttagcaatggaggcgatccattccttgtctgcttcaaaatcaagttatccaatggttgatctcacccaactcttcaaacaacaaaatatctccttatgtgtgactgaatttttcatgcactctggttttggatccatccattatgttcctcataatgaagtatttcatgcttattcagtagcaaaagacgatattttttcttgaaaatcctcttaattaacacgtgcattttcttgtatgaatcgttacctattccttttaatcatgtatcttggtaattaattgcatttgcatcattaaacctggcttgactcttgtgttgcttgatagttcatttgttttgtctataaactatgtgggcgtcagctctgtataggtccatgtacaattttccaattcttcctatcaagtttacaaaaacaggtggggcctgtccagctgtacctgactatgatttggggtgggtggggtctgaatctttttctttgttcttataatctcatggtgtagaatttctgctggttgggcctgatgacatttggaatctgattacttctttacaccattgtgacattagttgactgtcatttgttgctttttatttgagttgcctggattgaattagtctcaggacagacataggataggacctaagatcgcattagcaaaagctaaaatggtctaggattagaagtgttataccaaatcttccatgaactccagatagcccagagtcttttataatgccacacacaaagctttcatgtgttggaaaaaaatcataggtcaaccgaactaagttatcacaacatttactcaaaccatatcagaaggcacatatgcttacataaatttcattttagttgataccaccggtcctgggtttcatgcttacaactagaaaagggttctattttttcagattatgaacataccatggaaacatgaagcagggttttacttttatatatgctagcaattgttatctgttgtgttgctttacatttctgttacttactcttttgcaggtaaaatatacagactgtggagttagtcctcaggatctacatcatgtattcacaaagtttgctcatcctcaaagtggaggaaaccgagggtttaatggtagtggtcttggccttgccatatgcaagagccatcccggtttctaggattccatgtcgtcccatgagaatataacgaaggaaacaagaagcacattatagaagtagcaagatcacagtacatatcagcatgacattcatgaagccatcccggtttctaggattcttgttttgctctgtccatggcacgccaccaacattcatccctaaaactgacatttttttgcaacataaatcaggtaaacgagagccctggaaataacaggaattaattcaggaaagtacacgagcaagcacccgaggtcaatgagcttacctccattgacaatggagataggaaggaatatcatgaagagaaatgaaaggaccatataattccaagaccctgatgatggccacaactgcttatattgatgattcctactcggagattattgatcctctaaagactgaggtgctgtatgttgttgaactccctggtgaccatacttagcacccaccaaaaccgaatgtggtggtgtctagcagtgtgtgcaaacttctagaatatccagtctgcttgaatgccatgtatcctattcatcagctgcacattcatactgatccatttggcatgtttatatctaaaaccctgttcaaatgtagtcgattggatgaaaattatggctttactggtttcagcgttcctttcaatatcatgtactgttatcaccattttattctgatccgtttcaatttctatggacgtttagtacataatgtttataaaccttaacttttttactcttttttcttttttgattagctacgatacagtgcagaataatatgttctgcttttttattcaactattcaaatcttattttttattcaactattcaaatcatattttttgattagctgattgcaggagagattaaaatcaaagggattgagctacaggagagttgcagtctgtcgttcttttccatgggtgtgattgagactgaaacgatgggtaccagagtgaaggagtcgaagacagttttagtagagaaagagctcgaactgatcgacgagcctcagattcaagagagccctccagttcgtgcattgttgcatgatgaggtggattttgctgaatcgtcacttgctattagagaatctgacattcccgtgaagaaggtgctgataatcgtgacaatcacttttgtttggccacaacagccatattacttgaagcccatgttttgaaagctgtattggcacttcttctatggttagtggtggaatagcccgaacagtcctatgaaacagcaaaaaatctgttacagtccacttaggtggaagaggagtcactacttatagaaaaagcttgttcctagaggtggtttctcccggcaatgcagaatcttgaagcacgtctaaagtggcttgatgatagttctaaatttcaactccctgtcattaccaggtgccagataggctgctggtcgattccatcctgaacaagttgcgccaaagattacatgaatattgcgtgccgagatctgtcttcagtaatgcgatgccatcctgaacaagttgcagcgacaattaggataggattttcccacgctttttagtcttgtgtattccttttatgctcttcatctttttttctcattatatccaccaattagatagtcatgtagactttcttttaggcgcttttgttttttatactttgtgttaccttgcttttgttttcatactttgtgttaccttacagatgtaaaaacgctcccctcccgtacattgcactatttatgaggaaaggtaaaatagcgtcatttagctttttcagtcgaggaaatgcactaatattttgtcgaat

SEQ ID NO: 6264 - DNA, 1148 bp, Zea Mays
aggaaagcccagataattacacactagcttcacggtgaaggcagtcggggtcacaattcacaactcccaacccaatccagcccagcaatcaacaattcccccggtcgttttcacttgacatcccccgtcccatagatcgccggcgatggctccggccgttgccgcggcggcgtcggcggcgatgaggcaggcactgcgggaccggcagatcctcgatgccgtgggcactggcgctgcggcgctctcgctggcaggctcctccttcatcgtgatctgctacctcctcttccgcgagctccgcaagttctccttcaagctcgtcttctacctagccgtctcggatatgttttgcagcttattcactatattgggggggccatcgaatgcattttactgctttgcacatgactacagtgctcatttcttctgtgtggcttcttttctatggacaaccaccatatcattcactctgcatcgcacagttgtaaaacacaaaactgatgttgaagaatttggatctattttccacttatatgtgtggggaacttcactatctaccactgtattacgttcgataggaagtgactacggaagaccaggcacctggtgctggattcagcagggaagcatggcaaaggtcctacatttaataaccttttatcttccactttggggtgccattttgtacaatgggtttacatactatgaagtaaaccgcatgctgaataatgcaacgcagatggctgctggcataagtgatcaatcaaatcagtctgacattagggcaggcaggaaggcatttaaccgatggggttattaccctctaattctaatcggttcatgggcgtttgcaactatcaatcgtctttatgactttgccaatccagggcacaggatagtctggctctcgtttcttgatgttgggttcgctggacttatgggcctattcaattccattgcttatgggctaaactcttctgtgcgccgagctattgcagagagaatcgacacgttcctacctgagagaataaaaaggagcctccctgctttgtcaaggctgaggagtcaacaggaaaatgaactcacttctcttatcgttgagggtaactgatatctgcgtggacaagaaatgacgacatatatagccg

SEQ ID NO: 6265 - DNA, 3954 bp, Zea Mays
ctgccgcaacccccatgccccatccccctccacctgccaaaataaatccatgcgctctccagctcggtgctgcaatcccatcaaaagctagggtttcacgcctctcccgacttcacagttcacattcctctcctccccttcccacctccccaactcggccgccgtagacgcggtggcgcacgaactgccctagatttgagcgagccaccctgcgaatcttcacctgacgcacaaagtctgtcagagacagtgaagaattcgaacacgatcttaaacatcgttgattaagaccacacacaaacacatctacctggcttcccccctatcagttgtttttgtgtgtttttttttgctgtttcggacgattcataagaaccgacctgcaaggcttgcagatctaccttgagaaccagggcccttgttttggacgtccagaacgaacccttgaccctgcggatctgcttgatccgttttggatctgcttgtttttttgctggatctggagagaatgttcaagtcgatggtttattacgtgaacacctcaatcggagaggtggaggtgtggcccaagggcgaggcgagcgcgggcctgaccatggcggcgtgggcgcgagaaatccgcgttgaacgcatttccccgcccagcgagcggtgccctccgctggccgtcatgcacaccgtggccgtcggcgcccgatgcctcgtcatggagtccaggccgcccgttgtcgccgacgttgtgccgcctctcgtcgtcatgcacaccgcttgcctcagggagaacaagactgcggttgttccacttggagatgaagagttgcatttagttgcgatgacatccagaagaaacttgacaaatcatgcatgtttctggggctataaattgccatttggtttgtataattcttgcttgaccatgttaaatcttcggtgcctgggtattgtatttgaccttgatgagacattgattgtcgccaatacatcacggtcttttgaggacagaattgacgcacttcaaagaaagctgagtaatgagactgatccacaacgtaggaatggtatgctatcagagatcaagaggtaccaggatgataagtccatcctaaagcaatatatagaaggtgatcaggtctatgatgatggaaaagtgtataaagcacaacctgagattgttccaccattgtctgataaccagcaaccaatgacacgtccagttataagattacaagataaaaacattatcctgacaagaataaatcctctgattagggataccagtgtgcttgtatgtttaaggccagcctgggaggatcttcgcagctacttaattgccagaggtcgcaagcgttttgaggtctatgtgtgtacgatggctgaaagagactatgctttagaaatgtggagattgcttgatccagattcaagattgattaattctgttcaactccatgatcggatggtgtgtgtaaaatctggtttaaaaaagtccttgctaaatgtcttccatgatggttcttgccatcctggtatggcattagtaattgatgatcgcctgaaagtttgggatgagaaggatcaattacgagttcatgtggttcctgcatttactccatattatgctcctcaggcggaggcaaattgttctatcccagttctgtgtgtagccagaaacgttgcatgcaatgttaggggtggtttcttcaaagactttgatgaaggcctcttaccaaggattagcaatgttcactatgaggatgaagtaaatgagatatctgcgccagatgttggcaattatttgataacagatgatgaaaatgtcgcattagtgaatgggaatagagattcattgccttttgatggtatggcagatgcagaggttgagcggagaatgaaggaagccaatgctcaatcattccatcaaacagcgggagactttgtcatgccagtagcccctgcccagaatttcgtttcgacttcagttgcatcattagccccacctcttggcatgatgccatctccatttagccagccagttgctccaccaggtttttcagattcactgcaaggttctccagctagagaagagggtgaagttccagagtctgagttggatccggacacaaggagaaggcttcttatattacagcatggccaagacacaagagatcctacatctccactaccagcaataccacccgtccaagttccagttcctccagtgcaaccccatgggaattggtttcccacagaggatgggataaaccaaagtaacctgaatagaggctcagcaggattcactgtagaatctgattctattgtctatgagaaaaagcaaccacctcatccttcattctttcatggtggggatagtcctatgccgtctgatagatttggctatcagaaccagaggtttccctctcagctaccacacgaggatcaccccatgatgcagaaccatgcacctccaaaatacagatccttttctggtgaggaactagcatcttggcatgttccctcaagccagagaaacaaccagatagaatcaggaagacactttgcacaatatgctgggacctctgctggcatattagaggggattgctctgaaatgtggttctaaggtggagtacaagtcagcattatgtgatactgcagaactacaattctctattgaggtttggattgttggggaaaaggtcggtgaaggaattggtaggacaaggagagaagcacaacgccaagctgcagaaatgtctttaagaaacttggccaataaatacttgtcatctgatccaaataagttgtctgatatgaaagaaaatgatttcagtagcaacagaaatgtctttggttactctggaaatacgagggatgatatgttgccactttcaagtacttccgaggaatctcgctttatgaaaatggagaacaataattcccggaaaacaggaagttctgttgctgctctcaaagaacttgtacaagttggtggacaaattctaggcaaaggagttgggttaacatgggaagaggccaagctccaggctgctgctgaggctcttggaactttaagatccatgctaggtcaacttggtcataaacgatctggctctccaaggtcattggcaccaaattttaacaagcggttcaagccagattttccaaggaccgtacaaagagttccttacggaacatattctaggatcgaaggtcatgttccttaagaggtctgcataaatgatgtgcctgggcgctaaacttcaaaactggatgaagctttgaactgtcaggtcttcacacattgaatgcaagccgtagattcctggcttatagttggcttccaaggctctcacaagctgccactggctgagagtaccgacgaatataaaatacgtacttcatttaagtaagcgccaagagattgaaggattaatggtggccataactttatgcagaatttcattgccatgatcttaccagtcacaagtgttaccccatgttgtcaacttggcataatcgttgacctggaagtttaacggttgaaccagggaccggcatgcagctccatttcttttttggtgtgtgtccatggatcaaagagcagcgccgtggttgggcatttttacccttcctttggtttaggtgaaagttggacctctgtagctcggagtcttagcaggtagccagtttttatttctgataagtttttaggcaagttgtaagttgtagcacaaaatcgatcacttgatagtattaacattgcattgatgtagacatgtagtcatctttgtagctgtactctaggcaagcaacacgaatccagtggcttacatcattcatttgtatgctgtagtcatcttgtaatatatggcccatttctttgcaaggctggaaatttgcctctctaagggccagtttaagagtccaaaaaccggagggaactggaggggttaaa

SEQ ID NO: 6266 - DNA, 3987 bp, Zea Mays
ccgcaacccccatgccccatccccctccacctgccaaaataaatccatgcgctctccagctcggtgctgcaatcccatcaaaagctagggtttcacgcctctcccgacttcacagttcacattcctctcctccccttcccacctccccaactcggccgccgtagacgcggtggcgcacgaactgccctagatttgagcgagccaccctgcgaatcttcacctgacgcacaaagtctgtcagagacagtgaagaattcgaacacgatcttaaacatcgttgattaagaccacacacaaacacatctacctggcttcccccctatcagttgtttttgtgtgtttttttttgctgtttcggacgattcataagaaccgacctgcaaggcttgcagatctaccttgagaaccagggcccttgttttggacgtccagaacgaacccttgaccctgcggatctgcttgatccgttttggatctgcttgtttttttgctggatctggagagaatgttcaagtcgatggtttattacgtgaacacctcaatcggagaggtggaggtgtggcccaagggcgaggcgagcgcgggcctgaccatggcggcgtgggcgcgagaaatccgcgttgaacgcatttccccgcccagcgagcggtgccctccgctggccgtcatgcacaccgtggccgtcggcgcccgatgcctcgtcatggagtccaggccgcccgttgtcgccgacgttgtgccgcctctcgtcgtcatgcacaccgcttgcctcagggagaacaagactgcggttgttccacttggagatgaagagttgcatttagttgcgatgacatccagaagaaacttgacaaatcatgcatgtttctggggctataaattgccatttggtttgtataattcttgcttgaccatgttaaatcttcggtgcctgggtattgtatttgaccttgatgagacattgattgtcgccaatacatcacggtcttttgaggacagaattgacgcacttcaaagaaagctgagtaatgagactgatccacaacgtaggaatggtatgctatcagagatcaagaggtaccaggatgataagtccatcctaaagcaatatatagaaggtgatcaggtctatgatgatggaaaagtgtataaagcacaacctgagattgttccaccattgtctgataaccagcaaccaatgacacgtccagttataagattacaagataaaaacattatcctgacaagaataaatcctctgattagggataccagtgtgcttgtatgtttaaggccagcctgggaggatcttcgcagctacttaattgccagaggtcgcaagcgttttgaggtctatgtgtgtacgatggctgaaagagactatgctttagaaatgtggagattgcttgatccagattcaagattgattaattctgttcaactccatgatcggatggtgtgtgtaaaatctggtttaaaaaagtccttgctaaatgtcttccatgatggttcttgccatcctggtatggcattagtaattgatgatcgcctgaaagtttgggatgagaaggatcaattacgagttcatgtggttcctgcatttactccatattatgctcctcaggcggaggcaaattgttctatcccagttctgtgtgtagccagaaacgttgcatgcaatgttaggggtggtttcttcaaagactttgatgaaggcctcttaccaaggattagcaatgttcactatgaggatgaagatgaaaatgtcgcattagtgaatgggaatagagattcattgccttttgatggtatggcagatgcagaggttgagcggagaatgaaggaagccaatgctcaatcattccatcaaacagcgggagactttgtcatgccagtagcccctgcccagaatttcgtttcgacttcagttgcatcattagccccacctcttggcatgatgccatctccatttagccagccagttgctccaccaggtttttcagattcactgcaaggttctccagctagagaagagggtgaagttccagagtctgagttggatccggacacaaggagaaggcttcttatattacagcatggccaagacacaagagatcctacatctccactaccagcaataccacccgtccaagttccagttcctccagtgcaaccccatgggaattggtttcccacagaggatgggataaaccaaagtaacctgaatagaggctcagcaggattcactgtagaatctgattctattgtctatgagaaaaagcaaccacctcatccttcattctttcatggtggggatagtcctatgccgtctgatagatttggctatcagaaccagaggtttccctctcagctaccacacgaggatcaccccatgatgcagaaccatgcacctccaaaatacagatccttttctggtgaggaactagcatcttggcatgttccctcaagccagagaaacaaccagatagaatcaggaagacactttgcacaatatgctgggacctctgctggcatattagaggggattgctctgaaatgtggttctaaggtggagtacaagtcagcattatgtgatactgcagaactacaattctctattgaggtttggattgttggggaaaaggtcggtgaaggaattggtaggacaaggagagaagcacaacgccaagctgcagaaatgtctttaagaaacttggccaataaatacttgtcatctgatccaaataagttgtctgatatgaaagaaaatgatttcagtagcaacagaaatgtctttggttactctggaaatacgagggatgatatgttgccactttcaagtacttccgaggaatctcgctttatgaaaatggagaacaataattcccggaaaacaggaagttctgttgctgctctcaaagaactttgcactgttgagggatataacttagtttttcaagcctgtccatcttcagcagatggtttagttgggaaagaatcttatgctcaggtacaagttggtggacaaattctaggcaaaggagttgggttaacatgggaagaggccaagctccaggctgctgctgaggctcttggaactttaagatccatgctaggtcaacttggtcataaacgatctggctctccaaggtcattggcaccaaattttaacaagcggttcaagccagattttccaaggaccgtacaaagagttccttacggaacatattctaggatcgaaggtcatgttccttaagaggtctgcataaatgatgtgcctgggcgctaaacttcaaaactggatgaagctttgaactgtcaggtcttcacacattgaatgcaagccgtagattcctggcttatagttggcttccaaggctctcacaagctgccactggctgagagtaccgacgaatataaaatacgtacttcatttaagtaagcgccaagagattgaaggattaatggtggccataactttatgcagaatttcattgccatgatcttaccagtcacaagtgttaccccatgttgtcaacttggcataatcgttgacctggaagtttaacggttgaaccagggaccggcatgcagctccatttcttttttggtgtgtgtccatggatcaaagagcagcgccgtggttgggcatttttacccttcctttggtttaggtgaaagttggacctctgtagctcggagtcttagcaggtagccagtttttatttctgataagtttttaggcaagttgtaagttgtagcacaaaatcgatcacttgatagtattaacattgcattgatgtagacatgtagtcatctttgtagctgtactctaggcaagcaacacgaatccagtggcttacatcattcatttgtatgctgtagtcatcttgtaatatatggcccatttctttgcaaggctggaaatttgcctctctaagggccagtttaagagtccaaaaaccggagggaactggaggggttaaa

SEQ ID NO: 6267 - DNA, 2010 bp, Zea Mays
ccacactagcagcgtcgcgtctctttctcttctaacgttcaaatattcaaacgaggagcggatggacagaggggacggaggctggatgaggcactagaccactagtgcactacggaaacgcgagagaagaggcagacggcggcggcggccatggatttccactccctctcccggcgagaacttcaggcgctctgcaagagcaacggcatccgtgccaacatgtccaacgcggccatggcggaagcgcttaggtgcctccccgcggtggacaggatcgacgagatcgggagcacggcgccaccgccggtatcggcgatgaaggaacagacgccggatgcggaagaggcggtcggaggggagcaggagcacgggtgcccgctccctcgcggcggccgtgcacgggggaagagaaggaaggccggggcacggaagagtaagacggagggggatgaggaggaggtgatggtgccgggcccacagaccttgccgggacccaagatgacggtggcacgggaggctgctgcggcacctgtggatgatgcggaagaggcggccgtaggaattaggacgagaaggtcagcgagatccaaggtgaaggtcgcgctggatcagaaagaggaggacgtacaagcggcggcagcccggaaggagcagaaagtttcagataagagctgcgaggattcagaagagcatgcaatagtagtaggtgtggtggaggaagaagaggtcagaaagccacaggaaggtcaaaacgtgacgaggagagccgcgccatataagacacatgaggatttgcagccggatcagaggacggcggaagagttgtccatggcaaagaaaaggacgagaaggtccacaagatccaaggtagcagcggcagcacagaaggggcagaaagctgattcttctgacacaaccgttggacctgaaattgatcctaaatatgatgaagttgttcccaaggtggaggaggccacaaaaccacaggaaggcaagaatgtcactaagagggctacagcttatatttacaaggcacacgaggaggtgcagacaggccaggtgacagcggcacccgaagctacggcagaagaagtggccacgacaaagagaaggaggaggaggtcaacaagatccaaggtgggggcggcagcacggaaggctcagaaagaatgtgcggctgatacttctgatgcagtcaacgggtctacagtaagtgatgatcctaaggaagagcaagtggttgaggtgatagaggaagggacaacaaagcacaatgaagaacgagagcaaattaacaacgttcggcagtttgcttccttgccaaaactggaggactcaccaatccttggcatcgtgtccaagcccaatacagcagatgcttcagacaaggcaccggttgcacatcaggaggctagcaaggaagatcgtttcactttcactggtgaggctgatgtgtccaatcttcttgtcaacacacttgacagatttgcaaagcctgtgtatgagtccagagtcaaagaggagaagaaatgcagtgagtgttggtggatgcttctataatttacaagaggtgtaggaccaggtccagtcagaactgccaaaagtatcaaattacatgagatcatgtaatgtgtgggtcaaaaactctagaatcaggattggagagatggtttaagacacgaatctaagcaaagaaaaggaaaaggaaagaatcctgagagtgtaaacagatggtttatactggagcatgaggcagacatgtaaggccactgtggacaccacctccggcatggtttacatgatattaattgacaccacctccggcatggtcttcgccatgaggtctgacattgttttgaatgaagtggacagtttgtctagctaattaaaagtaaaattttcttgaagttgtccaggatgcccatacgctggcatgattgagttttccataatgatatttctttgccactgttgacgccttttggagcgccaaatactcaagccgggcgg

SEQ ID NO: 6268 - DNA, 724 bp, Zea Mays
ccaagttccatgtctttgtgttgttccttggtacctgcgtggggtgtgagtttgagagccacgtatgagggtccattcagtgttggcgccctggggtttcttctgcattggtgttagccaaattcagtgatttccccctgcctgtccttttgtgcacacccttggctgagattcatcatccttgtgtttagcttctacgtgttgtccatgcactgctgcttagtgtccctgctcgtagtggtgctggcaccctaggactttcccttcctccacagaattttatacaaagctcagggatactcgcctacatgttcagctgccctaaagactttgtctatgaagttcccctctgcccttgagtccaacctgtgttcatcactagagggacgtaactcttgagttcaagtcggtgttaacccactccacagccacccaacatactgtattccgtgcatcgagtgccagtggcgaccatagcagcagttcacaccctcaccatggccatgattcctcggaggttgtctcggccttgtgttgcccgttccctactcctcgcaggtgatgatgagtactctaggtgttcctatggttggagggcgtttccagttctgaaggaagattagttagtcttgtgtataagctttggagggttcctaccttcctgctaatgtaataagttatgcactttgagtatatcaggacttgtaataaatgtaactcttcc

SEQ ID NO: 6269 - DNA, 5751 bp, Zea Mays
gtggaatcgagtcaaatcgaccacttctctggcaagcccgcaggccgcagcccctcctctctccaagagccgccgcggctgctccccccctagcaaacccgccgccaccccattcgcccgccgcgcggcgccggccaaccgcgccttcttctcgccttcgctagctcgcgcgcgcgtcggcctccgcgccgcgccctcttcgctcccacagaaggcgagggcagtgaggtgcgcggctgtggcgatggcgtctgacgcggctcaggtgaaggccgcacgcgaggacatcagggagcttctcaggacgactcactcccaccccatcctggtccgtctaggatggcatgatgctggtacgtatgacaagaatattgaggagtggccacaacgaggtggagctaatggaagtttaagatttgatgttgagttgaaacatggagccaatgctggtctgataaatgctctaaagcttatccaaccaatcaaggacaagtaccctagtatcacttatgcagatttatttcagttggcaagtgctacagcaattgaggaagctggtggcccaaagattccaatgaaatacggacgagttgatgttacaggacctgagcagtgcccccctgaggggaaacttcctgatgctggcccaagttcacctgctgaccacttgagggaggtattctacagaatgggccttaatgacaaggaaattgttgccttgtctggagcacatacacttggaaggtccaggcctgaacggagtggctgggggaaaccagaaacaaaatatactaaaaatggtcctggtgcacctggtgggcaatcatggacagttgaatggctgaggtttgataacagttacttcaaggatatcaaagagaaacgagatcaggatcttctggtcctacctacagatgctgctttatttgaggacccaaagttcaaggtctatgcggagaaatatgcagaggaccaagacgcattcttcagagactacgctgaggctcatgctaaactgagcgaattgggtgcaaagttccaaccaccgcagggattctctttggatgattagtgcggcaccagaaccacagtccgtgaaacaggaaaaccctgtccttgaaaaggatcaagagggagcatacaattcattgttcttctcatatcatcgtacaagatggactggtcccccttttcatgatgctatatggagtcttctaatttagctagatttctgaaccgagcttgcaaataaaaaagaaccgacacagtggcactacataattttcagatccattgggagaactgacacagtgctatcagatttggttttatcccttccacatgacgctctgcgctgctgtcaattttctactattagcaccatggttgttgcttccctcctgctgcgattgggcttatccataggccatagcggatctgcagcacttaaaaactctggccccaacccaatcacattcacaacaaagcagtgctcagcaagtcactgaccagaaggccgcggtgagctcaccaccggtgttccgaaaccccagaaaacttcagagcttcggaccaaaaaaacaccaaaaaggcggcacccgggcgcctaggaggaagacgacgacgaccctccaaagcaagcacacgagcttccctccctcctcccccacgagctcgtgcttgcttccttccccaaaaccctagtaccccgccccaagtccggctgtgctccccgtctccaccgccgcggcgcggcaatgtcgtcgtcgaggccgacgcgttccagtatatccccattccgatcccgccgctcggctccggcggtgtcggcagcgggacctcctccgccggcgaggacctcatctgggggtcgcccgtccaccccctcttctactgcctctgggcgacccaccaccccctcgtcctccggtggtcgccccgctaccccgtccgccgcgttcgcgcgtcccgccaccccttcgtcgtcatcggcgcggcccgccacgccgtcctctaccgcctccgcgcggcccaccacgccctcgtcgatctcctcgcgcgttgcggtgagggcgccgctcgtggacgcggccaatgccaaggagaacatcatggtcaccgtccgcttccggcccctcagtcctagagagatcaacaagggggacgaggtggcgtggtacgcggatggtgacaacatggtgcgcaacgagtataacctcagcatcgcctatgctttcgataaagtgtttggccctgctactacaactcgccatgtatatgatattgctgctcagcatattgtgagtggtgccatgcaaggaatcaatggaactgtttttgcatatggagtaactagcagtgggaaaactcacaccatgcatggagaacaaaagtcacctggaatcattccattggcagtaaaggatgtattcagcattattcaagatacacctggacgagagtttcttctgcgggtttcgtatcttgaaatttacaatgaggttatcaatgatttactagatccaacagggcagaatctcagaattcgagaagatgcacagggaacttatgtggaagggatcaaagaagaggttgttttatcacctgcacatgcgctctctctaatagcatctggagaagagcacaggcatgttggatcaaacaacttcaatcttgtcagcagtaggagtcacactatcttcacgttgacaatcgagagcagcccctctggtgaaaatgaagcagaagaagtcaagttgtctcagttgaacttgattgatcttgctgggtctgagagttccaaaactgaaacaactggtttacggcgcaaagaaggttcatacataaacaagagtttgctcacccttggaactgttattgctaaacttacagatggtaaggccactcatattccttatagagactcaaagctcacacgcttacttcagtcttctttgagtggacacggacgcatatcactcatttgcacagttacacctgcatccagcaacagtgaggagacacataacacattaaaatttgcccacaggagcaagcatattgagataaaagcttcccaaaacaagataatagatgagaagtccttaataaagaagtatcaaaaggagatatccagcctgaaagaagagctacagcaactcaggcgtggtatgatgggaaatggtggtattctccctacggatcaagaggatcttgttaatttaaaacttcagcttgaagctgggcaagttaaacttcaatcgaggctagaacaggaagaggaagcaaaagcagcattgatgggtaggattcagaggctaacaaaattaatattggtatcaaccaaaagttcgatatcctcaaatgtttctggaaagactaacttccgccgacggcattcatttggagaagatgagcttgtgtatttgcctgatcgaaagcgggaatactttgtagatgacgatgatgttagtcttgattcagaactttcgcttgaagggaaacttgatctgaacaatccagaggagtcagccaggtttggcagaaggaaccacaaacgtggaatgcttggctggtttaaactaaagaagtccgaccagttatcagggctatcatccagtgtagacggtgatagcactgctagcgtctcaccttcgtgctctaaatcatcacaacaaaaacacttgctgcttgacctgaaggatggtcgaaggaaatctatgactaggaaaggagatgacccatcacttgctgattcttttcttgaaaggactcaagccggtgatttatttagtgctgcgcccagagtacggcaccctctgccgagtggaacaaccatcgtggatcaaatagatcttctacaagagcaggtcaaaatgctggctggggatgttgcactttgtacaagctcactcaaaagattgacagagcaagcagccaacaaccctgataatttgcaaattcaggagcaaattgtgaggttgaaagatgaaatcgcagaaaagaaatcacatatacatatgctagagcagcggatggtacaatcactggaaactacagaaggcccagcaattaagacagagttatcccagaccttttcaaagttgagcacgcagctgagtgagaagacatttgaactggagattatgtctgcggataataggattcttcaagaccagctacaagcaaaggtaacagaaaatgcagaactccaagaaacagttgcacacttgaggcaagaaatcagtaatttatcgaaggctgcaaaaagcgaggatagttttgctagcgtgcagtctagtgaaccatcaacagcaagcactgatactagggatcaaacaaatgaaatctcaaaccgtgcaaatatgtcctctagaacaacggacttaaatgagtcaggatttatatctcaagtgctcaaacaggcttcagaaattgaaagtttgaaacaagaaaatctgaggttggtggaagagaaggatggactggaaattcatagtcaaaagttggcggaggaatcatcctatgctaaagaattggcttctgctgctgcaattgaacttaagaatttggcagaagaagtcactaggctttcttatgaaaacgcaaagctgaatgcagacttagctgcggcaagagagctaaatgcatcgatgtcaagaagtaacatccaccctgacccaaagcgtcgtgatcatgagagcggaattttagttgaggagttgcagaaagagttggttgctagttgtcaaagggaggccgtattagaggacacactatctcaaaaggaccgaagagagagtgagcttctaaagattattgatgatgcaaaatgccgtgagcatgagttgaaaaatgaactggcaagcatgggggcccttctttcgaagataaagaaagaaaactctcaacaggatgtatttgaatttaaagcaaagcaaaacggctttcactcatccaagactgatagtggtagactggtaagtgaaatgcaagcatcggataatgggtgctgggatggcctcagtacttttgaagaagcaagagctgcatacaattttgaaagaatgcgctgcaaggaattggaaagcatcgtgtccaaactaaagggtgaggacctcaggggcctagatgttaaagttcttgaagaactacaaaacttccatgtagaagcactgtcaaggatctgccaagaaaagatggcaagtcaggcgctatagcaaaaacctttcctgagacgagtagccgctttcatgcaggccagagcttatttctcagatgtcccttcaacttcatgcccatctctctgaagttccactcacaatttcacatagttgctgctactgcaaccgggacaaccttgattagtccgcctttggacactgattcctgcgtttaaccgacagaaaacgaagcaaaatgcggttagatagcaggcgctaatggtcactgagtagttagcatgcagatactcccctcctgtacagctttttattaaagatagtagcagtggtattgtaggagtacccggattgtatttatactggtaatatatgagccggtaaaacccgaaggtggtgtttctgttatacctggaccgtgctctgcccttcaaaaactgtagtaaacccgaacggacgctgatgtagctttggcaaacttgctgttgatgtgatgcatgactgccgtgcacctggtgccgtgcccgacgatggttgactccacccaatcagccaagagcacggcacggca

SEQ ID NO: 6270 - DNA, 2480 bp, Zea Mays
acataaaaccctcgttgctgcctgtacatcccgtactcccctagcctgcctcggtgcgccgccgccacacctccaccatggctgcgaccacgccggccaccgacccgccggatgccttgcttgcagtaacagctgatgctcccactcctgctcgtcccaccccggcggagctggtagcccgcgccgtcgcccccgtcaagcccgccttcctctgcccgcctcccgtccgtgaggcacccaaggaggagggtaaagccgccggcggcggggccgtcgtaaaggtggagaagaagtccaagcgccagctcaagcgcgagcggcagcaggaacaaaaatctacttctcacctttgtatcgaagtagggaaaagtggaaatgtggactcatgcaaatatggtacttcttgtcatttcagccatgacataaatgcttatttgtctcagaaaccagctgaccttgaaggcacatgcccatttactgcactgggacatttgtgtccatatggactaacttgtcgattccttagtacacataaggataaccttgctcctcaaaatcatccagagggaaattgtgagagaaatcctttgagcaaagaaattcaaaagctcttatggaagagcaaatataaatttcccaaggccagtgcccagatcaaacttcttggtcttaaggatggaaacaagaataaagcagaagcagtaaatgatgataatccagatgaaacatgtaacctaaatgataattcagggggagaacctttagttgttgactcagttgaatctgtggagccaagggcatcaaagaaatcaaaggttgaagttgatgaaactcgggataatgaaatcaaaggtcctaccactggtattcatgacaatgaggctgaatctgaagttaattcaatcagtggagtaaaagtttcctcaaataaccaaagttcctgcaaagttgatctgatcacgatacctcatttacgtgaaaagaaaattatagattttcgagagaagctgtaccttgctcccttaaccactgttggtaatcttccttttcggaggctctgtaaaaccttgggagctgatgttacttgtggagaaatggctatgtgcacaaatcttttgcaggggcaagcttcagagtgggctttgctgcgacggcatccatcagaggatttgtttggggtgcaaatttgtggaccgtatccagatactgtagcacgaacagttgaacttgtggataacgaatgttcagttgatttcatagacataaatatgggctgcccaattgatatagttgtcaacaagggtgctggatcatcattgctcacaaagcctatgaggattaggagtattgttcaagcggcatcaactgttactgaaaaaccgttaactgttaaggtaaggacagctttctttgagggcaggaatcgtgctgattctttagtttcagatatctacaactggggtgcttcagctataacaatacatggtcgatcacggcaacaacgctacagcaaacttgctgattgggactatatctaccagtgtgcacagaaggctcctgactatttgcatgttattggaaatggcgatgtattctcctttactgactggaacaagcatgtttcagactgctccaaaatttccacttgcatgattgctagaggtgcacttatcaagccttggttatttactgagataaaagaacaaaggcactgggatatcacatctggcgagagattaaatattcttaaagattttgtgcgttttggtctggaacattggggctccgatttcaaaggagttgagacaacacgccatttcctcctagaatggcttagttacacctgccgctacattccggtgggtctgctggatgtgattccacaacgattgaactggaggcctccaagctactatgggcgtgatgacctcgaaaccctgatggtctcagattcagcagctgactggataaggatctcagagatgttgcttggcaaagttccagaagggtttaccttcgcaccgaagcacaagtccaatgcctatgaccgagcagaaaacggttaaacctttgttccgttgttcgtcagggcaggaactcagcaacaccagtggtgggttctcttgaggatcagagacaactactgaggtccatgctgcttgaacccatcatgttgtgtaacatgattttatatttagccaaatggtgattgtaccaatagtttaagtatagactatagagcacctgataattgaattgctcaattctcctctattcatgctagctctagcatcttacttatccatatacctatatttaaacttactctatgaacaatgcagtttacagtgcaaaacattggtttgagtggctatatgggtgaactattggatacggtctccgaaacaatatctaatgtatgaacgtacgttttctcagctttcccaatggtttaatgctgggcagagggctcaaatctg

SEQ ID NO: 6271 - DNA, 1440 bp, Zea Mays
tccatctagccagcccaatccacatcaccagcccacctcgtcgaactcgtcgtcttccgtccatccatcgtcgtcggcggcggcggagagagagcagatgacgtcctcggggacggtcgcgcagcagctgccgcggacggaggcgcggtcgctgtcgggtcacgagggagcggtgttggccgtgcggttcaaccgggacggcaattactgcctgagttgcggcaaggaccgcactctccgcctctggaatcctcacacaggcgcccaggtcaagacctacaagtcccacgcccgcgagggataacgccaaactggtgtcctgcggtgccgacagacaaatcttctattgggacgttgcctcgggccgcgtcatccgcaagttccgcggccacaacagcgaggtcaattcagtgaagtttaatgagtacaatgctgttgtagtctcagctggttatgaccgtacggtgcgtgcatttgactgcaggtctcaaaacaacgaccctattcagacaattgatacttttcaagatagtgtaatgtcagttaacctaacaaagacagaaataattgctggcagtgttgatggtactgtccgggcatttgacattcgcatgggtagggagactgttgataatctagggcatcctgtgaactgtgtatcattatcaaatgacaacaattgccttttagctaactgtttagattctactgtgcggcttctagacaagtcatctggagaactgttacaggagtataagggacatacgtgcaagtccttcaagatggattcctgtctgacgaatgatgatgcatttgttgttggcgggtctgaggatggttatattttcttctgggagttggtggatgcacctgttgttgcaagattcagggcacatagttctgtggtaactagcatcagttaccacccaacaaaggcctgcatgttgacgtcttctgtggatggctctattcgtgtttggacctgaagactcttgaatggttgatgtgctattcgtactgttcctccaaatcatccagttatctagcagcaaggattcgacagtatgaaagatgaacgcatgtctaacctaatgggattcatacacgccttgctgcagagagaagaaaatgcgctgctgttgggctgtgtagcacacagctctgaggccaaaaccttttgaagccggtattctgtcatctatgaagtttgtgagccttttagatgattttggattgtacctgaagacaacttgtgagttgcatgaaaagtaacatttgttacgaagtttcttactgcaagtgtcttgtctccatgttactgaagacaacttatgggggttgagaaatgtatcttctagttcctttttttttgttttgatttggaatggaatgactaatgagttcatcgaccatcacatcatcctcacaagctaatactcc

SEQ ID NO: 6272 - DNA, 1767 bp, Zea Mays
tccatctagccagcccaatccacatcaccagcccacctcgtcgaactcgtcgtcttccgtccatccatcgtcgtcggcggcggcggagagagagcagatgacgtcctcggggacggtcgcgcagcagctgccgcggacggaggcgcggtcgctgtcgggtcacgagggagcggtgttggccgtgcggttcaaccgggacggcaattactgcctgagttgcggcaaggaccgcactctccgcctctggaatcctcacacaggcgcccaggtcaagacctacaagtcccacgcccgcgaggtccgcgatgtgcactcttcctcggataacgccaaactggtgtcctgcggtgccgacagacaaatcttctattgggacgttgcctcgggccgcgtcatccgcaagttccgcggccacaacagcgaggtcaattcagtgaagtttaatgagtacaatgctgttgtagtctcagctggttatgaccgtacggtgcgtgcatttgactgcaggtctcaaaacaacgaccctattcagacaattgatacttttcaagatagtgtaatgtcagttaacctaacaaagacagaaataattgctggcagtgttgatggtactgtccgggcatttgacattcgcatgggtagggagactgttgataatctagggcatcctgtgaactgtgtatcattatcaaatgacaacaattgccttttagctaactgtttagattctactgtgcggcttctagacaattctcctcctccctgagaaaacatccagctgctgctgctgctgctcctccttgaccaacaagatgatgcagcttctcgggaagatgaagaacagccactgcaatctgatggaggatcaacggaaatggaagaatctgtcccaggtggtggtggagggcaagctactgctgatgcattccatttggatgaggatttgctactttaggtcttgagtttgattagctaagtacctaccgctgtttgagtttgaatgtttgattacttacttctgttcagactttaccctttagaggtgctactcaaggtcatctggagaactgttacaggagtataagggacatacgtgcaagtccttcaagatggattcctgtctgacgaatgatgatgcatttgttgttggcgggtctgaggatggttatattttcttctgggagttggtggatgcacctgttgttgcaagattcagggcacatagttctgtggtaactagcatcagttaccacccaacaaaggcctgcatgttgacgtcttctgtggatggctctattcgtgtttggacctgaagactcttgaatggttgatgtgctattcgtactgttcctccaaatcatccagttatctagcagcaaggattcgacagtatgaaagatgaacgcatgtctaacctaatgggattcatacacgccttgctgcagagagaagaaaatgcgctgctgttgggctgtgtagcacacagctctgaggccaaaaccttttgaagccggtattctgtcatctatgaagtttgtgagccttttagatgattttggattgtacctgaagacaacttgtgagttgcatgaaaagtaacatttgttacgaagtttcttactgcaagtgtcttgtctccatgttactgaagacaacttatgggggttgagaaatgtatcttctagttcctttttttttgttttgatttggaatggaatgactaatgagttcatcgaccatcacatcatcctcacaagctaatactcc

SEQ ID NO: 6273 - DNA, 2103 bp, Zea Mays
tccatctagccagcccaatccacatcaccagcccacctcgtcgaactcgtcgtcttccgtccatccatcgtcgtcggcggcggcggagagagagcagatgacgtcctcggggacggtcgcgcagcagctgccgcggacggaggcgcggtcgctgtcgggtcacgagggagcggtgttggccgtgcggttcaaccgggacggcaattactgcctgagttgcggcaaggaccgcactctccgcctctggaatcctcacacaggcgcccaggtcaagacctacaagtcccacgcccgcgagggataacgccaaactggtgtcctgcggtgccgacagacaaatcttctattgggacgttgcctcgggccgcgtcatccgcaagttccgcggccacaacagcgaggtcaattcagtgaagtttaatgagtacaatgctgttgtagtctcagctggttatgaccgtacggtgcgtgcatttgactgcaggtctcaaaacaacgaccctattcagacaattgatacttttcaagatagtgtaatgtcagttaacctaacaaagacagaaataattgctggcagtgttgatggtactgtccgggcatttgacattcgcatgggtagggagactgttgataatctagggcatcctgtgaactgtgtatcattatcaaatgacaacaattgccttttagctaactgtttagattctactgtgcggcttctagacaaccggctggctgctgatccattgttcctgggctcctggcgacttctcagttctcctcctccctgagaaaacatccagctgctgctgctgctgctcctccttgaccaacaagatgatgcagcttctcgggaagatgaagaacagccactgcaatctgatggaggatcaacggaaatggaagaatctgtcccaggtggtggtggagggcaagctactgctgatgcattccatttggatgaggatttgctactttaggtcttgagtttgattagctaagtacctaccgctgtttgagtttgaatgtttgattacttacttctgttcagactttaccctttagaggtgctactcaaggtgattgttgctgtaatgctgtttgagactttgagtactgctaaatagctactactgtttgagtttgagttaaatactgctgtagttttgattacctactgctgtttgaagtatattatatagtatataactatacactatagtgtatataactatatatatttatatatgtcctgattagtacaggatgtttaggactactaggtggacgacctgtcaccgattaatcggcctggtcgacgtcctaatcatgattactcgcctaatcggttaccatcaacgacatggataccaggcgacttgaaaaccatgtcatctggagaactgttacaggagtataagggacatacgtgcaagtccttcaagatggattcctgtctgacgaatgatgatgcatttgttgttggcgggtctgaggatggttatattttcttctgggagttggtggatgcacctgttgttgcaagattcagggcacatagttctgtggtaactagcatcagttaccacccaacaaaggcctgcatgttgacgtcttctgtggatggctctattcgtgtttggacctgaagactcttgaatggttgatgtgctattcgtactgttcctccaaatcatccagttatctagcagcaaggattcgacagtatgaaagatgaacgcatgtctaacctaatgggattcatacacgccttgctgcagagagaagaaaatgcgctgctgttgggctgtgtagcacacagctctgaggccaaaaccttttgaagccggtattctgtcatctatgaagtttgtgagccttttagatgattttggattgtacctgaagacaacttgtgagttgcatgaaaagtaacatttgttacgaagtttcttactgcaagtgtcttgtctccatgttactgaagacaacttatgggggttgagaaatgtatcttctagttcctttttttttgttttgatttggaatggaatgactaatgagttcatcgaccatcacatcatcctcacaagctaatactcc

SEQ ID NO: 6274 - DNA, 2203 bp, Zea Mays
ataacctcgcgtctgcgacacaccaacccgaaccttaggtagcgtcccggtccgcggtgccagccaccgcgtgccgccgcctgggtcttccctcctcagctccttcctgagctcggcggtggaatcacgggaggaggcggaatagtaagctgaggcggggccatcgggctccgtggttgaggatgcctgtgctgcgtagcgcggcgcgaagggcccgagaggcgcaggggcatccggcggcagctgatgaaaaagctccggaggcggcggcagcagcattagcagcagccccggcaccaccgccggtggagaagaggcggagagtgacgagggcggaggagagggagcgggaggagatcaggcctagggaggtcgtcgcgggagaaggcggcgacgacgagggggagcgtgggatggacgaaccggacagcgcggcacgcagcgccgacaagctgacattcgatgatgaggacggccccactgtccctgaagcggtccaggtgggtagttcaccgaagtatagagtcgacaggaagcttgggaaaggtggttttggccaagtatatgttggccaccgcatgtcagctactggtccaggtgccgtcgaggtggcactgaagtttgagcataggaccagtaaaggatgtcactatggccctccttatgaatggacagcttacaacgccattggtggcattcatgggtttccccgagtccactacaaaggacgccaaggggattactttgttatggttatggatatgctcggacccagtctgtgggatgtctggaataataaatctcacataatgtcagttgagatggtttcttgtattgctattgaagcaatctgcatacttgagaaattacattcaaaagggtatgttcatggcgatgtcaaaccagagaatttcttgctagggactcctgggacacctgaagaaaagaaactcttccttgttgatcttggcttagctacgaagtggaaggatattgcaacagggcggcacgttaaatatgatcagcgttcagatgttttcagttcatccacgagaggatcactaggccgtggtcaagcatttgatgcgctaaatcaagggcctgatcagggagtcgcctcccccaagatctgtggagaggaaatgcagctcaagggcttcagcgacagcgacatggggaacatttcgctatgctagtgttcatgcacatcttgggagaacaggtagcaggagggatgatttagaatctctagcatatacactagtctttcttctacgaggatgtctaccttggcaaggttatcagggtgacaacaaaagcttccttgtctgcaagaagaaaatggccacctttccagtatctctctgttgcttttgcccacatcctttcagaaagtttgtagagtatgttgtcaacttgaagtttgatgaagaacccgactatgcaaaatgtgcatcactttttcatagtgtactaagtgtagtaggttcaaatccagatgtcagaccaattaacactgatggtgctcagaagcttatacatcaatttggtcaaaagagaggccgattttttatagaggaagaagcagatgaacaaccaaagaagaagatcagggtgggaatgcctgcaacacagtggataagtgtctataatggcagagtacctatgaaacaaaggtaccactacaatgtttcagattcaagagttggacagcacatcgaaaaagggaatgccgatggactgtttatcagttgcataacatcttgttccgatctatgggctctaatcatggatgctggaactggtttcacatcccaaatttatgagctcattccacatttccttcacaaagaatgggtaatggaccaatgggagagggactactatataactgcggttgctggggcaaacaatggcagctcgttggtagtgatgtctaaaggcacaaagtacacacaacaatcctacaaagttagcaatagtttcccctacaaatggataaacaagaaatggcaagatggtttctatgtaacttccatggcaactgctggaagtaggtgggctgttgtcatgtctcataatgctgggttttctaatcagccaatgtaaggaaggatgttgcaaacagagtagttgcatgcctcacaagatctctatcatttgtcttggtcctcatcaagtcatgaatcattccatatccata

SEQ ID NO: 6275 - DNA, 2633 bp, Zea Mays
ataacctcgcgtctgcgacacaccaacccgaaccttaggtagcgtcccggtccgcggtgccagccaccgcgtgccgccgcctgggtcttccctcctcagctccttcctgagctcggcggtggaatcacgggaggaggcggaatagtaagctgaggcggggccatcgggctccgtggttgaggatgcctgtgctgcgtagcgcggcgcgaagggcccgagaggcgcaggggcatccggcggcagctgatgaaaaagctccggaggcggcggcagcagcattagcagcagccccggcaccaccgccggtggagaagaggcggagagtgacgagggcggaggagagggagcgggaggagatcaggcctagggaggtcgtcgcgggagaaggcggcgacgacgagggggagcgtgggatggacgaaccggacagcgcggcacgcagcgccgacaagctgacattcgatgatgaggacggccccactgtccctgaagcggtccaggtgggtagttcaccgaagtatagagtcgacaggaagcttgggaaaggtggttttggccaagtatatgttggccaccgcatgtcagctactggtccaggtgccgtcgaggtggcactgaagtttgagcataggaccagtaaaggatgtcactatggccctccttatgaatggacagcttacaacgccattggtggcattcatgggtttccccgagtccactacaaaggacgccaaggggattactttgttatggttatggatatgctcggacccagtctgtgggatgtctggaataataaatctcacataatgtcagttgagatggtttcttgtattgctattgaagcaatctgcatacttgagaaattacattcaaaagggtatgttcatggcgatgtcaaaccagagaatttcttgctagggactcctgggacacctgaagaaaagaaactcttccttgttgatcttggcttagctacgaagtggaaggatattgcaacagggcggcacgttaaatatgatcagcgttcagatgttttcaggggaacatttcgctatgctagtgttcatgcacatcttgggagaacaggtagcaggagggatgatttagaatctctagcatatacactagtctttcttctacgaggatgtctaccttggcaaggttatcagggtgacaacaaaagcttccttgtctgcaagaagaaaatggccacctttccagtatctctctgttgcttttgcccacatcctttcagaaagtttgtagagtatgttgtcaacttgaagtttgatgaagaacccgactatgcaaaatgtgcatcactttttcatagtgtactaagtgtagtaggttcaaatccagatgtcagaccaattaacactgatggtgctcagaagcttatacatcaatttggtcaaaagagaggccgattttttatagaggaagaagcagatgaacaaccaaagaagaagatcagggtgggaatgcctgcaacacagtggataagtgtctataatggcagagtacctatgaaacaaaggtaccactacaatgtttcagattcaagagttggacagcacatcgaaaaagggaatgccgatggactgtttatcagttgcataacatcttgttccgatctatgggctctaatcatggatgctggaactggtttcacatcccaaatttatgagctcattccacatttccttcacaaagaatgggtaatggaccaatgggagagggactactatataactgcggttgctggggcaaacaatggcagctcgttggtagtgatgtctaaaggcacaaagtacacacaacaatcctacaaagttagcaatagtttcccctacaaatggataaacaagaaatggcaagatggtttctatgtaacttccatggcaactgctggaagtaggtgggctgttgtcatgtctcataatgctgggttttctaatcaggtggttgaactggatttcttgtatcccagcgagggaattcataaaaggtgggacaggggttactggataaccgcagctcctgctacttgtgatcaggctgctttcgttttaagtgtaccaaggaggcgacttacagatgaaacccaagagacactgaggacaattaatttccctagtaaacatgtgaaggttaacaagcctgcagtagtacctcattcagtatcttatctgcaactgacggctggttctgacaaaatgtactcttgtttcattgcaggacaaatggtctaagaatctctacctagcatcggtatgctatggtcgtactatatcctagggatcttttcgagcggaatcctgccagcaccatcttttgacgtaggtagttcactgtagcagctcctatgtgcgggtatcctgagtcgtgttgcgaaggcgtctgctatcgttcttgattatagactagcatatcatgtacaacagtacatgttttgtactacctctgttctcgaatgtttgtcgcctgtgttgaatgcaatttttgtggagctgttagagcaggagatatccagagccaccatctgtatttttttctctgaaatttggtttttgatttaaagctggtaccctctgatagagcaagacgttctctgtatcaagtattcc

SEQ ID NO: 6276 - DNA, 2241 bp, Zea Mays
aaactccaccgggttttaataaaagccacggactctgagtctctgacgctgccttttgctctccccttccaccccgtctgcccgcgcgcgctgtctcgtggcgacaactgggcgaccgccgccgccgtcgctgccgccgctacgccaagaagctaggtcttcatcggtcccttcgtcgagattttctccggagacaagcacccagcaggggactacaagattgattttgatggattatgacaagtctagaagaagtaactccaaaaagaggagacattccaattctgatgacggaaagaggaaacggttgagctctaggcatgatgacacatctatgtcctctgagccaattgaaaccatctacaggatattgtgcccggcaaaaaagataggcagtgtcttgggaagaggtggtgacattgttaaggcccttagagaggaaactaaagccaagataagggttgccgattccattcctggtgcagatgagagagtaattatcatcttcaattaccaaaatcaacctgaacttactgatgaagcagctgaaaaacaaattagtgatggcttagggaacatgaaaccccattgctttgcccaagatgccttattgaagatacatgataagattgtggctgatgaaatttatgatgaagtcgctcatgatgaaagttctgatgatgtcactgctcgaattttggttcaaggcaatcaagttggctgccttctaggaaaaggtggctccattatacaacaactacgaagtgatactggtgctgggatccgtgtcttgtcatctgaaaaccttccccagtgtgcacttcaaagtgatgaactggtgcagatatctggagcaccatctcttgtaagaaaagctctatatgaaatatctactcgtctccatcagcatcctcgtaaggaaaatagacctcttgaacaaataatagatgcaagcacacaaaggaaacacgagtctccaacactgcaacatgaaaatccaatgttgccgcacctgcatagtcatcatccacctccaatacccctgcttgacccatacagaagtggacctcagtatcctgttagtgaaactgaagagttttctatcagaatcctatgtgcttctgagctcattggttcagttattgggaaaagtggggctaatgttaggcgggtagagcagcagactggtgctcgcattaaagttcaagagattgacaaagatgcttctggagaaaggctgatcattgtttcatctaacgagataccaactgaaccaatatccccaacaattgaggcactcattttgctccacgataaagtgattactgaaatgagaagacgaactggggctgaaattcgagtttactcgaaggcagataaaccaaaatacttgtcttttggtgatgaacttgtgcaggctgctggacaaattcatggactggaggactatagaggactgccaagtgcttctggaaggttctcgagcactattgaactaaggattccaaatagttctttggagtctattgttggtgttggcggggtcaatttagcagagatacgtcagatttctggtgcaagactgaggctacatgaggctcatgctggttcttctgagtctgtggtggagatccagggcacactggaccaagcaaaagctgcgcagagcctcctggagggctttatcagcgcgaacagcaggcagcagcaatcccattcttctcgcatgccactttacccaagatggggatagcttctggttgtggcaggggaaaaccgagtcagcagggttggctggagttatctcagactgcagattagatgcatcgatgatgttaatggtagctgtttaaattgaccgtgcaagcatgataacttatattatgccataggacaagtaatgctgattctctcatgaaatactaagtgacaagctgtctctgtagttgtatttgtttctgaatgtttgaaccctactgttacaacggctgctattttaggtcagatttcagaggccggataattatgttatctgcagagttgggccaaaaaaaaaagctcaatctggttgagactggcttcacccatgccgtttcatttttagaagttacagcatctctgcaaaatatatgggtaaggcctcttggaacgcatgaatttcatagaaatcagtttattttctcagaaaaaacatgggaaacaggggaaaaaaatcccacgttccaagaggcctaaagtttg

SEQ ID NO: 6277 - DNA, 2305 bp, Zea Mays
cacggactctgagtctctgacgctgccttttgctctccccttccaccccgtctgcccgcgcgcgctgtctcgtggcgacaactgggcgaccgccgccgccgtcgctgccgccgctacgccaagaagctaggtcttcatcggtcccttcgtcgagattttctccggagacaagcacccagcaggggactacaagattgattttgatggattatgacaagtctagaagaagtaactccaaaaagaggagacattccaattctgatgacggaaagaggaaacggttgagctctaggcatgatgacacatctatgtcctctgagccaattgaaaccatctacaggatattgtgcccggcaaaaaagataggcagtgtcttgggaagaggtggtgacattgttaaggcccttagagaggaaactaaagccaagataagggttgccgattccattcctggtgcagatgagagagtaattatcatcttcaattaccaaaatcaacctgaacttactgatgaagcagctgaaaaacaaattagtgatggcttagggaacatgaaaccccattgctttgcccaagatgccttattgaagatacatgataagattgtggctgatgaaatttatgatgaagtcgctcatgatgaaagttctgatgatgtcactgctcgaattttggttcaaggcaatcaagttggctgccttctaggaaaaggtggctccattatacaacaactacgaagtgatactggtgctgggatccgtgtcttgtcatctgaaaaccttccccagtgtgcacttcaaagtgatgaactggtgcagatatctggagcaccatctcttgtaagaaaagctctatatgaaatatctactcgtctccatcagcatcctcgtaaggaaaatagacctcttgaacaaataatagatgcaagcacacaaaggaaacacgagtctccaacactgcaacatgaaaatccaatgttgccgcacctgcatagtcatcatccacctccaatacccctgcttgacccatacagaagtggacctcagtatcctgttagtgaaactgaagagttttctatcagaatcctatgtgcttctgagctcattggttcagttattgggaaaagtggggctaatgttaggcgggtagagcagcagactggtgctcgcattaaagttcaagagattgacaaagatgcttctggagaaaggctgatcattgtttcatctaacgagataccaactgaaccaatatccccaacaattgaggcactcattttgctccacgataaagtgggcaggtgattactgaaatgagaagacgaactggggctgaaattcgagtttactcgaaggcagataaaccaaaatacttgtcttttggtgatgaacttgtgcaggttgcagggcctccagctattgcaagaggagccctcacagagattgcttcgaggcttagaactaggactttgagagatacaagctgctggacaaattcatggactggaggactatagaggactgccaagtgcttctggaaggttctcgagcactattgaactaaggattccaaatagttctttggagtctattgttggtgttggcggggtcaatttagcagagatacgtcagatttctggtgcaagactgaggctacatgaggctcatgctggttcttctgagtctgtggtggagatccagggcacactggaccaagcaaaagctgcgcagagcctcctggagggctttatcagcgcgaacagcaggcagcagcaatcccattcttctcgcatgccactttacccaagatggggatagcttctggttgtggcaggggaaaaccgagtcagcagggttggctggagttatctcagactgcagattagatgcatcgatgatgttaatggtagctgtttaaattgaccgtgcaagcatgataacttatattatgccataggacaagtaatgctgattctctcatgaaatactaagtgacaagctgtctctgtagttgtatttgtttctgaatgtttgaaccctactgttacaacggctgctattttaggtcagatttcagaggccggataattatgttatctgcagagttgggccaaaaaaaaaagctcaatctggttgagactggcttcacccatgccgtttcatttttagaagttacagcatctctgcaaaatatatgggtaaggcctcttggaacgcatgaatttcatagaaatcagtttattttctcagaaaaaacatgggaaacaggggaaaaaaatcccacgttccaagaggcctaaagtttg

SEQ ID NO: 6278 - DNA, 2955 bp, Zea Mays
ctatctttcgcgtacagtttgttgtgctgtggcgccggccagcagcaaggcctggtttggagggcggtgggctgggctgggctgggctggtgatctcggcttgtgcgtgcgtgacttagggcctagagatgcaaaaaaagaagggaaaaaaaatgattcgtgactctcccgaggtgcggtgcggccgcaccccgcatgccattgcggtattgccaacgtcgcttcgcccctgaatccctccgctaccgcgcctagggttttaggcttttagcacacaccggcggcgctgcataccaagggcttcccctgcccgcgccgatgccgcgcaagcacgcgccggcgtttacgccggaggcagcctccgcctcttcgtcaggcggggctggccagccgcataacctccccgtgcttcaggcgaagatgaagcgtgacccggagggctacgaggaggagctccgccagctccaccgccacttcgagtcctcggtgttcctattccagcagcaggcggcgctggctacaacctcgtcctcgggaggcggcggggaggtggccaaggagctcggggacctcgccctgttccttgcccacgtcgcgcctttctacccggatgacctcgccgatttgcccgaccagattggtggcttgctcgacaccaacgcgcgtgggctgccgccggggctcaggtctcacctcgtgcaggcgcttgtattgctggtgaatcggaagattgtcgatcttgaggacacaatggagttattcatggagcttcaagttattggagatcgagctgtaaaaaagctagcattttcgcatattgtacacagtatcaggaggatgaaccagaagcacaagaatgaatcgacaaatcgtaaactgcaaaacgtcctttttaaattcttacaggctgaagaagagtcacgagcaaagagagcatttactatcctttgtgatcttcaccgtcggagggtctggtttgatgaacgcacaacaaatgcaatatgtgatgcttgtttccacccttcctctaggattatgatagctgctatttcatttcttcttggatatgaaaatgctccacaagaggatgatagcgacgcatcaagcagtgaagatgaagcagatcaaaacccacaaattcttctcagtaaacaggacgtttataaggcaaatcacaagggtacgtctgctagtaaaaaaaagaagaaagctaaattacagcgggtcattcgtagcatgaaaagacaacagcggaaatctgtcgaggaaactggttccagtttctattcacccctgacatatttaaaagatgcccagggttttgcggagaagcttttctctcggttgcagaaatgcaatgagcgatttgaggtaaggatgatgatgctaaaagtaatcgcgaggaccattgggctgcatcacttggttttgttgaacttctacccgtatcttcaaagatacgttcaacctcatcaacgagatgtgacgactctactcgctgcagcagttcaggcttgccatgatatgatgctgttgaaccactgttcaagcagatagtaaatcagtttgtgcatgaccgttctcgtccagaggctattgctgttggcttaaatgttgtgagagagatctgcatgagaatacctttgatgatgaatgaggatctgctccaagacctcgttttatacaaaaagtcccatgagaaagctgtttccattgctgctcgttcgctgatcacattgttcagagagatctgtccttcattgttagtcaagaaagatcgtggccgtcctgtggatccaaaggctcggcccaaagcatttggagaagtcactgttgctagcaacgttcctggtgccgagttgctagatgaaaatatttcttcagaaggggaaagttcggacgatgagtctgatggttttcactccgatgatgagatggacttgacacctgcccctcctggaacagaagaaaatatggagggttcatctgttgcaaacaaacatgatgccgatggagataccaaagaggaagatgacgcatctgatgatgaagatggtacggatcaagatgactccaacagtgatagtgatgaactagacgatgactctgatgtggatgtgggtactgatatatctgatgaagacgaaggtgacgacggtgaactgaaagaaagcataaatggttcagaggatgaagctttagaccagaatgaagacagcgaagaggaagacaagtcaaaaggcagtggctctaaagcgcagaagaggaagttaaatgattatattggacagctaaattctgctgatgcaagccttcgagctctgaagaggttagcaactgccaagaaggctgaagaaccatctgatgaaactggtaaaattctatccgatgaagatttcaaacgcatcaaagaactcaaggctaagaaagaagcgaagctggctttggctcagcatggactaatcaagggtgtcgacacaaggtctgtaacctttaagatgccatcatctgaccagctcagcaggaagcgtgtcgatccacttgagcttgaggctcacgtcaggagaaagatgtccaaggaagaaaggttggcgttggtgaaagctggaagagaggatagaggtccttacatggcaagggcggccgtgaaacagaaaaagaccggtggactgagcaataagcagaagcagcacaagaagaggatgccactggcagcgactagagccaaggcagcacgttcccggcaggagaagaagcagcagcgcaagcgctccgggaatcagttcaggggccgcaaggcgtggaagtgagagagcctctgctgccgctttgcgattcatctagccgaatggccaatttttttgactctttgtatcttcttctgccagttaatgtttccatataataccttgattctatgagaatgcttttccatatttcgccgttggtatctgc

SEQ ID NO: 6279 - DNA, 2555 bp, Zea Mays
ccacactctccccgccactcgcctcctctgagctgcctgcttgttcgagctcccacggctccagtgtccccgacacatcagccgctccctccactcgccttcctttttgacgttccaggatcatccatggcatccaaaccaagtagggaagactagcatcgaacccgctcgtcacaggatccaaccgcctaagaaacaaagcagccgtggcgacctcctagaggagtcaaccaggaacaagaaggcatcaagcatgttgccgtaggtgggagggggagggcaagggcgcaaaaatggcaacaaccatggccggcgatgggatgcggcggcggtgagcgcatggaggaggacgaggcggggacggcgtcgtcgtcgtcgtcgccgcctattgtgcagctgggctacgaccaggtcttgtccgtcctccgtctgctcccgcccgaggccgtgctgtccttcgccgccacctgccgcgttttccgggcctgggcctcctcggacgcgctctgggaggcgctgtgctgccgcgactggggctcccgcgccaccgctgcgctcgccgagcgccggcgcgaccgcggcggcggccttcaggcgccgtggcggagggtctacgccgaggtcgccaggctcggcgcgctgtccgcgcgacgcgtccccgccaggggcgcctcaccgcggccccgcgcgtcgcactcacttaacctcgtcgccggctggctcgtgctcttcggcggcggctgcgagggaggtcaccatcttgatgatacttgggtggcttatgctggaagtggagctggaaataggccgccccctatacttagctggcagcaattagcatccggcactccaggtggtcgtttcagtcattcttgccttctagttggtgacacattagtcttgtttggtggaatcacagatcagggacagcgtttgaatgatacatggactggtcaaatcatctgtgaagagcctcgaaggccacggatctcatggagattgctggagggctctatggaagccggcttggtgatacatggcttcttgatctctcaaatggccttcagtctggcagctggcaccaaataggcaacacatggcctttgcctcaacctcgttctggccactctttaacttggattggcagcacatgcatggtattatttggtggtagaggatcggaatttgaggttcttaatgatgtctggctgtttgatatcagtgatcaataccccaaatggaaggagctaaagtatggcttgtctagtgctcttggtgagcttccttttccacgggttgggcattcagcgatacttgtgttgggtggcaaggtccttgtgtatggcggggaggactcacaaaggcgacgaaaggatgacttttggatcttggatacaccagctctacttcaatacgagtcaggttccaagaaaatgaccagaaagatgtggaagaaactaagaattgatggtcagtgcccaaactaccgatccttccatggggcatgtgtagatgcttctggttgctgtgtgtatatttttggtggaatggttgatggccttgtacacccttcagaagccttgggcatgaggtttgatgggcatctgtatcaagtggagctcgtgctacatctttaggacgtgtttgttcccttgtatatccgagaaattccataggtttgatgtttagcgtctggtgtagtaccatgtcacccaggttttcaacattgtaaggatactccagatggtgcctaacggtcgtttgcgcatggatgcttgcgcacagctgtcgctgatctgtgaaaggaacagtgacccttgtaattttggcctgatgtgtctgcatatggccatatgggtttgaattgtcattcctttgtcagattcatatgttccaaagaatgtccgtcaataccatctggagcagatggttgttttgctacctgatgagccatcatatagtcatgggaagagagagaaagatattcttttccacaataatccaatgcgcgaggattgctcgggaccatatggagctgctattggatctttgcatcccagtcacaggttagctcaatgcaggagaggaccatgtcccattcaacccttgggttcacatgcacagaacctgttatttgtatttatctaatgatggtgcatgagtcatattggcatcaccaagcatcagaatttcttccaaagatgaatgctggtttgatctttggtccaccagcactcgatagtcatgtcttgcgcgcattaattctgcgataacaggaccgatgattgcttggattatttcagattatggaccatttgcagtatgattgctcgagagaaatctggagctcctgttcagatccactttgtgacagcaaggcatgcttcagcatgaagatccatgtatgatacctctgaaaggtttacttaggcctagactcagtttgtctctgattctgtacattcttgatagattatatttgctcaagatgttgtttcagtgcagcattcaactgcaaattttattgctggatgaatcgctatccactagtacat

SEQ ID NO: 6280 - DNA, 2714 bp, Zea Mays
cctcccctggataaaagcaatcctcccgcagaagcagaacgattccggaaagtgtctcgaatcttccaaattctttcccgagacctaaaattctctcgacggattcgcctgatctgacacgcgatctctcggctcgccccaatggccgacaaggagaagttggagtctgaagaggagtacgagagcgacctcgacgacgcacccctctccgcgttgcggcgccgggacgctgcgagcgatgacgaggacgaggatgaggacggagggatgcccttgaggcggaggaaggctggatccgacgcagattccgacgggcagggcgccgccgaggtgtacgacgaggatggcgcgtacgaagaaagcgaggagtacgaggaatacgagtacggggggttcaaagcagggggcggcggagtgcgcggggtggctgtcgaggcggttgccggtgcgggccatgaggaaggcgaggcgggggatggggaagctgaaaaggcgggtgaggcagcgccaggaggcgaagaggaggacaagaaggggaacgaaccctactccgttccgacgaccggcgccttctacatgcacgacgaccgcttccaggagggccgggggcgggggcgggggcgccaaaggagaatggtgaacagtagaaggttatggagtcctaaagatgagcaagcctgggttcatgacagatttgatgagatggacctgcatgattttcatggtgacaatccaaaaagaaagcagggaggtgtctttagaggacgtggtggtggacaaggtggtagaactcgtggtattagccgtgatctcagagtcttgaaggcacttcgtcaaatgcaaacttggtaaaagatgaagctcaaggaccaaattcacgacttgagcaagtccttcctattaagcagactgttgcatcaaacttgaattcagcttcgccaccattttatcctgcgaggtcatccagtcaagagtttgcagttggtcaaggagagaatacacaagaacttagtactaacctagtaagaggaaaggcttttgtgccatcggggcatgttgaagctgctataaatggcatgaatagacctgcactgcttccacctgcatcgtcatcaaatggtccatttcctgtagccactaatcaagtcaatagagattatggccatcctgcacatccaattgttcaacaaaacccagttcaaccccctacacgatctgcacccaggatgcctgcccagatgtttggtgcaacattcagcaatggcagtaaaatatcacctgcacaacctacatcaactattttagatgatgacgctgaaatttcttcacctagtggatcaaacaaatatgattctcggttaacagttaaaggacaacctgatgaccaaggagaagagcgagcttcgtttctctatggtggggctcgtgttcttggggctacaagcgcaatgggaatcacacttggtgatcaaaattttcatggtaccccagcattgctgccaggtttgtatcatggctcagtaaaacatgagttcaataacatgctctgtgaagcgtatcaaagaaataaactactttgaagcttaccataaactagtgaagttatgcagtttggaggtcagcgaccagttggacgtggtgttccttcaattggtatggctctgccaggatttgtgtctcaacagcaacttggtatcaataattctgagatgacttggctaccaatattgactggtgcctctggagctctaggagcaccttatggttcaccttatatagccgtcgatggaagttattactctcgaccgcctgaacaaccatcttcatcagtttctaatagagaatctagtgcaaataatgcttcttctctgaagtcccaagaaattacagaggttgcaggcgacgcaagaactcaacaccaaaataaacctcgtcgatactcggagatgaactttggccagtgaacatagtgatgatagtaaatcagtgagggttcattggagctttggatccaagtaagacttgtgcaagagaccctggccttaccaagtgcttccagcatttcactgtctgatgtctagcactatcttgtgacccaaacgaggtttgacaggaggtgttcaaaccatcgctgtggtcatttgctgtgattattctgacgggctggtgttgttacaatcattaggtgagattttctggtactctacgtcaccacaataccagacggtcggtccgtaagtgtgaaggtcttgatggaaatcgtgaggacggaggtctcggtcgtactgcaaagctcgtgtccccgctgtacagtgtacatcacgtctctgactgtgtttgggtgtgcgctgcctctgcctacgaactcttcggtggttgtcgcatttttgaactgacaaataaaaaagaacgtgttgagcaccaaattgagaagggcggacggtccagcccggtccggacagtccgcgcctgtgggctgcacggtctgcgcaagcgcagaacagattagggttccaagttttgtgctacagttgttagctagattcgcaggattcgcttggaaattagtttgtaaatggttcagtccccctcctctataaataaagaggtatacggtcgatttgtaataatcaatcgaatcaataaaacttctatctcgcatttattttctgtgcaattaggagtggttctagtctatttctagtttagtctct

SEQ ID NO: 6281 - DNA, 3000 bp, Zea Mays
ctggtcagaaaaaagttgaaccaaacaggcacttaaaatctcaatgcaacctctcctcccctggataaaagcaatcctcccgcagaagcagaacgattccggaaagtgtctcgaatcttccaaattctttcccgagacctaaaattctctcgacggattcgcctgatctgacacgcgatctctcggctcgccccaatggccgacaaggagaagttggagtctgaagaggagtacgagagcgacctcgacgacgcacccctctccgcgttgcggcgccgggacgctgcgagcgatgacgaggacgaggatgaggacggagggatgcccttgaggcggaggaaggctggatccgacgcagattccgacgggcagggcgccgccgaggtgtacgacgaggatggcgcgtacgaagaaagcgaggagtacgaggaatacgagtacggggggttcaaagcagggggcggcggagtgcgcggggtggctgtcgaggcggttgccggtgcgggccatgaggaaggcgaggcgggggatggggaagctgaaaaggcgggtgaggcagcgccaggaggcgaagaggaggacaagaaggggaacgaaccctactccgttccgacgaccggcgccttctacatgcacgacgaccgcttccaggagggccgggggcgggggcgggggcgccaaaggagaatggtgaacagtagaaggttatggagtcctaaagatgagcaagcctgggttcatgacagatttgatgagatggacctgcatgattttcatggtgacaatccaaaaagaaagcagggaggtgtctttagaggacgtggtggtggacaaggtggtagaactcgtggtattagccgtggtaacttcagaggcagcagaactcgaacatactatcatgatggtagcaagaactacagctatgttccaaaggaatctcatgcataccgtgataacaccaagaatgcccatcattcttcacacattaatggaaagaatagagttccaaaaccatctcgtgaccactatgatggtgctaaaagttatgacattgtcccaaatgaatctcacatttaccatggtgatgctaagagccaaaaaaatgcaccaagagtagttcgagggagaggctccaagcgttaccaaccacgcttgaaaagcacctctgatgtatcttcagtgcaaaataccaaatctcagagtcttgaaggcacttcgtcaaatgcaaacttggtaaaagatgaagctcaaggaccaaattcacgacttgagcaagtccttcctattaagcagactgttgcatcaaacttgaattcagcttcgccaccattttatcctgcgaggtcatccagtcaagagtttgcagttggtcaaggagagaatacacaagaacttagtactaacctagtaagaggaaaggcttttgtgccatcggggcatgttgaagctgctataaatggcatgaatagacctgcactgcttccacctgcatcgtcatcaaatggtccatttcctgtagccactaatcaagtcaatagagattatggccatcctgcacatccaattgttcaacaaaacccagttcaaccccctacacgatctgcacccaggatgcctgcccagatgtttggtgcaacattcagcaatggcagtaaaatatcacctgcacaacctacatcaactattttagatgatgacgctgaaatttcttcacctagtggatcaaacaaatatgattctcggttaacagttaaaggacaacctgatgaccaaggagaagagcgagcttcgtttctctatggtggggctcgtgttcttggggctacaagcgcaatgggaatcacacttggtgatcaaaattttcatggtaccccagcattgctgccagttatgcagtttggaggtcagcgaccagttggacgtggtgttccttcaattggtatggctctgccaggatttgtgtctcaacagcaacttggtatcaataattctgagatgacttggctaccaatattgactggtgcctctggagctctaggagcaccttatggttcaccttatatagccgtcgatggaagttattactctcgaccgcctgaacaaccatcttcatcagtttctaatagagaatctagtgcaaataatgcttcttctctgaagtcccaagaaattacagaggttgcaggcgacgcaagaactcaacaccaaaataaacctcgtcgatactcggagatgaactttggccagtgaacatagtgatgatagtaaatcagtgagggttcattggagctttggatccaagtaagacttgtgcaagagaccctggccttaccaagtgcttccagcatttcactgtctgatgtctagcactatcttgtgacccaaacgaggtttgacaggaggtgttcaaaccatcgctgtggtcatttgctgtgattattctgacgggctggtgttgttacaatcattaggtgagattttctggtactctacgtcaccacaataccagacggtcggtccgtaagtgtgaaggtcttgatggaaatcgtgaggacggaggtctcggtcgtactgcaaagctcgtgtccccgctgtacagtgtacatcacgtctctgactgtgtttgggtgtgcgctgcctctgcctacgaactcttcggtggttgtcgcatttttgaactgacaaataaaaaagaacgtgttgagcaccaaattgagaagggcggacggtccagcccggtccggacagtccgcgcctgtgggctgcacggtctgcgcaagcgcagaacagattagggttccaagttttgtgctacagttgttagctagattcgcaggattcgcttggaaattagtttgtaaatggttcagtccccctcctctataaataaagaggtatacggtcgatttgtaataatcaatcgaatcaataaaacttctatctcgcatttattttctgtgcaattaggagtggttctagtctatttctagtttagtctct

SEQ ID NO: 6282 - DNA, 1656 bp, Zea Mays
aactgtagctgccgcggcgcctgcttctccccgatgcgtcaaacacttgacctgcacacggacagcggcggtggcgtcccgatcctgtccacccacccatctaatgcggccgcgaggaggatccacctgattctgctgctcctgctcctccttctagtgagttctattcccgtccccctccctacccgctgcgcgctgctaggatcttcgcctgcgaaaattttcggttcagtcgtcaggaggtcgagagaccatgacacggaagtcagcagtagcggattatgtttagtggcacaaggatcattcgtgtagctgaaaggatttgccttcaatggagcttgaagctgctcctgacgataaagtattctgttcagatgatgagatgcagacgctgtggcctctgggacaagtagacccaaagagcgtgaggttcccttgctgcatcgtgtggactcctctcccagtagtttcatggctggctccctacatagggcacgtggggattgctcgggaggatggaaccgtcttggactttgcaggttcgaatttagtgagtgtggatgatctggcttatggttctgtcgccagatgcctgcagcttgacagggcaaagtgctgcttccctgccaacccggcgtcgcacgtgtgcttgaggtcccacgagcactcggatgccgggacggcgatctcgtgggacgacgcgctgcggtcggggagccggcgcttcgagcacaagtgctacaacctcttcacctgcaacagccactcgttcgtggccgactgcctcaaccggctggcttacggcggctccgttgggtggaacgtgctgaacctggccgcgctcgtctggctgcgcggccggtggctggaccccatggccgccgtccggtccttcctcccgttcgccgtcgtctcctgcgtcggcgtcctgatggccggctggtccttcctcctgggcatgaccgcgttcacgctgctcttgctcggctggttcgtgctcggcgtctactgcatgaagggcctcgtcgtctgacgcacgctggctcggagccgaacgtgtgcccagcttcttcactgagcatcggggtcatgtagtagatgaatgaaggatcgaaatcttgaaaggggtgtgagtcggaggggagagacaacgggaaaacaaaatttgagcccgtttttaatagcggaaacccaaatccagatatttataaaatcgaagtttctatttgaaacaaagtagaagtacaagataaaaggaaggagggggaaatagcacaaaaacaaaattgggctagagtcttagaaccgttggaggccgaaactcacgccctccttgctgcgaagctgtcgatctgcagaatgcagctctgttaactgacagtctcctgttacgaggcaatcagaggctttttctagactggacctcgccatatccaccatatagatataggaggtaccagaagggggtgttctatatagcaagctgtagctgaactcattggattagacatatcagggcgatcaatccaatagcatctcagtgtcctgtcatttcataaaaaaacagcttcaacgatatacaattttacatttctatcaaaaaactataaagatatatcataaaatgatctaaatatacgtacacctgaataagag

SEQ ID NO: 6283 - DNA, 4906 bp, Zea Mays
ctcacgcaccccaaattcaaatttcgaatcccagaaggacagcaccgttgcccttcggcttcgataaacacccctcaacccccattgctttctagccccagatccccaatccccaagaccccaacgcctcacgcacccctcaaccctaccgcagctgcgcaggcacacgacctccgtgtgcagcgcatcgccgccatgacgggtcccttacactccagctccggccacaacgccgccgccggcggcgggggcaagaccatcgaggaaatgtaccagaagaagacgcagctggagcacatcctgctgcgccctgacacctacattggctcggtggagaagcatacccagacgctctgggtctacgaggacggcgccatggtgaaccgctccgtcacctacgtccctggactctacaagatcttcgacgagatcctcgtcaacgccgccgacaacaagcagcgggatcccaagatggacgcgctccgcgtcgagatcgacgtcgacggctgctccatctccgtatacaacaacggcgacgggatacccgtcgaggtccaccaggaggagggcgtctacgtgccagagatgattttcggccacctcctcaccagtagcaactacaacgacaacgagaagaagacaaccggcgggaggaacggatacggcgccaaactcactaacatcttctccacggagttcgtcatcgagaccgctgatggacgtcgccaaaagaagtacaagcaggttttctctgaaaacatggggaagaagtcagagccccagattaccaagtgcaagcagggcgagaactggaccagggtcaccttcaagcctgatcttgccaagttcaacatgatccatctcgaagatgatgttgtagccctcatgaggaagagagtggttgatatggcaggcactcttggcaaaacagtgaaggttgagttggatgggcacagggtgcccataaagagcttctgtgattatgtcgacctgtatatgaagagtgctaactgtgacagacctgataatttcaaaaagatttatgagcaagtaaatgatcggtgggaagtgtgtgttagtcaaagcgaagggcagtttcagcaggtcagctttgtcaacagaattgccaccataaggggtggaactcatgttgattatgtcaccaatcaaattgccacccatgtgatggcttttgtgaataagaaaaacaagaatgcaaacatgaagctacacaatgtgaagagccatttgtgggtctttgtcaatgcgctgattgacaatccggcctttgattcacagaccaaggagaccttgaccactcgtcagggaagctttgggtcaaagtgtgagctttctagtgatttcctcaagaaagttgagaaatctagtgtaatcgataatgtcctctcttgggctgatttcaaacttagcaaagaattaaagaagactgatggaagcaagaagtcaagaatttctggcatccctaagcttgaggatgcaaatgaagctggtgggaaggactctcacaagtgcaccttgattctgactgagggtgactctgcaaaagctcttgctatgtcgggcatagctgttgtagggagagattactatggtgtatttcctctcaggggaaaactattgaatgtcagagaggcaaaccacaagcagataatggacaacgctgaaattcagaacataaagcaaatccttggtttgcagcatggaaagcagtatgatagcaccaaaggtttgagatacggccatctcatgataatgacagatcaggatcacgatggttcccacatcaaagggttgctgatcaatttcattcactcattctggccatcacttcttaaagttccatctttcttggttgagttcattactccaattatcaaggcaaccagaggccaaactactaagtcattctacacgttgccagagtatgaagaatggagaaataatttaggagcaagtgcaagttcatggactataaaatactacaaggggttaggaacaagcacagccaaagaaggccgaaagtacttcgaagatattactgaacataaaaaagattttctctgggtagatgaccaagatggcaatcatattgaattagcattcagcaagaaacggattgctgataggaaacagtggcttacaaattttcagcctgggacatacattgaccaacgtgacaaacatgtcaagtatagcgatttcatcaacaaagagctgatactcttctcaatggcagacctgcagcgatcaataccttcaatggttgacggccttaaaccaggccagaggaaaattctgttttgctcattcaagaggaattttgttaaggaagctaaggtggctcagttctctggttatgtgtcagaacactcagcataccatcatggtgagcagagtttagcaggtacaattattggaatggctcagaactttgttggcagcaataacatcaaccttatgtaccctagtggtcagtttggcaccagagctcaggggggcaaggatgctgcgagtcctaggtacatcttcaccaagctgtctcatatcacacgttcaatttttccgaaggatgatgatattcttcttaattatctgaatgaggatgggcagtcaattgaacccacctggtatatgccaatccttcctatggtcttggtcaatggtagtgaaggaattggaactggatggagcacatatattccaaactacaatccaagagacattcttgctaacctcaggcgattgctgaatggagagtctactgtaccaatgcacccatggtacaggggatttaagggctctatagagaagacagtcaatacaaaggtagctggttccacatatactgtcactggaatcattgaggttcttgacaacactacactgaggatcactgaattgccaatccgccgttggactcaggattacaaagattatcttgagagtttggctccagatactaagaacaaggacaaagtaccattcatagaggatgtcacatgtcaaggtgataatgaagatgtttacattcagttcacattaagtgagaaaaatatgaatatagctatggaagaaggactagtgaagaagtttaagctgacaacaacaattgggacatcaaatatgcacttgtttgattcagatggtaaaattcggaatacttgaggagttctgtcatttaaggcttgaattctattgtaagagaaaggaagcattgttgaaaagcatcaagttggacttaaagaagcttgaaaacaaagttaggtttatccgctgtgttgttgataatgaaattatagttaacaaccggaaaagggcagatctatttttggagcttcggcagaagaattttgatcctttcccaaagaaaaaaaagagggctgaaccagctgctgtaggtgctttagaagaggaggaaaatgaagagagtcctgaagctgctggagcggaacctagtgactatgagtatctcctctcaatgtcaattggtacgttgactttggaaaagatacaggagcttaatgctgagaaacaaaaattagtggatgatgttgaggaattggagaatatgtcaccaaaatcactatggttgaaagatcttgatgcttttgagaaagaactggatgtgcttgatcaaatggatctagcagaggaactgcaaagggaaaagaggataaatgctggcaaaaaaggaggatcaaaagctgcacccaagaaaccacgtaaaaaggctgcatctaaaaagctggatagcgatacagaagatgatgattttgaaccagcggttgcaaagcgtggagctcaaccgaagaaaacatccagcaaggcaaatgattctgcgtctgaagatggagattatgtggctgctgaaaatcaaaagaaacaatccaagaaagcaagtgcccatgtggacgaagaagttgacatgccttcgttaaaagaccgtctggctgcttttaatatcagcgactcctctccggatcattctgccatggaaactgaagtaacagaattgacagaacagcagaatgaaaacaaagcgacagagggagcaagcaaaagaggcggacgaaagaaggcgtcatcatccttggcgacgataccatctgatgttgatgaggaagtcctagaggtccaagctcagaagaaaggtagaggaaggaagcctgctgccgttgtgaagcccaaggctcctgccgccgccaggaaaagggcgccggctcagggcaaggtaacacagaagaaaatagatgagatgctcaaggccactgaggataacaacaccagtgcatcttcccctgagaagaaggtccggaagatgaggtcctctcccttcaacaagaagagcggctcaatcttacagagaggctcgaccgcttctgcaagctctggaacaactgttgaagcttcaccaccctctggcagctctgcagagccagttggtgctgcacaacctagaaggacagccagggctaccaagaagcctatctatattagcgatagcgaccctgaggatgaagtggagttgattgatgattcggactttgatgcggacggtgactctgacgagtgaagattgtagtcatccgtactttggctgcaacaatatccagtttgtgtcgttgcatgtgacaatttgataatgcatttcttgtgcgttgtatgtgttcgttgcgttgttcagaactgttgccaagagctcaagacaacctggttaactggttaactgaattgtatgtctaattttggcatacaagtgtgcctgtggtatgttttatgctctgatgctggcatgctgctctcagagcgcccattgtgtgcattatcaaagtttgtgcggggagtttccagggttatatataccaaatctaagtagttgaagaat

SEQ ID NO: 6284 - DNA, 1627 bp, Zea Mays
acctctaccgacacgtgggtctacccgccaacctgtccgtttccgccgcctctgacacgcgggcacaggcacgggcctcctccaaaaaaccccccccctccccagcttgtctgcccctctctccatttcgcggaggaagaaaaaggggaccaaaaaacggaaaaggggataggaggaacggatcagcggtggaagcttccagccctagcgcagcaatggcgggttggtgcgagcaggcggtggcgctgctacagcgccccgcggtggcggagatggccgtcgacgtgctgctctgcgcggtgccgatctgggccgccgtcatgatcggcctcgtcgtcggctggtcctggcgcccgcgctggacgggactgctcttcctcggcctccggagccgcctccgcatcctctgggtgccgccaggcctcggggcccggcggctctggttcgcctgcaccgcgctctccgcctgctccgtcgcgaccaagctcatctcctccgcattccgccgctgcagaggcaagcaccaggacagggcctcccccgacgatgatgccgctgcgaccagagacggcggatgtcgcgccgacggcaggagggacctataatgtactgcagccgcactatttttgaggatgctactcctgaactggttagagatttcttctgggatggtgattttcgtctaaagtgggatcccatgcttgcatattgcaaatctttggatgagttccctcagaatggagcaacaattgtccactggataaaaaagttcccgttcttttgcagtgaccgtgaatacatctttggaggacgcatatgggaatctgggaagacttactattgtgttactaagggtgttccatatccatcattgcccaagaaagaaaaaccgaggcgtgtggagctgtacttctcaagttggcgtattagagctgttcaatcgcctaaacatgtgggtcagcaatctgcgtgtgaagtaactttggttcactatgaggacatgggtataccaaaagatgtagcccgggttgctgttcgtcatggcatgtggggtgctgttaagaaacttcagtctggattcagagcataccagcaaatgagacacacagaaactaccctgtcacacagcgtcatcatggctcgaatgaccaccaagatatccatcacagcttcaaatgatcccttggaccatgacctctcggttgccgataaaatcagtgacgagaatgacagctccaatgcagttcaacatggttttgattggaagtggttggtggttgggggtgcagtggctgcggtttgtgtgctcaacaccggtctggtaggcaaggccgtcttgcttggagcagcgagaaggcaagcaaagaagtgatatgaggagcagccttccagccagacattcatcagattgtagctacgatcgtacaggcaaaaaaatgttgagaaaataggtggggttcaacagagataactgctgtttgaggcgtatgcaatgggtctatcggatctagtttcacagtatagtctattttatttagagataaaaatcgcttgtttaagaataagtaaagctctttatttaagaagaggtgtttgagaattaagacggaatgaccgttttcttcct

SEQ ID NO: 6285 - DNA, 1825 bp, Zea Mays
acctctaccgacacgtgggtctacccgccaacctgtccgtttccgccgcctctgacacgcgggcacaggcacgggcctcctccaaaaaaccccccccctccccagcttgtctgcccctctctccatttcgcggaggaagaaaaaggggaccaaaaaacggaaaaggggataggaggaacggatcagcggtggaagcttccagccctagcgcagcaatggcgggttggtgcgagcaggcggtggcgctgctacagcgccccgcggtggcggagatggccgtcgacgtgctgctctgcgcggtgccgatctgggccgccgtcatgatcggcctcgtcgtcggctggtcctggcgcccgcgctggacgggactgctcttcctcggcctccggagccgcctccgcatcctctgggtgccgccaggcctcggggcccggcggctctggttcgcctgcaccgcgctctccgcctgctccgtcgcgaccaagctcatctcctccgcattccgccgctgcagaggcaagcaccaggacagggcctcccccgacgatgatgccgctgcgaccagagacggcggatgtcgcgccgacggcaggttttgatgattgattagctccgttcgcattgcaccatggaaggattcgcaacataaacttgcctgctgctggggtttcatcgtggctgtggtttatttcttcctcttttgatggttttaaacaaattttgagggtgagcatgatacagtcactgagaaggacctagaacatctcctgcaacttttagataataaggaaagcggggatacagcttggcagaatttgatggagcgtagaacctccaacatgacatacaatgcctggcggcgtgagcctgaggagggacctataatgtactgcagccgcactatttttgaggatgctactcctgaactggttagagatttcttctgggatggtgattttcgtctaaagtgggatcccatgcttgcatattgcaaatctttggatgagttccctcagaatggagcaacaattgtccactggataaaaaagttcccgttcttttgcagtgaccgtgaatacatctttggaggacgcatatgggaatctgggaagacttactattgtgttactaagttcaatcgcctaaacatgtgggtcagcaatctgcgtgtgaagtaactttggttcactatgaggacatgggtataccaaaagatgtagcccgggttgctgttcgtcatggcatgtggggtgctgttaagaaacttcagtctggattcagagcataccagcaaatgagacacacagaaactaccctgtcacacagcgtcatcatggctcgaatgaccaccaagatatccatcacagcttcaaatgatcccttggaccatgacctctcggttgccgataaaatcagtgacgagaatgacagctccaatgcagttcaacatggttttgattggaagtggttggtggttgggggtgcagtggctgcggtttgtgtgctcaacaccggtctggtaggcaaggccgtcttgcttggagcagcgagaaggcaagcaaagaagtgatatgaggagcagccttccagccagacattcatcagattgtagctacgatcgtacaggcaaaaaaatgttgagaaaataggtggggttcaacagagataactgctgtttgaggcgtatgcaatgggtctatcggatctagtttcacagtatagtctattttatttagagataaaaatcgcttgtttaagaataagtaaagctctttatttaagaagaggtgtttgagaattaagacggaatgaccgttttcttcct

SEQ ID NO: 6286 - DNA, 1117 bp, Zea Mays
tttttttttttttacttgatggaattgattttggcagaaaaggaaggagaatcaaagttgagtggaccaagaggcaactcaaggaggtctccaaccaatgcaaaaccgaccaaaaccttgttcgtgatcaactttgacccgatcaacacgagaattcgagatctggagaggcactttgataaatatggcagggtcgcgaatgtaaggatcaaaaagaacttcgcctttatacagtttgaggcgcaggaggatgctactagagcattggagggtgctaatgggagccatttcatggacagggtcatctcagttgagtatgcgctccgtgacgacgatgaaaaaggtgaaagggcgacgaacggatacagcccagacaggagaggccgcgaaagatccccaggtgcaagacggtctcctagtccttacggcagaggtcgggagagaggtagcccagactatgggagaggcaaggagaggggcagcccagactacggcaggggaggccgcagccctgataatggcaggggaggccgcccagccggcggtggcggcggcggcagaggtgatcacgccaggggaggaggacgacgacgcagccctgactattatgaccgcgagcgccgagaagctagtcctggctatgacaggccccccagctgctcacctggaactgggagggacgcgagagactagaaaagcgccccatgcctgtgttgtagaattcaagcatcaaagcctcccgcgtcagatgaagttagagttggtgatgttagccagcaggaaactcgtttacttatgtgcgttagctcgtgctgactttgcaagttagcttaccatttcccatttgcgactccagaatgtaactcgtatggtctggaatggtagctttcaggactcgtttgaacctttcttggagtttttttcttcttttccggctaccttgattgccctgtgcatgcgctgatgaatctacagattgtttcgtctgtcaagtgttccgctgtaatgtaagagacgaaattatttgttccttgttgatgtagtccctgttttgtgcagcgagaaatttcagtatcttacgctcagtatgcgcgcctctccagatctgacacctaat

SEQ ID NO: 6287 - DNA, 1034 bp, Zea Mays
tgtctcgagccgattcattttgaacaaagaaaataatagtaataaatagatctccaaataccccggttattgggtggcctccagttcgtgccttcagaagaaatctggccacctctagcagagcatcccttgaacatcagaatgggaagaaggaagacaaacctgaacagaccacaaaaagagctccatttgtaaagatcaacatggacggcatccctattggtagaaaaatcgatctgagtgccctcggtagttacgatgagctgtctctgtctgtcgacaagctattccgggggcttcttgcagcacaacaagaccctctggctgccggcgcaaaggagtgttcacaggaagaggtggcgatatcgggtttactagatggaactggggagtacactctggtttatgaggattatgaaggcgatagggtgctggttggcgatgtcccctgggggatgtttgtttcttcggtgaagaggctgcgcgttctgaagacatctgacctctcttcatctctaacagcacctcctggccagaagaggacggtaactgagtgtccagtgtttacctcttagacacttccttgcagtgatgttggtgtgctgtgaagaagaaaacgtcttctgagcttgtatcatctttcttcgtggtttcttcctcttcttttccctactttctcttggaagggatcatcaaagaaccgaaccgaccttttgggttttcctgctcttgtttattttgtttctctttccgggaagcgatgtgaccttttgggttgtatgtaaatgttcagacgaaccagctctatgtttatgcagcctatcctgtctgttgccttttacacaccgaggacatgtactgtttgttgtggtcatgatggctgaaatcgacgatttttttcccgtcaacatgcatgaacaattctggtcatgttatccgtttggtgggggtttgcagcggggatcttgaagttctggagcagagtagtatgccatatttcatatttgttagaactgtttcatatatactttgga

SEQ ID NO: 6288 - DNA, 1996 bp, Zea Mays
cggctatgagcctatgaccaccacaatcaccagcagcggccctgcgtgcgtgatgatagtagctggacagcagcagcagcagctatacatgccctcatgaatgaatcatcgaccaccccaacccaaccccctgccgcgcccgcacccagcgccccgagccctgctcccccatcgtcttcttccttgtccgtctccactaccgaccaacgggctgcctgctcacacttcgccactactgctgctgcgcgttggcgagcgcgcgtggttcacgagcgagctccaccacaagcccagtcgcgcacggcagccgttttgcttgttttgtttgctttccgcctcttccgtgcttcctcttttgggcggcctggctgggctagctagctgttctgttcattccgagttcccggcatagaacacgaggttggagttagaggcttaccgagggagcagacagcagaggacactataagagtagctagccctacccaatatcttcagccgtgcttgccaacttggagagagagagagagagagagagagagagagagagagagagagagagagagagagagagagagagagagagagagagagagagagagagagagagaagagaagagaagagaagagaagggagtgagtgatcgcaggaaggaggatcggagtgatgggagacgcagcagagaccaacaagactcttcacaactggatgggcgagccgaggccgaggtcgagcgaccagcgcgacgaggaggagacgcttcagctcagcctcggcctccccggaggaggagcaagtgcgggtggtggggtagcacccgccgcctggagaatgctgccggccagagacgaggagatgcgctctgctgctgctgtcgtcgacacctccctgctctctctcggctactccgccccagctttctcgccccgctcaccaggcaaggcaaaggggtccccagcagcagctacagagaatgcccttgcatccaccaacaacgcctcccagagaagatctccaaataccccggttattgggtggcctccagttcgtgccttcagaagaaatctggccacctctagcagagcatcccttgaacatcagaatgggaagaaggaagacaaacctgaacagaccacaaaaagagctccatttgtaaagatcaacatggacggcatccctattggtagaaaaatcgatctgagtgccctcggtagttacgatgagctgtctctgtctgtcgacaagctattccgggggcttcttgcagcacaacaagaccctctggctgccggcgcaaaggagtgttcacaggaagaggtggcgatatcgggtttactagatggaactggggagtacactctggtttatgaggattatgaaggcgatagggtgctggttggcgatgtcccctgggggatgtttgtttcttcggtgaagaggctgcgcgttctgaagacatctgacctctcttcatctctaacagcacctcctggccagaagaggacggtaactgagtgtccagtgtttacctcttagacacttccttgcagtgatgttggtgtgctgtgaagaagaaaacgtcttctgagcttgtatcatctttcttcgtggtttcttcctcttcttttccctactttctcttggaagggatcatcaaagaaccgaaccgaccttttgggttttcctgctcttgtttattttgtttctctttccgggaagcgatgtgaccttttgggttgtatgtaaatgttcagacgaaccagctctatgtttatgcagcctatcctgtctgttgccttttacacaccgaggacatgtactgtttgttgtggtcatgatggctgaaatcgacgatttttttcccgtcaacatgcatgaacaattctggtcatgttatccgtttggtgggggtttgcagcggggatcttgaagttctggagcagagtagtatgccatatttcatatttgttagaactgtttcatatatactttgga

SEQ ID NO: 6289 - DNA, 1883 bp, Zea Mays
cattatatcgtctaattaaaagatttaatcaccgaaccgatttcatatccgcgttcctgacatttttgcgaacgaaactagaccactcatactatatatatttcaaataaaaaaattacgtgattaagattaatatataattagtgtatattaacatgtaattagtatctattaagcaatttaccatataattagtgtctattaatagattttttaaatttttttaactcatgcaccatgtactcatgcaagcaaccaaacaacatctcttgtgaaccagactggccacatacacacaaccaaacacgctatactgcatgcactcagccagtccagtctgagccaggctcactagatacgagccaggctcacccatacaagtaaccaaacgccccctaagagaacctggaaccggctgcgtctgggagagtggctgggtgccgtcgtgtacgaactccaactatacctatactccagaaatcttcgtgagaggaagtcgagcgccgggagcggcgctcaactcatccgctcaacggggttctaacactatccatggaagaccccgtggcggcgccctcttcgtcttccgccgccccagctgcttccgcagcggctaggatttcggcggcggcggcggcggcggtaacatctgccgttacctctgcgccgcccgctctcgctccgctgcagccgtctggcaccgccgctgcggtccctgaagccgcgtcgacgtgccggaggcagctgttcacggtggagctgcggccaggggagtccacaatcgtgtcgtggaagaagcttctcaaggaggccgggcacaccgccacggcaccgccagtggcgccggagccaaagttcgctgcacatgcgggcccatctggtgctgtaagcagtcattttgcggttgttgcgtgttggttggttacttggttacctgctgcatcgatgtaatctgtgcgctatctagcttagccttttgagttcatgaaaatagaaggattccctgctgactgaaggtaagatctggaagatggaacgtgagggccgtttgtgtttggtgcctgtgctctatcttccagagatgttctacagcgagtatcagttcctcttgtaatctgccaaaaccttgaaagcatataggtccaaatcaatgacacctcatcgtgatggattgttgtacctgttcatgccaaaaccttatcattcttgaacatgatgttcttagcattcagcatttcatcagtgtgaaaagtatgttaaaattttggaatccactgaattgcttggcattcaagaagtgtgctgtatttaacgtctagcttgtcttatcatttgaatcaggcacatcctgcagaaaatgacccaaaggatccaatgcagtcattgaaaaaattgagtgcctttacatgggaaaacatagcagtgacgaagaggatcttaatgatgtaccagatgatgatcagtatgacactgaggattctttcgttgatgatgctgaattggttggcgttaaaaaatctcctcgtttgtctcacgccaaagcacaagtctaaggcctgggctcggtcgtgtccattttcacatgagctacagtgccgctatgtatgggtggggcagcggtttgggggttttcttgacctgtgtgagagctcttcttaatacaatacacgaggatgtcttacccccgtcgagttttgtattatgatatgaaattgtcacttgagctgtaatagaatatatgactgtatatctcacaacctgagctatatgtttgggaaaggttcatgtaaatatttccaccatgttaaactacatgatgccaatgcatagtttagccatcttgtatatgagtatatttataaagaaacatatgactgccatga

SEQ ID NO: 6290 - DNA, 2088 bp, Zea Mays
gcgtacttgcgtcgcgttgcgtccccgcttccgttactccctccgcgccccgctcctcccgcctgtcctccacgcgacgttccttgtatccccgtcgccttccttgggcagttgggctgagtcctcccgtctctcgcccctgcagatatagttgcggcggggtttccttcttcgagaaagttccgaaccagagggagccgcgcggaaagccggaggcgtcccatgctgctggcagtcttgctaacttcagctgatggttaatatgagggacaatgactcatcaagcgacgcacaattggacgagccattaggacgggtatcgatactctcttacggttctgggcatatgctcaacgacatcacatcgtcttgttggtttacctatttgcttgtgttcttgacagatctgggacttagtccaggtgatgccgctattgtgatgctttctggacaattggcggatggcttcacaacaatctttgttggggaattgatggatcgctttggacatttcaaactgtggcatgcaggaggatctattttagtggcaatttccttctcgtctgtttttggtagctgtgttccttgcaaacttatgggaattaatacatctactttggagactgttggatacagcacatttgctgctatttttaatgttggttgggcagttactcaagtcgctcacatgtctatggtaaactgcattacatcaaatccaactagccgggtttcacttgttgcgaatcttagcctgtatggcgttgctttggtgatatttactctattgcagtcagtgaatgtactagttcaggtgtccatttccctcggatcttgctttgttgtcatcttcttgattggaaccaaagagccaggatcaattcggcactgtttggataagagtccttccagaatttcatgggactactggttcaagagagtattgtactaccaagttgctctagtctatactctgactagattggtgaccaatgtttcacaggcatttcttgctttctatgtaataaatgatttagaaatgaatcaatcctccaaagcattggtacctgctattatctacatctgcagtttgatagtatctgtaatattacaggagactagatggtcaagttggcgtcttaagctttacttttcagctggagcagtgctttggatattgtcaggtcttggaattgttcttctaccgagcagaatgcacaacctcatgtatgccatttcaatcgtaataggagctgcgaatgcacttatgacagtgacaagtattagcatggaaggtgttctagtaggagaagatctaaatggttgtgcttttgtgtatggctcattaagttttgttgacaaagtttcatgtggaatagctctctatgttctcgagtcctatcaaggaagtacaaagatcagatcaaatttaggaacaacatctggctattcagttacaagacttggcttgggcttagttccagctgcttgttcgctgctttcagctatagcagcttataccatggagctccctgatactcagaaaggacctttggtggaaccccttctagcataacttcactggtggcagtgttacagtttcaccgtgagatttcacagtaattgctcgatggaatgacactgctgctcgagcctgaagatgttagcgacctggtcaattcgttttgacttcgtatatatagtctgaataaattatgacggaggggatatactgagacacgtttgaatagggattagaagtgacataggggggctaggggcaagaagatctgtgttgatcatactgagctttacaagtcattctgcaatccaatgtaaatataacttagcttcatttcgaaagcatcaaaactgccaactaggcacatgtagcgacgatgggcaaggaaaagaatatctctggtccttgttctacgctataatttcattgtatatgtagcatcatgattgaaaagaaatatcttatatttatattgatgggtgaaatagtgtcgcctatgctcatgtaaattgtttctgacatttagaaattaaatatgcttgagaagagagcactaatctgtctaa

SEQ ID NO: 6291 - DNA, 1832 bp, Zea Mays
cacgcttttgtcacaggccataaacaaaaaggtacgctccagcctccagcctccagtagaggtaggaactactagcatcacattcccctccccgcgccgcccggacaggacagcgcaaaaggccacctttccttttcctccgacgaggccggccggagctttgggacttgggagtgattgattccatatcattgcgcattaggtgcgcgatctccgtcaacctccttgcctccactccacagcccacgcatccccctgccgctgcctgcgcctacatatctgacaaacgacctccgctctgcaccgtgccgagactgccgactaccgacagacacggtggtctgccactgccagtctgccactgccaggcgccgtcctgcagagatggcagcggcgctgaggccgaggctgctcgtgctgctcgcggtggcggccgcggcgaccgggccgtcgtgcgccggcgccggccgcgtcgacctgtggccaatgccggcgtcggtcgcccgcggcgcgcagacgctcctcgtcagcaaggacctcaggctgtccacggccgggagcagctaccccgacggcaagggcatcctcacggaggcgttccggcggatggtggccgtcgtggagctggaccacgccatcaacgggacctactcccggggcgcgcccgtgctcgccggcgtccacgtcgccgtccgctcgcccaacgacgagctcaacttcggggtggatgaatcgtacaggttgtctgtgcctgccactggggatccgctgtatgcccagatcgaggctcaaacagtttacggagcgcttcatgccttggagacatttagtcaactgtgcagctttgacttcaatgcaaacctgatcgaacttcattcagctccatggactatcctggacgctcccagattcccttaccgagggctcctcatcgatacttcaaggcactatcttcctgtcccagtgataaaaggtgtgatcgactcaatgaccttcagcaagctgaacgttcttcattggcatatcgtggacgagcaatcgtttccgctcgaaatatcttcctacccaaagttgtggaacggcgcttactcttattcagagagatatacagttgatgatgcactcgacatcgtacagtatgctgaaaaaagaggcgtgaatgtcttggctgagattgatgtacctggccatgctctttcatggggtgtcggatatccatcattgtggccatcagctacatgcaaagaaccgcttgatgtcagcaatgaatttacatttcaactgatcaatggaattctttcagatttcagcaagatttttaagttcaagtttgtccatttgggcggagatgaagtaaacacaagttgatgcaacatagcatgaatgaatctgatgcctacagatattttgtactgagagctcaaaagatagcgatatcacatggttatgacatcattaactgggaagagacatttaacaactttggagacaagctggatcgcaaaacagtggtgcataactggcttggaagtggagttgcagagaaagtggttgctgctggtttgagatgcatcgtaagcaaccaggataagtggtacctagatcacttggatgctacatgggaaggattttacacgaatgaaccactgacaaatatctacaacccggagcagcagaaattggtacttggtggtgaggtatgcatgtggggcgaacacattgatgcatcagacattcagcagacaatttggccacgtgctgcagcagctgcagcgagcatgaatgtatatgcagactacgaaaagactagacatgcctgcacagtatgaaag

SEQ ID NO: 6292 - DNA, 2203 bp, Zea Mays
ccactccccacatcgagaacagccatcgacgccgcaagaggagacgcacccaagagagaggaggcgaccatgagggccaaggtatactccacccatctcccttcctacttctcgcgcctactacctcatctcttagatccatgtggcatatcgccctgctggtgctcccggcgttggcccaggtcccgaagcgggagggttggtgggggaggaggaactaacgatagccatcgccatggccaccgacgacgactgataggactgcctcttcttcatcgatgtggtaacgacagaaatcaagtaatggggacggggctctccaggccatgcgggtcaaacgactggaacacgtccccttagcctccgaacgggaaccccgggctggagctctacagcgagaagaccaagcttgctgaagggccgcaggcttggaacatctagattttgttttgctaaggggagcgctatgtgagggtgggcaggttgctcaggtcaagtgggttcacggctgcgagcttcatggagagactattgatagcaggtttctttattttcatgggaaaagtacatgtttctattgtgccttcgtacattcatagttgaggtttaatttgtgtcctgcatcattctttgatcaagattgatgagggaaagatcagtatgccgaggatgggaccgggttgtagcttgcgatgctagatctgctcatcatgaaacccatcatgactaatgcatttatctgccatttaagtgtacaccagattatttgtatgtttgctgcttactatgcaaaatggcagctaaaagaagccctaaagcatgcgagctgcacctctaccggtttagtggccaaactggctgttactacgtttcagaagtaataaagctatgattaaggaacgattcttgttcatggagatcgatgcactgctacatgattttgggaataaaatcaacttgaattctcgggtgcaggtactgaatactgctcagcatgtcgttcaagtctgtattccaattcttccatctttcttgacccatctgtatttctctaatatgagcttttctgttgatggtcctttaagtaactttgaagaccatcactcgctgaaaaaatttccttcttggagatcgatgcgatactgcactgaatcagaataaaatcaatggtgaatttgctgtcagtttgctacattggtcggtgggaagttgtctatctgtttcttctatcggcgaataccacctatccgctatccttgttcaccgcttcacggtacaatgccacgcaactgcttgccgcctttgcatcaccacgccatttaccgttcctttctcatcgtccagaggctgttcaacgcttggaagcctccctctctcatgcacgcagcctttgctcccaacttgtgaacgtcgctgcctccttattcctgtgacgcacggtgtttagaggctcccagcgctcgatcgctcgtcgcgtccttgctacagcaccgaccggtcgtctctagggccctcgccctcctacttccttgcgtcgagccgccatcctttccactgcgcccagccactctccatcactaaccctggccgtggctcacccaggtctggcgtctccctgttctcgcctcgtccttgtgctcgtggtcgacctgcaccgtcacccagttcaccggtgtcatcggcgcacgcctccctcaccaacgatagcaacttcgccagtgtcgtcttctccaaccttcgcatgttcctgcagctagacgtcgcatcgttcctgctccctgccgcagttttccctggcatgctcggactcattcgggcgccgacctggactcatccgggcgccgacctcctccacgctacgctcaggacatcgtcggcgccgtctggccatgcttgtcgcgctgcacgtcttcatgttcctctgcgtcgatctcgcttcgccgaagcaacagcaacaccagcgtcgtctcccagcttgggttcgtgaatttcctcgtcgaaccggcatcgtgtcgtcacctggtagtgtagagctctttattcgtattttggcgatttatattcatgtgtatatattgtaggtgtattccctttggggttggtgtattatgttacactcgattaattccgttcggttaaccacgcctgatgttcgaaaaaaaatcgcctgaactagaaatcattgtcgtgttcatgattttcg

SEQ ID NO: 6293 - DNA, 3091 bp, Zea Mays
caattatctaaggaagaacaagcaatggacaacaatgacacatctgatctgagaaaattctcaaggcaagcgtacctgcaaaagcgacgagacaaaaaaattgaggaaattcgtgatgaaattctggaccaccagtacatttttcaggatctgaaactaacagaggcagaagaaaaggagttgagatacaagatgaagatatatgatcttgtcaaggaacatgttgagactcctgatgatgttggtgcgtacaaaatgcctgaagcttatgacatgggcgaaaatgtcaatcaagagaagagattcgctgtggccatgcaacggtacaaagatcctaaggccaatgataaaatgaacccttttgctgaacaggaagcatgggaagaacaccaaataggaaaatcgaaactgcaatttggatccaaagataagaagccgtcttcagatgagtatcagtatgtatttgaagatacgattgattttgttaaatcatcagtcatagaaggaacccagcctgaagatgattcagataaagaagacgttgaagcaaaagatattttgaaaagggagctccaggatgagcgaaagacacttccaattttcaaatttagggatgaactgcttaaggctgtagaagagtatcaggttatcgtcatagtgggtgagactgggtccggtaaaacaacacaaatacctcagttccttcatgagtctggttatactgcaaaaggaaaggttgcatgtactcaacctcgtcgagtagctgccatgagtgttgcagcaagagtatctcaagaaatgggtgttaaacttgggcatgaggttggttactctataagatttgaggattgcacttcagataaaacaattattaagtacatgactgatggaatgcttctaagggagttccttggtgaaccagatttggctagctatagtgttgtcatggttgacgaggctcatgagcgtaccctctccactgatatcttatttggtctagtgaaggatatttctcgttttcgaccagatctgaagttgctcatttctagtgccacccttgatgcagaaaaatttagtgactactttgattcagctcctattttcaagatacctgggaggcgatacccggttgaaattcattatacaaaagctccagaggctgattacatagatgcagcaattgtcactgttttacagatacatgttacccaatcccctggcgatatcctggtgtttctcacaggtcaggaggaaattgaaacagttgatgaaatccttaaacacagaacaaggggcttaggcaccaaaatctcagaattaattatatgtcctatttatgcaaatctgcctaccgagcttcaagctaagatatttgagccaacccctgagggtgcccgtaaggtggttctggccactaatatagcagagacttcattaaccattgatggtataaaatatgttattgatcctggcttttgtaagatcaaatcatacaatccccgcacaggaatggaatctctacttattaatcccatctcaaaagcttcggcaaaccagagggctggaagatctggacgcactggacccggaaaatgcttccgtctatacacgagttacaactacatgcacgacctagaagataatactgttccagagatccaacgaaccaatcttgcgaatgttgtgcttacactcaagagtcttggtattcatgacttggttaactttgacttcatggatccacccccatcagaagccctattaagggctctggaacaactttttgctctcagtgcactcaacagtcgtggggagttgaccaagactggaagaagaatggcagaatttccactggatcctatgttgtcgaagatgatagttgcttcagagaaatataagtgttctgatgagatcatctccattgcctccatgttgtcaattggcaattctatattttatcgtccgaaggacaaacaagttcatgcagataatgcaaggttgaatttccacactggcaatgttggggaccatatagcactactaaatgtgtataattcttggaaagaaacagactattcaactcaatggtgttatgaaaactatatacaggtgcgcagcatgaagagggcaagagatattcgggatcaactagatgggcttatggaaagagttgagattgagatttgctcaaacaccagtgatttagatgctattaaaaaagctataacatcaggtttcttccatcactctgcacggttgcagagggatggtacatataagactgtcaagaaccctcagaccgtgcatatccatcctagttcaggattagcggaggtacgtccgcggtgggtagtgtaccacgaattagttctcacgacgaaagagtttatgcgccaggtgacggaactgaagcctgaatggctggtagagatagcaccacattattaccaactaaaggatgtggaagactccggaacaaagaagttaccgaagggccaaggacgagctgcattgtagctatgatacatgaagtttcgatggatgtattgtgttggactcatcgtaggagcatcataggatgtatataactccttatatcacgaacaggatacaagatgtcacttttcattgccctgcttaggtttcagagtaagctgattgtgaatgtaaattgtgacacgaagacatgcatgtgaaccgctataattgtcacactggagggagcgccggcatgcaactttcgtgtcttccagccgctacgcttgacgatcgttcgcatcctgccgccgtcgcgactattatccaagaaaatgcatatgtgcctttcctcgccggcctcttggatatggatgtatgttgaacaaacgcctatcaagggaaggataaatgagggatgagtatgggattttgaaaaaaagaaatcctgaatctttctgtaaattgggtaagcaaattgagaaaaatggatgggttgggacggaatcgtgagtcttgaatctgaacaactcagggtctttggttgggaccggattatgggccacttgatccgaccaactcgtaaaaaaagtcaggcttgattgtccaaaaaaac

SEQ ID NO: 6294 - DNA, 1933 bp, Zea Mays
ggggcggtggcgctgcctccctctctctctctagcccagccgcctccccaacggcccaacctcaccgaggagagagagaccgatacagagagagagaccaagaggacacgggagagaggacgttcatttccgcgtcgtctccgcccgcagccggcagccccaccacccaccacatggccgccatgccgggtggggcccacggcgccggcgccgcggacccgatgcaggtggaccagccgctcccccctgccgccgcaggcacagcacacgcccccgccgacgccaagggagtgatccggtcacaggccatataatctcgacaaccattggagggaagaatggagagcctaaaaggactatcagctacatggcagagagagttgtgggaactggatcatttggaatcgtcttccaggcaaaatgtctggagactggtgagactgttgcgattaagaaggttttgcaggacaagcgctacaagaacagggagctacaaatcatgcgatccatggatcactgcaatgttgtttccttgaagcattgcttcttctctaccacaagcagagatgaacttttccttaacttagtgatggagtttgttcccgagtcattatatcgggtgttgaaacattacagcaatatgaaccagaggatgccactcatttatgtcaaattatatacctaccagatatttcgaggcttagcctatattcacacagtacctggagtttgccacagggatgtgaaaccacaaaatcttttggttgatccactgactcaccaagtgaagatatgtgattttgggagtgccaaaatgttggtcaaaggtgaagcaaacatatcatatatatgttcacgttattaccgtgctccagagctcatatttggggcaactgagtacacaacatcaattgatatttggtcagctggatgtgttcttgctgagctgcttcttggccagcctctcttccctggtgaaagtgctgtggatcagcttgttgagataataaaggttcttggtaccccaacgcgcgaggaaatccgatgtatgaatccaaactacaccgagtttagatttcctcagatcaaagctcacccatggcacaagattttccacaagcggatgcctccagaagctatagatctcgcttcacgcttgctccagtattcaccaaatctaagatgcactgctcttgaagcgtgtgcacatccattctttgacgatttgcgagaaccacatgcgaggttgccaaatggacggccatttcctccactgttcaactttaaacaggaactagcaaatgcctccccagagctcatcaacaggttgatcccagaccatgctaggcggcatcttgggctcacattattgcccgctactggaccataggcgaaggctctatggtggtgcttcgttgtgcggaaggcaacctgcattcaaggtgtagaatctgacaattattggaaggtcaaacatgagctggcgcgtaaggagaggtggtatgttctcgtgcagccagccttaatttgtcgcatgtcttaatgcaaaaatctgatttttgcccaagtagtgagaggagggaagggggtggtcggtgtattgttaagctattgaaggaattcgatccctgctattgtgttactttctccaacgtttaaacgttgtagtgcgcctgtaagtgttccatatatcccctgttgtcagtcagtgtaattctgtaaatgttattaatgggaaattatttcgtgcttttccaaccacataactaatccctaccttgttggaagcaatctcttgttttcgttgtcagttgtgctgatctgggaattgtttccttcaactccatgcgagcaagttttagttctgaatgaattgtcatcctagagtagcatcagatgggcacgtgcctagtgcaaaggcagcaaagatata

SEQ ID NO: 6295 - DNA, 2408 bp, Zea Mays
aatgtatttccatggaaccgaacgcgtgctgcgcctcctgtacggcgcggaggtaggtcaagccgcggttgggacgcggtgtggcgtgggcgagccgaaccaagcggcgatcgatcgaaacgaggcgtcgcgtggcagccggagatgtcgcagaagaggcagccggaggagggcgacgtcccgcggcgcgccgccgatgccggcggcggcggcggaggagacgagcccggtgggagctcgtcgcgctcctctctgccccagcgccacggcgagccgaagcggcagaggatcgcccttcgcgatgtgatcacggaggtgatgcggaacaccagcatcgagaagtttctaatcgcgctcgagcccctcatcaggagagtggtaaaagaagaaattgagtcggcttttgcaaaccatgcctctatgatggcaaggagtgtcacagacagtgttccatctgtgtcaaagaatttgcagctgcagttcatgaccagactttctcttccaatatttactggatccaagattgaaggagagggctccttaagtataactattgctctagtcgacgctttgacaagacaaattgtagcaccaggcaaagagttccagataaaggtcgagattgtagttctggagggggattttgaaagtggagaagatgatgactggacagctcaggagtttaacaataacattgttaaagaaagagaaggcaaaaggcccttgatttctggggatgcattcattgccctcgtcgatggcattggaacagtaggggaactttcattcacagataactccagctggacacggagccgaaagttcaggctaggagcaagaacagaggatggttctttcaatggtgtaagagtacgggaagcaaaaactgaatcatttgtggttaaggaccatcgaggagaatacttagttctagttgaggaagactagttgaggtggaaagtatgatcatgcacccaatcttcaccgagtgtacaagaagcaccacccaccatttcttgaagatgaagtctggcgcctagagaaaattggcaaggaaggtgcttttcacaagcgtttgaatagggagaacatttgcactgtcaaagattttctcaccttgttaaatcttgatgcttctaggcttcgaaagatattaggtggtggcatgtcaacaaagatgtgggaggccactgtggaacatgcaaaaacatgtgttctaactgacaaagtgcatcactactatcctgatggtctaaacaaagctggtgttgtattcaatgtagttggagaagtaagagggttaatatctgataaatatgtttttgttgatgactttactgaaaaggagaaggccgaagcacgtgcagcagtgaagcaagcatatgaacactggaaggatgtccatacttgtgacaatgaaacgcttgtggaaaacccttcacatccattcaatttgggatctccatctttgcatgaaaatcagtataaccagttgcccacacaagtttctactgatggttttagtttgagcaattcggccatactatcacccaacattttctcaatggagccatcgagtgctttagacccttgtagtatattggagactgaagaaagcagtgctaatcaatttcagtcggtgttgcccccagttggtggccatgaagtgccccgagaacctcagacgctggataagttctccaactcgttggtatatgatgactgcagcgcccatccctcattcagtgaaagctattacagcactgtagatccaagcatgtccttcgacacacaagatcttggagctgcactgaaaggcttcattgcaaccatatcgaagcctaaggcggcatatagaggatggagaacattgtcttatgtgctaggatggattttctataccaagagaattgttgcaaggagaaagaaacatgggaaataagtgaacacaagtctttgtgtagttaaatgcgaatataagcttagagaatgagagattatgtacattagtttgtttcttgtcacagctggtaagctctgctggtttcttcagctgtacatgggctgtcagctatggttcgctatgcggctgtaaataatcaaatgaagtttgtacagggtgagggatgcgcatagcatttctgatgttttggatggatgccggagcttgctttttgatgcggcccgtgtattatctatgtagtagtatgcagtatgctgcttaattctgcagtattttcgacatttggaatctatatgtcgcatggtaacaagtttaattctgcttattttcgtacacagataatactgcagaattaccatgccgcaaactgatttttatgtagacagtaatgtgtttatggatatggttgacacttaaataaaaagctgggcagcgtgcacatgcc

SEQ ID NO: 6296 - DNA, 2515 bp, Zea Mays
ggcccagtctctccggagaccggagcgacgagtccgcgagaccgccaccgccacccagcaagccgagcggcgccaattctgcgctgccatcgtcttcctccgtcacacccggctcgcaaaccctagctcgccccggccccacctccggccccgttcgtcggtgctatgtcgaagcggccgaagctcgagggtttcagcatcccgcggcccacctcctacaacttcgagcgctcgcagtccgtgcagcggctctaccgtccgaccgatgacccagacctcgacgacatcgccttctccgacgacgccccctcagatgcccaagccagcaccgcggtagaaggaaaggccgagaatgaggaggagatggacccgctcgacgccttcatggccgagatccaggaggagatccgtgcgccgcccccgccgcccaagcccgaggcgcttcgccgcacggattccgacgatgacgaggatgaccccgtcgagagcttcctgcgggccaagaaggacgctggcctcacgctggccgccgacgtcatgcgcgctggttacgactccgatgaggaggtctacgccgctgccaaggccgtcgacgccggcatgatggaatacgactctgatgacaaccccatagtcatcgacaagaagaaaatagagcccataccagcactcgatcactcgaccattgagtatgacgccttcacaaaagatttctacgaggagaagccatcgatttcaggtatgagtgaccaagaggtaacagattatatgaaaagtttgtcaattcgtgtttctggttttgatgtgccgaggccaataaaaaactttgaggattgtgggtttcatgtacctctaatgaatgctattgccaaacaagcttatgaaaaaccaactacaattcagtgccaggctttacctattgtactttcagggagagatatcattggtattgcaaaaactggctctggtaaaactgcagcttttgtgctccctatgattgttcatattatggatcagcctgagcttgagaaagaagaaggtccaataggagtcatttgtgctccaacaagagaattggcacatcagatatatctcgaagctaagaagtttgcaaagccttacaaccttcgagttgctgctatatatggtggtgtttccaaatttgaccagtttaaagaactgaaagcaggttgtgaaatagtcattgcaactccagggagattaatagacttgctgaagatgaaggcattgaagatgttcagggcaacttatctggttcttgatgaagctgatcgaatgttcgatcttggatttgagccacaaatacgatccattgttggtcaaattagaccagatcgacaaactttacttttttctgcaacaatgccatacaaagtagagcgtttggcaagagaaatattaactgatcctattagagttacagttggtcaagttggcggtgctaatgaagacattaaacaagttgttaatgtactcccttctgatgttgagaaaatgccttggcttttggggaaattgcctggaatgattgatgatggagatgttcttgtatttgcatctaaaaaggctagagtggacgagatagagaaagagttgaatcagagaggattcagaattgctgcgcttcatggcgacaaggatcaagcttctcgtatggagaccctgcagaagttcaaatctgggacatttcatgttctggttgcaactgatgttgctgcacgaggtcttgacatcaaatcgattaaaacagttgtcaactttgatattgcaaaagagatggatatgcatattcaccgaattggaagaactggtcgtgctggcgataaagatggcactgcatatactctgattacacagaaggaggcacattttgctggtgaactggttcacagtttgattgctgctggccaggatgtacccaatgaactcatggatctggctatgaaggatggaagattcagagcaaaacgagactccaggaaaggtgggaagaaaggtggcaaaggaaaaggtggtgttggcggtgctgggcgcgggcgcggtgtgcgtggagttgattttggcctcggcataggttacaatgccgaatctggttcacaagtgcctgctgcaagatctgctgctgtaaattctctgaagacagggatgttgcaacgatttaagagcagctttgtctctggatcttcaaatacaccaagcagcagtgcaccttcctttgtaagaccagcactccgtggctttgtgtctggcggcaccattggaggagacacacggcctgcacaggcagcccccactttcatccctgcatcccggcctgcacagcctgcccccgcggtccctgcatcccagcctgcaggaaataacaacgaaaatgggaacccgaatccagaaagttcacgggatcagttcagggagagaaaacgaccatcaggttgggatcgctagtccctgctaactgggtagtggagtgggcgatggtatactttgagttgca

SEQ ID NO: 6297 - DNA, 834 bp, Zea Mays
cacgtactctgtcaaacgatacgccgcgatgcttccagacaagcgccatccccttcctcgccccacacgccgtcgtgttggccgcgcctctcttcaaccttttcttgagcattggcgagagcccttcacatggtgcggcgctggcatcgttgttggcgacctctgcgcggtcggatctgcaaaggttgcagctagcgcgcctacagtacgtcaacatggtgcggcatctctttttgcagatccccaacttgctacgccgccggccgccgcatcggaactccttgcaccgcttgcctttcttctcccattcaaccggcaagcgttccctggctcaataacgcaactgggggatgtctgtcgctatctccatataggaaacgacaggtgcgacagatttagattttcaggtgatgcgtggtcgggatcgccggatcaatcaaaataagtgtgaaatttgagaggccgtggaacttccagatcgagtagtatccatccagatcgatatcccagaagaccaagcctggccatgaaacgcatgctaccccgatctcttcttcaccttttcttatccgcaggtaccaacaaaaaaagtgacccttttgacgacgtattgcgtgggcaaggcatgacagtgcgacaagagagaaactaacaaagagctctgttcgttctgctgattgcttatgattcgactcgcagtggcggtagctgggagagcttgggactggccagacacgaccaactcaccactgtaataagacgacttttatacatagctgacagtacgcaacctcagttcaggcgcaagtgattccttaaatcaagcaaccccaa

SEQ ID NO: 6298 - DNA, 2464 bp, Zea Mays
ggcggaaccgaagaccgccgagcccccgacccagctccagcctccagctgcgtgtgagcgtgtcgatctccactctcccgcgtgttcatcacaatcccaactcccgttactttccgggctcctcgtcctctgccccaaaaccctaaacctaataccgtcatggcgctcactacacggggtgccgccggcggtggggatgcggcgaaggcgccgtccgcttccgatcccagcctcggctttctcaccaagtgcgacaccgaggtcaagctaccccgcgccgatacagattacggccgagcagatcctccgggaggctagggagcggcaggagcctgagatccgcccacccaagcagaagataacagacccccaagagctctccgagtaccgcctccgcaagcggaaggagttcgaggatgtcatccgccgagtgcgctggagcgtctcggcctgggtcaagtacgcgcggtgggaggagcagcagctggacttcgcgcgcgcgcggtccgtctacgagcgcacgctcgacgtcgcccaccgtgaccacacgctctggctcaagtatgccgaattcgagatgcggaaccggtttgtcaaccacgcccggaatgtctgggaccgcgcggtgtcgctcctcccccgggtggatcagctatggtacaagtacatacacatggaggagctgcttggtgcagttgccaatgcgcgccaggtgtttgagcgctggatgtcttggcgacccgacacggctggctggaattcttacatcaagtttgagctgcggtatggggaggtcgagcgtgccagagctatctatgagcggtttgtggctgagcacccacggccagataccttcatccgatatgctaagtttgagatgaagcgcggtgaggtcgaacgggcacggcgggtgtatgagcgtgcagcagacctgcttgctgatgatgaagatgcagaagtgttgtttgtggcatttgcagagtttgaggagaggtgccgtgaggtcgagcgtgcacgtgcaatatacaagtatgctctggacagggtgcccaagggtcgtgctgaggaattgtataggaagttcctggcatttgagaagcaatttggtgaccgtgagggaattgaggatgccattgtcggcaagaggagatttcagtacgaggatgaggttaggaaaaacccactaaactatgactcatggtttgattatatcaggctggaggagagtgttgggaataacgataggatcagggaggtgtacgagagggccattgccaatgtgcccccctgcagaagtgcagaggagaagcgatattggcagaggtacatatacctctggattaactatgcactttatgaggagctagatgcacaagacagaacggaccagggaggtttacaaggaatgcctgaggctgattcctcacaagaagttcacatttgcaaagatgtggctcatggcggcccagtttgaaataaggcagaaaaatctaaagcctgcaagacaaattcttggaaatgcaattggaatggccccaaagggcaagatattgaagaaatatatttaaatcgagctttatttaggtaactttgaccgttgtaggactctttatgagaaatatattgaatggtccccagcaaactgttatgcttggaggagatatgctgaattggagaagaaccttagtgatactgatcgtgctcgatcaatatatgaacttgctattgtacagacagcccttgatatgccagagattctgtggaaggagtacttgcagtttgaaattgatgaaaatgaatttgagaggactaggcaactatatgagagactgcttgataggacaaagcatttaaaggtatggaccagttatgcggagtttgaggcctctgctggcttgggcggtgaagacagtgaaggtgaggagaaaaagaatgataaggaacagaagatggagcaagtcaaaaaatgtagagctatctttgaaagggcattcgactacttcagaaccagtgcctccgagttgaaggaggaaagagctatgcttcttgaagaatggcttaataaggaagtgatctttggtgatcttggggatgtcaccttagtgcaaaagaaggcgccaagaaaagtcaagcggaagagaccaattcctacagaagatggctccactatagcatgaggagtatatagattacattttccctgatgaagttgctctagcaccaaacctgaagatcctggaagcggcttacaaatggaagaagcagagaaccgacgatgacaatgtgtgatcctggcatcgcagtattggcgttgtcgtgaacattttgctacagccaaaatcaggtgtcttgcaacactggccagagctatcggaatgagaataatcgatttcttcatgtcacagaggatgcagttgctgttgaaaagaattgtcagaaatacttttaacaggtaactgtatgg

SEQ ID NO: 6299 - DNA, 1192 bp, Zea Mays
tcgggtgctggtggttgggcagtaggcaaaggcaaggccgtacgcggaagaaaccgccgcagcctgcccagcgcaagaaaaaggcagaacccagccgcggcgccctcttcgcagtcccaactcccaaccgagaggttggagatgacacatgtgtttccaagggaaggtgcctcatctagctcaacctcaatgagcagccagaggagtgaaactgatgatgataggatgattgcaatggttctctctgaagaatatgccaagttagatggtgctatggccaagcgtcttactaatttaacatcaattccccttgttccccggattaatacatacttcccgacatatagtgatgctactatggaccattatcgcctccttgacaggttaaatgcatacggcttgtttgaggtgagagtgtctggtgatggaaattgtcagtttcgtgcactctcagaccaactatatagatcacccgattatcacaagaatgttcgaaaggagattgtaaaacagctcaaggaatgtaactccttatatgaaggttacgttccaatgaaatataaacattattgcaagaaaatgaagaagtatggtgaatggggtgaccatgtcacgctacaagcagctgctgacaagtttgctgcaaagatatgtcttctaacatcattcagagatacctgttttgttgaaattgttccacaatatcaagctccacagagagagatttggctgagtttctggtccgaagttcactataactcactgtacgatgctcgagatctccctagcaaatacaagcctagaaagaagcattggttgttgttttgatatccacgcgggggtttgcttcttaatggtggaatcatattgcttgaccgcttcgaccaccggccgctggtggcagcctggtcatagctcattgtggctctatccactatatagctatgcatcaatgatccattgtattgctcggtacaactccatcacgatccaggcatacaacactagatacagttacaatgccgaacctgagccttgtgaatagatactcctttactgacatacaggttgattgtataccatgtcctatttgttcattgttatattctttatttatacagttacatattattaatcttcatcagttcattattcagttcatatttggaagaattcatcatcgtgttcttgg

SEQ ID NO: 6300 - DNA, 1692 bp, Zea Mays
gcgaggagctcgtcgcggcgggccgctccgacctcgcggatgccgtcgcgtccagcgggggctggctctccctcggctggtcctccaccgccgcggaggggcccgcgacgatggctgcgccgcgctcatcgggcgggggccaccctgactacccgcccgagacgggcgtgtattaccgtggtgacctagcgccgggctcagtggatgactccgagtgggaggaggaggaggaggacgacgacgaagaggaggcgtcatcatctgggcgggagccggaaacagaggagaccaggttcaaatcaggaatcgaggggatgctcaccaggctgcagaaggatagggagcaagcgcggccacctccacggagtagtacccacgacacacgggaacaaagtgatgatgatgctttagctggcaacagtggcgctcctagtcatatagcggctggcggcagacatattcgaagggtacctgagaatggaagtgtccgtggatctcattatcaaaatggaataatagagggcaacaacaccttagagagttcgagcaatgatgcatggaaaacatggacccttggcaagggtggtttatctcattttgaagtggctgaggtcctacctactgaaagaagaaaattatcccaacatggtgacattgcatctgtgcaaaatgatgttcaaaggtcatctaatggtgtggctgtaagtgattatcctagtgatggtgttggcactgaaagagatgagatacattcacgtcttcaaagtctggaattggacctttcttctgctctgaagacattaagatcaagatttgataaagtcttatcacatatgtcaaatagtaatggagcaactgtgctagatgacatctctgatgattgggaacttgaggagacaaaggtaatgcaagctcaggaggagcttagatcaatccgggccaaaatagctgtgttagaagggaagatcgcacttgagataatagaaagttggaaagatcagaaaacggcatgttttccttaaatctgagactgtaccctggtagatatgagattaagtttatcgttgacggtgtttggaagaatgatccgctgcgacccaccgtgcataacaatgggcatgaaaacaaccttctgcttgtcacttgacttgaagtttgcacccggtagcatttttgtagatcatttgcctagcaccttgtcggtcccccatgtaactaatcaactttcccttcaattttttctttcttttctagataggtgtgtgcaacataaacagtgtagggtgttattgaaacctgttgagataggagaaggaagtagatgcatattcttttgttcccatcgttctccccggtgttggtccagcttcatgattttgtttaacaatgttgtgatgtacatatgcagtgaggtggtctattatcgaaattatttcaaaatttgtttgcaggagttacattatcgtcgttctaacccccacatagaatgcagctaagaatcgccggggggattttgtttacggtgggaagggatttcttccagtgaaggtacggcattcgtttatccaggtctgcgtcactgaagtgctgaaggcatgtcatcggagtaaatgcttgtaatcataagctgccacttgatcatcctatagattcaaatgaaaggaccagtaacaaaggtataaagtaataaac

SEQ ID NO: 6301 - DNA, 2191 bp, Zea Mays
caaatatcaaaatctctcccattccactgcccctaccacagttccactggccttcgcttcgccacggttctcgcctcctcgcattctaaacatcgccatgattcggtggttctgaatgcatctcctgtaaccaccgggcccggagcttctcccaagcccgcgtcgccgtcgagggctgttaacctggcaacactctcaccaaccaacaaacaaacgcgcggggtcgctgtaatggccgccgccgccgccgctgtgaatgggagcctagaccgcctagacgtgcatgagaggaaggcgcagaagagctactgggaggagcactctggggagctcaacctcgaggccattatgctcgactcccgtgccgccgaactcgacaaggaggagcgccccgaggttctgtctttacttccttcatatgaagggaaatctatactggagctgggagctggaataggtcgctttactggtgaactggctaaaacatctgggcatgtttttgcagtggatttcgttgaaagtgtgattaaaaagaatggaagtataaatgatcactatggcaacacgtcctttatgtgtgctgatgttacatccacggacctgatgattgaagcaaactccattgatctgatattttcaaactggttgctgatgtatctttcagatgaggagattgacaagttggtagaaagaatggtaaaatggttgaaggtcggtggttatatcttctttagggaatcttgcttccatcaaactggagatacagaaaggaaatttaacccaacacactatcgagaaccaaggttttataccaaggtatttaaagaatgccaaacctttaatcaggatggcacttccttcaaactttctttgattacattcaaatgcattggagcttatgtaaacatcaagaaagatcaaaaccagatatgttggctatggaaaaaagtaaactcatcagaagatgggggatttcaaagttttttggacaatgtgcagtacaaagccactggaatactacgctatgaacgtatctttggagatggctacgtgagtactggtggagctgagactacaaaagaatttgtggagaaactgaatcttaagcctgggcagaaggtgcttgatgttggatgtggaattgggggaggtgacttttatatggctgagaagtatggtacacatgttgttggtattgacctttccattaacatgattatgtttgcccttgagcgttccattggatgtaagtgcttagttgagtttgaagttgctgattgcaccacaaagacatacccagaccacatgtttgatgtcatctacagtcgtgacactatccttcatatacaagataaaccctccttgtttaaaagtttcttcaaatggctgaaacccgggggaaaggttctaatcagtgattactgcaagagtcctggaaaaccatcagaagagtttgcaacatacattaagcagaggggttatgatctccatgatgtggaggcttatggacagttcctcagtgttttacagaaggagctagacaaatttgagaagaacaaagatgatttcctgtctgagtttgcccaggaggattatgacgatatcgtgaatggatggaaggcaaaactgcagaggagctctgctggtgagcagaggtgggggctgttcgtcgccaccaagtgatgcgcgtgcgtgtggctttattacaaataacatttggagctctgctggtgagcagaggtgggggctgttcgtcgccaccaagtgatgcgcgtgcgtgtggctttattacaaataaatttgaagctctgctggtgagcagaggtgggctgttcgtcgccaccaagtgatgcgcgtgcgtgtggctttattacaaataaatttgcttctgcaattcaccgatgggattcgcttcataacgtgattttacataactgaactcagagagcctatcctattgctttgtgttttgggacaatgagactgatataacttttacggtcctgttaaatatagagtgtgctgtactgatgctcctcatggctgtggctacatggttgacacgtgacatgagatttgttattttcatatttttttagaaaaatattttgcatctcaacttttgaccaatgtgcatcagatgcattgaatctgtgcatcattttataatttttttaaaacttatgtgtac

SEQ ID NO: 6302 - DNA, 2206 bp, Zea Mays
caaatatcaaaatctctcccattccactgcccctaccacagttccactggccttcgcttcgccacggttctcgcctcctcgcattctaaacatcgccatgattcggtggttctgaatgcatctcctgtaaccaccgggcccggagcttctcccaagcccgcgtcgccgtcgagggctgttaacctggcaacactctcaccaaccaacaaacaaacgcgcggggtcgctgtaatggccgccgccgccgccgctgtgaatgaccgcctagacgtgcatgagaggaaggcgcagaagagctactgggaggagcactctggggagctcaacctcgaggccattatgctcgactcccgtgccgccgaactcgacaaggaggagcgccccgaggttctgtctttacttccttcatatgaagggaaatctatactggagctgggagctggaataggtcgctttactggtgaactggctaaaacatctgggcatgtttttgcagtggatttcgttgaaagtgtgattaaaaagaatggaagtataaatgatcactatggcaacacgtcctttatgtgtgctgatgttacatccacggacctgatgattgaagcaaactccattgatctgatattttcaaactggttgctgatgtatctttcagatgaggagattgacaagttggtagaaagaatggtaaaatggttgaaggtcggtggttatatcttctttagggaatcttgcttccatcaaactggagatacagaaaggaaatttaacccaacacactatcgagaaccaaggttttataccaaggatggcacttccttcaaactttctttgattacattcaaatgcattggagcttatgtaaacatcaagaaagatcaaaaccagatatgttggctatggaaaaaagtaaactcatcagaagatgggggatttcaaagttttttggacaatgtgcagtacaaagccactggaatactacgctatgaacgtatctttggagatggctacgtgagtactggtggagctgagactacaaaagaatttgtggagaaactgaatcttaagcctgggcagaaggtgcttgatgttggatgtggaattgggggaggtgacttttatatggctgagaagtatggtacacatgttgttggtattgacctttccattaacatgattatgtttgcccttgagcgttccattggatgtaagtgcttagttgagtttgaagttgctgattgcaccacaaagacatacccagaccacatgtttgatgtcatctacagtcgtgacactatccttcatatacaagataaaccctccttgtttaaaagtttcttcaaatggctgaaacccgggggaaaggttctaatcagtgattactgcaagagtcctggaaaaccatcagaagagtttgcaacatacattaagcagaggggttatgatctccatgatgtggaggcttatggacagatgctcaagaatgctggtttcagtcatgtcattgctgaagaccgaactgaccagttcctcagtgttttacagaaggagctagacaaatttgagaagaacaaagatgatttcctgtctgagtttgcccaggaggattatgacgatatcgtgaatggatggaaggcaaaactgcagaggagctctgctggtgagcagaggtgggggctgttcgtcgccaccaagtgatgcgcgtgcgtgtggctttattacaaataacatttggagctctgctggtgagcagaggtgggggctgttcgtcgccaccaagtgatgcgcgtgcgtgtggctttattacaaataaatttgaagctctgctggtgagcagaggtgggctgttcgtcgccaccaagtgatgcgcgtgcgtgtggctttattacaaataaatttgcttctgcaattcaccgatgggattcgcttcataacgtgattttacataactgaactcagagagcctatcctattgctttgtgttttgggacaatgagactgatataacttttacggtcctgttaaatatagagtgtgctgtactgatgctcctcatggctgtggctacatggttgacacgtgacatgagatttgttattttcatatttttttagaaaaatattttgcatctcaacttttgaccaatgtgcatcagatgcattgaatctgtgcatcattttataatttttttaaaacttatgtgtac

SEQ ID NO: 6303 - DNA, 975 bp, Zea Mays
acgatgagcaacgtgtgatcctcgatgggggttgcattgcactgcagataagccgaccgctcaccgcccgccacgtagcacccccacccacccttccctccgccaataactctcccttgtcagctagctagcgagccgtgtggccgcccgtgtcgtgtagtgtgtagtcgcagcagctagcgcccggccggccagtcgagtgagtccatcctccatcgccatccaatggccgccaccgccctgagcatgagcatcctccgcgcgccgccgccctgcttctcgtccccactcaggctcagggtcgcggttgccaagccgctggcggcccccatgcggcgccagctgctgcgcgcgcaggccacctacaacgtgaagctgatcacgccggagggggaggtggagctgcaggtgcccgacgacgtctacatcctggacttcgccgaggaggaaggcatcgacctgcccttctcctgccgtgcggggtcctgctcctcctgcgccggccacctacaacgtgaagctcatcacgccggagggggaggtggagctgcaggtgcccgacgacgtctacatcctggactacgccgaggaggaaggcatcgacctgccctactcctgccgcgcggggtcctgctcctcctgcgccggcaaggtcgtctccggctccgtggaccagtccgaccagagctacctcgacgacggccagatcgccgccggctgggtgctcacctgcgtggcgtaccccacctccgacgtcgtcatcgagacgcacaaggaggatgaccttatctcctaagcaaattaataaagcaccgccaattatcacgtcgacttgcaagcacaggagagtagaagatgtctcaatactggctgtgcatgtaatttttttgtccgtttcaaactgtattgtaaactattacctctgttttcaaatattttttaaatatttatcgccggctaaaaaaaagaaataaa

SEQ ID NO: 6304 - DNA, 2692 bp, Zea Mays
tcttaattcacgcggattgagctgaaggccgtagggccgtagggtgatgcccagtcccagtctcggccggccagctctcttttagtagagacactctgccacagcgtagcctagcatagcgtccactagctagctagctagctagcatcagtcatggaggatggcgccgagaaggcgacgacaccggattcttcttcttcgcaagcggcaccgccagcgctgagcgcggtgtacgtgaacaggcgcctcgtggcgggcaaccgcgccatggccgccgtccacgtcgcgctggtcgccacggtcatcggccagcgcgccctggcgctgctctctgctggaaccagcagcgcgtcgcccgcgtcccggtccctgcaggtgcagcacgtggccatggcgctggccgacctgacgctgctgttcgtgtgggcgctgtcgcagtcggggctgtggcgtcccgtgacgcgcgccgcgttcccgggccggctgctggcggcggtgccccgcggcgcgctcccgcgcgtggacgtgctggtggtgacggccgacccggacaaggagccgcctctcggggtggtgaacacggtggtgtcggcgatggcgctggactaccccggcggcaagctgagcgtgtacctgtcggacgacgccgggtcgccgctcacgctgctcgccgcccgtaaggcctacgccttcgctgccagggcctgggtgcccttctgcaggaggcactccgtgcagtgcccctggccggacaggtacttcgccggcgacgacgacgacgctgacggcgatcggcggcgggaggagctcgcggaggagagggcaagagtcaggaaactatacgagaagttgaaagcggatatagaggcggctaagaatgacgagactatttctgggagctggtcaaaagacaaacgtcagaatcacgatgcttacgtggagatcatcgaagacggcgacggcgttgaggagattccggcgctggtgtacgtagcccgcgagaagcggagagcgtggcctcaccacttcaagctgcgagtgtcgggcgtggtgagcaacgcgccctacgtgctggtcctcgactgtgacatggcctgcaacagccgcgcctccgccctggacgccatgtgcttcctcctcgaccgcaggccgccgccggacagcctcgccttcgtgcagttcccgcagctgttccacaacctcagccacaaggacatctacgccaacgagctcagatacatcttcgggacccgatggttcggcctggacggcgtccggggccctcccctctccggctccggcttctacgtcaggagagacgcgctttacggggccacaccgaccgcggacttcatgcccgatgccaccgccgtcgccgagctcaagacaaggttcggccactccgaccgtctcgtggcatccttacgcagccccggcgttccaccagaagcagaagcgatgatgtcccttgcggcgctggcctcctgcgcatacgaggccggcaccgcctggggcgccggcgtcggcttcatgtaccagtcggtggtggaggactacttcacggggttccagcgcttcttcgcccgggggtggacctccgcctactgctacccggagccgcgcccggcgttcctcggcagcgtgcccaccaacctcaacgacgtgctggtccagaacaagcgctggatgtccggcatgctcgccgtcggcgtctccaggcgccactccccgctcgcctgccgcccgctcctccgggcctccctgctccaggccatggcctacgcctacttcggcttcgccgcgctctgcgccgtccccgtgctctgctacgccaccctgccgcagctctgcctcctccggggcgtcccgctattcccctgccccgccgccaccgcggcggcgttcgcgtcctcgcttctgcagcacatggcggaggtgtgcgtgtccaggcggggtaggctggacctgcgcacgtggtggaacgagcagaggttctgggtgctcaacgccctcacagcccagctcttcggctgcgtcagcgccgcccaggagctgctcggcgcacgcgccttggacttcgacctcaccagcaaggccgccgtcgacgggagcctgtaccaggacggcgtgttcgacttcacgggctgctccgcgctgctgctccctgccaccacgctctccgtgctcaacgccgctgcgatcgtcgccggcacctggaagatgtcgtcgtcgtcgtcgtcatcgagcggcggcttccacttcgccccgcagctgttcctcatgtgctacggcgcggcgctcagctacccgctactggaggggatgttcctcaggcgggatcctgcgagggttccgccacgcatcaccgcactctcggtcgcattggcagccgtgctgcttgccgccatgcttggatgaacatcaaccgagagatgcacggcctgcttcaactcttgtctactgttctagatatactgtacttttaattactattcccactgtattcccaccgttgaagcacaacaacgcagtgaactaaacgacgaacgagaagaagcccaaggttaattagaactaatttatgatatacgttcggactaattattctacacatcaaagatatttatgtaatgcggtataatatatataatttgtttactattgcatacgcataaatttagaaagataagaa

SEQ ID NO: 6305 - DNA, 1238 bp, Zea Mays
cgaggcccatctccgacgacaaatgaaaaccctaatctccagcaccccggcggcctcctgcgctctctggcgctaatggcgccgccgcgtccacccacaggaccgatcctcttcctgcccctcgtcttcctcttcctctttaccaccgccgttgcgtctgcggcggcgcctgaggatgaaaagttcactgaggagctgctcctgcggtcgctcccggaccgcaaggcactggcacacttccacttccgctcctctgctccccccgctgcctccgttggtcggcaccaccacctcttccccaaggccatctcccagctggttaagaaatatcatattagcgagttggagctatctttcacccagggaagatggaactatgaacagtggggtggatttgatcctatgtcaactaataatgcaaagcctcctggtgttgagctgtgggcagtttttgatcttcctttgtctgagatcgatgcaacatggaagaacctgacacataacactctctggcctattttgtgcatccatcaactttttggagtcttccactgcagtttctgctcctcgctggggcttcaaactgaacgaaggcaatttgcgatatggtgcattgcctcgtgaagcagccttcaatttacaaaggatattaccattcacaaaaactgaaactgagatcctcccagtcacttggtattattcttgatcaaactctgactgttgtgctgcaaccaaataatgtacatggtgaacagctacattccaatcatggtcaacttcagcccaactggtccatgagacatcttttcaacagaaagttatcagggaaatgccttgtttctaaatccagcagagtattcattgaggttgataaaggcattgctgacaaagttaacatatctagaagtgttcattcttggagtaatgaattctttgtattgtccaatagcccggacaagttgatcaaagacagcaatctagaagttcttctggtggtctggcaccttttctgttcatgtttttgttgatcagaacagaaaaaaaacacactgtaaagtttaggcaagagcgagatggctttatgaggaagtttgagggttgctggacgatagaacccctttttgttgacaaggaattatgccttcctctgaatccacattcattggaggaatatgaatcttgtactggtggcagggggagcgcaccgtcgcctccttccgggaccgcctcgccgcgca

SEQ ID NO: 6306 - DNA, 2337 bp, Zea Mays
gtccacgtgcgccgcacacgcgggaaaggggactctacaacacgcatcgccccgagccgagccctctcgcttcccttttataccccttgccacgcgcattcccctctccactgccagctccggtccgcagagggagggaggaggacgccagttgccactgccgcgccgctcccgcctccctctctccatccgacgagctcgagaagccaccatgatctccgcgcgcaccgccgcagcttcccccgcctccctgtggaagcggggaggacaaagtgagggcggcggcagttgcgacggatgtcggacctacaggaacactttgcggagggccgcagcagcgaaggtgcgtgccttgccgtcgagggcggtggaggcggtcaaaatgggctccgccgcggaggtggagcaggaggaggcggtcaaaatgggctccgccgcggagatggagcaggaggaggcggaggtggccgcggccgcggccggcgtcgtcgtcgaggaccactacggcgaggacagcgccaccgaggagctgcccatcctgccctgggccttctccgtcgcaagcggttacaccctcttgagggatccacatcacaacaagggtcttgctttcatggagaaggagagggatgcacaccacttgcgggggctgcttcctcctgcagttgtgcctcaagaactccaaattaagaagatcatgcacaacctgcggcagtaccaggtccctttgcagcgctatatggccatgatggaccttcaggagaggaacgagaggcttttctacaagcttttaattgataacgtggaggagctgcttcctgtggtttatacaccaactgtaggtgaggcctgccagaagtatgggtccatctttcgacaaccacagggtctgtatgtcagcttgagggacaaggggaaggtcctagaagttctaaggaactggccacataggaacattcaagttatctgtgttactgatggtgagcgaatcttgggacttggagatttgggttctcagggaatgggaattcctgtaggcaaacttgctctatacactgctcttggaggagttcgtccatcagcttgtttgcctatcacaatcgatgttggcacaaataatgagaaactgcttaatgatgagttttacattggactccggcaaaaacgtgcaactggcgaggagtatcatgagcttatggaagagttcatggctgctgttaagcaaatctacggcgagaaagtcctcattcagtttgaggacttcgcgaatcataatgcttttaatttgcttgcaaaatatagcaagagccatcttgttttcaatgatgacatccagggcacagcatcagtggtccttgcaggtttgttagcagcactcaaggtgtgggcacatgagcatgagcccttgacaaccttgtacgatgctgttcagtccatcaaacctacagttctgattgggacgtctggagttggaagaacattcacaaaagaagttgttgaggccatggcttccttcaatgagaggcctatcatcttttcactgtcaaatccaacctctcattctgaatgtactgctgaagaagcatataactggactcagggtcgtgtaatatttgccagtggcagtccatttgaccctgtggagtacgatgggaaggtttttgtacctggacagtcgaacaacgcctacattttccctggatttggcctcggtcttgttatctctggagccatccgtgtccacgaggacatgcttcttgccgcctcggaagcactagctgctcaggccacacaggagaacttcgacaagggatcaatcttcccgcccttcaccaacattagaaagatctctgcgcgcattgccgcagccgtggctgcaaaagcttatgaactcggtttggcgacccgtctgcctcccccaagggacctggtgaaatatgcacagagctgcatgtacactcctgtctaccgtaactaccggtagtgctgctgggatcaattctgcagtaataaaatatgtcgacgcagatgatcctgcaatgttgtagtttattttttcatttgttggccctgctgctgaccacctttgtggctgctagacactgtacctgtctatgcatatatgatactggaacatttggcgcgctgtgggcgtccctgtcatgagatcaattgcagaaataaaatgcaatttagatttgagcaccaaaataaaaatagtaataatacacaagtgaggcaagcatatgttgaatctgatttgcttcaccttcgattagagatgacaatgagtaaatattcaccttcgattagagatgacaatgagtaaatacccgt

SEQ ID NO: 6307 - DNA, 657 bp, Zea Mays
cagggatggactagtatgcaagcaaatggggcgcttggcgtctgacctcaacaagcaagaaagcaaatggcaggcggcagggttgcgcatgccaccctcaagggcccgagtgtggtgaaggagatcttcattggactgaccctgggtctgatcgcgggaggcatgtggaagatgcaccactggaacgagcagaggaagactaggtccttctatgacatgcttgacaagggccagatcagcgttgtcgtcgaggagtaaagagttcttcccagttattttcaaagaactctctcgagagcatgacaaagtgattgcttgctgtggagatttgtcctggaaataagcacaaccatttgggaacaccagattttgtcgaattttcctttccttttgatgaatatttgagcacgtccatgtcaataccaaacatctggccttttctctctctgttttttttacatatgtttatgtggtcttagcgagtagctgtgctcgactttgcgttatgaggtatgccgtatgtgattggatcacggtgacctaacaggctatcccacacttgtgtttttacctgacttttgagtgggtgatgcacggataatattgacatgttgcgtgcacgttcaggtggtgctctttcacttgatggcgtcgtcg

SEQ ID NO: 6308 - DNA, 2521 bp, Zea Mays
acacttgcttgctccctctcttctccccttcgtccaggcgccggatctgacacctctcccaccaccaagcttggctgcgctgccgcgcctcgcagatcccgatctccccatgcctcctcgcccccgctgaccccactgcggctgccgacagccacgatggcgtcgcgcccgcccctccgcactacctccgtcgcctccgtcttttcctccaccgactcctccacttccaccggcccccccggtggcgtcccgcagtccatcaccgcgctcctcaacaacccgctcccctcctccgccgcctcctcgtactcctggttgtcgtggccgcccaccaccataacgctacccgatgcggctccaccgccgccgtcgcacccctgcgagatcacccgcgccgacttcgcaccctaccttgccgccgtctccgaccccttcgcgcgcttcgccgacatccgcctccatgcccacgccgagcttgccgcctcttctgacgccgagggcgcccccgcggcctcctccggcctcgccgcctgtctccgtgaggtgcccgcgctcttctttaaggaggacttcgcgctcgaagacgggcccaccttccaggccgcctgcccgctcgacgacgatgcgctgcaggagcgcctcggacagcacctcgacgtcgttgaggcccaccttgtgcgggagatagcactccggtctgagtccttctatgaggcgcagggccggctgcgcgggcttgatggggagatcgtcacggcggtagggaggatccgcgagctcagagaggtggtccaggttctcacgggggacctcgtcggggcagcgaggcaggtgcaagagctcaatgctacccgaggcaaccttgtggcgctgcagcagaagctcactgtcatcctctatgttagccaggcgcttaccgcgctgaagctgcttgttgcagctgcagattgtgctggtgcactcgatgtcatcgataacttgcaaaatctgctagatactgatgaacttgctgggctttattgctttcggcatattcgagatcagctgggaacatcactagattccgtgaacagcagaatttgtgcatgctgctgttcctgatggaaaagctgtagatgctatgattttatcaactgtgaaaagaaaggcttcgagcccattgaatgggacagaccatgagggtaacatagacgaggaggaaagttttattctcagggaccggctcctccccctcattatttgcctactgagaacggacaaatttcctgcagttctcagaatttaccgggatacacttataactgttatgaaagcttcaatcaaagcaacagtagcggaattactccctgttttaactgccagaccaatagattctgattcagtaactggaggcagagctaccgatgctgacgctggaggccagtccttggcaaataagttgcggagtctttcatctgaaggatttgttcaacttttatctgccattttcaggatagtacaggtacatttacagcaagcagctgaagtgaaaagaatagttgagtggatcatgggaaaccttgatgaaacattaagtattgatgctagtaatcctacattacaacatggtggttcagttatttatgatacccaagagaatgactcttcacggggctctaatactcttgcacggagtacttccaagatcccatttgtccaaggaaaaataaatgatttttccattataagttcaataaagaatgttcgggctgatgtcttgagagaaaacactgaagcagttttcgcggcttgtgatgctgcccatggacgatgggctaagctactaggtgttcgtgctggattacatcccaggttaaggcttgaagaattcttgatcatctacagcataacagaagaatttatagctgctacagaaaagattggaggcaggttgggttacaacattcgtggaatcctacaacaacaatcaaagcaatttgttgattatcagcataatgttcggatgacaaaaatcaaggcagttcttgaccaagagacgtgggttgctgtggatgttcctgaagagtttcaagcaatcgttctttcactttcatccacttactcttctgttaatggcatggagatgcctagcactgatgataactcaaagttcagtgatcatcagcctacaagtcaagaactgacatattctgctgaaaataatgctgataatggcaaagtaacatccgggactggtgaaaaccaggttgaatccacttctcagagtgcaaataatgttgccgggaatctgaaatccaccttgcaaacaattgtacatggaggtgttggctatcatatggtaaactgcggtttgatactgttgaagatgttatctgaatatgttgacatcagtaaatgtttaccatcactatctttggaggtggtccaacgtgttgtggaaatattgaagcttttcaacactaggacttgccaacttgttctcggtgcaggggccatgcagaacctgagctgcatacattga

SEQ ID NO: 6309 - DNA, 2531 bp, Zea Mays
cacttgcttgctccctctcttctccccttcgtccaggcgccggatctgacacctctcccaccaccaagcttggctgcgctgccgcgcctcgcagatcccgatctccccatgcctcctcgcccccgctgaccccactgcggctgccgacagccacgatggcgtcgcgcccgcccctccgcactacctccgtcgcctccgtcttttcctccaccgactcctccacttccaccggcccccccggtggcgtcccgcagtccatcaccgcgctcctcaacaacccgctcccctcctccgccgcctcctcgtactcctggttgtcgtggccgcccaccaccataacgctacccgatgcggctccaccgccgccgtcgcacccctgcgagatcacccgcgccgacttcgcaccctaccttgccgccgtctccgaccccttcgcgcgcttcgccgacatccgcctccatgcccacgccgagcttgccgcctcttctgacgccgagggcgcccccgcggcctcctccggcctcgccgcctgtctccgtgaggtgcccgcgctcttctttaaggaggacttcgcgctcgaagacgggcccaccttccaggccgcctgcccgctcgacgacgatgcgctgcaggagcgcctcggacagcacctcgacgtcgttgaggcccaccttgtgcgggagatagcactccggtctgagtccttctatgaggcgcagggccggctgcgcgggcttgatggggagatcgtcacggcggtagggaggatccgcgagctcagagaggtggtccaggttctcacgggggacctcgtcggggcagcgaggcaggtgcaagagctcaatgctacccgaggcaaccttgtggcgctgcagcagaagctcactgtcatcctctatgttagccaggcgcttaccgcgctgaagctgcttgttgcagctgcagattgtgctggtgcactcgatgtcatcgataacttgcaaaatctgctagatactgatgaacttgctgggctttattgctttcggcatattcgagatcagctgggaacatcactagattccgtgaacagcattctttcagcagaatttgtgcatgctgctgttcctgatggaaaagctgtagatgctatgattttatcaactgtgaaaagaaaggcttcgagcccattgaatgggacagaccatgagggtaacatagacgaggaggaaagttttattctcagggaccggctcctccccctcattatttgcctactgagaacggacaaatttcctgcagttctcagaatttaccgggatacacttataactgttatgaaagcttcaatcaaagcaacagtagcggaattactccctgttttaactgccagaccaatagattctgattcagtaactggaggcagagctaccgatgctgacgctggaggccagtccttggcaaataagttgcggagtctttcatctgaaggatttgttcaacttttatctgccattttcaggatagtacaggtacatttacagcaagcagctgaagtgaaaagaatagttgagtggatcatgggaaaccttgatgaaacattaagtattgatgctagtaatcctacattacaacatggtggttcagttatttatgatacccaagagaatgactcttcacggggctctaatactcttgcacggagtacttccaagatcccatttgtccaaggaaaaataaatgatttttccattataagttcaataaagaatgttcgggctgatgtcttgagagaaaacactgaagcagttttcgcggcttgtgatgctgcccatggacgatgggctaagctactaggtgttcgtgctggattacatcccaggttaaggcttgaagaattcttgatcatctacagcataacagaagaatttatagctgctacagaaaagattggaggcaggttgggttacaacattcgtggaatcctacaacaacaatcaaagcaatttgttgattatcagcataatgttcggatgacaaaaatcaaggcagttcttgaccaagagacgtgggttgctgtggatgttcctgaagagtttcaagcaatcgttctttcactttcatccacttactcttctgttaatggcatggagatgcctagcactgatgataactcaaagttcagtgatcatcagcctacaagtcaagaactgacatattctgctgaaaataatgctgataatggcaaagtaacatccgggactggtgaaaaccaggttgaatccacttctcagagtgcaaataatgttgccgggaatctgaaatccaccttgcaaacaattgtacatggaggtgttggctatcatatggtaaactgcggtttgatactgttgaagatgttatctgaatatgttgacatcagtaaatgtttaccatcactatctttggaggtggtccaacgtgttgtggaaatattgaagcttttcaacactaggacttgccaacttgttctcggtgcaggggccatgcagaacctgagctgcatacattga

SEQ ID NO: 6310 - DNA, 1479 bp, Zea Mays
aggtatgccagccgcgacgtcgtgccgggcggagggttttgccgagattttcccaaaaaagggcattgccacccgcaccgagaaaagaaaacgatacacgccgcgatagaaacactcagacacaccctctccatccgcccctcctcttcctcctcccggtcgcggcttcccccgattggcatccggggcgggcccatcccccacccggccgccgcgcgcgtccatggacggcctgcacggtacggacgcctgcttctcccccgcgagggccgtctcgccgcaggtgaggctcccggggccgccggacgtgggcagtcagtacctggcggagctactgcaggagcaccagaagctgggacccttcatgcaggtgctcccaatctgcagcaggctgctgaatcaagaaataatgcgggtgttgaatatacggcgccagcatggtgctgctgtggactttgagaagtttgcagccgcaagccccaaccagatacatccgtcaccccccatgccgaacttttgtggaaacggttttagtccatggaatgggatgcattcagagagagtaggtgttccgcaaggagctatgggttggcaaggacccccacagagccctgcttcttatatcgtcaagaagattttgcggttggaagtaccgacagaaacataccctaatttcaattttatcggtcgtcttcttggaccaaggggaaattctttaaagaggattgaagcctgtacaggctgtcgtgtattcatcagagggaaaggctcaattaaagattctggcaaggaggaacaactcaagggaagacctggctatgaacacttgagtgaacccctccatatcttgattgaagctgagttacctgctaatgtgattgatgcaagacttgcaaaggcacaagagatccttgaagagttgttgaaaccagtggacgagtcacaagactactacaagagacagcaactccgagaacttgccatgttgaattcgccactccgagaggagagtccacgttcaggcggtgctcctccaagtcccttcagtaagactgtctccgttcaacatatttgcactgaggacaagggttgttggcacgacgatcatcgtgggaggaagggagctttgccataggagcgactaccgtggccatgaccatgggaggaaggaccatgacgacccatgtagttggtagagacattgtattgtaaatacaatttggccacgtgttggagttggtaagcctcaagcacaactaggtttgcgaatatgtagtcgaggggagtggctcggtcttagtcgtcgtggaggtgatgaatgggtcatagtcaatcgagagccttgctaggagataggcgagaacctcgtcatcacggagagggcattggtgtcgacaagctccgtaaccttgcgaaagatgtcgatgagtcccatgaccttgcgaaatatgacagacatatcatgtttctttgatgcag

SEQ ID NO: 6311 - DNA, 1770 bp, Zea Mays
aggtatgccagccgcgacgtcgtgccgggcggagggttttgccgagattttcccaaaaaagggcattgccacccgcaccgagaaaagaaaacgatacacgccgcgatagaaacactcagacacaccctctccatccgcccctcctcttcctcctcccggtcgcggcttcccccgattggcatccggggcgggcccatcccccacccggccgccgcgcgcgtccatggacggcctgcacggtacggacgcctgcttctcccccgcgagggccgtctcgccgcaggtgaggctcccggggccgccggacgtgggcagtcagtacctggcggagctactgcaggagcaccagaagctgggacccttcatgcaggtgctcccaatctgcagcaggctgctgaatcaagagagtaggtgttccgcaaggagctatgggttggcaaggacccccacagagccctgcttcttatatcgtcaagaagattttgcggttggaagtaccgacagaaacataccctaatttcaattttatcggtcgtcttcttggaccaaggggaaattctttaaagaggattgaagcctgtacaggctgtcgtgtattcatcagagggaaaggctcaattaaagattctggcaaggaggaacaactcaagggaagacctggctatgaacacttgagtgaacccctccatatcttgattgaagctgagttacctgctaatgtgattgatgcaagacttgcaaaggcacaagagatccttgaagagttgttgaaaccagtggacgagtcacaagactactacaagagacagcaactccgagaacttgccatgttgaattcgccactccgagaggagagtccacgttcaggcggtgctcctccaagtcccttcagtaagactgtctccggtaggccgaataaaacaggggacacagaattgtagatgacactgtttaccactgtttgaagagagaagtttgaaataggatctactggagatagcctaacggcggcatgaaaagagtgaaacaatgacacccattcctccatcttgatcctccggcaaccccacttagtccatgccttcacatcctattttccatgagcaaagctttcatgatggtgttggtagtgtgtgacatcctttaatgtactagcaggtgaattttgatctcccatcccatgtgacattaaccttgagtgacagatgactatgcgtagtgtatcctctatgactgtataattagaacatttgatttatttgttactggtaatgctgagagatagtactgtgcagaattcggagttacagtgtagtgtgccaatatttatctcaaacctgtttgattttcagttcaacatatttgcactgaggacaagggttgttggcacgacgatcatcgtgggaggaagggagctttgccataggagcgactaccgtggccatgaccatgggaggaaggaccatgacgacccatgtagttggtagagacattgtattgtaaatacaatttggccacgtgttggagttggtaagcctcaagcacaactaggtttgcgaatatgtagtcgaggggagtggctcggtcttagtcgtcgtggaggtgatgaatgggtcatagtcaatcgagagccttgctaggagataggcgagaacctcgtcatcacggagagggcattggtgtcgacaagctccgtaaccttgcgaaagatgtcgatgagtcccatgaccttgcgaaatatgacagacatatcatgtttctttgatgcag

SEQ ID NO: 6312 - DNA, 2624 bp, Zea Mays
ccacaccctcaccatggctccgccctcctcccccgctaatcaccacgccgcgcacgcgccgcgcgaggcccgtcttcgttcccccaccgctaatctcgccgcggcatccatggcgccgccctcgccctccccccacatgtccacgccggcgccccctccctcgcgccccacctcaatctcctccattgcgcgcccgagaacgcgcaaatcccccattcccgcgcctctccctcgcgcctcgatggaatcgccacggcatccatggtagggtcctcaggatccacctccaccgcgtcgccacagtccgcaggggccgagggtgccccgacggtggggacctagactgtggtcaggtgcacgcgtattcaagcaggcgctcttgcttttcgtccacaacaagttctccatgtgccctgggcacgcgacacatgttcggggtggtgggcattaccgtcacctccctcacgtcccgtgccgccgcggccgaggtctgcttcctcgccttccgcaacgagcagtccgcggggtacgccgccgcctacgacttcctgacgggctccccgggcgccctcctcatcgtctccggcccaagatacatccacgggctcgccggcctctcccacgccaccgccaacgcctggtcgctcctcatgagctccggatcctgcgaccaggctgacgccggcaggggcgacttccaggagctcgaccagatcgctgccaccaagcccttcgccaagctcgccgtcaaggcaacaaccatcctcaacgtatctaggtcttccctgccaacaagaacaaatggcacgcccgccgtgccgatttgaggtggttttggaggtgaggaggggtacgatttcggtgaccctaggccttgcgggtccggtggatggaagcggtggagctgccattaccagctaaggtggagttcaggaagccaagaggaagagaataatcttggcccacatgatcgattggttcatgtttaccatttcatgaaagaccctaaccagaatcatcaaattcagaatttgagagatccctttgtatggttatttgggaaggtgagaccgctgctgaggtaatggagcgcatccagagaaaacttagagttcatgatgatgaattgtccaaggtaatatattatattattactatttatcatagaatgaatttacccagatctcccttccccctcccttaaatatgaatatagcgtggattgaatctaatctgtttattgctccaacttaatatggtgttattttattttggttgtcaaggtcgatttgctatccaacaattttgcattatttctggctacctattggtcttgctgccacaccggagttgccatcttagcttttgtcgtcctgtccccttcctatcagggcaatatgacttgctccccttcctgtcaagctacatgcttcgaccagctgaggcactgaaatgaaactaaattattgttgcaaacctctctgccatcttgtgcgtgcactatgcaaaatcacaaggcgggcttagtttctctaacactgataatgcttatttgatcagttgaagcttgcattcatttccatgaacaaacaagagtacctccaagacactaacgttgtatcaacatgtttttaggcaagtgatttctttataatgcttacatgcataccttctcttgttcactatgttcatacacgatgctttgctttttactatacgagagatgtatatggtgcttgggaacaataccttggcttggagcacactgatacaacattgaaacaataccttggcttgggatcaataccggcaaggacccaacaagcccaagagggcacccaacgcttacttcgtgttcatggagacgtgattttgggacgatcaaactgttgggattgcgcttggacattccgggcagcgtgcacccaagattgaccaagctgattcgacggtgctaggacaaagatcctgatgcgtgtctgacttttgcagagattactatagaactccaagatagtctacaccatatcgaggcacccaagggagccagccgtcgttcttgagcaaagatgtagaagaaataagaggaagaaaaagaataagaatacatacgtagggcaaggtttcctacttttttgtgtgttacacaagttgcagtatgagtgtttgtggtgtatgtcatagttataaatatttcaaggccaagtaagtataaaaaccgaccttagctcagttggtagagcggaggactgtagtggattccccatgtcatttgttcttgttggcagggaatacctagctacgacaaagatggggatggctaggaaagaaaaccaattgtgggacaatgataattgatatcaatgtcagccccttatatgctacacctgcaacctgtaatcataccgtcaactgcacctgacatccgtgcatcagaagtttttaattctgatgatttagattatgtctataaatctgttgaggatggcatggaacatatttttacttcaacaacacaactccaatttggtcatgatttgtgcttgaatgaagaagtcaagatttccttttgactcagcctgtttttctgaattactggtttgttacaaaattgtagatataat

SEQ ID NO: 6313 - DNA, 1420 bp, Zea Mays
gacgaaaataccctctctgcctcttcgacgcatcgcaacggtttgttttccttcttccacgcgttgggaaggtgaggcggcggcgcgcgctagggaaaggtgtggcgacggcgtgcgatcggggaagggaacgcggcggcgcgtgcagggctacgcgacgccctctgcgcgtctccgtcaggaggaggcgtttccatcagccacctcgctccaagcacgctctgcttggctgcccctccggtttggccttgtgcaaatggacgcaagcaggtccaatttggctggtggctcgaatccatcacaatttgctaatgttgaatcttggaactttgatggatgttattacaacatcatggatgatgagaatttacaacataatgcagatgtgcatgaggttcaagggctgccctcagacgatgtcgaagtacacagtacaagtgcaacaaagaaagtagctaggagagcgaagaacttcagtcatcaagaggatgaggttatatgttctgcttggataaatggtagccaagatgcaataattggaatgaatcaaacgagtggtggctattggaagcgttttgctgattactatgacaagtacaagcctgaaggatcacaaaggacacaaatagctatacaacacatgtggaagacaattcagaaggaagtgaacaagttttgtgcgtacttgtctaaaatagagcatcgaaatgagagtgggaaagtggcagaagataggctgaagatgccatgaaaatgtttgagggattacaaaatcatcctttccaattcacacattgctggatattattgagaaatgaaagaaagtggtgtgaaaggtctactgtaacaagaccagggagggtcgtaaatgaagatcaaccctagaacatggtcccttctggtgaacctgaggttacaatacgtcccgaagtgactcatgcaagaggaagcgagggaacaaaaacactgcacctactgattccactacttgtgttgaagtgcttgagtgtatgaccaagaaccgtgagcttgtcgaggttaaacgtgatgagcaatacagggagctacttgcacgcagggaccgtgagcttgatttgaaggaacaagagatggagttcaagatcatggctgtgaacattgacgacgtgccggaggataagcgagcttactacctgaacctgcaacaaaggattatggagaagagtcacagaaacaacaatagttccacttagaatttaatgatgtttcacaatgaactttatggtggaatctttatctatgctatttaaattctgcaagttgtaatagtcaaaactatttgaaagataactatgtacctttttttggaaatttgttcttgatatttgactgaataatatgtgtacaatgggaagttgtatgtgcatctgaatggttgttc

SEQ ID NO: 6314 - DNA, 1035 bp, Zea Mays
ctatccacaaacaggggacaaggaacaggggacaggcacagccgcacagccgccgcccctccatccacctctccacaccatctgacgctgctcccaccgaggtctccaaggctcactcctcaccagcttctgctctctccctcctcatctctgctctgctctggaccgttaactctccagctccccctcgctccgttcccttccgcccaaatcactgggaccaccaccgccttcttcaagatcggcgggcgggcaccggccggcgatgacatccaccgtcaccacaaccgttgggtgcggggggctccccgtccgcccgttgtcgacagcgaccagaggacgcccacgcagatgcgccgtccgagcccaggccgcgggagcggatgcctccaatgataagtcagtggaggtcatgcgcaagttctccgagcagtacgcccgccgctccaacactttcttctgcgccgacaagacagtcactgccgtcgtcatcaagggacttgctgatcacagggatactcttggagctcctctatgcccttgtaggcattatgatgacaaagctgcggaggtagcacaaggattttggaattgcccatgcgtccccatgcgtgagaggtatgccactgtatgctttttcttactcccgataatgactttgctgggaaggatcaggttatctccttcgaggagatcaaagaggcgacatcgaagttctaagcccttgtatttgtcacggagtgtttacttgacagctaattttttatatgtatatgtacttaagtagcatctataagatatgccatcaggaaaattttcataaaatgtgcagtaaacagcacttcgcaaggctgccgatcatataagccgccttcggcctttttattgtatctgggctccatttcgtgaattaaacctacgcaattcgccgctcttaactgcttttcctgtgttacttccctctctcccagataagaaacttaggtttgtttggattgaggagttattctatccaaattgaggtgcatcatgagt

SEQ ID NO: 6315 - DNA, 1434 bp, Zea Mays
gctagacacagccttagtcacaactccaactcgtctcggtctcctcccccgaggcctcgattatccaaaaactaaccaaaatacggaatctttcccgtgtatcccaactctcacccgatctcctcgataggcttttgtctccaaggccgcgctttctaacaagattcctcccctcctctctccgataacgctagcctccgccgccgccggcgacgaatccgccatgtccatgttcaacaggatcttcgggaagcccaaggagcaggccaactccagtgccttggccacactcgacaagttaaatgagactcttgatatgctggagaagaaagagaaggtgctggacaaaaaagcagccgctgagcttgagagagccaaggagttctccaaagctaagaataaaagagcggctatccaatccttgaagaggaaaaaactttatgaacaacaaattgagcaactcggaaattttcagttgagaattcatgatcagatgatcatgttagaagcagctaaagctacaacagagactgttgatgcgttgagaactggagctgcagctatgaaagcaatgcaaaaagcaacaaacattgatgatgtcgacaagaccatggatgaaattaatgaacagactgaaaatatgaaacaaattcaagatgctttgtcaactcctcttggagcttctgctgattttgacgaggatgaactggaagcggaacttgaagaactggaaggagcagagttggaatctcagcttctggagcctgttgcagctcttcctgtgcatccagtgcatgtcccaggcaacaagcaaccagctcgccctgctccacagaaagctacagctgaagatgatgagcttgctgcactgcaagctgaaatggcactgtgatcaggtttccactgaagaggtgaaatgtgtatatgaattgcgttatgctgaaagctgagtcaggctttattgtatttgccatgtgtgtataatcttggtggatatttggcaaccgtcaaccgaagcagcgaaaggccgctacagccggtatttgtttcagtgattgggctctgttttctttccacagacaatttagttaatgtcgcccggttaggtctatgctaactattcaggtcaccaacgtgcattgtttgtcacagtatttttcagttacccatattgtttggagccatgtaagagtgttggaacgtttaaagcctcagggttcatatttgatgtgacggagggagtattacataaagtcagttgttcggatttgcagctgtaatctgtagagacaaaacactgtaagcagtagaagctgatatggattaaagtcaagcgaataggctctaatgcatagagacaaaacgacggttgaacacataggcagtaacgcatttgaaatataatggtgcgtttggttgtaatgacaaaacggg

SEQ ID NO: 6316 - DNA, 656 bp, Zea Mays
tagaagttgcttatctgatgatcaaaatccatatttttttgatcttgcgaccgcaggaaccactaagaggccgacttgttgcgtcttggttctgaccaaaccaaacaagggggagctcagtggagaggtgaaggataaactgaagtcggactatgaccaagttgtaacggaagtcgctgaggctacatctgcaatgttctgaggaccacattatctgagaatccggcaattccctgtgcacgtctttcttggtgtagtatcctgcccagcttctgtgaaccgaaccaatatgttttgcacggtggctggagcgagatatgactatgagtttacctatatgctatggaccatccttgttggcggcatatgattctaccagtgattagatctagccaattacaatcagttctgtgagcagactgtttccttgtgttgtcagatctcggtagctagtgtgtgcgttccaggtctttttgatcttatcacaagatgtgctcgtgatacttgtgttgaaggaactgtggtatcttagcgccttatatcaagattagtttttggcttctgctcgtattgggtaaaacttggaatgtagagcatcccgtcaatgccctaaacaatgataagcaaaagatccagcggcaaaatggccttagttt

SEQ ID NO: 6317 - DNA, 2163 bp, Zea Mays
ccctaccccagttttctcttctcccctcgctctctccgtgtctccatctctgctaatctgtgcaactaatcatcatcgtctccagtctccctagtccctgctgccgctgccgcttgtcgctgacgccgtcgcgtatcctccgcatctaagctgccggcggcgaccaaacccgccccgcctctcctccgtccgcccccgcaccagctggttccctcccgtgaactcgcacgctcacaggttttataattgtttgcaaaagggctatagtacttgatgagatgaagtcaacagtgttttcaacagctgttgtttctattgggtatgcattgcttggatgggattttgcagcattatcagaagctaatcatcatatggaaaaagaatttgaattgttgaatggaccttctattgaaggagagatagctgctattgtggaaggtgtggacatcatatcggactccactgttggcgctgctcgtgctcagagtttctctggaaccagtgctagccacacttggccccgtagtactttttattggcagctttcagacccactagttgatcttctcggaagcgttcatgagaatatgtcagaaggaggaagtagacggaatagtttcttcccagtcttcaacagtttttcttttccagagcatgaacatatgaatgaacacagggatggtaacagtgatcaacagactagggagacttattatgctggagaagctaataatggagatggtttaagggcttctctgctttctcaggcagcaagtgttgaagtaaatgatacaaatacctcttttacttctgaagggagctcttcatatttaagaaggcatggaacatcagtgcttgcacaagagtttatggcgtctatacatgattatgacattgaagaagaagaagaagaaatccatgggtttgcattgcctcaccagtctgcacctcgtgatatggaaagcaccgggagacatccattcagacatcaaatagtccggttatctgaaacagctgatatgaagtttaaatggcgggtgcttcttcaaccaggaatcaggcatgccttatgttatggcatgttaattcaagcccttcagcaatctacaggaatcagtggtcttctccgctgcgctcctgaaatatttgagcagtctggagtggctagtttgttttcagacattggactttctcctcattcaacatcaattctcatgagtacccttaatgctttgctgatactcccttgtataactgccgcaatgctgctgatggatgtctgcgggagaagggttattgtgctggccactactcctgtcctgatactatcattgagtgttatgtctatgtccaccctggtgaatatgggaccgttcgaaagtgccgtcctcttccacttcgcattaaccatttgcttctggtcctatgtcattggtttgggaccgataccaaacattctctgctccgagatattcccaaccaaggcccgtgcgacatgtgcaagtttctgttcgctttccttctggtttgggggcctgctttcagcgtactgcttcccggtgatgttgagcaccatcgggcttggcggagcgtgtgggatctatgcacttgtgtgctgcgctccgctttttctcgtctactatcgaataccagagacgaagatgcttaacctggagctcattgcggagctgttcaagctttcaaggcaggagcatgtacagtagattgtccaggaaccgaggtagcccaggctgagtgccgatggatggtgatgtgtgtacatatgacaaatgtaactttggatgctgaatttgtttttgctagttaggaggattggtgatagtgtacgaagtggtttactcttttgctgtccacaggttgctggcagtgtttgtagtgttttgtcttagggggaattcctgtactccactgtaattgtaatgtaccctataacttatttgtcatcgcaaatatcctaatgcaatttcttatccttccataccattgctagtggtatagaagggaccaggacatgcagttttcttatatttttttatgccgtcgccggtggcatggaaaggtaagaaattgcatccatccgagtgtcattacgagagattaggacatttgcgattggaaataaagtattagacaaaatttggc

SEQ ID NO: 6318 - DNA, 1686 bp, Zea Mays
gtgattgcgtccgcctccttcaaccctatccacatctggcacagaggaaaattggctacggtacaaaacaccgaggcatcgatggactcttccaccagctgacagctatgatttcccctgctcacctcgccttcgccgccgccttcctcctcgtcgtccggtcgtcggcgcctggcgctgctgccgcccgcccgatcttcgatggcaagccatccccctccgaggccaccgccactgcgaggtggctcgccgcccagaacacgtggggtgtcctcagcacaatatcaagtgacttaagtggagctccatttggcaatgtagtttcatatagtgatggagtaccaggcgagggccgtggaataccctacttttatctgacaactctggatcccagtgcaagagatgcactggaagatgaaaggacctcttttacccttagtgagttccctctgggaacttgtggggaaatagatcctgaaaaccccacttgtgcaaaacttactcttaggttaatggaaaggtactaaaaattacatccatgataagatgatcgatcactcgccgtttgtatgcatttagcctatttgtttagttgtgtttgaactgacaatgatctatttgggcctgaactggttttctacctataaatttcacagctgatgtttctgtagaatgaatacacgctgatgggcttgaactgtcactatttgggccatgggctgtatacttatagctgcatgtgtgttttcatttcatgttagtaatgctaatgccttatgtatttctcataattaaacttttcgactggatcatgaagttttcaataaaaagaagggacaactcggtggtatcaatttctacaatcatgaaaaaccacatggaagtagcaaattcttataaattataattgtcacgacaactcggtggtatcaatttctacaatcatgaaaacatgtatttgaggctgtctcctcttaatttatctcttatggtaaaataatagaaagttaaagagtatatttttttatcacatgttagatttaacgcagtacgattcatcagagaagaaaatccttccctttactcctctcccacaatagacataagttgaatactataacatatggtttacaaactattatatattgtggatgccacattgctgtactcgtttttttccatatgataggcatttgctatttttgcagttgaagatggttgaccttcagtcatctgaagcagatttggccaagtcagcactttttaccaaacatcctgaaatgaaggattggccaaagaatcatcatttcaaaatcttcaaaatggaaatcgaaaacatattcttgattgattggtttgggggtcctaaacccatatccccctcccagtaccttgaatttggaagaaatcagggctcattgatgtactcataagcgaagaatgcttcatcgatcaatatcccgtctgtgtatgctcttctcaaaaatgaaatccatattgcacatattgtaaagacatctctgtgcacggaataaacctgtagtgttattaaaatgaaatccatatggcacatattgtaaagacatctctttgcatagaataaagttttagtgttattattattgattatgttgtttaattatcacatcttcgtgaacaattactttacaaaaaagaagtctacag

SEQ ID NO: 6319 - DNA, 3244 bp, Zea Mays
gtgattgcgtccgcctccttcaaccctatccacatctggcacagaggaaaattggctacggtacaaaacaccgaggcatcgatggactcttccaccagctgacagctatgatttcccctgctcacctcgccttcgccgccgccttcctcctcgtcgtccggtcgtcggcgcctggcgctgctgccgcccgcccgatcttcgatggcaagccatccccctccgaggccaccgccactgcgaggtggctcgccgcccagaacacgtggggtgtcctcaggttccctccagttcatcccgaaacccttctcccgtgctcttgcccccgcgacatggcgccggagctagttccttagcagcacgtgttcgtgttggttcgatcgaaccgggaaactgctggtgctagatgaaatttgtcgctttggagtttggaaacgatgttgttatctggcggtggttaagtgctgagagtatataaaaatttgcttgaggcttcgtagtctcgagaattttttgtgctcgttgctttgtagtttgcgggagctgtgtttgtttttttttcacaaaggaaaattaggtgataaaaagtattgaaaaaaatcttccagcctcaacataacaaagaagcacacggccttttaacaaagagaagccacccacagtagtgacactcaatctgaagaccacccatatgcccgggagaatataaccttagccatccatgccaagtgttgcatagcctccacaactaaatcctgtgtagtttgggggagctgtgtagatgccattggtggagctagaaatttagctttgggtgtgcacaaagcatatgggtctaaaaaaacactcatttaatttgttgcttaaacggtaaaatagaaaacatgcatacgcaacttcaattgcttaatacatggcttaaacgtcacatggttttagtctcccatgacttgaatgagcatgggagtaaaaagataaggtctaaggaaaattacagtttgaccttgtgctctgtctaaaagtacaatgtccttgttcagcttcaaaggttcaacacttttctgaagtctgaaccataggtttagagcttcaatttctaggtggtttcgtaatacaatttcgaagtgcagtgaaatcaatgtgaaaaaaataagagttaatctcattttgaagtaaatcaataagtgaaaaaaataggagttaattgtctcagcttactgcttttgactgctgcttccttccatgttggacccaatggtgaaacaatgatggtcctgacagggtactgatgagtggcctccacttgctaattgggtgttgatagttggctgaatgttgaaataaagaactgcccccagctaatgtgaaaatatagaactgcttcctgctgatgtagtgtcattttggttgtgcctgggcacaccagactgcaaatggtacatgcccaaaatttaagactgatttgggagaagccactaccttgatatacgaactgtacaaagacagattcataattcaagatttagagtacactgtattcatgagtcatcacgtcaataagtccagtttattagtggacatattactagtgaattgcagaattgaaatctgtaaggccttgttcgtttcatcccaaaacggcaaaaccatgtggattgagggatattggggtggattgaggtggattttgattagtagtggatttattccccctcaatccacatggatttgaaacaaaatgaacaggccctaaatgtgttcaattttgttcctttctcaggttattgtagatcaatttccgtttggttggttactgatcaatcttgaatatttcatttgcagcacaatatcaagtgacttaagtggagctccatttggcaatgtagtttcatatagtgatggagtaccaggcgagggccgtggaataccctacttttatctgacaactctggatcccagtgcaagagatgcactggaagatgaaaggacctcttttacccttagtgagttccctctgggaacttgtggggaaatagatcctgaaaaccccacttgtgcaaaacttactcttaaatggaaaggtactaaaaattacatccatgataagatgatcgatcactcgccgtttgtatgcatttagcctatttgtttagttgtgtttgaactgacaatgatctatttgggcctgaactggttttctacctataaatttcacagctgatgtttctgtagaatgaatacacgctgatgggcttgaactgtcactatttgggccatgggctgtatacttatagctgcatgtgtgttttcatttcatgttagtaatgctaatgccttatgtatttctcataattaaacttttcgactggatcatgaagttttcaataaaaagaagggacaactcggtggtatcaatttctacaatcatgaaaaaccacatggaagtagcaaattcttataaattataattgtcacgacaactcggtggtatcaatttctacaatcatgaaaacatgtatttgaggctgtctcctcttaatttatctcttatggtaaaataatagaaagttaaagagtatatttttttatcacatgttagatttaacgcagtacgattcatcagagaagaaaatccttccctttactcctctcccacaatagacataagttgaatactataacatatggtttacaaactattatatattgtggatgccacattgctgtactcgtttttttccatatgataggcatttgctatttttgcagttgaagatggttgaccttcagtcatctgaagcagatttggccaagtcagcactttttaccaaacatcctgaaatgaaggattggccaaagaatcatcatttcaaaatcttcaaaatggaaatcgaaaacatattcttgattgattggtttgggggtcctaaacccatatccccctcccagtaccttgaatttggaagaaatcagggctcattgatgtactcataagcgaagaatgcttcatcgatcaatatcccgtctgtgtatgctcttctcaaaaatgaaatccatattgcacatattgtaaagacatctctgtgcacggaataaacctgtagtgttattaaaatgaaatccatatggcacatattgtaaagacatctctttgcatagaataaagttttagtgttattattattgattatgttgtttaattatcacatcttcgtgaacaattactttacaaaaaagaagtctacag

SEQ ID NO: 6320 - DNA, 2042 bp, Zea Mays
gtttagtcgcagcagtacaggctccacttgggagcgaggacgaggaggcgggtgccgctcctgtggcttcgccatgtgctctcgccccgcgtcctcggctcctccctcctcggtatctacatgccattatgccaagatctcccactctccgatctgaccagggccgggccaccgcagccatttgcgtctgctcttcccgaatccctgtctcgctttgccctccgtttctccagctataaagccggggggtcctgtggcgtgtgacctttttataccggatgtgcagcgcagggtcaacttcgtcaggtttcttggctccaacaaccttcctgggtcactcttcagtcaatctcaaactctccatgcggtttcaaaacatttgatggcaactccgctcctctgaattcgactgctacccagaaactgtaaagagatggggtgtggcccatcaatccccgacaagtacacgataggtgggaaggggcgcaagcgccggagcgtcatacaggaggttgccgtgttcgtgcccaccatccgcatcccagtggcctctgacatagctcatccgctcaggggaatagtttccaaggatcttgtcgaccgactctccacactccgtgcccatgtcgcctcgctggctgaagaaatctatcacgcggacgtatcagctgttcaagaactgcagcatgcgctagaggagtacttgccagttgttcttggtttaacaacgaaagagagccgtcttgaatcgtcagtacagttcagatggaagaccttagacgacgaccaggagtgttgtctggcgagcgcgtggtatgaggtgctctcggtggtccacatgatggccatgcttgcgttgtttgaggctaacctattgctcatcccaaagagcagccaaggtggtggtgaaaggaaggtagcagaagacgcaaagaaggatgtcgtcgattcattgctcagggcgtcgggatgcttagactactccgtgcatcgcatacttgttcagatacctgcgcaagtcaagaagggttttcccagttacttgcaggagggcatgcttgaggccatctcaattcaggcattggctcagtgtgtggaaatacagcttggcttggcttctgaatgtgagaaggcaacgctgtcagtaaagaggaggctagcttgtgagcaagtcagctatttttctcaggctcactattgtctgtcgggatgcgatacgagtgactcgtacgggaagaagcttctgctgttcctcaagtggaagtggatggaggccaaggctgtagcgtattactaccatggtctggtgctcgacaagggcggcgaaccggcaaaccatatcagtgcagtctgctgcctctctgcagctgatgacctgctctcagacagcaaaagggcttgcttgagtttttgcttggcaaatcctgtcacgagggtgcctcctccttggggtgtcatgaaaaacatgcacaaaaagatcccagatgtcgcttacaagaagttccaagcgcacgggcatctgtttgagcaaaacaagaacagcgcactccaatccgttcctgacctaccagagtttgcgctgtcgctgagaccggatggatacgagttgccaagcactgattcgatctgggataatgttgatggccaacctcagattcaaagcctcaaggagcatatgatagatgacgaagatgaagtaggcacaaaatgatagttctcacttccaaatgcttcttttcattgtaccaccaaaagtagcagagctcaaaaacgcttaatccaaaatgttttggattcagcatatggctcaactgaaaaaggaatcgcgatctctgtattattgcaagtattaccatatgatatagtaaagtcttatgtgtaatagaatcataaataatagttggtttcttgctgtaatcgcctttaattttattttcccaactggcagaatagagcatcacagaaaaaaaaaatacggcacgcatttcagtagaacaatagtctgcgtgtttggttgggtggctaagtggagaatgtagaag

SEQ ID NO: 6321 - DNA, 5466 bp, Zea Mays
ccacgctccaacagaagcctccacctctgcggtcatgagggtcatctaaccttttcacagctccagcgaatgcacacagccgccgtcgtttcttcgtcttcctctcagcgccggcgctcccactcgtgctccctcccccactcgcgctcggcacgcaggccacgcggcggcgctcaggctcgggatatcagcgacggcggggcggtcccaggcttgtcgtcttcgtcagcggctccccctcctgcctctcgccaatcgcctcgcgccctcgcctctggttctccgcacacagcccggcgaccctgcgtgcgcccctaccgcctccggtggaccatcgacggctcctggcccggcggctgcgctgcacgccgcgcgcggccggcgggcagcgggagctagcagccgctgctgcaccaaggcggtcgcgccgctttgggagcgcttttgccccaaagcgaagcattaccagtccgcttaacgcttcagcgcgctgaagcgtgcgtttagttccgctttttggaaccctgtgctgacttctctttcgaggatctagagcgcacaatgatattttgctagcgttatgctcttcaactcgccaaaatcagcaaaacgaataggagtacagttcctatcagttgcaagtgcagactgctttggtcgagatgtctctccgacgcactttgcatccctgttaaaggaatgcaggtctgtgaatacagttcgtcaaattcatcagaagataattgcttgcggccttctttcgtatccatcatctttgttgtctgtgccactcgcaccacttccatcacattcatatgtatcaccaaaatctttgggcaccggtgttgtagcttcctatcttgcttgtggtgctacgaaggatgctctctcagtgttggagcgtgtcacaccatcaccagccgtgtggtggaatctactcgtaagagaacacatcaaggaaggccaccttgatagagcaattggtgtatcttgtcgcatgctgcgtgctggaactaagccagaccattttactctgccgtatgcgctgaaagcatgtggagagctaccttcatactgttgtggaagagcattacatggactcatatgttgcaatggatttgagtcaaatgtctttgtctgcaatgcattggtggcaatgtattcccgctgtggttctttggaggatgccagtctggtgtttgatgaaataacacggaagggaattgatgatgttatctcatggaattcaattgttgctgcccatgttaagggtagtaatccgcggactgcattagagctgttttcagagatgtcaatgattgttcacgaaaaagctacaaatgaaaggtcagatatcattagcattgtcaacattcttcctgcatgtgcttctctaaaggcattgcctcaaattaaggaaatccacagctatgccattcggaatggcacatttgcagatgcttttgtgtgcaatgctctgattgatacctatgcaaagtgtgggtcaatgaacgatgcggtaaaggttttcaatgtaatggaattcaaggatgtcgtttcttggaatgcaatggttactggatacacccaaagtgggaactttggggcagccttcgagcttttcgagaatatgcgcaaggaaaatatcccactagatgtcataacgtggagtgctgtaattgcagggtatgctcagagggggtgtagccaagaggcccttgatgcattccagcaaatgattcttgatggttcagagccaaattctgtcactatcatctctctattgtctgcttgcgcttccttgggagcattgtctcagggcatggaaattcatgcatactctctgaagaagtgtcttttatccttggataatgattttggtggtgacggtgacggtgaggatctaatggtgtacaatgcattaatagatatgtactcaaagtgcagaagtttcaaagctgcacgctccatatttgattccatacctcgaagagaacgtaatgtggtgacttggaccgtcatgattggtggatatgcacaatatggagactcaaatgatgccctcaagattttctcagagatgatttcaaaaccatacgcagttgccccaaatgcttatacaatttcctgcattttgatggcctgtgcacatctggcagctcttcgtatgggtaagcagattcacgcttatgtcacccgtcaccatgaatatgaaccatctgtgtactttgtggcaaattgccttattgatatgtactcaaagtgtggtgatgttgatactgctagaaatgtatttgatagcatgcctaaaaggaatgaagtatcttggacttcaatgatgtcagggtatggaatgcatggtcgtggtaaggaggctttagacatatttgacaagatgcagaaggcaggctttgttcctgatgatatttccttcctggttcttctttatgcttgtagccattctggcatggtggatcaaggtctgaattactttgatatcatgcgcagggattatgatgtagttgccagtgcagagcattatgcttgtgttattgacttactggctcgctgtgggcgattagataaggcatggaaaacaattcaggaaatgccaatggagcctagtgcagttatctgggttgcattacttagtgcctgtagagttcattcgaatgtggaacttgctgaatatgctctgaacaaactggtcaatatgaaagcagagaatgatggatcctacacacttatctccaacatatatgctaatgcaaggcggtggaaagatgtagcaagaatcagacaattaatgaagaaatcagggattaagaagaggccaggatgcagctgggtccaaggtaagaagggtactgcatcattctttgttggagatcgatcacaccctctatctccagagatatattctcttttagagagattaattggccgcatcaaggttatgggttatgtccccgagacaaactttgcactgcatgatgttgatgacgaggagaaaaataatcttctcagtgaacacagcgagaagcttgctctcgcatatgggctcctcacgacttcccctggttgtcccatacggatcacaaagaaccttcgtgtttgcggtgattgtcatagtgcattcacctacatctccaagattgttgaccatgagatcattgtacgagattccagtcgcttccatcatttcaagaatggctcttgttcctgtggtggctattggtgataccttgttctgtgaaagcagcaggggtggattcaggccctgggccacctgggccatgacgtaaatgcctagggtttcagagatgaacagggcaactcatgagctgggcagcgggagacaagcggcgcgtgggagcgggagcgaggtgacgagcgggcggcacgggctgcaggccgacggccaacgggactcgggagcctagcccagagccacaagataacgcaggcgggagatactagcgcgtgcagcaaccaggtctagaagaaaggaagcccagctttatcctggagccaagaagccgaggtgagattgtggttggactggaagggagcgagggagcagccaggcatggaggagcctgttccggctgatccccaagattttcttgaagccaaggagatcaggttcagggatcagatatgagcaataataatcttgaggcagtgacactccttataatcttccttcgaatctccagagcttgtgagtcatttagttatgtttatatgtgtacttaactattcccatttatgttttaaaaatatttttgggggtcttacttacctgctatttagaaatcttgttgtaaataacttcatgtgggacagtaccttactccatcttccccttactgacttgtaagttcatccttaccacctactctatttacaagtttacgttcttaaaccaacatttagcaatctttgcagaaatgtcaaaaacaaccaattcaccggttgagtacctgataaactaaaggggatcgataatctccaataagtacctttactgcaacagttgtggtgacttttatttgacacactatgttttgtataaaaccggctcagggcttttttaaatcctagatccgccaccgtccgcaagggtgaagcagctgtccttcctaaggttatgccctttgttcctagttcttctctgctttagtttattatgtatgtctaaaggtatttctttttcaaatttagttgtcatcagctgtttgaggatttgttaaactgctggtcaaatttcttagctgtagaatggatgaaagggaggagagcgctcacatccggtcgaccggtcgttttggtggaacgggagcatttcaactatttatgccaggagccaggatctaattcaattggtgcatcatctattcatctagaatgtcatcccaagccaggcttctttgctttgtggtgactgccattgcaaagctagcaacatgccatattgagttgcttcgggaagcacgggtgtcattgggtaagtttgctcgttcccgaacctcagacaggagagtctggcaatgggcctgtgactatttagggctcatgaatgaaccagccatctgtttatcagtactgggaccgtccactgcccaaggtaatggtcctggtgttgtgcattggcgtggaggaggaacagcgatggtagttcacgttccttttttaccttttagcagagcaaaaaggtaaaaattctgcaagcacttctttagttaaatgtggaataagcatcctttcatattctttaagggagctgtatatatgcttacaatctgagcacagcgatgtgaaatatttgcactttgactgaggtactaaaactgaagtgtcatagcatcaaggggagacactagctaaacaaacctgttgtttgcttatgtaaaatatcatgcttgttttgtatctattggtagttcataatattatcttatatagaaaatgccaaagtttgtattgcaggtccaccgtttcatgattttcatttaccgacctcctcccaacaaaatgaagatcggttcagtctggcatgatttctctagcagaatgccttgtgcatatatatagcgaccttattttgtgatcgtagcgacgtagcatgctgaagatccaagctccttttcgagaaaaggtctggtctggacatccaagcagagagtcttgtacacatggttgactatttcagaggcacactcaggtgcacccgtgtttgtacatggagcgcctgattggctaattggatgagcgtcgcgtggctttacgctgcagctgctcgtgcagtctctgccttgtgtatataggaaccaaacactgtcatgcgtcataaagattaaagagctgttttgtatgaaatacatgctcagatgtgatacctggtgacgaaatctcagacatcgagttggcattgctaaggaatgaagccatattatattactc

SEQ ID NO: 6322 - DNA, 6171 bp, Zea Mays
cagaagcctccacctctgcggtcatgagggtcatctaaccttttcacagctccagcgaatgcacacagccgccgtcgtttcttcgtcttcctctcagcgccggcgctcccactcgtgctccctcccccactcgcgctcggcacgcaggccacgcggcggcgctcaggctcgggatatcagcgacggcggggcggtcccaggcttgtcgtcttcgtcagcggctccccctcctgcctctcgccaatcgcctcgcgccctcgcctctggttctccgcacacagcccggcgaccctgcgtgcgcccctaccgcctccggtggaccatcgacggctcctggcccggcggctgcgctgcacgccgcgcgcggccggcgggcagcgggagctagcagccgctgctgcaccaaggcggtcgcgccgctttgggagcgcttttgccccaaagcgaagcattaccagtccgcttaacgcttcagcgcgctgaagcgtgcgtttagttccgctttttggaaccctgtgctgacttctctttcgaggatctagagcgcacaatgatattttgctagcgttatgctcttcaactcgccaaaatcagcaaaacgaataggagtacagttcctatcagttgcaagtgcagactgctttggtcgagatgtctctccgacgcactttgcatccctgttaaaggaatgcaggtctgtgaatacagttcgtcaaattcatcagaagataattgcttgcggccttctttcgtatccatcatctttgttgtctgtgccactcgcaccacttccatcacattcatatgtatcaccaaaatctttgggcaccggtgttgtagcttcctatcttgcttgtggtgctacgaaggatgctctctcagtgttggagcgtgtcacaccatcaccagccgtgtggtggaatctactcgtaagagaacacatcaaggaaggccaccttgatagagcaattggtgtatcttgtcgcatgctgcgtgctggaactaagccagaccattttactctgccgtatgcgctgaaagcatgtggagagctaccttcatactgttgtggaagagcattacatggactcatatgttgcaatggatttgagtcaaatgtctttgtctgcaatgcattggtggcaatgtattcccgctgtggttctttggaggatgccagtctggtgtttgatgaaataacacggaagggaattgatgatgttatctcatggaattcaattgttgctgcccatgttaagggtagtaatccgcggactgcattagagctgttttcagagatgtcaatgattgttcacgaaaaagctacaaatgaaaggtcagatatcattagcattgtcaacattcttcctgcatgtgcttctctaaaggcattgcctcaaattaaggaaatccacagctatgccattcggaatggcacatttgcagatgcttttgtgtgcaatgctctgattgatacctatgcaaagtgtgggtcaatgaacgatgcggtaaaggttttcaatgtaatggaattcaaggatgtcgtttcttggaatgcaatggttactggatacacccaaagtgggaactttggggcagccttcgagcttttcgagaatatgcgcaaggaaaatatcccactagatgtcataacgtggagtgctgtaattgcagggtatgctcagagggggtgtagccaagaggcccttgatgcattccagcaaatgattcttgatggttcagagccaaattctgtcactatcatctctctattgtctgcttgcgcttccttgggagcattgtctcagggcatggaaattcatgcatactctctgaagaagtgtcttttatccttggataatgattttggtggtgacggtgacggtgaggatctaatggtgtacaatgcattaatagatatgtactcaaagtgcagaagtttcaaagctgcacgctccatatttgattccatacctcgaagagaacgtaatgtggtgacttggaccgtcatgattggtggatatgcacaatatggagactcaaatgatgccctcaagattttctcagagatgatttcaaaaccatacgcagttgccccaaatgcttatacaatttcctgcattttgatggcctgtgcacatctggcagctcttcgtatgggtaagcagattcacgcttatgtcacccgtcaccatgaatatgaaccatctgtgtactttgtggcaaattgccttattgatatgtactcaaagtgtggtgatgttgatactgctagaaatgtatttgatagcatgcctaaaaggaatgaagtatcttggacttcaatgatgtcagggtatggaatgcatggtcgtggtaaggaggctttagacatatttgacaagatgcagaaggcaggctttgttcctgatgatatttccttcctggttcttctttatgcttgtagccattctggcatggtggatcaaggtctgaattactttgatatcatgcgcagggattatgatgtagttgccagtgcagagcattatgcttgtgttattgacttactggctcgctgtgggcgattagataaggcatggaaaacaattcaggaaatgccaatggagcctagtgcagttatctgggttgcattacttagtgcctgtagagttcattcgaatgtggaacttgctgaatatgctctgaacaaactggtcaatatgaaagcagagaatgatggatcctacacacttatctccaacatatatgctaatgcaaggcggtggaaagatgtagcaagaatcagacaattaatgaagaaatcagggattaagaagaggccaggatgcagctgggtccaaggtaagaagggtactgcatcattctttgttggagatcgatcacaccctctatctccagagatatattctcttttagagagattaattggccgcatcaaggttatgggttatgtccccgagacaaactttgcactgcatgatgttgatgacgaggagaaaaataatcttctcagtgaacacagcgagaagcttgctctcgcatatgggctcctcacgacttcccctggttgtcccatacggatcacaaagaaccttcgtgtttgcggtgattgtcatagtgcattcacctacatctccaagattgttgaccatgagatcattgtacgagattccagtcgcttccatcatttcaagaatggctcttgttcctgtggtggctattggtgataccttgttctgtgaaagcagcaggtgcagaagcaacactaatgttttccaagtgaaagaaatactaatgtgatcatgacttttctcaggactaatgtgttcatgacttcattataatgattcacgcagaattctgtttaccattatttctctctttgtttttagttcttctgtgacatacacctgcactggtgtttatgttgtttgtctctctttgttcatgtctaatgctgatatatttgaaggcataattcttatagatgatctgcacagtccactgttgttcattctcctgaataagccctgctgtttgagttgccattagaggttgattcttctctgattaataagtgataattatcatccttgtatcagatattcgcggtgcttgtgtcatgattttctaatggcttacgtttctacagaaactgagcatatttttcctttgcaaatttgaagactaattatctgtatcctctttctacctttcttgaatgcaatgttgtctttctacatttactatagcaagcacccaacctttgatcgatgggctggaaatttgtgtttttctttcatcaaaattgtttgtttcgattattcattctcaaagaaaacggtatttttagccattcagtctaatcacctcactattgtcttgtgtgagacttggagttaatttaatccataggtagttcactcaaattctgaaatgtaatttaaataaggtttgcttctatcagtcgaatctgtgaaagttgacatttttactaaggcagcaatttgtataattgctaaacttctccgcaagcaggggtggattcaggccctgggccacctgggccatgacgtaaatgcctagggtttcagagatgaacagggcaactcatgagctgggcagcgggagacaagcggcgcgtgggagcgggagcgaggtgacgagcgggcggcacgggctgcaggccgacggccaacgggactcgggagcctagcccagagccacaagataacgcaggcgggagatactagcgcgtgcagcaaccaggtctagaagaaaggaagcccagctttatcctggagccaagaagccgagggagcgagggagcagccaggcatggaggagcctgttccggctgatccccaagattttcttgaagccaaggagatcaggttcagggatcagatatgagcaataataatcttgaggcagtgacactccttataatcttccttcgaatctccagagcttgtgagtcatttagttatgtttatatgtgtacttaactattcccatttatgttttaaaaatatttttgggggtcttacttacctgctatttagaaatcttgttgtaaataacttcatgtgggacagtaccttactccatcttccccttactgacttgtaagttcatccttaccacctactctatttacaagtttacgttcttaaaccaacatttagcaatctttgcagaaatgtcaaaaacaaccaattcaccggttgagtacctgataaactaaaggggatcgataatctccaataagtacctttactgcaacagttgtggtgacttttatttgacacactatgttttgtataaaaccggctcagggcttttttaaatcctagatccgccaccgtccgcaagggtgaagcagctgtccttcctaaggttatgccctttgttcctagttcttctctgctttagtttattatgtatgtctaaaggtatttctttttcaaatttagttgtcatcagctgtttgaggatttgttaaactgctggtcaaatttcttagctgtagaatggatgaaagggaggagagcgctcacatccggtcgaccggtcgttttggtggaacgggagcatttcaactatttatgaatgtcatcccaagccaggcttctttgctttgtggtgactgccattgcaaagctagcaacatgccatattgagttgcttcgggaagcacgggtgtcattgggtaagtttgctcgttcccgaacctcagacaggagagtctggcaatgggcctgtgactatttagggctcatgaatgaaccagccatctgtttatcagtactgggaccgtccactgcccaaggtaatggtcctggtgttgtgcattggcgtggaggaggaacagcgatggtagttcacgttccttttttaccttttagcagagcaaaaaggtaaaaattctgcaagcacttctttagttaaatgtggaataagcatcctttcatattctttaagggagctgtatatatgcttacaatctgagcacagcgatgtgaaatatttgcactttgactgaggtactaaaactgaagtgtcatagcatcaaggggagacactagctaaacaaacctgttgtttgcttatgtaaaatatcatgcttgttttgtatctattggtagttcataatattatcttatatagaaaatgccaaagtttgtattgcaggtccaccgtttcatgattttcatttaccgacctcctcccaacaaaatgaagatcggttcagtctggcatgatttctctagcagaatgccttgtgcatatatatagcgaccttattttgtgatcgtagcgacgtagcatgctgaagatccaagctccttttcgagaaaaggtctggtctggacatccaagcagagagtcttgtacacatggttgactatttcagaggcacactcaggtgcacccgtgtttgtacatggagcgcctgattggctaattggatgagcgtcgcgtggctttacgctgcagctgctcgtgcagtctctgccttgtgtatataggaaccaaacactgtcatgcgtcataaagattaaagagctgttttgtatgaaatacatgctcagatgtgatacctggtgacgaaatctcagacatcgagttggcattgctaaggaatgaagccatattatattactc

SEQ ID NO: 6323 - DNA, 6630 bp, Zea Mays
cagaagcctccacctctgcggtcatgagggtcatctaaccttttcacagctccagcgaatgcacacagccgccgtcgtttcttcgtcttcctctcagcgccggcgctcccactcgtgctccctcccccactcgcgctcggcacgcaggccacgcggcggcgctcaggctcgggatatcagcgacggcggggcggtcccaggcttgtcgtcttcgtcagcggctccccctcctgcctctcgccaatcgcctcgcgccctcgcctctggttctccgcacacagcccggcgaccctgcgtgcgcccctaccgcctccggtggaccatcgacggctcctggcccggcggctgcgctgcacgccgcgcgcggccggcgggcagcgggagctagcagccgctgctgcaccaaggcggtcgcgccgctttgggagcgcttttgccccaaagcgaagcattaccagtccgcttaacgcttcagcgcgctgaagcgtgcgtttagttccgctttttggaaccctgtgctgacttctctttcgaggatctagagcgcacaatgatattttgctagcgttatgctcttcaactcgccaaaatcagcaaaacgaataggagtacagttcctatcagttgcaagtgcagactgctttggtcgagatgtctctccgacgcactttgcatccctgttaaaggaatgcaggtctgtgaatacagttcgtcaaattcatcagaagataattgcttgcggccttctttcgtatccatcatctttgttgtctgtgccactcgcaccacttccatcacattcatatgtatcaccaaaatctttgggcaccggtgttgtagcttcctatcttgcttgtggtgctacgaaggatgctctctcagtgttggagcgtgtcacaccatcaccagccgtgtggtggaatctactcgtaagagaacacatcaaggaaggccaccttgatagagcaattggtgtatcttgtcgcatgctgcgtgctggaactaagccagaccattttactctgccgtatgcgctgaaagcatgtggagagctaccttcatactgttgtggaagagcattacatggactcatatgttgcaatggatttgagtcaaatgtctttgtctgcaatgcattggtggcaatgtattcccgctgtggttctttggaggatgccagtctggtgtttgatgaaataacacggaagggaattgatgatgttatctcatggaattcaattgttgctgcccatgttaagggtagtaatccgcggactgcattagagctgttttcagagatgtcaatgattgttcacgaaaaagctacaaatgaaaggtcagatatcattagcattgtcaacattcttcctgcatgtgcttctctaaaggcattgcctcaaattaaggaaatccacagctatgccattcggaatggcacatttgcagatgcttttgtgtgcaatgctctgattgatacctatgcaaagtgtgggtcaatgaacgatgcggtaaaggttttcaatgtaatggaattcaaggatgtcgtttcttggaatgcaatggttactggatacacccaaagtgggaactttggggcagccttcgagcttttcgagaatatgcgcaaggaaaatatcccactagatgtcataacgtggagtgctgtaattgcagggtatgctcagagggggtgtagccaagaggcccttgatgcattccagcaaatgattcttgatggttcagagccaaattctgtcactatcatctctctattgtctgcttgcgcttccttgggagcattgtctcagggcatggaaattcatgcatactctctgaagaagtgtcttttatccttggataatgattttggtggtgacggtgacggtgaggatctaatggtgtacaatgcattaatagatatgtactcaaagtgcagaagtttcaaagctgcacgctccatatttgattccatacctcgaagagaacgtaatgtggtgacttggaccgtcatgattggtggatatgcacaatatggagactcaaatgatgccctcaagattttctcagagatgatttcaaaaccatacgcagttgccccaaatgcttatacaatttcctgcattttgatggcctgtgcacatctggcagctcttcgtatgggtaagcagattcacgcttatgtcacccgtcaccatgaatatgaaccatctgtgtactttgtggcaaattgccttattgatatgtactcaaagtgtggtgatgttgatactgctagaaatgtatttgatagcatgcctaaaaggaatgaagtatcttggacttcaatgatgtcagggtatggaatgcatggtcgtggtaaggaggctttagacatatttgacaagatgcagaaggcaggctttgttcctgatgatatttccttcctggttcttctttatgcttgtagccattctggcatggtggatcaaggtctgaattactttgatatcatgcgcagggattatgatgtagttgccagtgcagagcattatgcttgtgttattgacttactggctcgctgtgggcgattagataaggcatggaaaacaattcaggaaatgccaatggagcctagtgcagttatctgggttgcattacttagtgcctgtagagttcattcgaatgtggaacttgctgaatatgctctgaacaaactggtcaatatgaaagcagagaatgatggatcctacacacttatctccaacatatatgctaatgcaaggcggtggaaagatgtagcaagaatcagacaattaatgaagaaatcagggattaagaagaggccaggatgcagctgggtccaaggtaagaagggtactgcatcattctttgttggagatcgatcacaccctctatctccagagatatattctcttttagagagattaattggccgcatcaaggttatgggttatgtccccgagacaaactttgcactgcatgatgttgatgacgaggagaaaaataatcttctcagtgaacacagcgagaagcttgctctcgcatatgggctcctcacgacttcccctggttgtcccatacggatcacaaagaaccttcgtgtttgcggtgattgtcatagtgcattcacctacatctccaagattgttgaccatgagatcattgtacgagattccagtcgcttccatcatttcaagaatggctcttgttcctgtggtggctattggtgataccttgttctgtgaaagcagcaggtgcagaagcaacactaatgttttccaagtgaaagaaatactaatgtgatcatgacttttctcaggactaatgtgttcatgacttcattataatgattcacgcagaattctgtttaccattatttctctctttgtttttagttcttctgtgacatacacctgcactggtgtttatgttgtttgtctctctttgttcatgtctaatgctgatatatttgaaggcataattcttatagatgatctgcacagtccactgttgttcattctcctgaataagccctgctgtttgagttgccattagaggttgattcttctctgattaataagtgataattatcatccttgtatcagatattcgcggtgcttgtgtcatgattttctaatggcttacgtttctacagaaactgagcatatttttcctttgcaaatttgaagactaattatctgtatcctctttctacctttcttgaatgcaatgttgtctttctacatttactatagcaagcacccaacctttgatcgatgggctggaaatttgtgtttttctttcatcaaaattgtttgtttcgattattcattctcaaagaaaacggtatttttagccattcagtctaatcacctcactattgtcttgtgtgagacttggagttaatttaatccataggtagttcactcaaattctgaaatgtaatttaaataaggtttgcttctatcagtcgaatctgtgaaagttgacatttttactaaggcagcaatttgtataattgctaaacttctccgcaagcaggggtggattcaggccctgggccacctgggccatgacgtaaatgcctagggtttcagagatgaacagggcaactcatgagctgggcagcgggagacaagcggcgcgtgggagcgggagcgaggtgacgagcgggcggcacgggctgcaggccgacggccaacgggactcgggagcctagcccagagccacaagataacgcaggcgggagatactagcgcgtgcagcaaccaggtctagaagaaaggaagcccagctttatcctggagccaagaagccgagggagcgagggagcagccaggcatggaggagcctgttccggctgatccccaagattttcttgaagccaaggagatcaggttcaggtgcctgcttgtctcaattcatgttactgcatacaaaatcttgctgatttcaactgtttttttttgcccctgaagaatcgttttctcgagttctcgtggcttatccatccttttatctgtttctcactttctctgttcttggaagacgctaatttcagctcagttctctgcaaatttctctgtaataaagtttatatagctatgtagttagaatcacactaaacactgttaactttagcaaatttcttagaatatgttaatcacgcattcacacacccgtgctactaaactgctattggtagctaacaaaccatttggtggttcacggcactggtcatttcaattcctcgcactagttcagttgtaagtgagatctcatgagctcgaaaatctcaatccttggatgtttacagacaacatgccattgttcacttttaatttaattttagtgttctgcagggatcagatatgagcaataataatcttgaggcagtgacactccttataatcttccttcgaatctccagagcttgtgagtcatttagttatgtttatatgtgtacttaactattcccatttatgttttaaaaatatttttgggggtcttacttacctgctatttagaaatcttgttgtaaataacttcatgtgggacagtaccttactccatcttccccttactgacttgtaagttcatccttaccacctactctatttacaagtttacgttcttaaaccaacatttagcaatctttgcagaaatgtcaaaaacaaccaattcaccggttgagtacctgataaactaaaggggatcgataatctccaataagtacctttactgcaacagttgtggtgacttttatttgacacactatgttttgtataaaaccggctcagggcttttttaaatcctagatccgccaccgtccgcaagggtgaagcagctgtccttcctaaggttatgccctttgttcctagttcttctctgctttagtttattatgtatgtctaaaggtatttctttttcaaatttagttgtcatcagctgtttgaggatttgttaaactgctggtcaaatttcttagctgtagaatggatgaaagggaggagagcgctcacatccggtcgaccggtcgttttggtggaacgggagcatttcaactatttatgaatgtcatcccaagccaggcttctttgctttgtggtgactgccattgcaaagctagcaacatgccatattgagttgcttcgggaagcacgggtgtcattgggtaagtttgctcgttcccgaacctcagacaggagagtctggcaatgggcctgtgactatttagggctcatgaatgaaccagccatctgtttatcagtactgggaccgtccactgcccaaggtaatggtcctggtgttgtgcattggcgtggaggaggaacagcgatggtagttcacgttccttttttaccttttagcagagcaaaaaggtaaaaattctgcaagcacttctttagttaaatgtggaataagcatcctttcatattctttaagggagctgtatatatgcttacaatctgagcacagcgatgtgaaatatttgcactttgactgaggtactaaaactgaagtgtcatagcatcaaggggagacactagctaaacaaacctgttgtttgcttatgtaaaatatcatgcttgttttgtatctattggtagttcataatattatcttatatagaaaatgccaaagtttgtattgcaggtccaccgtttcatgattttcatttaccgacctcctcccaacaaaatgaagatcggttcagtctggcatgatttctctagcagaatgccttgtgcatatatatagcgaccttattttgtgatcgtagcgacgtagcatgctgaagatccaagctccttttcgagaaaaggtctggtctggacatccaagcagagagtcttgtacacatggttgactatttcagaggcacactcaggtgcacccgtgtttgtacatggagcgcctgattggctaattggatgagcgtcgcgtggctttacgctgcagctgctcgtgcagtctctgccttgtgtatataggaaccaaacactgtcatgcgtcataaagattaaagagctgttttgtatgaaatacatgctcagatgtgatacctggtgacgaaatctcagacatcgagttggcattgctaaggaatgaagccatattatattactc

SEQ ID NO: 6324 - DNA, 3467 bp, Zea Mays
aaccaccaaccccagacccagccagaggcctctgcctcagcccgtcttcttcttcttctcccatggcttaccgcggcggcggcggccggggaggaggaggccgcgacggggaccagcagcgcccgccgcacgtccacggacgaggagccggggggcccggaggcggccgcaccttcgtctggcctccaccgccttcttccacgccgcggccggtgccgccgtaccaccaccaccaccaccaccaggtgcccatgggctaccgcgcgcccatagtgctgccgcaccaggccgcgtacggggtgccgatggccgtgtaccggggggcgccggcgcccgcgtacagggtgcccgcgccagcgtcccctcggcctcgcgtctccttctcgcctgcgcctccggcgtctccggtcactatcagggcgccgccgccatcaccgacgacgccgccagctgctcccaccactccggcgcctccacgccagcccgcgcccgcgcccgcgcccgagccggccccggccccgccccccgcgccgtcgctcgcggccctggcgaaggaggtcgagaagaagctcttcgtctccgagaccgcgctggcgccggccgcggcggcggcagcggcagcggcagcgcagggcacagctggtgccggcgctgacgacgcggcgtcggacgtcgacctggcgccggtctccaagaaggggctcgcgcacccggctcggccggccctcgccaccgtggggaggaatgtgtttgtccgcgcgaaccacttcctcgtccacgtcgccgacaacaacttgttccactatgatgtcgctattaatcccgagtcaaagtcaagagcaacgaacagggaagttctcaatgaactcatcaagttgcacgggaagacatctctgggcggcaaattgcctgcctatgatggcaggaagagtctctatactgctggttcacttccttttgaatcagaggagtttgtggttactcttgttgatcctgaaaagaaggagaaagaaagggtggagagagagtacaaaatcacaattcgaattgccgggagaacagatttctaccaccttcagcagtttctgcttggaagacagagggatatgcctcaggaaaccatacaagtacttgatgttgtcctcagggagtcgccgtcttggaattatgtcacagtgtccagatcctttttctctacaacttttggtcacagaggtgatatcggtgaggggcttgagtgttggaggggttactaccaaagcctgcgcccaacacaaatgggcctttcgctgaatatagatatttcagcaacatccttttttaagcctgtgacaattatcaaatttgtggaggagttcctgaacctgcgtgatacatctcggccgttgtttgacagagatcgtgtgaagataaagaaagcattgcgcggtgtccgaattgaaacaactcaccaacaggaccaaatcagaagatacaagataacagggattactcccatccctatgagccagctgatattccctgttgatgataaaggaacaagaaagactgtagtgcagtacttcttggacaaatatgactacagattgaagtatgtctcttggccttgccttcaggctggcagtgattcacgacctgtatatttgcctatggaggtttgcaagattgtagaagggcagagatactctaagaagcttaatgacagacaagtgacgaacatacttagagcaacttgtaaacgtccccaggagagagagaagagcatacgtgatatggttctgcataacaagtatgcagatgataagtttgctcaggagtttggcatcgaagttagcagtgatctagtgactgttccagcccgtgtgctgcctccacccctgttgaaatatcatgactctggtagggagaaaacttgtgcaccaagtgttggacaatggaacatgatcaataagaaaatgatcaatggtggaactattgataactggacttgtttgaacttttcacgcatgcgccctgatgaggtacaaaggttctgtatggatctgactcatatgtgcaatgccactggaatggttgtcaatccacgcccatttattgaagtccggtctgctgctcctaaccatatagagaatgctttgagagatgtacacaagagagccacccaaatacttgcccaacaagcagtgggaaatcagctccagcttttgattgtaattcttcctgaagttagtggttcttatggtaaaattaaaagagtctgtgagactgacattggaattgtatctcaatgttgcttgccaaagcatgctagcaggccaaacaagcaatatttggaaaatgttgcactcaaaatcaatgtcaaggttggtgggcgtaacacggttcttgagcgagccttttcacacgatggtataccttttgtctctgaagtcccaacaatcatctttggcgcagatgtcacacaccccccaccaggagaggactctgcatcatccattgctgctgtggtggcatcaatggactggcctgaaatcaccaagtacagaggtctggtttctgctcaaccacaccgacaagagataatagaagatttatttactgtcagtaaagatccacagatggggcacaacgttaatggtggcatgatcagggaactactgattgctttccgcaagaagacaaacagaaagcctgagaggataatattctatagggacggtgtaagtgaaggtcaattcagccatgttctccttcatgaaatggatgctatcagaaaggcttgtgcttctttggaggagggatatctacccccagtgacgtttgtggttgttcagaaaaggcatcacacaaggcttttccctgaggttcacggaaggcgtgatatgactgataaaagtggaaacattcttcctggaactgtggttgaccaaatgatttgccaccctactgagtttgatttctacttgtgtagtcatgctggcattcagggaacaagtcgcccgacccattaccatgtgctctatgatgagaacgaatttactgctgatgcactgcagtcactgaccaacaatctttgctacacctatgctcgttgcacccgtgctgtatcagtggtcccaccagcgtactacgcccaccttgccgcattccgcgcacgctactatgtggaaggagaaagctcagacggtggctcgacacctggcagcagcgggcagacagtagcccgtgaggggcctgtcgaggtgcgtcaacttcccaagatcaaggacaacgtgaaggacgttatgttctactgctgagctgctccaagtttagcattcaagctttcttattttcgtaacttatccttgatatggagctggttgctcttattttcgtctctcggtattcggagtagctaggctatgactggagcatggtcttgaaggcctaacactctgtttggatgaaatcaatgcaaatactct

SEQ ID NO: 6325 - DNA, 2554 bp, Zea Mays
ggagctccccacacaccctccctgcatgatgcaatcctaaagaaagctgctgaaacctaaagctggtagaaagctgcctcccctcccccctatggtgttgtctgtgtagcagcaaagccaaaaaaacaacactgctcctccaaagaccttttccaccctcactctctctctctcctctcccctctcctcgccctctctctctctctcaaattcattcctagctgtacccacatctctctcccccggcccttttgttttgtttattcacaactctcctccgtcctcgctctcatctggtccgcactccggaggagtgatttacctccccctccggcctccaatcttatatagagatgcctcaattccattgccccattcccatcgcagactgatctagcgagaaggagaggcacacaagtgacggcagtgccgtgcgcgcggcgccacccccaccacaccatgttgagttcttgcgcgccaacgacggcctttccgcccccagaggcgggggccgccgcgccaccggagccgttccggtctctgcagatcgccacgaccaccagcgccgccggggccaagaagaagcggcgtcccgccggcactcctgaccccgacgcggaggtggtgtcgctgtcgccgcggacgctgctggagtcggaccggtacgtgtgcgagatctgcgggcaggggttccagcgcgaccagaacctgcagatgcaccggcggcggcacaaggtgccgtggaagctgctgaagcgggaggccggggaggcggcgcggaagcgcgtgttcgtgtgcccggagccgagctgcctgcaccacgacccctcgcacgcgctgggcgacctcgtcggcatcaagaagcacttccgccgcaagcacagcggccaccgccagtgggcctgcgcccgctgctccaaggcctacgccgtccactccgactacaaggcccacctcaagacctgcggcacccgcggccacacctgcgactgcggccgcgtcttctcccgggtggagagctttatcgagcaccaggacacgtgcaacgccggccggacgcgggccgagacgtcgtcgtccccggctagtggtggtggctacggcggcggcaccggcgccgggttctgcgtggccgcagctgcctccacgtcccagcaacgtcacctgcatgccgccgccgccgcggcggcggcgttgtctcggacggcgtctagtgcgagcccatcaagcggcggcgagtttggggtgagccagcaggtcgcctgctggcctggtccggcgatggcgagccccacggccgccgcgacgttccacaggttcgaccaggctctgtcgcctccgacgccgcacgagcgtcctggaggcatccacaacctggagctccagctcatgccgccgcgcggcagcgccgccagctactacgagggggctgcaggtgcagctcctgcagctgccgtcaggtgctgcgcctcgccgcattattcgcctgctgtacatgttccgcagccgggcgccgacccgatgcggctgcagctgtcgatcgggttcggcggcggcgacggcgagacgtcggcgccggcagcggcggcgaggctgaaggaggaggcccgggagcagctgcggctggcgatggcggagaaggcggcggccgacgacgcccgggcgcaggcgcggcggcaggcggagctggccgagcaggagctggcggccgcccggcgcatgcggcagcaggcgcaggcggagctgggccgcgcgcacgcgctccgggaccacgccgtgcggcaggtggacgccacgctgctgcaggtcacctgctacagctgccgctgcaagttccgggcgcgtgtgactggcggcggcgccatgagctccgaggtggccagctacgtctcctccgttgtcacggccgagggcggcgacgccgaggtggacgacgacgacccgtaccgccaccaccggcagctcaccgccgacgacgacgcgccgagccacgctaggatgatggacatcaactagcggccggccggcgcccggccatctcgtactcgcatggacgagaggccgtgatggatggatcgtggatgtgcgatgtggtagcagctgcttggtggtggtctctgactagatgtggtgatagtgcagagtgctagtctagactctcacggccggcggccggcggggagtcatgcttgagcgcaaaagtgaagctagtagctaattacgacgtgcatggaatctttcgcttgtttgcttgctgttggactttcttacaataacatttgttcgatcgatccggactcagcaggagcattccggctgcagctggtgctgtcgaaaccgagaaagaatgcatgcatggcagctcttgtcacttcttgtcatcgtttcagctaaactaacatctcgatagatgcagttaggctacaagcctacaacagttttgctactgtgctaccggttttacgatttgtttttctggttacactatggcagcagggaagagggattggagttgggtagtaggggtaaaaggcatatatagttgacatgagaa

SEQ ID NO: 6326 - DNA, 2639 bp, Zea Mays
cggcgactccgaacgcaacgccgatcgtgcgcctcctccctcaccgcgcgccgccgtcgctgccatcggttcctttcaaccggtggatcaccccgctttccataaccgtttatccttggttgtgctcagcgtctggttccgccattggtcccatggctgccccgcgcgccgcggcggcgtcggcgaagcaggtgacgaggcagaactttgcggaggccgtgctggagctgagggcccacctggaggcatgcgactacgtggccgtggcggcgcagaagaccggtgccccgacgggatggcgccgcgcgttgccggtggacactgcggaaacggcgtatctcaaggccaagctcgccgcagagtcctttcagccactccagatcgccgtctgccccttcaggcagcgcaactcttacccgtctaccctcgtcgcctacccgtacaattttcacttatttcctagagatgaactacagctcggaatgccttcatacagtttctcttgtcaaccatgttatttatcaactatagctaatgatggttttgatttcaatatgtgcatatatgatggctctttggttagttcccttagcagattaatattgggtgctgaaacgtatggttccaggcccagtatgagtattgatgtctgcagtgatcggcaagttcaattggtcttggaggtgtgattgtacaacacaagtttgatgttttctctagttaaggaagaaatggttttgtacttaaggaagcaaaatatgagtccctagctcaggttctttggtgcggttatcaatcctgcaaagagttgaatgatcaaaatttcatgtcatgcttttaatatgaagatgtagttgaaataagctgcattgctgaaaaattgtttgctccaaatgtcgcttttgaattacctcttctttacagatgaaatggtaatcccactctactggtttaaccatttgagttattctgcaggcagtaaacccatatctctgatgaccttgtatctctcgttccacacaaagctggagttggtagggctgtgcgtgtgatctttactaattcgaaagaggataagaatcttctcctggtttgaatctctgcttctctagaaatcagcagcattatgtatttatgtacaatgtatgtataaagacaataagatgtcaaaaaccacaacttagttaaagtccattatctgctgactcacttgcagatggatatccagaaattagaagatgaacaaaactttaaattccgtgggtttcgagaagttattgatctactatcatcttcacagaagccaatcatatcatacagttgcttgaatggtaagttgacacataaccaattcacacaatcatatggcttgttaacctcttgatatgttcacatgtcatttttcttccttttttctcagatctgacaatgctgcacaccaaattcattgcacctcttccgccaaacatgcatgaatttatgtgttctctaaaaatggtcttccctaatgttgttgatatcagccacctgtggaggcaaattggccctttgagaaaagcgaagaatatacaagccgctctcagttacttacaaagacagtactttgtgccaattgaaatagaaataccacagcaagatggtacaagcagtataacaaaaaatgagcaaaatgttctgagaataacaaagttatttgctaaactaagcaatttactgaaaatcagtcctgagtgccaactgcaatctcgtgaacagtgcactgcagttgaagagtattgtaacatcttctatccaagttgtgtggtcggaggttctgacgatgctaactttgcttttgagtcagacaccacagaaactgtgagcactgataacatcatcttcttgtggggctttagggaaaaatctgtgaaggagttaaaatcgtaccttattggcttacatcaagccttttcagaggattttgaggtcaagttgttggataagacatgctcagcttttgatattccgtgattctaatactgcaatgcagttactaaaagaaataggctcagaaggcccctcactaaacagattcttctcagaaggtctgaaagctgcaggttttgaagtgtacaaaaaggtctgcaggttaggactttgggattcagatttagctgaggtcctcgaggatgtttcatctgagctaggtgttccgacacttcctgagtgcagcacctctcagatatactggaatagtgaattaatgctggatctgaaggagtatctggaatgatagaacattatatagcccttaatatatttttaccaggttctaagattaatgagagctcccctcaagaagcagtagcaggccacagcagcccgaatagtagcaatgatattctggcatcagtccggcttaaatgaacagtatgtatgtacgagggcagtgaggtacccttgtgacgaccacggagatatagagagtttgtattgtattcttcatctgtgttgggctttggttagctaagtcattagcagtaatctcgtgtatttgggcctaggtttagcccggcccaaacgttttcgtataaagagtctgtaatagggaggatttgaacagaatagaaaatacagaaagaaaaggcagttgaacctcc

SEQ ID NO: 6327 - DNA, 2850 bp, Zea Mays
gagagctcatggcgtgagcgaggggttgcaggcagcgctcgcctccgcccttctggtataaaagcctctcacgccgcacccacatttctcacatcacagtgcgggcggcgggcgccactctcacacctaccaggaaaccaatcaaaacttaaaaccaatcgaaattagaccggcgacgaggattagcgctcgccggcgatggattctgactacggcgtgcctcgcgagctctcggaggtgcagaagaagcgcacgctctaccagcccgagctgcccccctgcctccagcctattgctcattttctcaggaagacagctgttgtccctgatgctaaggtcatatctgaacaccaggcggtcagggttggcattgtcttctgtggcagacaatccccaggaggccacaatgttgtttgggggctctatgaggctatcaaggcccacaaccaaaacagcaaactcattggtttccttggtggatcagatggtctgctagcacagagaaccttggagatcactgataaagttattgcttcatataaaaatcaaggtggatatgacatgcttggtcgaacaaaggatcagattaggacgacagagcaggtcaatggtgctatggctagttgccaagctttgaagttggatgctctggttatcattggaggtgtcacttccaacactgatgctgctcaacttgccgagacatttgctgaggcaaagtgtgcaacaaaggttgtaggtgttcctgtaactttaaatggggaccttaagaaccagtttgttgagacaaccgttggctttgacaccatatgcaaggtgaacgcacaacttatcagcaatgtatgcactgatgctctatctgctgagaagtattactactttattcgcctgatgggacgcaaggcttctcatgtggcattggaatgtgctcttcaatcacatccaaacatggttatcctaggagaggaggtggctgcttccaaacttacaatttttgatattacgaagcagatttgtgatgcagttcaggcaagggctgaaaaagacaagaaccatggggttattcttattcctgagggccttgtggagagtattcctgaactatatgctctgcttcaggaaatccatggcctccatggcaaaggtgtttctgttgagaatatctcttctcagctttcaccttgggcatctgcactctttgagtttttgcccccttttatcaggaagcagctactactacatcctgaatctgatgattcagctcaactttcccagattgagactgaaaagctgctagcccagttagttgagactgagatgaacagacgtttgaaggagggcacttacaaaggaaagaagtttaatgcaatctgtcacttctttggctaccaagctaggggagcactgccttcaaagtttgattgcgattatgcctacgttttggggcatgtgtgctaccacatcatagctgccggattgaacagttacatggctacggtgacaaatcttaagaatccagtgaacaagtggcgatgcggcgcgactcctatttcgtctatgatgactgtgaagcgatggtcgcgtggcccttcagccacccaaattggaaagcccgctgttcacatggctagcgttgacttgaaaggaaaagcatacgatgtgttgagacagaattcttccagctttttgttggaagatgtctacagaaacccaggcccgctccagtttgaaggaccaggtgccgattcaaagcctatttcattgtgcgttgaggatcaagactatatgggcagaataaaaaagttgcaggaatacttggagaaggtgaagaggattgtgaagcctgggtgctcgcaggatgttcttaaagcggcgctgagtgccatgtcttctgtgacggaaacactgaacatcatgacttcatcttctaccggccagactccactgagtcattaggtaccatttcatggtatggatcataatccccacttttttcagtggtggcgattaacgagtttaggaacagcaaccctggtatcatacgggttattcttttgtagccttttggagagttctatcggttttggattcggtagtttatgaaggcttgttgatgagtttgagctcgaatagcttttgaaacagccggatgatgccatctttaataaaccaaattctgtgactgcattcacatttctgtcagtcacctgagtgagaaaatgtgagtctcagcaatctcttcatctgaaattgtttgcttgttgctttttgcatggaggcttcaagcgatttgatcgttggtctgagcttaatctctttcatggcgtactacatgtcatagtgtaaaattaggtatttatagtgtgcttcttttgggaaataagctagtttatcttctcacccacttttttgttttgtttgtcgaatggaatgagttggtccatcatcacctcattcctcatagttagttatagggtatttggtttgaggaataagttagtccaccattttcatacttctcacttttttgtttggttttgtggaatgaaataagttgatccagcaccacctcatttttattaggatgtttggtttgaggaatgagctagtccatcatcttctcacacatttttgtttggtttgtagaatgtgatgagttgatccatcatcacctcgtcccttatagttaattagttaatactaatatgaggaatggagcaatcccactaaatttgaggaatagattcatgatacatcacattattttggatggagtgatttctcaaaccaaacatccctatagttagttagtactaacatggggaatgaggtcattccaccaaatttgag

SEQ ID NO: 6328 - DNA, 6608 bp, Zea Mays
cgaagctccagctccgacccaccgtcgactcgccgaccagccggcgccgcctcctcaactctcaagactccgggtctccgccccaccgcctccccgccggcgctgccgcgccgagggcccgagacccgagctcctccctgccccgcgcccccacggccgccctgccgagctccggccagggccgctcagccgctggccgagctccacccgcgcgttcgcggctctgcgcccccgccaggccgagcttcgcccgttcgccgtccgcgcctgcggcttccgcagtccgcacagctgacagcagtccattcgccgtccgcgcctccggtctccggacagcagtgagcgttagcaacaccttcattttggcgcgtcctccgccactggcgcgagcgcgtggcgacagcagctgagcggcggtgccagcgtgagcaaccgagcaggcgcgggcagccgagcgaggcagcagctgctgcgctaatggcacggccgttctcgtcgctggtggactcctcgtatcgccgcaggatcatcgagtgcaaagcggcggcttactccttgcggctcccttcctgcgctaggccgcccgcacgcccccgtttcgctgccagctccgacaacactccagactatgacgcggtgggagaccctgaatcacatggcttacaaatttgggagccttggctcaaatgcattcacaagcaatgtcagtgttgaagcatcttgctgtgacgggcttctcctgcactgctatttttacctccctcttgcggaccatttcacgttttgatcccaccaaccatgtcgtttttgaactccttgtcaaagcatatgtcaaggaaagaaaagtgctagatgcagctgtggcagttctctttatggatgattgcggctttaaggcttcacctgtttcttgcaataccatcctcaatgctcttgttgaggaaggggaatcaaagcatgtttggttgttcttgagagagagtttggcccgtaagtttcctttgggtgttaccacttgcaatattcttctgaattccctatgcaccaatggagaatttagaaaggctgaagatatgcttcagaagatgaagagctgtcacatatctaattctgtcacatataatacaatcctacattggtatgttaagaagggaagatttaaggctgccctgtgtgttctagaagatatggagagggatagtgtacaggcagatgtatatacatacaacatcatgatagataaattatgtagaataaagaggagtacacgtgctttccttttgctcaaaagaatgaggaaagatgacttaacacctgatgaatgtacctacaatactttgattaatggtttttttcgtgaaggtaagataaatcatgctcgctatgtcttcaatcatatgctgagacaaaatttggttccaagtgtagctacttacactacaatgattgatgggtattgccgaaacaggagaattgataaggccctaagtattctatcggaaatgcaaattactggtgtcatgccaagtgaactaacttatagtgctttgttgaatggttactgcaaagtttccatgctgggacctgctatatatcttatggaagatctgaaatcaagaggtataaccatcaataagacgatgcgtactattctcattgatgggttctgtcaagtgggtgagatttccaaggctaaacaaattttgaagagtatgtttgaggatggaattgatccagatgtcatcacttattcagcattgatcaatggtatgtgcaggatggctaagatgcatgaaacaaaagaaattttgtcaaggatgcagaaaagtggaattttacctaatgatgtcctatatacaactctgatttgttactattgtaaggcagggtatgtcaaggaagcactaaagcattttgtggacatttatcgaagggggctagttgccaatccagttatccataatgcattattacatgctttctatagagagggaatgattacagaggctgaacacttcagacaatacatgtctaggatgaatatatcatttgattctgtctcctttaaccgcataattgatagttattgccacagaggtaacatagttggggcattttcagtttatgatgatatggttagatatggctattctccaaatgtttgcacatatcagaatttgcttagaggattatgtcaaggaggccacttggtacaagcaaggcaatttatgtcctgtcttcttgacataccttttgctattgatgagaaaactttcaatgcactacttcttgggatttgcagatatggaaccctagatgaagctttggatctatgcgagaaaatgataaaaaacaactgtttacctgatatccatacctacaccattcttctcagtggtttttgcaggaaaggtaagattttgcctgcgttagtcatcttgcagatgatgttggagaaaggagtagtccctgatactgttgcgtatacctgcttgctgaatgggttgatcaatgaaggccaagtgaaagctgcttcttacgttttccatgagatcatatgcaaggaaggcctgtatgcagattgtattgcctataattcgttgatgaatgggtacctcaagagtcgaaatgtgaataccataaaaaggatgatgtctgatatgtatcagaatgaggtttatccaaactctgctagctataacatacttatgcatgggtatgtcaagaggggacaattttcaaagtcattatatctgtacaaatatatggtgaggaaaggaatcaggccagacaatgttacatatcgtttgctcattcttgggctttctgagtgtgggttgattgacattgcagttaagtttttggagaagatggtcttagaaggcattttccctgatcggttagttttcgatatattgattacagctttcagtgagaaatccaagatgcataatgcactacaagttttcaattgtatgaagtggttacatatgtcacccagcagtaaaacttttagtgccatgataaatggattgatcagaaaaggttacttggaccatagtcacaaagttttacatgagatgttacaagtagggcttcaaccaaaccatacacactatattgcattggtcaatgcaaaatgtcgggttggtgagattgatagagcgtttaggctaaaagaagaaatgaaagctattggcattgtgcctgctgaagttgcggagagttcaattattcgaggactttgtagatgtggaaaacttgaggaggcagtcatagttttcagtagtatgatgcgttcaggaatggtgccaactgttgctaccttcactactctaatgcacagtctttgcaaagaatccaagattgctgatgctttgcacttgaagaggctgatggagttgtgtagattgagggttgatgttgtcagttataatgttttaattactggtttatgcaaagacaaacatatctctgacgcactagatctttatggagagatgaaatctaagggtctttggccgaatattactacctatatcacactcactggagctatgtattcaacagggagagtgcagaatggagaggaactactggaggatatagaagaaaggggacttattccggcatataagcagcctgaaaatcttgaaagacggatggaggatgcaattattaggctgaacatgataagaaactgcagaaaggaagtgccttttagaggggttgagctactacctctagaccctaaacccgtgtgtagtgctgctagtgattgtaaccccactgaaactcggcaacacaaaggaatttgagcatttgaccaatatggttggtacaaaactattggtatcttttctgagtagtgcttgtgatgccttacattgttgtgttcctccactgagggatccatggatccatctctagatatgttgaatatgtgattttccttaaaaagctaattcagaaatacaaaattacctagggaggaagaggaccctcacatatttcagtggatcctgggggcaggtaaaaagggattatgagtgctgatgcgtgatgttaggtatgatatgcataagttacagcaggcattcgaagcataggaacaaagcaacggctggcattgagtctggcagtggaggcaacaaaggatactggtatcagtgcttgcagctacatcttcagacaactgatgttcttgaagacgaagatttatatgcaaacctgggtgcctccacaaaagtctaaacccttatacatcttgttatatttcctctccaaatggtaaggtttgaatggatcttaattttttttattttttcccagagatagaactaactcatattcagatttacttcacatgtgtatctcaagaatcatttgtttccattttttatggagctagtagtttcaatctcaactgcttatgttcattgttggcatgtcttagttatagaaaagtacataaaagttgatagtgtgtttcacagatctagactcactcaaaataggtctttctgtactcaaacatttctataacaataatttgatccaataaccctgtgactgtaagctgggtgaagggacatcatctatcagactatgaactttagaaatccgggtcatcttttgtggctctcttcgagctcaataatgtctgtatactattactgtgtacacatggtgacatggatatactatttttttttaccaacaccatgtcttgatggctgttgtgcttgaataattggaagcgagaagtactatcaaagaatcttttttggggaaaatgtgagaatggtttcttcaccacttctcacttcacagttgtgtaggcatggttttttcattgtgacctccattacaacccttaggcctcgtttgggaacacataaaccggtcggtttccacgggacggccggcacacgggctatctgaaaacatgttttagaggcttgtgtacggatttgtttcaccccgtgtaccaccggtttgcacagggtaaggttttctatgccccgcgcctctctctcgccctcacctagcgctgcccttagccaccgcccccgccgtcgccacatctgccacctgccaccaccaggttgcatctctcgtcctcgtttgtgcgctgtcacctgccaccgccctcacctaccggctaccgctgccgccgtcgtcatctctatcgcccaacgccaccaggttacagacacggtaaccacggtgtacggcaacagagatccaaccagatctggataacaagactgcttgctgtctgctgggaagtggagcaagctcaagtttatatccgcctcgagggaaccggtgggagaaaagggagtggacagatctgactcagttcttgtctccgcttttctaacttctcacaggttggttgcaatggcccaaggaatgactaaaccaaaagcagaacaaacctgtgtgaatttctgtcgttgcaagaagaacaaacctgacatttttttatactagtgtcttagtcatcaatctaatgatattaattatatactgttgatattaataatttttttatatttggttaaagttaaaaatagttgactaattgaaaacgataacaacatttatcttgggacagaggtagtagaatgttagaggtttgattcaactgtcaactgctgtgtccctaaagcatgattaccctgttggaaatccatttggcgacggcgacggtatcagctcacagtatttgataaataagttcacagtatttggttcaactgttaacatttatcttgctgcagatgctgtggtgttcagacctcacaaaggctgcaggcttggcgtagagatggatttctaagaaaagaaaaaaaatggtgcttcctgcttacaatttattagttatcaaccacaaacactgtgagcttttgcagacagaaattgccttatttatatttacagaaacagatcacactggttgcaacctgcactgcatgatgaaaatgatgtctacgagagaaggggggaaacagaagaagaatctgaagatttagtgaaaccaaaacagaaaggtacataaggtctgatagagattgagaatccaaacctggtgaaattaaagaatataaaggtcaaggacattgatgtggtaatgtattgtggaatcctgttttacaacttcaaccattgattccagtgaagctaatgccatggaatggaattctcaccacgtttgctggctgtacgagtacacaaatctgatgaatggattcagctaaaatgtcatagaatggacccggaatttatgctctttttttgtgctctctcagcatgtgctagctggttaagtactagcattgctattgggcgctattttgtatgcttgttctgctgtcttttggatgtaaacgaacaagtttgcatgcttgttctgctattggataagaagtattagcattgctatttgcatgcttgttctgctggttaagaagttaagaagtattagcatgtgacttgtggagatgtgcatgcttgttccgctcgcactgcttgcttgtttgcaacctgcagcaatctgtgccaaacggacacagggcacgacaggcagtgcaggtaaatgc

SEQ ID NO: 6329 - DNA, 1620 bp, Zea Mays
taggttttgagagcgaggtgcccgtctgaataggttgcgcacgaggagagcccaccggccaccgcctaccgcaatggaagccgcaggcggcggagccgaggatgagcaggtgatgagcgaggtgcacttgggctgcccgccgcacttctctggcctcctcgtctcccatttcagcttctcctcacggcccctagggccatatggacacaaaggaggcggcggcggcggcggcgggagcgagctagtcgcagcaactagcggttctggtgattcccctgacgcagtcgccgtggatgaggatggggatctcgttctggaccggaggagaagaaacaaatatgctagaggtgaccgccatctgttcactattcagcatggtgttaccagctcgcttaagagcgttgggcttcagccgtgcaggtttggaaagcggccttactattatctgactttattctgcacgaaagcttttcatcgccaaactttgatggtgttactgccattgagataggtgctggaacaggtttggtaggtttagcactagctcgagttgctagaaggatttttgttacaggttcgatgaagctaaagtctgtgtacgagaactggactggaaaatggcatggcctccacctgtgggtacatatgacccttctgatccaagtcggtatttatggtctgcaagtgaagttgaggaggctgagaaagcaacagtcctgtttgctgcagatgttatttacagtgatgatctcacaaatttgttcttcaacacggtgaagaaattgatgtcggtcggtgctaagaaggtgctatacttggccctggagaagagatacaacttcagtgtagacgaactagatgtcgtggccaatggttacacgcacttccgaagtttcttcacagcccaagatgagcacggtgatccgagcaacagatctggaccaggttttgttggaaagcagatagaccctgcagagattcctcagtacatcagagagtatgagaggggcaaggatttagagatgtggatgatcatgtacagtccggaggagaaacagcacagtaactctacaaaaaccgtcttttccttctaggaggacgaagagagcaatgagtgcttggtgcaaaaagacgaattccgttaaaaagacgggaccccctcccacgggcatccatactatcttgacaaaaatgaaaactgctgcttggtgcaagatccgtgtggtgtcgaagaatcgcagttcggcatcttctctgcggggaccgcgacagaaacgaggtcatcagaagagagaaataagttacacctaattgcggcagggcagggcagtggtggctggcatatattaagtggtggacaatcaagaacatgctctgcatgcttagcttaagtatatcatacgtatataataacgccgttgggactcgttttctttgtcgcccggaaacagcatctgtttggtccaagattcttggcacgccattgcgatccaaccctgtcgtgctcaaacatactctctccgtcggctggtgctctcgtttcatttcatcacaagttaattaattttaattttaactaaatatgtataaaaggacaaggccggccttcccagtcacagg

SEQ ID NO: 6330 - DNA, 1677 bp, Zea Mays
taggttttgagagcgaggtgcccgtctgaataggttgcgcacgaggagagcccaccggccaccgcctaccgcaatggaagccgcaggcggcggagccgaggatgagcaggtgatgagcgaggtgcacttgggctgcccgccgcacttctctggcctcctcgtctcccatttcagcttctcctcacggcccctagggccatatggacacaaaggaggcggcggcggcggcggcgggagcgagctagtcgcagcaactagcggttctggaggtgattcccctgacgcagtcgccgtggatgaggatggggatctcgttctggaccggaggagaagaaacaaatatgctagaggtgaccgccatctgttcactattcagcatggtgttaccagctcgcttaagagcgttgggcttcaggtttggaaagcggccttactattatctgactttattctgcacgaaagcttttcatcgccaaactttgatggtgttactgccattgagataggtgctggaacaggtttggtaggtttagcactagctcgagttgctagaaggatttttgttacaggttcgatgaagctaaagtctgtgtacgagaactggactggaaaatggcatggcctccacctgtgggtacatatgacccttctgatccaagtcggtatttatggtctgcaagtgaagttgaggaggctgagaaagcaacagtcctgtttgctgcagatgttatttacagtgatgatctcacaaatttgttcttcaacacggtgaagaaattgatgtcggtcggtgctaagaaggtgctatacttggccctggagaagagatacaacttcagtgtagacgaactagatgtcgtggccaatggttacacgcacttccgaagtttcttcacagcccaagatgagcacggtgatccgagcaacagatctggaccaggttttgttggaaagcagatagaccctgcagagattcctcagtacatcagagagtatgagaggggcaaggatttagagatgtggatgatcatgtacagtccggaggagaaacagcacagtaactctacaaaaaccgtcttttccttctaggaggacgaagagagcaatgagtgcttggtgcaaaaagacgaattccgttaaaaagacgggaccccctcccacgggcatccatactatcttgacaaaaatgaaaactgctgcttggtgcaagatccgtgtggtgtcgaagaatcgcagttcggcatcttctctgcggggaccgcgacagaaacgaggtcatcagaagagagaaataagttacacctaattgcggcagggcagggcagtggtggctggcatatattaagtggtggacaatcaagaacatgctctgcatgcttagcttaagtatatcatacgtatataataacgccgttgggactcgttttctttgtcgcccggaaacagcatctgtttggtccaagattcttggcacgccattgcgatccaaccctgtcgtgctcaaacatactctctccgtcggctggtgctctcgtttcatttcatcacaagttaattaattttaattttaactaaatatgtataaaaggttagtaatttcaatgatgtatactaataaatattattagatcgattatttaatctattttttctaataaaattatttgcagatataaa

SEQ ID NO: 6331 - DNA, 922 bp, Zea Mays
gcaagatgtactctccaagaatatcgacatcgtcatgtccattcacatccatcctcatggatctgaagcatatgatccagtccttgattatggtggcagctggcacaaatcgtaaagattttggagtcgcttgacagcgaaggtcaccagcctccaagtgtcacactatgagagcgccaaacagcgcacttgaaccattttttcgaactacaccagcagggatgtaactttatgagagcgctattgattgtgtccagttaggctacactgtcatttttgggtggtatgcaacattcttgttaatccgaacagggaatctgttatgtccaattattgctcacgtcttctgtaatatgatgggtttacctgttttctcgtcaccacgaacaaaaggagcggcattggtagcgtttctggctggttcaatagccttcttttggctgcttttccctgcaacaagtcctgaactgtacaacagcagttttgatcgctgcagttgctggcatggcttttgcaattggaaataacatagaactagattggaaagcaatgggtcctaacttgaagctactaacaattgaaacctccaggccctagctgacacttctgacggattttctatttgcagaaactccatatgaatgtcttaaaacgttttgtagaaatgtgtcccttgttttagcttaagactcaagagcttaaactagcaaaagattgtattttgccacttgttaaatacgtgctgatcatgaaatcgctgtcaatcccttctcaaagtggaatttgactttgttgagctgcttttatttatattgtgcttgctactgcagcgcctagagtttgtagattacacatcatggacccgtctgatattgtaaacgagagacatgtttctaagttaatatgctccctccatttattt

SEQ ID NO: 6332 - DNA, 1416 bp, Zea Mays
caaacacccatagtccgaaaacagcgtgttcttcgtgccaagcgaagccacgcgaccgactgtgttacgatcccaaatcttcactcccgacgaaatctagaatccaatgagcaatctcgactgacgcctgcttcaccagattatggcgacgccggcgggcctccttctcgcctcgccgccggtgatatcaggtgtcgcggcgatggcggcgtgcgccgcaatggcagtattctacgtcgctgtcctctatgccccgacggtcatcctccggttcccacccccaacctcactccgcaccttcctccaccgtcgcttcgcctgtgccgccgtcgcatccgccgcctccgtccttgccactgcgtccctcctccgagtctggagcctcagcgacttcgctgatatgtttgctgtgttcggcattaggaaggatcacttgattcaggccgtggctattccacttctcctgacatccctagtgtatgctgggtcattcgtcgctagagtgtggctcctagtgagctcgtggggcggtggcgatgaggtggagataggctgcgcacagaggcttgcacaatggatccaagctgctgttgcggatgttatggtttggcggaactatgtagtggcaccatttactgaggagctggttttcagggcatgcatgatacctcttctgctctgtgggggattcaaaatgtctacaattatatttctgagtccaatcttcttcagtctagcgcacttgaaccattttttcgaactacaccagcagggatgtaactttatgagagcgctattgattgtagggaatctgttatgtccaattattgctcacgtcttctgtaatatgatgggtttacctgttttctcgtcaccacgaacaaaaggagcggcattggtagcgtttctggctggttcaatagccttcttttggctgcttttccctgcaacaagtcctgaactgtacaacagcagttttgatcgctgcagttgctggcatggcttttgcaattggaaataacatagaactagattggaaagcaatgggtcctaacttgaagctactaacaattgaaacctccaggccctagctgacacttctgacggattttctatttgcagaaactccatatgaatgtcttaaaacgttttgtagaaatgtgtcccttgttttagcttaagactcaagagcttaaactagcaaaagattgtattttgccacttgttaaatacgtgctgatcatgaaatcgctgtcaatcccttctcaaagtggaatttgactttgttgagctgcttttatttatattgtgcttgctactgcagcgcctagagtttgtagattacacatcatggacccgtctgatattgtaaacgagagacatgtttctaagttaatatgctccctccatttattt

SEQ ID NO: 6333 - DNA, 1450 bp, Zea Mays
caaacacccatagtccgaaaacagcgtgttcttcgtgccaagcgaagccacgcgaccgactgtgttacgatcccaaatcttcactcccgacgaaatctagaatccaatgagcaatctcgactgacgcctgcttcaccagattatggcgacgccggcgggcctccttctcgcctcgccgccggtgatatcaggtgtcgcggcgatggcggcgtgcgccgcaatggcagtattctacgtcgctgtcctctatgccccgacggtcatcctccggttcccacccccaacctcactccgcaccttcctccaccgtcgcttcgcctgtgccgccgtcgcatccgccgcctccgtccttgccactgcgtccctcctccgagtctggagcctcagcgacttcgctgatatgtttgctgtgttcggcattaggaaggatcacttgattcaggccgtggctattccacttctcctgacatccctagtgtatgctgggtcattcgtcgctagagtgtggctcctagtgagctcgtggggcggtggcgatgaggtggagataggctgcgcacagaggcttgcacaatggatccaagctgctgttgcggatgttatggtttggcggaactatgtagtgggcatgcatgatacctcttctgctctgtgggggattcaaaatgtctacaattatatttctgagtccaatcttcttcagtctagcgcacttgaaccattttttcgaactacaccagcagggatgtaactttatgagagcgctattgattgtaggtgtccagttaggctacactgtcatttttgggtggtatgcaacattcttgttaatccgaacagggaatctgttatgtccaattattgctcacgtcttctgtaatatgatgggtttacctgttttctcgtcaccacgaacaaaaggagcggcattggtagcgtttctggctggttcaatagccttcttttggctgcttttccctgcaacaagtcctgaactgtacaacagcagttttgatcgctgcagttgctggcatggcttttgcaattggaaataacatagaactagattggaaagcaatgggtcctaacttgaagctactaacaattgaaacctccaggccctagctgacacttctgacggattttctatttgcagaaactccatatgaatgtcttaaaacgttttgtagaaatgtgtcccttgttttagcttaagactcaagagcttaaactagcaaaagattgtattttgccacttgttaaatacgtgctgatcatgaaatcgctgtcaatcccttctcaaagtggaatttgactttgttgagctgcttttatttatattgtgcttgctactgcagcgcctagagtttgtagattacacatcatggacccgtctgatattgtaaacgagagacatgtttctaagttaatatgctccctccatttattt

SEQ ID NO: 6334 - DNA, 2717 bp, Zea Mays
caaacacccatagtccgaaaacagcgtgttcttcgtgccaagcgaagccacgcgaccgactgtgttacgatcccaaatcttcactcccgacgaaatctagaatccaatgagcaatctcgactgacgcctgcttcaccagattatggcgacgccggcgggcctccttctcgcctcgccgccggtgatatcaggtgtcgcggcgatggcggcgtgcgccgcaatggcagtattctacgtcgctgtcctctatgccccgacggtcatcctccggttcccacccccaacctcactccgcaccttcctccaccgtcgcttcgcctgtgccgccgtcgcatccgccgcctccgtccttgccactgcgtccctcctccgagtctggagcctcagcgacttcgctgatatgtttgctgtgttcggcattaggaaggatcacttgattcaggccgtggctattccacttctcctgacatccctagtgtatgctgggtcattcgtcgctagagtgtggctcctagtgagctcgtggggcggtggcgatgaggtggagataggctgcgcacagaggcttgcacaatggatccaagctgctgttgcggatgttatggtttggcggaactatgtagtggcaccatttactgaggagctggttttcagggcatgcatgatacctcttctgctctgtgggggattcaaaatgtctacaattatatttctgagtccaatcttcttcagtctagcgcaatgagtgaggattgtactctggagcaggctgcagcgcaagatagtagctaggtcctgaagaaagttctggtcctgtcagaagtttcaattagtcagagcctcagaggcatttgattagtaatggttgtgagtttggtttgttaggatatctagtttgttacagggtttggatcataagctgttatgatcggcattctatatcaatgtcgtgccaagcgtccctgttgcgaaccagcgacaacaccgatatcgcttcagtcggttcaggggatttgtttgtaatttatttgctcaaagataggagtttgtttggtttgataagttcgttggcttgttagggttcggctatttaaatagccctaacactatcatttgtttgttaagcaagatcagtacataaggtgttgcttctcgcccagaacccatttgacgtgcgccctcaccttgtcttgagcaagaagggcacctgctcactgccaggggttcaaaccctgactgctggtcactcagcattgcgccctcggcagccattcaggtcctatcattggcagattgattgagaagttagatggtgttggctgattgtaattggtgaactcaagcagtaggtgggatctatcatccactacctcttgctgtccctgcctcttggtcttgtatgtgccattgttggttcctaagccatggccttggccatgcctgagcacgtcacacgattaaagcctatgcaatattgtctccaatcatccacggccatcacttctggtatttgctttgtctggttccaatcccattttgcaagatgtactctccaagaatatcgacatcgtcatgtccattcacatccatcctcatggatctgaagcatatgatccagtccttgattatggtggcagctggcacaaatcgtaaagattttggagtcgcttgacagcgaaggtcaccagcctccaagtgtcacactatgagagcgccaaacaggtttgtgcgctgaacctcgcaaaattgtgtctggaactctggatcgcacactgcatggcgacaaggaccctgctcaggatgataggtcgatccgatacgaaggcctcaagttttctgatctttcttgctctaatttgggattagtttattaatcaaattgctgcataccacatttacattgtattgcctatacattctctgttgttgatattcatgtactcttctaattagaactgaacctttctgttaacagcgcacttgaaccattttttcgaactacaccagcagggatgtaactttatgagagcgctattgattgtaggtgtccagttaggctacactgtcatttttgggtggtatgcaacattcttgttaatccgaacagggaatctgttatgtccaattattgctcacgtcttctgtaatatgatgggtttacctgttttctcgtcaccacgaacaaaaggagcggcattggtagcgtttctggctggttcaatagccttcttttggctgcttttccctgcaacaagtcctgaactgtacaacagcagttttgatcgctgcagttgctggcatggcttttgcaattggaaataacatagaactagattggaaagcaatgggtcctaacttgaagctactaacaattgaaacctccaggccctagctgacacttctgacggattttctatttgcagaaactccatatgaatgtcttaaaacgttttgtagaaatgtgtcccttgttttagcttaagactcaagagcttaaactagcaaaagattgtattttgccacttgttaaatacgtgctgatcatgaaatcgctgtcaatcccttctcaaagtggaatttgactttgttgagctgcttttatttatattgtgcttgctactgcagcgcctagagtttgtagattacacatcatggacccgtctgatattgtaaacgagagacatgtttctaagttaatatgctccctccatttattt

SEQ ID NO: 6335 - DNA, 1708 bp, Zea Mays
cttgctcctacaggttcagatctctcatcggcccccactccattagtccatttccattcccatcccgaccccgtcttgccaccggctacacgctctcggagtctcggacgccgcccaaatggaggccatccggaagcaggcctcaaagctccgggagcaggtagctcggcagcagcaggtgaacactacacgcctccccctttcgcaagatctccgccatccgttcctccgcgacccggccacgggctcgcaccgcccggctcccgccctttctcttaacgcgggtccttcgagatctggtcatcatctctaggtttgttattgatcactgatgccgcgtccgtgctcgcggccgcccgtgtcctgtttcgcaggcggtgatgaagcagttcgggggcgggtacggcgcagacggcgtgttcgctgacgaggctgaggcgcaacagcactccaagctcgagaaactctacatctctacgcgcgcggccaagcacttccaaagggatatagttcggggcgtcgagggctacatagtcacggggtcgaagcaagtcgagatcgggaacaagttatgtgaggatgggaagaagtatggcactgagaacacttgtaccagtggtagcacactgtcgaaggcggcattaagttttgctaaggcacggtccatgatggaaaaggaaaggggtaacctgctgaaagcccttggcacacaggttgcagaaccactgagagctatggttatgggagctcctttggaggatgcccgccacctcgcccaaaggctattgaagtttcaaaacgccaaatgaaactaagagaagcatctggaaatagtgatatgatttcaaggctagaagcggctgagtcaaagctgcaggagttgaaatcaaatatgggggttttgggcaaagaagctttggccgcaatgactgccgttgaaggccaacagcaaagactgacactgcagcgtcttattgcattggttgaatcagagagaaactaccaccaaaaggtcctacaaattcttgatcaacttgagagagagatggtatctgagcgccaaagaattgaaggggcacctcctccggtggttgagagttccatgcctccaccgcctgcatatgaagaagtcaatggtatattcatgaggaatacggtcgcagagttggtcgagaccgtggagtatttcctggctgaggcaatccaatcatatcgagcagagagcgacactgagctcaacctttcagctggtgactacatagtggtccgaaaggtgtcgaacaatggatgggccgaaggtgaatgcagggggagagctggctggttcccctacgactacatcgagaaacgagagcgtgtgcttgcaagtaaagtcgcgcaagttttctaaaacttttgctgagacatccatatattcccggggatgtgcaatgtgtattatgcttgatcgtcagaagagaagatctgtaattttgctggaagctgcctgttggatggcttgttcctgcctggccgtctgcattgttcaaattcatgtggcaggaactgaacattattaatgcttaatcttcattcttcagttatcccgttaatatgtatccatactttttgtttgtttgtttgaagcatacaacaagacgagaaatcaagcgctaattattctgtatcgacaacaagatttatttgaaatcgattcttaatgcgagtg

SEQ ID NO: 6336 - DNA, 1630 bp, Zea Mays
ctcgttctgcggtcagagtcagaacggcctaggcgctagcgataagccccgcccaccgcgcgcgcgccgcggcaccgtaccgggatgggcgccataggcatcgtcgtcagagcgtgcgcgcctctcgctcccgccgccgcggccgcgccggcaccctccggctccagctccagggacgccgctcaggcccagcggtggagcaagcccacgaggaccggccgcgtgctcgtgctcggcggcactggccgtgtcggaggatccacggccaccgcactctccaaactccgccctgacctcggcatcctcgtcggtggcagaaaccgctttgacagggagaaaggcgagtccattgcagccaagcttgggggccaatctgagttcgtccaggtcgacacccgcaacgcaggcatgttggaggaagcgctgcagggtgtggatttggttgtccatactgctggacctttccagagggcggaggagtgcaccgtattgcaggcggcgatatctactaagacaccatacattgatgtctgcgatgacacggactattcttggagagcaaagggcttccatgagcaagcaaaagctgccggtgttccagctattactactgctggcatctatccaggagttagcaatgtgatggctgctgagcttgtacatgctgccagaagtgaaaatggcgaacctgaaagactaaggtactggtggtgctggtccaacaattctgacaacaagttttctacttcttggggaggatgtgattgcatataacaagggagaagaaatcaaattgaagccctatagtggagctctgaacattgattttggaaagggggtcagaaagaaaaatgtctacttattgaatttgcctgaagtcaagagtgctttcaagatattaggtgtgccaactgttagtgctcgatttggagttcttgagggatagaaataaagttcagaagttggttcagtctgttgatcctttggttcgagccgttgatggtattgcaggagagcatgtctctatgagaatcggtgggatttgcaaccgctgcatttgctttagcagttcttgagggcaacacacaaccaggagtttggtttccggaagagccggagggaatacggatagaagcaaggaagctgcttcttgagcgtgcatctcaagggacaagtaccttcgtgatgaacaagccttcctggatggtagaaactgatccgaaggaagtcggcctaggaatttttgtgtgagaagatcgagttgcttaaattattggggtgcttgaaaagggcagctaaatcttgggagtagtttaccatccgcgagaagttgaatgcggcaaccagcagcatgttgaagtccttgcgctattttgtttttgaaagggttgtatatgaaccatgatgattatgaagaaaaagaatacaggtcagttacacgattttgttcaccacaggtggtaagcttggaacttatctgtcgtttggttcacgaaatgtaatataaatagcaatataataattcacagttgaataccagcggtaacctatactactctattaaaaacctaatgtggatatctggtgctatcatgactttatcctccgcgctgacactctgggctcgtcc

SEQ ID NO: 6337 - DNA, 1716 bp, Zea Mays
cctcgcggtagcggcgcggcactcgttctgcggtcagagtcagaacggcctaggcgctagcgataagccccgcccaccgcgcgcgcgccgcggcaccgtaccgggatgggcgccataggcatcgtcgtcagagcgtgcgcgcctctcgctcccgccgccgcggccgcgccggcaccctccggctccagctccagggacgccgctcaggcccagcggtggagcaagcccacgaggaccggccgcgtgctcgtgctcggcggcactggccgtgtcggaggatccacggccaccgcactctccaaactccgccctgacctcggcatcctcgtcggtggcagaaaccgctttgacagggagaaaggcgagtccattgcagccaagcttgggggccaatctgagttcgtccaggtcgacacccgcaacgcaggcatgttggaggaagcgctgcagggtgtggatttggttgtccatactgctggacctttccagagggcggaggagtgcaccgtattgcaggcggcgatatctactaagacaccatacattgatgtctgcgatgacacggactattcttggagagcaaagggcttccatgagcaagcaaaagctgccggtgttccagctattactactgctggcatctatccaggagttagcaatgtgatggctgctgagcttgtacatgctgccagaagtgaaaatggcgaacctgaaagactaaggtactggtggtgctggtccaacaattctgacaacaagttttctacttcttggggaggatgtgattgcatataacaagggagaagaaatcaaattgaagccctatagtggagctctgaacattgattttggaaagggggtcagaaagaaaaatgtctacttattgaatttgcctgaagtcaagagtgctttcaagatattaggtgtgccaactgttagtgctcgatttggagttcttgagggatagaaataaagttcagaagttggttcagtctgttgatcctttggttcgagccgttgatggtattgcaggagagcatgtctctatgagagtagatttggactgctcaaatggtcggaatactattggattatttactcataaaaaactatctgtatcggtgggatttgcaaccgctgcatttgctttagcagttcttgagggcaacacacaaccaggagtttggtttccggaagagccggagggaatacggatagaagcaaggaagctgcttcttgagcgtgcatctcaagggacaagtaccttcgtgatgaacaagccttcctggatggtagaaactgatccgaaggaagtcggcctaggaatttttgtgtgagaagatcgagttgcttaaattattggggtgcttgaaaagggcagctaaatcttgggagtagtttaccatccgcgagaagttgaatgcggcaaccagcagcatgttgaagtccttgcgctattttgtttttgaaagggttgtatatgaaccatgatgattatgaagaaaaagaatacaggtcagttacacgattttgttcaccacaggtggtaagcttggaacttatctgtcgtttggttcacgaaatgtaatataaatagcaatataataattcacagttgaataccagcggtaacctatactactctattaaaaacctaatgtggatatctggtgctatcatgactttatcctccgcgctgacactctgggctcgtcc

SEQ ID NO: 6338 - DNA, 1764 bp, Zea Mays
cggcgcggcactcgttctgcggtcagagtcagaacggcctaggcgctagcgataagccccgcccaccgcgcgcgcgccgcggcaccgtaccgggatgggcgccataggcatcgtcgtcagagcgtgcgcgcctctcgctcccgccgccgcggccgcgccggcaccctccggctccagctccagggacgccgctcaggcccagcggtggagcaagcccacgaggaccggccgcgtgctcgtgctcggcggcactggccgtgtcggaggatccacggccaccgcactctccaaactccgccctgacctcggcatcctcgtcggtggcagaaaccgctttgacagggagaaaggcgagtccattgcagccaagcttgggggccaatctgagttcgtccaggtcgacacccgcaacgcaggcatgttggaggaagcgctgcagggtgtggatttggttgtccatactgctggacctttccagagggcggaggagtgcaccgtattgcaggcggcgatatctactaagacaccatacattgatgtctgcgatgacacggactattcttggagagcaaagggcttccatgagcaagcaaaagctgccggtgttccagctattactactgctggcatctatccaggagttagcaatgtgatggctgctgagcttgtacatgctgccagaagtgaaaatggcgaacctgaaagactaaggtactggtggtgctggtccaacaattctgacaacaagttttctacttcttggggaggatgtgattgcatataacaagggagaagaaatcaaattgaagccctatagtggagctctgaacattgattttggaaagggggtcagaaagaaaaatgtctacttattgaatttgcctgaagtcaagagtgctttcaagatattaggtgtgccaactgttagtgctcgatttggtactgctcctttcttctggaattggggaatgcaggctttcgcaaactttttacctgttgagttcttgagggatagaaataaagttcagaagttggttcagtctgttgatcctttggttcgagccgttgatggtattgcaggagagcatgtctctatgagagtagatttggactgctcaaatggtcggaatactattggattatttactcataaaaaactatctgtatcggtgggatttgcaaccgctgcatttgctttagcagttcttgagggcaacacacaaccaggagtttggtttccggaagagccggagggaatacggatagaagcaaggaagctgcttcttgagcgtgcatctcaagggacaagtaccttcgtgatgaacaagccttcctggatggtagaaactgatccgaaggaagtcggcctaggaatttttgtgtgagaagatcgagttgcttaaattattggggtgcttgaaaagggcagctaaatcttgggagtagtttaccatccgcgagaagttgaatgcggcaaccagcagcatgttgaagtccttgcgctattttgtttttgaaagggttgtatatgaaccatgatgattatgaagaaaaagaatacaggtcagttacacgattttgttcaccacaggtggtaagcttggaacttatctgtcgtttggttcacgaaatgtaatataaatagcaatataataattcacagttgaataccagcggtaacctatactactctattaaaaacctaatgtggatatctggtgctatcatgactttatcctccgcgctgacactctgggctcgtcc

SEQ ID NO: 6339 - DNA, 5292 bp, Zea Mays
ttttgactcagtggaaaaggtttttcaccactgcaccagcattcccacagtcagatagaagactggatgcattaatgttatgtgtgaaggaaacatttctttacctaaatgagaacttgaagctaacaccacaagctttgtctgacaaggctataccaatggatgaactggaagatatgcatcagagggtaatgtcatcatcactgttagctatggcaactcttatagaaattttactaggagtgaaattgcaaagttgtgatggtgagagtaccaatactgaaaacaaaaatatgtcaaaagttaggtcaactgtactttcttctgctgaagctgcattttgtatgcataaatgttttcttgacgtcctcaagtcaaaaagttctgttatacggtcagctacatactcactgcttacaagttacatcaaacatgttcctcatgtttttgacgaagaaaccatgaagaaactttccccaactctacttggtgcattccatgagaaggatgcgtcatgccactcttctatgtgggatacaattcttgttttctctagaaagtttccagaggcttggtcatattgtaatattcacaaagttgtcctcagtcgggtttggcatttcctacaaaatggatgttatgggtccaaacaagtttcatatcctcttctagttcagtttttggactctatgccacctaaagcagtcatgggacaacaatttgtttttgattttttgcataatctttgggctggaaggaaccagaggcagttatcagctgctgatagtttggctttctgtggtgcctttaaacagagttttttgtggcttctaaaaaatgcatcaagatattctactggagattcttcagatgatgtacccatcaagcttataactgatgtacttgccaaaatagtttggcgtgactaccttttattgtctggagacacaattggtggcggtgttctcttatctcgtaaaacttcaggatacagaaaatcatttacttaatatttcttgtcagtcgctgttaagtgactgtttggacataattcaacaaggagagaagctttccaagtttcagaatcatgtagaacaacttgtgtcgttctttctatctttggatcaaattgttgtatgcaaaggtgaattatggccactggaaaggttagcaaaaccattggttgagcaatctttgccagctattaagttcatggacactccatgccttgttaaacttctttcagttttggttgaaatatttgggcccacccccttattttttaagacttgtaaggaaaatgatgaaaagttggatatcaagtcttatctggagtttttcaatgatgaattgctcccttggtgtttggatggaaaatatagcacctgtaactcaaagattgatttgttactttccttatttcaagatgaatccttctttgaccaatggtgttccatcatcaaatgtacgacaactgaacaaaagcagtccgttgatgataagacctcaaatattctgggacgatatgaattgcttacactgttacttcagaaaatcagagaaaagattgctggggggaagctaagaaatttgcaggaaaatggttatcttctgcaacatttgcgtcttgatatattagattctactgcagcttctgtcctctgtgatttgcctgcttcagattgccaagttagttttatatgtgctgcacttggtggcgcagatcaagaggaccaaatctgcttcctttctcctgagacagtttgtaaaattctcggatccattttaaagaatttggcattggtactcaaaacatcaacttttgaatgggcaaggttagcacattctttgttgcctgctgaacctgagcacttgatggttccagaagaaaattcctcaataattaacttcgagatggctcggattgcctttaaagttcttcagggtagcttgttttcactttggagacttgaggaaaattctgtatttccttctattctggctgctctttttgtcattgaatgggaatgtagcatgtctttagctcttgatgaagagaagtgtttggaaagtaatatagaagatacggaagttggtgtttctatgtgcagcagttcaaaaggttgtttggaggaggaaatgcatttgaaggttaaccttgcagaaagcatacatgttttttgccaaagcttaagtccatccttttgggataatcttcactcatgcacattgaatagattggcaactattctacctcagtgtgtcagaaacttggaaagtttttttgatgttttattatctgagggggaacattggccgctctggttgatgccatctttacaaaatggacatttatctgtgaaggtccagctggatccagatattacagatgaaattgaactcaaacacgagcgatttgttgcctttgttgataggcttattctcaaacttggctttagtgaagtggttttaggtattccaggaaatatacagtctgccacatcacaatcaattgatatcacttcacctgtctcttccttgtccagagtatgggtggctggtgaggtcctttgcacttggacatggaaagggggctgtgcattgaaaacattcttacctttgctggttcagtacatgaaagacgagtcatatcttgagatcaacattgtgccattgttgcttgatacactgttaggtggcgcccttatgcatgatagtggtccgtgggtactgtttaatgcttggcatctttctgacaacgagatcgataaaattcaagatcgttttcttcgtgctcttgtggctttgttatttactattaatacaaatgattgtctctggagagaatctgatgcacttgtattttttgagcaactgctgagcaatctttttattggctcatcagttaatagaaaatgcctgaagattctaccctatgttatgacctccatcataaaacagttctcagccttgaacaacggagattcttcgtatgctgatttggtgcggaaaagcatacagagttggcttgatgcaaccatttcttgtctgtcatcaagctcaagggaggtacctgtgcaagatattgaggactggatgcaagtggtgttgtcttgcttcccattgaggataactggaggagcccgggaattggtagctgtggttgagcgagagatcagtgatacagaaagatcactgatgttgactctgtttcagaaataccagattttctatggtagtacagcttcatcattggtcactagtggaactgccgtatcaacgacagttgaattactgggagtgaaactgacagctgttttggttggttattgctggagcaaccttaaggagaatgattggcattttgtgttccgcatggtattcaaatgcattgaatcgtctgttttgcttgtggaagaaatgactgatggcataaatgatgccacaataaaccaggtatcaagtgaagatgccttggagaagcttaaattagtggttggcactacagataagttaacattaagccttgcagaatctgctttggttacaatgtgtcagctcaaccatctttgtaatatccaagaagcagaaaactcccagtgtgtacagcttattaaatcaggggactatgctgagagtaatgacaagatggtagagagtgtcctccgtttgttcttggcctctggtgtttcagaggcaatcacaaaatcttgcagtgaagaggcttcgtctgtcataggttctagtcgccatgcttatttgcacttttgggaacttgtggcatcattcataaaaaatgctccactgcaaagtagaaagtctgcacttgagtccatggaactgtggggactgaccaagggttcagtcagtggactatattcgattcttttctcctcacaaccaatatttcacttacaacttgcagctttctctctacttctctctgagcccttctgtcaactttcactggttaaaaattattcaatgggagaaagttgctcatctgctcagcaatctggcacaagccaaagtgctgagttgatgccagattcagacaagacagtgcatctaagagaggaactttcagacttaatcgagttcccaacatctgaacttctcaaaactgatctgacagctcgagatagggttgatgtattcattgcctggtcattgttgctgtcccacctgcaaacactaccagcatcttccagtatcaagggagatgtgcttcaatacatacaagaaaaggtcagtccgtgcatattggattgcattttccagcatatcccagtaaaggccgctgcaccgaatgggaagaaaaaggataccgagctagcgcctgaagcagaagctgctgccaaagcttcgaagaatgccatagctacttgttctttgcttccgtacttggagtctctttggcccatcgggactttgcagatggcctcacttgcaggctcactgtacgggatgatgattaggctgctgccttcttttgtgcgcacatggtttactaccttgagagaccgttcattgtcatactcaatcgagtccttcaccaaacaatggtgcagccctcctcttcttctagatgagttttctcaggttaaggagtccgtatacggcgatgagaatttctcggttagcgtcaacaggtcggctttcgagatcgttgctacatacaaaaaggaggagacaggaatcgaccttgtcatacgcctcccgagctgttaccctctgcgccacgttgatgtcgaatgcacgagaagtttgggtatcagtgaagtcaagtgcagaaaatggctgctttcgctcacgtcattcgtccgcagccagaatggcgcgatagcagaggcgatccgcacgtggaagagcaatttcgacaaggagtttgagggcgtggaggagtgcccaatctgttacagcattctccacaccagcaaccacaacctgccgcggctggcgtgcaagacgtgcaagcacaagttccacggcgcctgcctctacaagtggttctccacgtccaacaaatcgacttgcccgctgtgccagactccgttctagtcctagctctagacacatgcttgtttgttggcaccacaccgttcgatccttcgatgtaaatggcgtgtgtacgcagcgcagtgttcagcgttttggctgttaaatactctcgaaacaggacgggacctgcagagactgagttcagaggtcttataatctacaattaccgtggattcgctagattatttttaggttaattgaacatgaaaatgtctaaattcttaacactta

SEQ ID NO: 6340 - DNA, 5820 bp, Zea Mays
atggggaagcagaagggccgcgcgtccagcagcggcatggcggcgtcgctggtaccgcacgcccatggcgccgtccccaccgtcggtttcggcggctaccatggcgccgtccgtgttgagcccgctgcgccctccgacccagacgccccgattcgccttaccccagatgtggatggtgaagtactccagaacctaaagaggctgggaaggaaagatgcaacaacaaagatcaaggccttatctactctctctatactctttggacaaaaaccttgtgaggaagttgtgcagattgttccacaatgggcatttgagtacaagaggctgctacttgactataacagagaagttcgccgtgctactcatgaggccatgtctagcctcatcacagcagttaggaaaggtatagcaccgcacctgaagtctttaatgggtccttggtggttttctcaatttgatcctgctcctgaggttgctcaagctgcccgacgttcgttcgagagatgatgcatcaagcctaggacttttgactcagtggaaaaggtttttcaccactgcaccaggcagcattcccacagtcagatagaagactggatgcattaatgttatgtgtgaaggaaacatttctttacctaaatgagaacttgaagctaacaccacaagctttgtctgacaaggctataccaatggatgaactggaagatatgcatcagagggtaatgtcatcatcactgttagctatggcaactcttatagaaattttactaggagtgaaattgcaaagttgtgatggtgagagtaccaatactgaaaacaaaaatatgtcaaaagttaggtcaactgtactttcttctgctgaagctgcattttgtatgcataaatgttttcttgacgtcctcaagtcaaaaagttctgttatacggtcagctacatactcactgcttacaagttacatcaaacatgttcctcatgtttttgacgaagaaaccatgaagaaactttccccaactctacttggtgcattccatgagaaggatgcgtcatgccactcttctatgtgggatacaattcttgttttctctagaaagtttccagaggcttggtcatattgtaatattcacaaagttgtcctcagtcgggtttggcatttcctacaaaatggatgttatgggtccaaacaagtttcatatcctcttctagttcagtttttggactctatgccacctaaagcagtcatgggacaacaatttgtttttgattttttgcataatctttgggctggaaggaaccagaggcagttatcagctgctgatagtttggctttctgtggtgcctttaaacagagttttttgtggcttctaaaaaatgcatcaagatattctactggagattcttcagatgatgtacccatcaagcttataactgatgtacttgccaaaatagtttggcgtgactaccttttattgtctggagacacaattggtggcggtgttctcttatctcgtaaaacttcaggatacagaaaatcatttacttaatatttcttgtcagtcgctgttaagtgactgtttggacataattcaacaaggagagaagctttccaagtttcagaatcatgtagaacaacttgtgtcgttctttctatctttggatcaaattgttgtatgcaaaggtgaattatggccactggaaaggttagcaaaaccattggttgagcaatctttgccagctattaagttcatggacactccatgccttgttaaacttctttcagttttggttgaaatatttgggcccacccccttattttttaagacttgtaaggaaaatgatgaaaagttggatatcaagtcttatctggagtttttcaatgatgaattgctcccttggtgtttggatggaaaatatagcacctgtaactcaaagattgatttgttactttccttatttcaagatgaatccttctttgaccaatggtgttccatcatcaaatgtacgacaactgaacaaaagcagtccgttgatgataagacctcaaatattctgggacgatatgaattgcttacactgttacttcagaaaatcagagaaaagattgctggggggaagctaagaaatttgcaggaaaatggttatcttctgcaacatttgcgtcttgatatattagattctactgcagcttctgtcctctgtgatttgcctgcttcagattgccaagttagttttatatgtgctgcacttggtggcgcagatcaagaggaccaaatctgcttcctttctcctgagacagtttgtaaaattctcggatccattttaaagaatttggcattggtactcaaaacatcaacttttgaatgggcaaggttagcacattctttgttgcctgctgaacctgagcacttgatggttccagaagaaaattcctcaataattaacttcgagatggctcggattgcctttaaagttcttcagggtagcttgttttcactttggagacttgaggaaaattctgtatttccttctattctggctgctctttttgtcattgaatgggaatgtagcatgtctttagctcttgatgaagagaagtgtttggaaagtaatatagaagatacggaagttggtgtttctatgtgcagcagttcaaaaggttgtttggaggaggaaatgcatttgaaggttaaccttgcagaaagcatacatgttttttgccaaagcttaagtccatccttttgggataatcttcactcatgcacattgaatagattggcaactattctacctcagtgtgtcagaaacttggaaagtttttttgatgttttattatctgagggggaacattggccgctctggttgatgccatctttacaaaatggacatttatctgtgaaggtccagctggatccagatattacagatgaaattgaactcaaacacgagcgatttgttgcctttgttgataggcttattctcaaacttggctttagtgaagtggttttaggtattccaggaaatatacagtctgccacatcacaatcaattgatatcacttcacctgtctcttccttgtccagagtatgggtggctggtgaggtcctttgcacttggacatggaaagggggctgtgcattgaaaacattcttacctttgctggttcagtacatgaaagacgagtcatatcttgagatcaacattgtgccattgttgcttgatacactgttaggtggcgcccttatgcatgatagtggtccgtgggtactgtttaatgcttggcatctttctgacaacgagatcgataaaattcaagatcgttttcttcgtgctcttgtggctttgttatttactattaatacaaatgattgtctctggagagaatctgatgcacttgtattttttgagcaactgctgagcaatctttttattggctcatcagttaatagaaaatgcctgaagattctaccctatgttatgacctccatcataaaacagttctcagccttgaacaacggagattcttcgtatgctgatttggtgcggaaaagcatacagagttggcttgatgcaaccatttcttgtctgtcatcaagctcaagggaggtacctgtgcaagatattgaggactggatgcaagtggtgttgtcttgcttcccattgaggataactggaggagcccgggaattggtagctgtggttgagcgagagatcagtgatacagaaagatcactgatgttgactctgtttcagaaataccagattttctatggtagtacagcttcatcattggtcactagtggaactgccgtatcaacgacagttgaattactgggagtgaaactgacagctgttttggttggttattgctggagcaaccttaaggagaatgattggcattttgtgttccgcatggtattcaaatgcattgaatcgtctgttttgcttgtggaagaaatgactgatggcataaatgatgccacaataaaccaggtatcaagtgaagatgccttggagaagcttaaattagtggttggcactacagataagttaacattaagccttgcagaatctgctttggttacaatgtgtcagctcaaccatctttgtaatatccaagaagcagaaaactcccagtgtgtacagcttattaaatcaggggactatgctgagagtaatgacaagatggtagagagtgtcctccgtttgttcttggcctctggtgtttcagaggcaatcacaaaatcttgcagtgaagaggcttcgtctgtcataggttctagtcgccatgcttatttgcacttttgggaacttgtggcatcattcataaaaaatgctccactgcaaagtagaaagtctgcacttgagtccatggaactgtggggactgaccaagggttcagtcagtggactatattcgattcttttctcctcacaaccaatatttcacttacaacttgcagctttctctctacttctctctgagcccttctgtcaactttcactggttaaaaattattcaatgggagaaagttgctcatctgctcagcaatctggcacaagccaaagtgctgagttgatgccagattcagacaagacagtgcatctaagagaggaactttcagacttaatcgagttcccaacatctgaacttctcaaaactgatctgacagctcgagatagggttgatgtattcattgcctggtcattgttgctgtcccacctgcaaacactaccagcatcttccagtatcaagggagatgtgcttcaatacatacaagaaaaggtcagtccgtgcatattggattgcattttccagcatatcccagtaaaggccgctgcaccgaatgggaagaaaaaggataccgagctagcgcctgaagcagaagctgctgccaaagcttcgaagaatgccatagctacttgttctttgcttccgtacttggagtctctttggcccatcgggactttgcagatggcctcacttgcaggctcactgtacgggatgatgattaggctgctgccttcttttgtgcgcacatggtttactaccttgagagaccgttcattgtcatactcaatcgagtccttcaccaaacaatggtgcagccctcctcttcttctagatgagttttctcaggttaaggagtccgtatacggcgatgagaatttctcggttagcgtcaacaggtcggctttcgagatcgttgctacatacaaaaaggaggagacaggaatcgaccttgtcatacgcctcccgagctgttaccctctgcgccacgttgatgtcgaatgcacgagaagtttgggtatcagtgaagtcaagtgcagaaaatggctgctttcgctcacgtcattcgtccgcagccagaatggcgcgatagcagaggcgatccgcacgtggaagagcaatttcgacaaggagtttgagggcgtggaggagtgcccaatctgttacagcattctccacaccagcaaccacaacctgccgcggctggcgtgcaagacgtgcaagcacaagttccacggcgcctgcctctacaagtggttctccacgtccaacaaatcgacttgcccgctgtgccagactccgttctagtcctagctctagacacatgcttgtttgttggcaccacaccgttcgatccttcgatgtaaatggcgtgtgtacgcagcgcagtgttcagcgttttggctgttaaatactctcgaaacaggacgggacctgcagagactgagttcagaggtcttataatctacaattaccgtggattcgctagattatttttaggttaattgaacatgaaaatgtctaaattcttaacactta

SEQ ID NO: 6341 - DNA, 575 bp, Zea Mays
tcgcctgtgcgttcgtttgtgacttggcgctgctgctgcgacgacgagcagcagcagcggttcggccggcgtgtacagccctccagcgatgggtccgtcggccctcaacgacaacagcgctgccgccggcgtcgtcctcccgatggctggcgctgggcggctgctgatcctggcctgctgctcgctcgtcgctctctactacctcggcgcgtgatgatcgtgtgaggacgagacgccgctccccgctgccgcttgctgttgttggggtgtcttgttccttagcccttttcttttctcctctagtggcagtggcaggcaggagagaaccttgtgacgatgggcgcactgcactgccttccaccggtggaggagagcttggcagtgtgaggcccctgtaaatcttaggttctagggagggagggatgctgtgttgacttcttggacatgtgtgctcattgtttcatcggtctttgtttagggttgatgcgctaagcttcgcactgcctgacttgtggctgatgttgctcatgagccgtgttgtttcccttgccctgatggagagtggttcatctgct

SEQ ID NO: 6342 - DNA, 1853 bp, Zea Mays
ttttcttgtcagaaatatcataatgcaagctgcctacttaggatttagatggatcattcattcacagagaaagggaaaaaaaggtttgtaccagtaaaattatctgatgtacgcaaagaagtgcagtgtcccatatgcttaggcatcatccggaagactagaacagttatggaatgcctgcaccggttctgtagggaatgcattgacaaatccatgcgacttgggaacaacgagtgtccagcgtgccgcacacactgtgcgagccggcgttctttgagagatgatccgaattatgatgccttgattgcagctctatatccagatattgacaaatatgaagaagaggagctagcgttcaacgaagaggagaatgaccgcaacaagcagattcaagcatccattgctgaggcttttcggaaacaatcagaagttattgggcggaagtctactgccaaagctactgctgctgcatttgtaagaagatcacgccgtaacattcggcctaatgggcagaatacctatttccgtggccgaggaaaagccagttctgatgacgttgctctggcctgttctgaagatgaagaggatggaaacggtgaaagctgtagcaaagaggcctcatctgcggaggagagttccccagagaaaaagcagaaacgactgccaaaatggccaacaccgcgttcttcacctgcccgagcatgcaatgatgaggttgcttctgatgaaaaggatgatgtaggaatatccagggaaaatttcagcacatctcctctacgagcatggggaaagaatggcactcgcagtcagactcgccacagtagcttcagtggttcaaatggcaggatggtcaagggtgggcgcatgatcaagttggttgagtgcttgcgaaattctgacgacaatgaaggcgagcgtgatgtacatctttgtctgcttccacttgatggacaaacggcaccaaatctggagaagtcatatctgtgttgcggcccaactctgtccatcaaacaactttgtcagtttgtcgccagtcagacatctcacaaagatgaagaagttgagatgtatgcgctgaagccttcttgtagcaagcctgtcagcactaatacatgcggtcctgacaaagcaaggctcgcaggggaggaacgcctttcagacttgcgctcctcgttcacatttcctaatggggttctggagctggtgtatgccataaaagtggctaactagatgctgagtgaaggcccattagttcaaatggaagtgttttttgtttatacatatcttcatcgtgatcccttgacgaaatgacaggtttgggctcttgaatacaacttggaaggaaaaaaaacgttgggggagactagttgttgtataattagcttgtgagatgtgagataaatgtgcgtacgttgtcaacgaatagtttcagaagagtcagattggcttccacagttcacctcgctgcaacccaaaatctggtctccactgccggcatttgggggaatttctcggttgggtgaaggctgagttatttcctcgagtggtcaagttgttttacttccacagttcaccagtttcagcttttgtaattcatcggttcatattcttcaggcggcagccagtccgtgctgcgaacgacttcccagatacatgtaacataaatcttataaaaaatatatatgtaacagaaattactttttttgtcgtttctttgtacggcacaaggacagtcgtatttaaccttgagctggttataccagagtgttactattttattatatctgtacttatacaaactacaaggcaatgtattcttcctttgcgaatgttgttagcaggcagtttcttcc

SEQ ID NO: 6343 - DNA, 2930 bp, Zea Mays
atcaccataggcaatcacaattccctttcccctcgccgccgcctcgctctctgccttttccacctcccccattcccacccgccgattcactcaccttggggcctcacgcggtcgcgcctccagcctcccctacccctactcccctcgcgcccagggaggagcccgagtcgcggcgagcgaagattccctccgattgctctcctcctagaacttccgatcggctcgtgatggccatgcagcagcacgcggcgtcggcgtcgagctccagcttggggctgcaccttctcgcctcgccctcgtccatcagggaggccacccacaccaaggttttcgtgggcgggctcgcctgggagaccagcagcgacaggctccggcgcttctacgagcgcttcggggacattctcgaggccgtcgtcatcaccgaccgccactctggccgctccaagggatacggattcgtgacattccgtgaagccgagtccgcgagcaaggcctgcgaggaccccacgccggtgatcgatggcaggcgcgccaattgtaacctggcatctttgggtcgagcccagcatcccgtgccccctgggcggccaagatcagctgggtcctatttgggtgtcccagttccaaaggccttctatttagggggttacagccaccaccgaccgtttccacttgggtactaccaaggatttcctgttccccagtacagggtacattaaactcatattccggtcagcaatatcttcctatttatggagtctcagctgcagcgaacacatccaaccaagcatttagccagctgagtccatccgtttccggtggtggcaatggttatttgtcggttcatagttacaacgtgcctggaaatcaatatgtgcagctcactggatccaacttcagcggtgcatcaccaaccgctcgaccttccattcagacttcttttttagtaggtaatgtggtattcataccatgccgcagtatagtaggacctgtgtattctaaagaaactatgacatgcttggtcccaggggcggacccacgttgaaagtagtgggggcacaggcccctgctcaattttttggtttcagtggactttttatgttatttggtgtagctatagagctttattagttaatagaccttcacttaggcccctactcagaatttgggctgggttcacccctgttggtcccttctagaaatctggaaattatttaaggttcgtgtcatatttgtgcatccttggtagtttttagtttctgttcaatgtcacatgctcttctatccatcatgtttgttcttaggttgggcacattttcttcgggccaagattatagatgtgttttctaaattatatcattttatgatgaaatattttcgtttatgaataagttctttatgttcacaaattctttgttttactaactatacgtctatacataacaaacaagatctttcattccttttgtaacaattttcgagctaatttcataaggtccagaaagatcgaaaacacagaaacatgcttggcatatgcagatcattgtgtgtttttttttgcattcctagggcttatattattgattctctaccatgtgacaccagcctcttaaaaatgttcccttgtccagtcgtccttaagattacctgtacatatataggtagtgtttgtttatttgagttgaataagtcacattactcggactacatacactcagtagccaaggtaatcatcacgcaaacacaaatgaaactgtagacatttctttatgtttctagatttgagatttctattttctccatttgtgaataatcacgcattaattggcttctgcagcaacacccgttcctgcacatccacacctaataattccagccccctcaccccagtttacacaagctagtggttcagaccaaagtgcaagttgaactgtgcatccaaacatttgtaccttgaggtacccttagattgcagcaggactaaaaagagcagtgttgctgtattcacagcatttgttcttgcctggcaagcaatcatccttgcattcataaggttgtcgttatcatggtcaacagatgtacctggaaaccatgaagttgcccctatggatggggcaagtgatccaagagtaacagttgctcttgcagtttcgctcagtttaaatcgcaagcgtgatggaaatgtagcttatgctggaatggagtccagcatatgtaagatggattaatccaatggagatcagccttcaggtgattgtgcatctgaaaattcgtgttggtgtgtggtccctagtcccagtcaccgtgcacagggtctgatgatcaagaagtgtgtcctgtcctgtacaagtctgcagtcatcaactcatcaccccgttgtctgcatgactagggcctgtttggtttggtgtctaacttgccacactttgcctaacttttctgtctaaggttagtttttcaattcgaaggactaaccttaggcaaagtgtggcagatttagccaccaaccaaacagcccctacattcatcagcggtcagcctttggaccaaactctggaagacctagctactctcttttcctgagagttaccagtaagtgtatccagttctgtatgcagtcatcatcgtgttgtttacaccactgggttgtagccagtgatgatatgatcattcgtctgtaccaaatttttattgttgcaactaaggtgtgatctagcgtgtagtgctctgtgtttggtggtttcaagtatagagcgcttctcttgtacttcaaaataaacccgtttacccatgatgatgctatatttagtagatttctcttctgattatgcttgtctctttaccaaagcatctctcggatagctatggcataaaaggcttgtacatgtttgaatgagcacacttatcaaacaatagaggttgtcttcttt

SEQ ID NO: 6344 - DNA, 2108 bp, Zea Mays
caccacccaatccccccaacaacccgtgcctgccgtgatccttccgacgccgttccccggccacctccaccgccaatggcaggcgccatccgcttcacatgacctcactgttacacggctcgagctgcctagctgtggctgtgagccccttctaccttcttggctgtttgctagctagaggccgagaacgaagccagccccgttttctgatccttcgcacagtggcgctgcacgtgcctctctcgatctgtcgccttctcctcttcttcgccttgtaccgtctgctgagcagtgagcacggaacaagatcgaaccacggcctcacatactcgcgcatatggcgacaatggcagggcgtcttgttgcccggacgtcgtcctcctcggccaagcgccagcggttcagctccgctgttctcctcctcgctctcttccagagctcgtggtgctacgacgacgcggcggcgacgacgacggtggattacggttacaacaacgagcacgaggccgaccgggtggcgttcctccccgggcagccgaggagccctccggtgtcgcagttcgccgggtacgtcaccgtgaacgagcgcaacgggagggcgctcttctactggttcttcgaggcccagacgtcgccggcgcacaagcctctcctactctggctcaatggaggacctggttgctcgtccgttgggtacggagctgcttctgagttggggcctctcagagtcaacagacacggggcagggcttgagttcaacaattttgcgtggaacaaagaggccaacttgctcttcctagagtctcctgctggggttggcttctcctacaccaacacatcatccgacctcaccaaactggatgatgctttcctgaagatgcatacagcttcctagtaaattggctcaaaaggtttccgcagtataggagccacgaattttatatctccggggagagctacgcaggtcactatgtgccacaacttgctgaacttgtctatgacaggaacaagggcaacaccaacacacacatcaaccttaaaggtttcatggtcggtaatccactaactgacgactactacgactcaaaggggctggctgaatatgcttggagccactcagtagtgtcagacgaagtttacgagcgcatcaagaaggtctgcgacttcagggtctcaaactggaccgatgactgcgatacagcgatgagcgccgtgttcagccagtaccaggagatcgacatctacaacatctacgcgcccagatgcaacctccctccgtcgtcagctgcacttgcacttgctgttgacaaggcagtcgtagccaacagacaggaacatttcaggcgaaggatcaggatgttctccggatatgacccgtgctactcttcgaacgcggaaaagtacttcaacgatgcaggtgtgcagacggcattccatgcgaatgccagtggagctcggaaatgggaagtttgcagtgattcaattttgaggtcatacaatttctcggtgctttctgtcttaccaatctactctaagctcatcaaagcaggactgagagtgtggctctacagtggggatgcagatggtagggtcccggtgatcggatcgcggtattgcgtggaagccctgggcctgcctgtcaagacgcagtggcaaccatggtacctgaacaaacaggttgcgggcagatttgtggagtaccatggcatgacgatggtgacgatcagaggagcagggcatttggtgcctctcaacaaacctgcagaagggctcgcactcatcgacacattccttcagggcaaacagcttcccacacacagatgacaagagtacttagggttgtgattgtgatgagggttattgttttcaaaaaaaaaatcaaggattggacaaactatgtgccccacacacacgggctaatcagtaaggatttcatttccagtttctgcataaattgggttggctacaaatagagctgcggtctgaaatacaattttcagcttacataaaaaatattaaatgaataagtatgataaaaccaaatggaacccttaaatcagtgtcctaagaaccggactgcgccttgattcaataatacctttcttgtg

SEQ ID NO: 6345 - DNA, 1693 bp, Zea Mays
caataagcttatgctgaaccactaagaacctcccttttattgagaacatggagaagaggatccaaggtgctacaaaactgctggatggtagtttggagcgctgctttgtggatggtctggaacaccgtgatgctaaagttatatacaactgtttgcgtgcttatgctgcaattgacaatacatcatcagccgaagagctttttcgtacaacagtggtgtctccattgatccagaaaatagttcctcaaaactatgcaagagctgttgctggggcatcatctgatgagctagaagaggattatcaacagataaaggcatgcgtagaaaaagattgcaaatttatattggaaatatcttcgtcaggctactgcttctccaagtctgctgtaacgaagttacgctatgagcctgcttacacagatttcatgcgacagtggaatgttggtgtctacttttcgttgcggaaattgcgggtggccttgattctactcttacaaatacctttagtcctactggattgaatgaggctcaacagaaaccgttgctcttgaaacaaagtattaagctcttagaaagtttggattcatgttggagtgatgaggttcttgtattctctcactgcgataaattcctccgtctgtccttgcagcttatttcaaggtatacaacatggctttcatgtggtttatcagcacgtaaagcttctgacaggagcccaaattcacctgcagatgctgaatgggcactgtctattcctatagaagatttcatatatataatgcatgatgtgcatgctgtaattggtgagctttcagaatcaggcagctttattggacatgtgaatcagtcactagggtcatgccccattgaagtatttaatcttgtgaaaggaagtatattgcaagctgctgaacctttaaaggagctgttgcctgcaataatggatgtcatgattggaatcatagttaagaagtctaatgaggacctgaagcacctgaaaggaataacagcgacatataggatgacgagtaaacttccagtcaggcattctccatatgtatcagggattttacatccactgaaggtgtttcttgaaggggaccgtatgcactatctatcagaagatgataaaactaagttgtgtcgtgggtctgcaaataagattactgcaacctactatgacttggtctctgaagttgtcactgtggcaaggaaaaccgagtcttcattgcagagactgcgccaaggtgcacaaaggcgagtaggagctagtacagatgcctcagatagcatcatatctgatacagacaagatctgtatgcagctatttcttgatattcaggagtacgcacggaaccttcgtgcgataggaatagacgcgagagagattgattcctacagagctctatggcagtgtgttgccccaaaggacaggcacgagaacatccagttttgatgtaaagaacgctgtcagtatatataaaataaaattgtcaacccgtagatatctcagtatgtgaaaatgatacggttggcactggttcatccagtcttcaacgacatgacaccctgtcagtttgtgaaacaaggacgtgtttggtttgatgaatgaggtggtacatttctctcttacttcttatttttatatttggtttttagaatagtacgagttgattcatcaccatttcattcc

SEQ ID NO: 6346 - DNA, 1253 bp, Zea Mays
ggagagtgcaaccgtggagcatcctgcaaatttttgcatgacgagcagagaaatgcaaacagtcgtcgggactctagggatggtggaccatcgagatcagagcggtatggagaccgagaatctaggagtaggcatgatgatagaagagcagaagatcgggacagattcaggcgtgacaactcacctgagagatcacgaggtgagaggcagagggacgatgacagatccgacagaggaagagaagcaaaatcagaaagacgcagatatgatgtggaacatgaggatcgcaagcggtcaaggcacggcagagagtgatgccatgaaagaagtgtttacaaagaacacaaatggtgcaagaggccgtgggggattgacgtttgtactcttaaattgcaacacaaccagtgctgttaaattttgatatttgaatatcggtgtcatttttagttatcatcactgaaaccgtctgactggattgtgttggtgccaattgcgtggtttttgccgaggaagttgtttactggttaatcttcagctaggatggtgggcgcgcctccgcaaggaccacaatgcctgttctggctacgcgctgatgaacaatgaaaatgatgctgtattttgcagaaccactgttacctgcaacagcatcagcagcagcatgtgcaacccaaaaggagccgtattccccagtagaaattttgtactggacagaggcacggttccaaaaggttcggccctaaaaattgctctgcaatgtcagtggtccagcgtagatgatgatgatcgcttctaacatagtctataaaaaatgcatactggagatttggtactagataacaagaggaccttgagtaccgagttttttccggtgaaagattgatgggcgatgccacagcctgaagacgaagaggatgtaaagaaaaaaactcgccaattaagggcttgttcggttattcctatcccatatggattggatgagattggaaaaaattgtgaaagattttgacttgtttgggattgaaacccatccaatcccacccaatccacatggattgagagcaaaacgaacaagccctaagaattgatgatgttgtagtacaaattccaggccttcggttgattttctaagagttagtttggttaattttctaagagttagtttgacagcctcgttttttcaaggaattttcatttttccaagtgaaattaatttatttttagaatttgagaatcttttattctcaagagaaatt

SEQ ID NO: 6347 - DNA, 1340 bp, Zea Mays
ccgccgtctaccgccgcagcggaatgggaatgacgttgactttggatgacctcaaaaccacattattgatgcccaaggagttggctgctggatttatactgcaatacacggtgatgccactgtctggattttttgtgagcaaactgttgaaattgccgtcccattatgccgctggactaattttagtggcctgttgccctggaggcacagcgagcaacatcgtgacctatttagcaaggtaatgaaaaaaaatagcgacatgccaaggataaatgccgtcacaggccttgttaaaactttagaacaataattatctggttggtgacaattcgtgaaatgttggcagaacgatatatttgaagtgattaaatgaatgtcaaggtggtgaatattcttgaattcttcagtggatataactgactggtgttgaaaattaacttgaaataaggcaaatgttgctctttcagttctgatgacagcagcaagcacttttgctgcagcgttcatgacccctctcctgacgtccaaactcgctgggcagtatgtcgcagtagatccaatgggactgttcgtgtccacatctcaggtcgtcctggcacctgtccttctgggtgctctgcttaatcagtactgcaatggtctggtccaactggtgtccccgttgatgcccttcattgcggtagcagcagtagccgtcctctgtggcaatgctattgcgcagaatgcttcggcagtcctggcatctggctcgcaggtggtcttgtctgtcggttgcttgcatgcatctggctttttcttcggctacgttctctcaagagtacttggcatcgatacctcctccgcgagaacaatctctattgaggttggtatgcagaactcagtgttgggccttgtccttgcaaacaagcacttgggcaaccctctcacggctgttccgtgtgctgtttcgagcatctgccactcggtctacggtagcattttggctgggatctggaggtctatgccaaacaaggacaagggagaatgatgcgatgatcaattcaaccatcagaattctttgttctccaacgatgaaagattttacccgtgagaataaacaccgcagagtggtgagcgctatataaaagcactgggcttgcactgttgttagtggttcatttgctttcttagattcggatagtacagttggtggatccatgattgatgtggatacatataccatgttgccatggcagcctgtttatcacacattcacttcaactagaacattgcggcgccctcacgggcgccctaccaagactcactcttttatgcaagaaacaacgaccaataaaacaaag

SEQ ID NO: 6348 - DNA, 1544 bp, Zea Mays
ccgctccgtccttcggcatgcttctactcagcccctcgccgcccttctactcagcccctcgccgccgtctaccgccgcagcggtaacggtcccccgccgtgtcctccttactccctacaaccgcctcaaggctacgcccaccccaccgcgcctcgcctgcctccgccttcggcccgccaccccgctccgcggcatttcgtcgaggaccgcgtgccgcgcggccgctgccgatgccgatgccgatgcagtgccctcccaagctcctggaggcgatggtggcgtgcgtggcgcaatggtgcgcattggggaggctctatcgcttgggttcccggtgtgggtggcatcagcctgcgccctcgcgctgtggcggccgccggccttcctctgggtcgggcccaccgcgcagatgcttggcctctccttcacaatgcttggaatgggaatgacgttgactttggatgacctcaaaaccacattattgatgcccaaggagttggctgctggatttatactgcaatacacggtgatgccactgtctggattttttgtgagcaaactgttgaaattgccgtcccattatgccgctggactaattttagtggcctgttgccctggaggcacagcgagcaacatcgtgacctatttagcaagggcaaatgttgctctttcagttctgatgacagcagcaagcacttttgctgcagcgttcatgacccctctcctgacgtccaaactcgctgggcagtatgtcgcagtagatccaatgggactgttcgtgtccacatctcaggtcgtcctggcacctgtccttctgggtgctctgcttaatcagtactgcaatggtctggtccaactggtgtccccgttgatgcccttcattgcggtagcagcagtagccgtcctctgtggcaatgctattgcgcagaatgcttcggcagtcctggcatctggctcgcaggtggtcttgtctgtcggttgcttgcatgcatctggctttttcttcggctacgttctctcaagagtacttggcatcgatacctcctccgcgagaacaatctctattgaggttggtatgcagaactcagtgttgggccttgtccttgcaaacaagcacttgggcaaccctctcacggctgttccgtgtgctgtttcgagcatctgccactcggtctacggtagcattttggctgggatctggaggtctatgccaaacaaggacaagggagaatgatgcgatgatcaattcaaccatcagaattctttgttctccaacgatgaaagattttacccgtgagaataaacaccgcagagtggtgagcgctatataaaagcactgggcttgcactgttgttagtggttcatttgctttcttagattcggatagtacagttggtggatccatgattgatgtggatacatataccatgttgccatggcagcctgtttatcacacattcacttcaactagaacattgcggcgccctcacgggcgccctaccaagactcactcttttatgcaagaaacaacgaccaataaaacaaag

SEQ ID NO: 6349 - DNA, 814 bp, Zea Mays
cttacaagttcttggtaattgtctcagtcagtaatattaaggagatactagataaggatacacgctattccttgcatttgtaatcgaccggctgcaccactacctgcgaaagctgatgacactgaggaaaacatccagcacatccagagaggaggtggagaaacttcagatggagaaccggtcgctccgcgaaaaggaggagaagtcctccagtgagacgaagaggcttcagcgagagattgcgaggctgaatgagggcatgaagaagctgaaatctgagaccgaagagcacgagaggaaggcgtcggtggcagaggcccatgtcgacgcgctgcagaagcagtcggaggagctgctcctggagtacgaccggttgctggaagacaaccagattctgcagactcagctacttagcagaggctaagctaaggagcttggtttgttagcaagactcctttaccaggtagtgtcgtagagccaaggacttgcccgattctgaatgcttacatgccgcggttctaaatttcggcatgtccattgtggttcttggcgtccatgctgttcctaacttgtgatcttgttgatgtatggatgcagcgtgtatttttagagttcatgtttcttccatttccgatagatggaggtacatgatgtaaggtccaggaacgacgggacgtccttgaggaattcggtagtcaaggctctcagaatgtgcttgaaaaaaatcggagtggcatgttacgcagattctgattcgtcctgaacttgaagcctgcatgaatgaaccaaagttgcctgaaaaaaaaggctgaac

SEQ ID NO: 6350 - DNA, 648 bp, Zea Mays
tttgaacgtaacaggctaacagcccagcccaaacatccggcccaccagatggtcgtgagtgtccgcacgaacccatcacacgctccgcccactcccccaggcgcacggccgcacctctccacctccggcgactaccaccagtccaccaccatggcggccacctccctcgcgcgcctctcccgacgcgccaccatttccgctaccgccgcggcgccctccctccggcgcctcctctcagtaacctccacagcctctgtcgcggcatccgccccgccgccgccgcccagcgcggccggcgccgcggccgtgggcgcggatcgggtgcggtgggactaccgcgggcagaggaagcttgttccgctgggacaatggatgcccaaggtggccgtggacgcttacgtagcccccgaggccgtgcttgccggccaggtcaccgtccacgacggcgcctccgtctggagcggcgccgtcctgcggggggacctcaacaagatcacgctcggcttctgcgccaacgtacaggagcgatgcgtcctccatgccgcatggacggctcccacaggacgcagcgggactatttttgtttcggctctgtagtgaagaatcgggcgtggcttgtaatttggtgatgcctttctcagcttgatc

SEQ ID NO: 6351 - DNA, 1601 bp, Zea Mays
tccagatgaacttgcccaggtccgcctcctcgccgtctcgtctgaccgtacgtctttggtgatgaagcatcgatccgggagaaggttcagcattagctctagctagagctagatagccggaggaggagctagtaggaagaggcatggataatcatcaacttgtcgccatggcagcggtggctcagccggcgagcccgacctcgccgcacgtcgcgcacaagatcccgcccggcgacgggccttacgcgagggccaagcacttccagctggtggagaaggacctggacgcgtcgatcgcgtggttctggaaggcgatcagcgcgggcgacaagttggacagcgcgctcaaggacatggcggtggtgatgaagcagcgcgggtacctggcggaggccatcgacgccatcaggtcgctgcggcacctgtgcccgaagcagtcccaggagccgctggacaacatcctcctggacctctacaaggccagcgggcggaccaaggaggagatcgagctgctcaagcagaagctccgcaagatctacctcggcgaggcgttccatggcaggaccaccaagcgcgcccgctcgcacggccgcaagatccacgtctccgtcaagcaagagacatcgcgcgtcctgggcaacctcgcgtgggcgtacatgcagcagcgcaacttcatggcggcggaggtggtgtaccggaaggcgcagatgatcgacccggacgccaacaaggcgtgcaacctcgccctctgcctcatcgagcaggcccggctcgccgacgccgagctcgtcctcgccgacgtgctcgccgggaggtacctgcaggcccgcgaccagcaggacggcaagatcgtccggaaagtggaggagctgctggcccggatcatggcgcatacgacgtggccgggcggtggcggcggtgacggacgacgacgcccggcggataagagcgggagcgggagcgagagcgacgacgatgactgggtcgagaaccagatgctggctttgctcgacgtggcggtgccgtaccggaagaagagcaggaggctgccggtctttgaggagatctcgcgagcagaatagcagatggctgatatagattagcagcagcatcatcatctttcgatcgagctccatgcatatatcgtttgagcgagcgcggatcctctggacctaactgcagtctgcagataggtaggtaggtaggtctgagctgatccagacccacatgtcagtgaccggacgcagaggatctgcttccattattatttgatcgactcctgtccagctcaaccttttggaccaactccgtggcgatagcagtagcagcagcagaaaggtaaagcgcgcgtgtgtgtgtgtgcccctgtgaatctgtggatcggagacagtgtgcagtagcatagcatcagcagcaaggtatttaaagcgtgcaagtgtgtgtataactgtatatacgcttcttatatgcatctgtggatattttgcatggatcggacgcatgtcgcagtcgtgtagtacgtgcgtttgtaaagctattttcaccagtatactcatctctatgctcatattcaaattttcactatatatctggttggttgc

SEQ ID NO: 6352 - DNA, 3255 bp, Zea Mays
gttcctcgggcagtcaggccacctctccgcctccccgttatggctctccaaccgcttcctcctcgccctcgcgtccatcccggtgtcgccacgctcgcggacgccgtcttcgcgcgccccccggatcccgccgcccgcgaccgattcccctggaacacgtccgtccgcctccacgcccccgcatcgcgctgctctactttgcgtggatgcgctattgcgacgtgcggccgggcgcctacaacgttcctcactgtcctcaaggcctgtggccgcgccggactcctggttcacgccgaggccgtgaggagagagggctgggcgcggacctcttcacggtgaacacgctcatcaacttctaatgcaggatcctggattgccactaggggaggattgtgttcgacaaggcgggcaacgtctcatggaactccatggtcgctgggttcttcgggaaggggagatgaggctcgcgcaggagctgttcgacgaaatgccgcagaaagacacgttctcttgggggtccttgatcgacgtttacacggaatgtgatcttagaaacatttttgttgatgggcattcaggtgtgaggaagccaaggaggctttggagtattttcagagtatgccggggtgtggcgtaaggcctgataaggtcgttgccgtgggggctgtcagtgctagtgctcagctgggcgctttggagcaagtaagatggcttcactcttgcttggagaagtgctatctgatgatgtggtctggatgtcgttggacttgcaactcatggttatggtctggatgctgtcatgctgtttcatcgagtggaggcagaaaaggttgcagtggacgatcttagtgtacttgtcattctgattgcttgcacacatgctggcttgatctcagagggtttagaaatatttcacagaatgaaaaatgattttgggatagatcccgaggtagaattggttgatctacttggccgtgctggacatttgcgttgagctggctgagttataaatggaacgtcttgcaaatcttggagctgattctggagtctgtttttctatcaaatatatatgctgatgaagcaatgtggggtgatgttttgaggattaggaaaatgatatgtgatgaggggatgagaaaggatattggacggagtgtgattgaagtggatggagaaatacatgagtttgtgaagggaggttgctcatatcattataaggaggaaatgtacttggtgctttggaatttatctaacatggcagcatctatttgattgcttctttctgtaccaactttgtgaaatcattcatcacgagtctgttgattcaacattctagtcatgcaccaaattgcatctgatggttcatagcccagatggtaactgcctatttttcaagcctgaattttcctgctcaagcacaagcaggcgtcttatgcagtatgaacttttggtgtgagctgtctgagggtgggcgcagtcacgcacgcaggaagctgattgacgagcctggacggatcactctcgctccactccagtcaccagtagccgagtgccacgtccatcttttacgtgacgcgaagccgcgaagcggtcggttcttatcacttatcatcagggggccagtcggggcaaccagctacaggacacgtccagatgaacttgcccagggacaggtccgcctcctcgccgtctcgtctgaccgtacgtctttggtgatgaagcatcgatccgggagaaggttcagcattagctctagctagagctagatagccggaggaggagctagtaggaagaggcatggataatcatcaacttgtcgccatggcagcggtggctcagccggcgagcccgacctcgccgcacgtcgcgcacaagatcccgcccggcgacgggccttacgcgagggccaagcacttccagctggtggagaaggacctggacgcgtcgatcgcgtggttctggaaggcgatcagcgcgggcgacaagttggacagcgcgctcaaggacatggcggtggtgatgaagcagcgcgggtacctggcggaggccatcgacgccatcaggtcgctgcggcacctgtgcccgaagcagtcccaggagccgctggacaacatcctcctggacctctacaaggccagcgggcggaccaaggaggagatcgagctgctcaagcagaagctccgcaagatctacctcggcgaggcgttccatggcaggaccaccaagcgcgcccgctcgcacggccgcaagatccacgtctccgtcaagcaagagacatcgcgcgtcctgggcaacctcgcgtgggcgtacatgcagcagcgcaacttcatggcggcggaggtggtgtaccggaaggcgcagatgatcgacccggacgccaacaaggcgtgcaacctcgccctctgcctcatcgagcaggcccggctcgccgacgccgagctcgtcctcgccgacgtgctcgccgggaggtacctgcaggcccgcgaccagcaggacggcaagatcgtccggaaagtggaggagctgctggcccggatcatggcgcatacgacgtggccgggcggtggcggcggtgacggacgacgacgcccggcggataagagcgggagcgggagcgagagcgacgacgatgactgggtcgagaaccagatgctggctttgctcgacgtggcggtgccgtaccggaagaagagcaggaggctgccggtctttgaggagatctcgcgagcagaatagcagatggctgatatagattagcagcagcatcatcatctttcgatcgagctccatgcatatatcgtttgagcgagcgcggatcctctggacctaactgcagtctgcagataggtaggtaggtaggtctgagctgatccagacccacatgtcagtgaccggacgcagaggatctgcttccattattatttgatcgactcctgtccagctcaaccttttggaccaactccgtggcgatagcagtagcagcagcagaaaggtaaagcgcgcgtgtgtgtgtgtgcccctgtgaatctgtggatcggagacagtgtgcagtagcatagcatcagcagcaaggtatttaaagcgtgcaagtgtgtgtataactgtatatacgcttcttatatgcatctgtggatattttgcatggatcggacgcatgtcgcagtcgtgtagtacgtgcgtttgtaaagctattttcaccagtatactcatctctatgctcatattcaaattttcactatatatctggttggttgc

SEQ ID NO: 6353 - DNA, 4178 bp, Zea Mays
agatgctcctctctcgcctccagcctcacgcgttcctcgggcagtcaggccacctctccgcctccccgttatggctctccaaccgcttcctcctcgccctcgcgtccatcccggtgtcgccacgctcgcggacgccgtcttcgcgcgccccccggatcccgccgcccgcgaccgattcccctggaacacgtccgtccgcctccacgcccccgcatcgcgctgctctactttgcgtggatgcgctattgcgacgtgcggccgggcgcctacaacgttcctcactgtcctcaaggcctgtggccgcgccggactcctggttcacgccgaggccgtgaggagagagggctgggcgcggacctcttcacggtgaacacgctcatcaacttctaatgcaggatcctggattgccactaggggaggattgtgttcgacaaggcgggcaacgtctcatggaactccatggtcgctgggttcttcgggaaggggagatgaggctcgcgcaggagctgttcgacgaaatgccgcagaaagacacgttctcttgggggtccttgatcgacgtttacacggaatgtgatcttagaaacatttttgttgatgggcattcaggtgtgaggaagccaaggaggctttggagtattttcagagtatgccggggtgtggcgtaaggcctgataaggtcgttgccgtgggggctgtcagtgctagtgctcagctgggcgctttggagcaagtaagatggcttcactcttgcttggagaagtgctatctgatgatgtggtctggatgtcgttggacttgcaactcatggttatggtctggatgctgtcatgctgtttcatcgagtggaggcagaaaaggttgcagtggacgatcttagtgtacttgtcattctgattgcttgcacacatgctggcttgatctcagagggtttagaaatatttcacagaatgaaaaatgattttgggatagatcccgaggtagaattggttgatctacttggccgtgctggacatttgcgttgagctggctgagttataaatggaacgtcttgcaaatcttggagctgattctggagtctgtttttctatcaaatatatatgctgatgaagcaatgtggggtgatgttttgaggattaggaaaatgatatgtgatgaggggatgagaaaggatattggacggagtgtgattgaagtggatggagaaatacatgagtttgtgaagggaggttgctcatatcattataaggaggaaatgtacttggtgctttggaatttatctaacatggcagcatctatttgattgcttctttctgtaccaactttgtgaaatcattcatcacgagtctgttgattcaacattctagtcatgcaccaaattgcatctgatggttcatagcccagatggtaactgcctatttttcaagcctgaattttcctgctcaagcacaagcaggtgccaacatgaacagtaccgactcaatgaggctcttgagtatccatgtgctgtccatttattattatttttcttgacttgcttccacagtggtgactcaacatgtgatttaacgaagaagatttatgcttttggctgcagttgttactccttttagtcagttttaaattgcatcatgcattagagtagccacttgtggattatgggatttaaaagtggttttggcctttaaaggacaagtttagtcctaattgagaagtgtctgcacctctgtaccattgttctttacttcatcagagtgaagatacatgaagttcagatttcagaatgaagacttcaagattgtatactgcctcttacttccgtctactttatgtgtttcattttatatctgtgttgttgtttgctgattacaaaaatgaaaagtggctgattttgggaacaacatttgatgatttgggactctgtaatatgccttgttttggttatttggctttagaactgaaaagtgattgctttctaaattaccagtatggtttatgcatatagtcatgactacctgaccatcagcacgagtagtttgacttggcactctattttgtttagtcgatctagcatgattgagacacctaaatggttggtcctctttgctaattgtaagaagcatgctcaagcttagaatttaagattatatcctaacagagttaacaatgatgaacactatcaagctacataagtgctgctggaccgtggggttcggtggtgtatttacgtcaaccttggggcatgagactcgagtatggtttggtgtaggcgtcttatgcatgtaaaatagaacagaaaccaatttgtttgttcctcttttttttcctgtttattaatacctactttaccttaaacactaaaactttgtttggtgtaggcgtcttatgcagtatgaacttttggtgtgagctgtctgagggtgggcgcagtcacgcacgcaggaagctgattgacgagcctggacggatcactctcgctccactccagtcaccagtagccgagtgccacgtccatcttttacgtgacgcgaagccgcgaagcggtcggttcttatcacttatcatcagggggccagtcggggcaaccagctacaggacacgtccagatgaacttgcccagggacaggtccgcctcctcgccgtctcgtctgaccgtacgtctttggtgatgaagcatcgatccgggagaaggttcagcattagctctagctagagctagatagccggaggaggagctagtaggaagaggcatggataatcatcaacttgtcgccatggcagcggtggctcagccggcgagcccgacctcgccgcacgtcgcgcacaagatcccgcccggcgacgggccttacgcgagggccaagcacttccagctggtggagaaggacctggacgcgtcgatcgcgtggttctggaaggcgatcagcgcgggcgacaagttggacagcgcgctcaaggacatggcggtggtgatgaagcagcgcgggtacctggcggaggccatcgacgccatcaggtcgctgcggcacctgtgcccgaagcagtcccaggagccgctggacaacatcctcctggacctctacaaggccagcgggcggaccaaggaggagatcgagctgctcaagcagaagctccgcaagatctacctcggcgaggcgttccatggcaggaccaccaagcgcgcccgctcgcacggccgcaagatccacgtctccgtcaagcaagagacatcgcgcgtcctgcgcaacttcatggcggcggaggtggtgtaccggaaggcgcagatgatcgacccggacgccaacaaggcgtgcaacctcgccctctgcctcatcgagcaggcccggctcgccgacgccgagctcgtcctcgccgacgtgctcgccgggaggtacctgcaggcccgcgaccagcaggacggcaagatcgtccggaaagtggaggagctgctggcccggatcatggcgcatacgacgtggccgggcggtggcggcggtgacggacgacgacgcccggcggataagagcgggagcgggagcgagagcgacgacgatgactgggtcgagaaccagatgctggctttgctcgacgtggcggtgccgtaccggaagaagagcaggaggctgccggtctttgaggagatctcgcgagcagaatagcagatggctgatatagattagcagcagcatcatcatctttcgatcgagctccatgcatatatcgtttgagcgagcgcggatcctctggacctaactgcagtctgcagataggtaggtaggtaggtctgagctgatccagacccacatgtcagtgaccggacgcagaggatctgcttccattattatttgatcgactcctgtccagctcaaccttttggaccaactccgtggcgatagcagtagcagcagcagaaaggtaaagcgcgcgtgtgtgtgtgtgcccctgtgaatctgtggatcggagacagtgtgcagtagcatagcatcagcagcaaggtatttaaagcgtgcaagtgtgtgtataactgtatatacgcttcttatatgcatctgtggatattttgcatggatcggacgcatgtcgcagtcgtgtagtacgtgcgtttgtaaagctattttcaccagtatactcatctctatgctcatattcaaattttcactatatatctggttggttgc

SEQ ID NO: 6354 - DNA, 1253 bp, Zea Mays
gagtgcctcctcggatttaagtgctatcctagcagaggatatatttccagcgttatgatctgtcaggactccttcacacggtgctttaagtcaaattctccagagccatggaattggaacatatatctgttccccttatggtgctttggtgtagtaataagatatggaatactcttcccactgaggtccttaacgcttgcaataggatggttagcattttttgctgccttttttcctgtccatttcctattgaaagggcaagacaagttgagaagtaaaattgagaggaagttggttgaaatgatgtgcagtgtttttgttgcttcatggactggagttatcaagtatcatggaccacgcccaagcacacgacctcatcaggtattcgttgcaaaccatacatcgatgatagatttcattattctggagcaaatgacagcatttgctgtcatcatgcagaagcatcctggatgggttggatttattcagaagactatcttggaaagtgtcggttgcatctggtttaatcgtaatgatctccgggaccgtgaagttacggcacggaagttacgtgatcatgttcaacaaccagacaacaatcctctgttgatttttccggaaggaacttgtgtgaacaaccagtacacggtcatgttcaagaagggtgcctttgagcttggctgcgctgtatgtccaatagctatcaagtacaataaaatatttgttgatgccttttggaacagtaagaagcaatcttttacaatgcacttggtccggctgatgacatcatgggctgttgtgtgtgatgtttggtacttacctcctcaatatctgagggagggagagacggcaattgcatttgctgagagagtaagggacatgatagctgctagagctggactaaagaaggttccttgggatggctatctgaaacacaaccgtcctagtcccaaacacactgaagagaaacaacgcatatttgccgaatctgtcttgatgagactggaggagaaatgaagggacgtaaagccgtacaagtgcacttcgttagggttttacatgcagctaccttgtaattcggttggcttccagaaaaaaaaaagtcagtgattaacaccgaagcattgtgctctcgtgagatgctgtgttggtcttaatatattgacggtactgtaccatggtttaaatgtgattattgaagcaatgtgaatggattagctggctaagaaaggaagtaaattgaattgtttgaa

SEQ ID NO: 6355 - DNA, 2808 bp, Zea Mays
cttaccaccaagtggacgcagcagctttaaccccccaaagcctcgacgccgcgagcacagctccgccgccaccgcccccttctcatccgcggtctcctccgcctgctgcatctctatcgatctagcgggactggctccttcccgtgctgggtccttcgtcaatcgtcagcgcgcaagatcggcacttgtgtacatctgagcagtttccggtgccctaattcaggcgcgggcgttgttgggttttcgataattttgggggttcacctgaaccctcatgacccaggtgaagcccgcccctgggggaaggatgctgaccgtgctgcgggtgcacctcccgtcggagatcccgatcgtcggctgtgagatcacgccgtatgtgctcctgcggcgccccgacggaggcgtcttcaccgacgacgtgtctgagaccgcgcccgtggatgggtacttcatgcgctacaagtggtaccgcatacaaagtgatcgtagagctgctatctgcagtgtacacccaacagaacaagcaacacttcagtgcatagggtgtctgaagtcaaaaatacctgttgctaagagctaccattgttcttctaagtgcttctccgatgcttggcaacaccacaaggttttgcatgaccgtgctataagtgctttaaatgaaaacggaaccgaagatgatgagttgtttggcagatttggtagcggcagttcgagctcaggggttattagtgctgcgttgtctggttcaacatcaaacctttcactgagctcaggtgttaataatggacctacacctgtgtatccaacaggcactgagaagagttctggtgaaacttggtttgaagtgggatggtcacgaacatatacggcaactactgatgatattggacatgtgctaagatttgaatgtatagttgtggatgtggaaacacgggggactgtgagagctcctacttcagtcatgacatcccgtgtaatcccagcaccgaccccgacaccacgccgcttgatccctgttaatgcagctgatgcaatggtccacttcgatttagatagccggacttcttcttttgggacatttactgtgctgtcctacaatattcttgctgatacatatgcaacaagtgatacatacagctattgtccaacttgggcacttacatgggcttatagaaggcaaaatttgttgcgtgaaattattggttaccatgctgatattatctgccttcaggaggtacaaagtaatcactttgaagattttttttcaccggagcttgataaacatgggtaccaacctctatataagaaaaggacgacagaggtgtacagcggaagtcctcaagcaattgatggttgcgctactttctttcgtcgggacagattttcgcatgtcaaaaaatatgaggtcgagttcaataaggctgcacagtctttaactgatgcaattattcctgccgctcaaaaaaagttagctctaaatcgtttggttaaggataatattgcgctaattgcagttttagaagctaaatttagtaaccatggaactgaaaaccctagtaaaaggcaacttctctgtgtggctaatacacatataaatatccaccatgaccttaaagatgtgaagctatggcagattcataccctcctaaaagggttggaaaaaatagctgttagtgcagacattccaatgttggtctgtggagattttaattcaactcctggaagtacgtcacatgggcttcttgcaaggggcaaagttgatcatttgcatccagatctagcaatagatcctcttggaattttgcgcccactaagcaagctgacacaccagcttcctctgtgcatactcatcattcgtgagtatggctggtgttggctatgatttggatcaccagcgaaggaggatggaccctgggacaaatgagccattgttcacaaattgcacaagggattttaccggtaccctagattacatattttacacagcggattcattgactgtagagtcattattggagctgttggatgaggatagcttgagaaaagacacggctcttccttctcctgaatggtcatcggatcatatagcgctcctagcagaattccggtgcaagcttagagttagacgatgatactttaggaggagctgtaggggagggattcttgacaatcgcatgagatgatgagaatgtaccctggcgaaggcaggaacgagaagcctaagggaaagaggcttgttatgttcctcacccttttacatttccgcctcgatgttctctagtggcactagttggaatgcgacttccaatagaagatatattatcaatgcaaagagaaatgatttaatagattcgtgtgccgtttttagttttccatcctcacattctcgcccccctcccccccccccccccccccctcttcaatgtgagttcattgtccacatttttgtttcctaccatgaatgtgctctagttcttacaaactaaaaatggccccttccatagtgtatgtatgtctcttgagcagggatcagctttggcgtagtttactgtgttgaagatgcttagttgaaaagtgatgtcgggttatctatgatggatattgaacgaatacctggtgactagagagagcttcacattggggaagctatactgaatgaaaactgtgaattttgatgtctctcttgcagtggtttctgaagcacccatctcaatctattgttatatatatatatttttattcctgaacttgttatacaaagtaatttgtttcacatggcaataacatgttggaactggtttggaagag

SEQ ID NO: 6356 - DNA, 2817 bp, Zea Mays
tgaacgtgaacggcgaacctgcagtcagacttaccaccaagtggacgcagcagctttaaccccccaaagcctcgacgccgcgagcacagctccgccgccaccgcccccttctcatccgcggtctcctccgcctgctgcatctctatcgatctagcgggactggctccttcccgtgctgggtccttcgtcaatcgtcagcgcgcaagatcggcacttgtgtacatctgagcagtttccggtgccctaattcaggcgcgggcgttgttgggttttcgataattttgggggttcacctgaaccctcatgacccaggtgaagcccgcccctgggggaaggatgctgaccgtgctgcgggtgcacctcccgtcggagatcccgatcgtcggctgtgagatcacgccgtatgtgctcctgcggcgccccgacggaggcgtcttcaccgacgacgtgtctgagaccgcgcccgtggatgggtacttcatgcgctacaagtggtaccgcatacaaagtgatcgtagagctgctatctgcagtgtacacccaacagaacaagcaacacttcagtgcatagggtgtctgaagtcaaaaatacctgttgctaagagctaccattgttcttctaagtgcttctccgatgcttggcaacaccacaaggttttgcatgaccgtgctataagtgctttaaatgaaaacggaaccgaagatgatgagttgtttggcagatttggtagcggcagttcgagctcaggggttattagtgctgcgttgtctggttcaacatcaaacctttcactgagctcaggtgttaataatggacctacacctgtgtatccaacaggcactgagaagagttctggtgaaacttggtttgaagtgggatggtcacgaacatatacggcaactactgatgatattggacatgtgctaagatttgaatgtatagttgtggatgtggaaacacgggggactgtgagagctcctacttcagtcatgacatcccgtgtaatcccagcaccgaccccgacaccacgccgcttgatccctgttaatgcagctgatgcaatggtccacttcgatttagatagccggacttcttcttttgggacatttactgtgctgtcctacaatattcttgctgatacatatgcaacaagtgatacatacagctattgtccaacttgggcacttacatgggcttatagaaggcaaaatttgttgcgtgaaattattggttaccatgctgatattatctgccttcaggaggtacaaagtaatcactttgaagattttttttcaccggagcttgataaacatgggtaccaacctctatataagaaaaggacgacagaggtgtacagcggaagtcctcaagcaattgatggttgcgctactttctttcgtcgggacagattttcgcatgtcaaaaaatatgaggtcgagttcaataaggctgcacagtctttaactgatgcaattattcctgccgctcaaaaaaagataatattgcgctaattgcagttttagaagctaaatttagtaaccatggaactgaaaaccctagtaaaaggcaacttctctgtgtggctaatacacatataaatatccaccatgaccttaaagatgtgaagctatggcagattcataccctcctaaaagggttggaaaaaatagctgttagtgcagacattccaatgttggtctgtggagattttaattcaactcctggaagtacgtcacatgggcttcttgcaaggggcaaagttgatcatttgcatccagatctagcaatagatcctcttggaattttgcgcccactaagcaagctgacacaccagcttcctctggtcagtgcatactcatcattcgtgagtatggctggtgttggctatgatttggatcaccagcgaaggaggatggaccctgggacaaatgagccattgttcacaaattgcacaagggattttaccggtaccctagattacatattttacacagcggattcattgactgtagagtcattattggagctgttggatgaggatagcttgagaaaagacacggctcttccttctcctgaatggtcatcggatcatatagcgctcctagcagaattccggtgcaagcttagagttagacgatgatactttaggaggagctgtaggggagggattcttgacaatcgcatgagatgatgagaatgtaccctggcgaaggcaggaacgagaagcctaagggaaagaggcttgttatgttcctcacccttttacatttccgcctcgatgttctctagtggcactagttggaatgcgacttccaatagaagatatattatcaatgcaaagagaaatgatttaatagattcgtgtgccgtttttagttttccatcctcacattctcgcccccctcccccccccccccccccccctcttcaatgtgagttcattgtccacatttttgtttcctaccatgaatgtgctctagttcttacaaactaaaaatggccccttccatagtgtatgtatgtctcttgagcagggatcagctttggcgtagtttactgtgttgaagatgcttagttgaaaagtgatgtcgggttatctatgatggatattgaacgaatacctggtgactagagagagcttcacattggggaagctatactgaatgaaaactgtgaattttgatgtctctcttgcagtggtttctgaagcacccatctcaatctattgttatatatatatatttttattcctgaacttgttatacaaagtaatttgtttcacatggcaataacatgttggaactggtttggaagag

SEQ ID NO: 6357 - DNA, 1424 bp, Zea Mays
tctctccttcctctcacattccactagaacactcccaccaggccaccacctccacctcgtcgtctcccaccaccgccgcgcgcgagccctagcccgatctagccggcggcaggcactagatcccgccgcttgcggcatcccgggacgcgcctcgccgaattcgccgctcctcgcactgcaacacgcccggaccactgttactgcatgccatgtagtattttattattggtggaggttgtcaccacaagacatatgttgtgatttctcgatggcgaggagatgaaacaggtgtgggggcggagcagcaaggacatgacaaccatgccccctccgcgccaccgtggcgctgctaagaagcccatgtggatcatagtgctattgtcgttggtttgtgttgcccttatgggggcctatgtctacccaccacggcactactctgcatgctacttctttgcttcgagtgtctgtaccccgttcaaggattggctacctgctgttgttcgggagcgaactgatgaagagatagtgtcatccgtggttattaggaatctcctttcgatgcctatggctgtgtcgaagaacccaaagattgcctttatgttcttgacaccaggttcattgccttttgagaagttgtgggaggaatttttacagggtcatgatggtcgatattccatctatatccatgcatctcgtgaaatacctgtacattctagctccctctttgttggacgtgaaattcgcagtgaaaaggtagtatgggggaggatttcgatggttgatgcagagaagaggctgttagcaaatgcattggaagatgtcgataatcaattttttgtcttgctttctgacagctgtgttccagtacatacatttgattacatatataattatctgatgggaacaaatgtcagcttcattgattgcttcctggatcctggcccacatggaactggaaggtattccatggaaatgcttcctgaaatagaacagagggacttcaggaagggtgcccagtggtttgctataacacgaaggcatgctttattgattctggctgacaacctttactacaataagttcaagctgtactgcaagccagcagagggacgcaactgtattgctgatgagcattatttgccaaccttcttcaatatggtcgatcctggtggaatagctaactggtcagtgactcatgttgattggtccgagggaaaatggcatccaaggtcatatagagctgcagatgttacctatgaactcttaaagaacataacgtctgtcaatgagaatttccgcattacaagtgatgataagttagggttgagaagcagaggcccggggtctttgcccatggccgagcaagagagaagacttctaattcctgttcgattggattgatacatctctccttatgtagagag

SEQ ID NO: 6358 - DNA, 1145 bp, Zea Mays
ctgtaccatgtcctgcagcgaagagattcgggagtccatgctgatcaaatcagagctgactgataccaggttgtcaccggttgggggaaccggatgattggaactaggaacatgacacaatgagtagtggtggtgtgtggtaggatgtggccttggacctcgctggtgcggttgagtcgccgtggtcggcaaccatactgtcaaggcagggatataaacacaaggagctgattccatgaagatttgtcaactccaattaacagctacacgattttcaaaacagaataattctggcgaggatgacgagctcctttctgaactaaaagataagtgggatgcaatggagaacaagtcctctcttgccttgtatggtgctggagcaatcctcgctgtctggatatccttggtcgtagtgagatctctcgactctgtcccattgctcccaggcatattggagctagtcgggctcagctactctggatggtttgtgtaccgatacctgctttttcaggaaaaccggaaagaattggcgggtgttatcgatgatataaagagaaggattgttggcgatgatgaatagctgtttcctggtttgtaattctatttatctcgccctgtttggttctgaggaattgaaaaataatccaatggtgaagtgagaaagcactttctagctattggttttaattcatggggtccaaacaggctcttgatagaatcttgtaggtttctgttcttaattaatgccagtcagagctacgaggtattggcctttccacatctcttgtgccgtctgcagttgaacatgttatttgcagaatctttttatttagcatggtctagaaaaattcttgtatcatccgtatattccgctgaggtatggccttccacaccaagatgtacctccagtttagcatggtctacaaaaaaaaatattttattctctgcatatgccgctccagttcctctcaaattccctgtgctgccctagccagaagttagccgtcagagcatataattgtaataagatataaaatcatctgaaacataaccggtagcacttttgtcctcacctgctcaaccgagcacctgagtttcggcttttttttaagtaagaaaaaagggaaaatctaaatcgattaaac

SEQ ID NO: 6359 - DNA, 2351 bp, Zea Mays
ccattttcgagcgcagaagcgagagagatccggagcagccgcagtcccaccgacctcgccgccggtcgccctccatctcctcgccgctgcctctcgtgacgacgagtccctggaggggctgcagcaggagcttgacaactgcaagaatgaccaggaagtcgcaaacattctagccagtggcatcaaactgcgcgagtacacaaaaggcgtcgagaataacatacgccaaatcgagctggattctatccagaaattggttccataagttcagagataaaggtccttcaggagaaatctatggacatgggattaaagctgaaaaatcgtaaggctgcagaatctaaattgtcaaaatttgtcgaggatataatagtacctccaagaatgattgacataattgttgatggagaggtcaatgatgaatacatgaaaacacttgagactctaagcaaaaaaatcaaattcatcgatgctgaccccatggttaaatcatccaaggctctaaaagatgttcaacctgaggttgagagactacgacagaaagccgtctcaaagattttcgagtttgtcatccaaaagttctatgccttgagaaaaccaaagactaatattcagattctacagcagagtgttcttcttaaatacaagtacacgataaatttccttaaggaacatgctaaggagatatatgcagaagttcgtacggcgtatattgacaccatgaataaggtgctaagtgcacatttccgggcttacatacaagcattggagaaactacagatggacatagcaacttccactgatttgcttggtgttgaaaccagaagcacaggcttcattttctccattggaaaagaacctctgaaaacccgtccttcagtgtttgctctgggtgaacgaataaacattttgaaggaaatcgaccagccagcattgatacctcatatagctgaagcgaagtcacagaaatactcgtatgaagttcttttcagaagcttgcagaaacttcttattgatactgccacttcagaatacctgtttactgatgatttctttggcgaagaatccatattccatgatatatttgcaggaccgattcaagttgttgatgaacatttcaatactgtactcctgaactgttatgatgcaattggcataatgcttatgatcagaataattcatcagcaccagctcatcatgtttaagcggcgaatcccatgtttggactcttacctagacaaagttaatatgtcactctggcctcgcttcaagatggtgttcgacttgcatttgaacagcttgcgaaatgcaaatattaaaacactttgggaggatgatgtccatccacactatgttacaaggagatatgctgaatttacagcttctctagttcatctcaatgttgagcatggggacggtcagcttgatctaaatttggagcgattgcggatggccattgaggatttgcttgttaagttggccaagatgttttccaaaccgaagctacaaactgtctttctgataaacaactatgatttaacaatttccattttgaaggaagctggaactgagggtgggaaagcacaacaacacttcgaggaggttcttaagagcaacatcgcaatatatgtggaagagttgctcctggagcagttcagtagtttgatcagattcgtcaaatctcgtccagcggatgagacggctgcaaattccgagaaagccagcattgccgaagttgagccactggtaaaggatttcgcgagccggtataaggccgcgatcgagctgatgcactatgatgtgatcacatctttcagcaactttctttgcgggatggagatcttgagagcgacgctcgcacagctcctgctatactacaccaggctctccgagtgtgtcaagagaatcaacggcggctctgctctcaacaaggaccttgtctccatatcctccatcctgttcgaaatcaagaagtattctaggacgttttagttgtttcacccccttccatgtacactaggacggctagctgaggggtagctgtgtatccttactttgtaactggtatgtgcgactgcaggggaaacaagggcattttgtcgtggtttgtatcttcgtctgtgttacccgacttgacccctgcccctttccagcacagaactatgatctctaggctgtctccacagttatcctattctatcttctgtcctatcatctattttaaacttcattttgtaaacagtatcgattatagtgcaaatctacaattttatacgatccgctgtggataaccatatgctgcatactaatgaatgcgtaccaaacgcttgccttaatgttatttttatgac

SEQ ID NO: 6360 - DNA, 2818 bp, Zea Mays
ccattttcgagcgcagaagcgagagagatccggagcagccgcagtcccaccgacctcgccgccggtcgccctccatctcctcgccgctgcctctcggcgaaaagcatacaatcatatgggtcgaaagaactaactgggccgtgtggtctgctgttagatacgagcatagactacaggctcaaagttccaattccaacccacccgacgtccgacgacagctggtccgggtctcctccatttcccggggacccgtccgatccgatcccagtcctcaacgccaacggtgggagatctagatcggagctagccagccagccggccgacgctgtccgccggccgccccggcgattctgacccgagatggcggtcgtccctgctgcagagaccctcgacgggctcaaggacaggttcgatctcggggtcttcgtaggcgacctcgccctcgatgaggaagtcaccagtgacgacgagtccctggaggggctgcagcaggagcttgacaactgcaagaatgaccaggaagtcgcaaacattctagccagtggcatcaaactgcgcgagtacacaaaaggcgtcgagaataacatacgccaaatcgagctggattctatccaggattacattaaggaaagtgaaaatctagtttctctgcatgatcaaatttgtgattgtgacaatattttgttacaaatggaaacagttctgactggattccagaaattggttccataagttcagagataaaggtccttcaggagaaatctatggacatgggattaaagctgaaaaatcgtaaggctgcagaatctaaattgtcaaaatttgtcgaggatataatagtacctccaagaatgattgacataattgttgatggagaggtcaatgatgaatacatgaaaacacttgagactctaagcaaaaaaatcaaattcatcgatgctgaccccatggttaaatcatccaaggctctaaaagatgttcaacctgaggttgagagactacgacagaaagccgtctcaaagattttcgagtttgtcatccaaaagttctatgccttgagaaaaccaaagactaatattcagattctacagcagagtgttcttcttaaatacaagtacacgataaatttccttaaggaacatgctaaggagatatatgcagaagttcgtacggcgtatattgacaccatgaataaggtgctaagtgcacatttccgggcttacatacaagcattggagaaactacagatggacatagcaacttccactgatttgcttggtgttgaaaccagaagcacaggcttcattttctccattggaaaagaacctctgaaaacccgtccttcagtgtttgctctgggtgaacgaataaacattttgaaggaaatcgaccagccagcattgatacctcatatagctgaagcgaagtcacagaaatactcgtatgaagttcttttcagaagcttgcagaaacttcttattgatactgccacttcagaatacctgtttactgatgatttctttggcgaagaatccatattccatgatatatttgcaggaccgattcaagttgttgatgaacatttcaatactgtactcctgaactgttatgatgcaattggcataatgcttatgatcagaataattcatcagcaccagctcatcatgtttaagcggcgaatcccatgtttggactcttacctagacaaagttaatatgtcactctggcctcgcttcaagatggtgttcgacttgcatttgaacagcttgcgaaatgcaaatattaaaacactttgggaggatgatgtccatccacactatgttacaaggagatatgctgaatttacagcttctctagttcatctcaatgttgagcatggggacggtcagcttgatctaaatttggagcgattgcggatggccattgaggatttgcttgttaagttggccaagatgttttccaaaccgaagctacaaactgtctttctgataaacaactatgatttaacaatttccattttgaaggaagctggaactgagggtgggaaagcacaacaacacttcgaggaggttcttaagagcaacatcgcaatatatgtggaagagttgctcctggagcagttcagtagtttgatcagattcgtcaaatctcgtccagcggatgagacggctgcaaattccgagaaagccagcattgccgaagttgagccactggtaaaggatttcgcgagccggtataaggccgcgatcgagctgatgcactatgatgtgatcacatctttcagcaactttctttgcgggatggagatcttgagagcgacgctcgcacagctcctgctatactacaccaggctctccgagtgtgtcaagagaatcaacggcggctctgctctcaacaaggaccttgtctccatatcctccatcctgttcgaaatcaagaagtattctaggacgttttagttgtttcacccccttccatgtacactaggacggctagctgaggggtagctgtgtatccttactttgtaactggtatgtgcgactgcaggggaaacaagggcattttgtcgtggtttgtatcttcgtctgtgttacccgacttgacccctgcccctttccagcacagaactatgatctctaggctgtctccacagttatcctattctatcttctgtcctatcatctattttaaacttcattttgtaaacagtatcgattatagtgcaaatctacaattttatacgatccgctgtggataaccatatgctgcatactaatgaatgcgtaccaaacgcttgccttaatgttatttttatgac

SEQ ID NO: 6361 - DNA, 1618 bp, Zea Mays
gcttcagtgtaggcgtgcacactttgtgttctgcctccgacaccctctcgcccgccctccgtcaatcacgcaaggtctgccacccgaccaccccatccgcagcgccaacacctccgtcggccgccagatccggatcccgtccccatcatcaacgcctccgcccccgtcaagctccctctacgcgtctgcctcctcctcggcctggatccgcggcggccctagagcgcgggcgcgcaggcacggccggcgcggctacacggcggcgcggacgccgcgtccccggccccggtcatggcgcgggtgcaggagacctgccatggcggcaccggtcccaagccctagccctggtggcggcgcggcatcaagccccggccccaccggcgggcgtggtcccgacggcgggcgcgatccctgcgcaggccttctcctgagacgctcgacctcggcgcggagcatggcggcctcgctctcgttggtggcgacgacttgctcggcggcggcgacctcctcgcgggcctggacacaactagccgtcgccttttttgatgtgacgctctctgcaagacatgctgatatacgacaccggcgacattcgccagccgccctgcgccccgttcgtgaagaatgcgtcagccatgttcagtttctcgcagggctgcctttgttggaggcaagaagtgcccgcagatatctggtgctttgttgtggcaccgcctcatgcatgggcaccaaggtcctctcgacgctcgacggcattcaacggcacaaacaagatccgtgcctacgcacactgcgcgaaaaactcggaagagatcgctctgctcctgatcaacctggacggcatcagcacgaaccgcatctacgtgacgagccaaggcgcgcacgcccggagcggaaggaagaaggagagcaggacgtccgacgtccacatcatccctgcagggctcggcgaagcagcagccgcgctcacgagacaggagtaccatctaactcccaaggacgggaacctgcagagccagcagctgctgctgaacggcaacgtcctggcaaccgacgccgacggggagatcccggagctggagcccgtgcaggtggaggggacgcagcccataaccgtgggcccttactctatcgtgtttgctcacgtccccagcttctacgctcctgcgtgcctgtagctagagttttcgactggattttttttcagcctttctcggtgtgcatctcgtaggttaggtaagtctgtccgggtgaacggcgaagcttgttcatctctgcccatagtccgtgaagtgtaagctgctaggctggaaggtttgtggtttatgattgtttgggaaaggagtggtcagatatataatgtgtgagcaaaagaaggaaggaagctggaaatgagataataaaagaaagggttttgagttttagtctcattttgtttgagagagcagcagaaaaagcgtggatggaaccatgtgaagaagaaagagacgggagggcacaaccgcacgagacgcctccacccggaattccggttgccgaagacaaggcaaaaatatgtacaaggacacaagcagggatctcagcctaatcaatagtaacaagttacgtgctgcacaga

SEQ ID NO: 6362 - DNA, 1269 bp, Zea Mays
agaaataaccacgagacaccacttcctagcttcccttcccctcggctgccctcaaaaccccctcaaaatcctccgaaccccgccgccgacgagcgagctatggcgctggcgcggcggctgctccgccttactccctacctcggcacgctctcgctcccaccccccaactcgcatctcctccggaatcgcacctatatctctgacatgcgccgctctgccttcgtcgaccgcttgctccgttccgtacgctccgagatctccttcctcgataactccgccccgccaccgccaccaccgcctcctaagccattcaccattgaggaccgcccgggcgagcagtgggcccgcctgcgccgcgtgttccctgcggccgagggggaggaagaggaggtcagggtggacgccacgttggtcgacggcgcgctccctccctcccgctcgggcgcggacacgggcggcccgcccagaatgcatatcagtgttaaggttgaggtctccaaggccgcgcggcctggagtggcgctcaccttcgagtgctccgcgtggcctgacgagatggaggtgcggagggtctttcccgtccgccgcggcgggcctgccccagtgcagcagtacgtcggccgccaattcaggcttccaaagtccactgctcccctccagacttccaatccagcacgtgggaatccaatctcgagttccaggcttccagcacgcgcgaatccagttcaccgacggactccagacttcatccttcaatctccagcacgcgcgaatccagtttttttcgtcggcatgagttcatcttctggagagtttggtcgtcgccgtcaggataatgttgaggtgatcttcccagaatcacaagttgtgggcagcggcaatccatcttctgttgcggataacacagttcttgcttcggcatcatcagcctcagccgctgcagattctgcagctctcgttgataaggctattgcaaagttgcctgctgatgttcgtgcacacgcaactggtatctgggacttgtagtattaataactatgagttggatgaggaaatgcaaagtgccgtacaagactacctggagaaaattggagtgaatgatgaccttgctgcatttttgcacgcctacatggaaaacaaggagcacactgaactgatcagatggctgaaaaacgagaagatgaggtgggtccactggttgccagacatgtgggtccactggttgccagacatgtgagtataggccttctgtgaggaaaacaagctaga

SEQ ID NO: 6363 - DNA, 1407 bp, Zea Mays
cagtagtcaggcgatgtattttgttttgagctgctgtacgtgtgagaataggattcacacatggtttcagtgtgctaaagaacagtggacatgggtggatatgttgttctgctggggctatgacatctatgcattataggttaagtttaagattgataaagattgccgtcctctccctgagagtagtctcaagcaagccatcaaggaaaattacagtgcaaagagcaaatttgacccagaactcaccacaaaacaggtccaaaggttacttttgctgtttaagcctcttagtgcacctcaatctgttccaaataatcactttgaagaaaggcgtcactatgaagaacaaaggaagccgtattatcattttgaagaaaggcttcctctgttgcctattgaagaagtgcgtcagccacggtttgatgatgaaaggcgccctgcagttagacatgttcctcttgaggatccatatagggcacaagcaccacgctttgctccagttcctgttgagtctcagcttggccattcgttggctagtgctcagggtgatcatggcagatattatcaaccaccagcacttgcgcctgagcctcgacacattcctcttgttctagagcctcgctatgttccgccagcccatgtgcctactgtgccagagcttcaacatgtcccagctgcatattatcgcacttcggctccatctggtgattcatactatcggcctgttgataatctggtgcctgaggggtatgcagacagaattgtggcaaacataaccgctagagatccaatcattagtgatcacacagcactgccagtggaagcctctgctcgaccagaccgcttggatgatctctaccggattcgtggtgctcatgtggaggagctgtaccgtccacgggaaattgctgatcgtgcggggatcactgctagagcagatcgtgtggaggaactctaccgttatgatcgacttgctaaccgtgctgtggacccccctcattcagcctaccttacaactgcttacgagaataaccctgcttatgctgaaacaagcgttaggcctatctcagcaagggttggtggctccggtgcgccagtttcgtcactctattcgttttctggtggtccagtatatcggtgatgagtgatcatggctagctctgttgaaaagccttagccagactaagaagacatgatgttcgtctctataactgcaactgccgttttaccttggcttcgactctgtattttcttaaatatccttcactggatgaatggtactcttcgttatcaagaagacctgctggtctatgctgttgaattatgtatttatgctgctgcatctctcttgctatgcttgaagctcgtttcattttgtgaatggaggtttacatattgccatgcttc

SEQ ID NO: 6364 - DNA, 1787 bp, Zea Mays
tagtcgactagtcgtcgacttagtcgaactagtcggcctacttgcccctaattcggcccaaacatcagaaaggcccattagtccattacacaccataaaccctaaacccaacagcagcctctagtccctcacatcgacctgcccgtcgccagcccctcacgttgtcctgcccaccgccagcccctcctctgccccccgccggccgcccacctccagccccacctctacccgccgccctcctctggccgcctcccctcctctggccgccgcccaggcacccaccgccagccgtcgaggcctgcaccgccctctaatcaccgcccaggcgtccacctctgactgccgcccacctccagccgtcgaggcttctggtggaaactcgtttgctaagatggaagagggcaatgactactatgttgttaggaaaggtgatgtggtggcagtttacaaaactctaagtgattgccagggtcagatttgctcttcggtatctggtcctgctgcaagtgcctacaagggtcactcttggagcagaggaaaggaggaatacctgtcttcacggggactaagtgatgctacatacgtaatcaatgcagccgaactcagggaagatatacttggcccccttgtgccctgtagtttccaggacatacttggttctagttcaaatcaactggctccaaatcatataggcttccataatgttatagcatctcagactggagcacaatatgttgatctgaaccatgaagccagatctagttcatccagacatatctcaccagcaaatttcaatcataccggaactgttgatgcacaacctatctcaaaacaatacatggtgggtattcttcattttgatggtgcttcaaaagggaacccaggtaaagcaggtgctggagctgtgcttatgactgaagatggaagagtgatatctcggcttcgtgagggtcttggtgtcgctactaataatgttgctgagtatcgaggcctgatcttaggactgaaatatgcgattcggcatggattcaagagaattaaagtacatggggactctcaacttgtctgcaatcaggtgaatggtgtttggcaaacgaagcagccgaatatgatggagctgtgcactgaagcgagaaagctaaaagagaacttccattcctttgagatcatccatgttcgacgggagtggaatgctgaggcggatcgtcaggcgaacatcggtatcacgcttgcaagtggcgccgtgtttgaggagcgtggtgacatctgatacatagctagcaacgtatgtatttaactaactagcttgacctttgacttgcacctttgtcgagcttctatgctgctctgcagcagccatcaggagctgaggtgatggcctgccgtctagtaggcactatatccaattactttacactagttggacctatttcaccatcaagctgctacggaagcctgatttctgctatggggcctcagtttgatgtgaaactgtgctttggaagcttgatgttgctcgataagttgatctatgaatggagaattttaatttgtcagctagcctttagatcgctatttagattttggatttgaacactctttgaactagcatccttaggctatcttcaacaccttactcataatcatactcatattcaaactttattctgtatagtggaaaacagtggtgaattcacggacatggtctaacgtttcatgccatgaattttggtagaattaacatattccttttgcatataaaaatttgagtaaaaatgtattaacga

SEQ ID NO: 6365 - DNA, 1755 bp, Zea Mays
cccacacctacagcagcagaactgcagaagcggtccctctccacagaactgcagaagcagcgcggcgcggccgttaactcggctccctcaccttgctgccccctccgcaggcgcaggcgctcgcttccggtaaaaaaattggaggtgccatttgccaggggcgtactccattgattcgggctgagttgtgcaaattgtgatagaactttcccgagattcaagcccatacaatgcagggcatctctatatgcggttcagttgcctcaccccatggagcaaactgcagaagggcttgtgttgcaaggaacgatgtgaggctgccttgtgaagttaatgcagtaagccagggattgcactctctgcattggtggtgtgcacacaaaccgcaaatgaagaacaatggaagaagaatgaatgccgcagtgaaaactaatgccagatggttgtttggaggagatgggcgtagcaatgatgcaaggctggagcgcagtgagtctgctaatgaagatattttgatcttctacttccagatggatctacagacccggatacagtatgcattgaatatagaacaatttgatgtggcaaagcaattgagggaaaaactaaccgagaaattattaggcagcgtgaagctagaaggggttcaccaaagactgaagcccaagacaaagctctaaatcttatacgtgtgcgtgcagacttgcagaaggctattgacagtgaaaactatgctttggcagctggtctccgtgatgacattgccaaacttgaggttgagtctcttgcagtatctgctaaagctcttgcttatcaaaatgtgaaatatgcatttcgattagggcagaaagtacgtcacaatatacatggatatagaggcgtgatatgtggcatggacccggtgtgctgtgaatccaagtcctggatggagacagcaaacgtggagaagctgtctaagggtccaaatcaacctttttatcaggtcctggttgatgtatatgttgatccagaactgctggttgcatatgtcgcagaagaaaatctttctgcagctgaagaatcagaaaaaggaaggtttgatcacccctacattgagtttctcttttacggtgaggacacagctggggatttcattcctatcaagcagctccgtgagaagtatgaccagccacgctatgaagcttctggagatgaaagtgacaacgatggcaacacaaatagctaaaggtcaagtgccttcgtgttgctagagttgttttggaaccattttgattcacctccaccaactcagatgtgaagtgctgaactatctggtacagatgcagatgtaagacaaggcaaccattggcgaactgggcatcctcagtaacctgcagtaattctctgcatatgccgtccaaccttgcagatcgaaaattactcttttagagttttaccgtcaccaatcgattaagccatgcttgagataagctacgtgtgccttgcttttacattataataccatcgataaatataaacgaaggaaagaaaggaagaaagaaagaaagaaaaaaatatatatccctatggatgttctgtgtatagttctctgagatctatctagttctgtactgtaccctctggtggacaattgtgcatatgtaacactggcaacttgtgtggagtctcgaataaattacgcgaagacttcacatgcagttgtttggactctgcattcatggaatcaatcatgtggaaataacattttttgttgac

SEQ ID NO: 6366 - DNA, 1758 bp, Zea Mays
cccacacctacagcagcagaactgcagaagcggtccctctccacagaactgcagaagcagcgcggcgcggccgttaactcggctccctcaccttgctgccccctccgcaggcgcaggcgctcgcttccggtaaaaaaattggaggtgccatttgccaggggcgtactccattgattcgggctgagttgtgcaaattgtgatagaactttcccgagattcaagcccatacaatgcagggcatctctatatgcggttcagttgcctcaccccatggagcaaactgcagaagggcttgtgttgcaaggaacgatgtgaggctgccttgtgaagttaatgcagtaagccagggattgcactctctgcattggtggtgtgcacacaaaccgcaaatgaagaacaatggaagaagaatgaatgccgcagtgaaaactaatgccagatggttgtttggaggagatgggcgtagcaatgatgcaaggctggagcgcagtgagtctgctaatgaagatattttgatcttctacttccagatggatctacagacccggatacagtatgcattgaatatagaacaatttgatgtggcaaagcaattgagggaaaaactaaccgagattgaaacagaaattattaggcagcgtgaagctagaaggggttcaccaaagactgaagcccaagacaaagctctaaatcttatacgtgtgcgtgcagacttgcagaaggctattgacagtgaaaactatgctttggcagctggtctccgtgatgacattgccaaacttgaggttgagtctcttgcagtatctgctaaagctcttgcttatcaaaatgtgaaatatgcatttcgattagggcagaaagtacgtcacaatatacatgaggcgtgatatgtggcatggacccggtgtgctgtgaatccaagtcctggatggagacagcaaacgtggagaagctgtctaagggtccaaatcaacctttttatcaggtcctggttgatgtatatgttgatccagaactgctggttgcatatgtcgcagaagaaaatctttctgcagctgaagaatcagaaaaaggaaggtttgatcacccctacattgagtttctcttttacggtgaggacacagctggggatttcattcctatcaagcagctccgtgagaagtatgaccagccacgctatgaagcttctggagatgaaagtgacaacgatggcaacacaaatagctaaaggtcaagtgccttcgtgttgctagagttgttttggaaccattttgattcacctccaccaactcagatgtgaagtgctgaactatctggtacagatgcagatgtaagacaaggcaaccattggcgaactgggcatcctcagtaacctgcagtaattctctgcatatgccgtccaaccttgcagatcgaaaattactcttttagagttttaccgtcaccaatcgattaagccatgcttgagataagctacgtgtgccttgcttttacattataataccatcgataaatataaacgaaggaaagaaaggaagaaagaaagaaagaaaaaaatatatatccctatggatgttctgtgtatagttctctgagatctatctagttctgtactgtaccctctggtggacaattgtgcatatgtaacactggcaacttgtgtggagtctcgaataaattacgcgaagacttcacatgcagttgtttggactctgcattcatggaatcaatcatgtggaaataacattttttgttgac

SEQ ID NO: 6367 - DNA, 2380 bp, Zea Mays
gttgtatctgggccgtgtgaaggactggctcaggtggaggcgagcaggctcccttcttccctatccacacccacacctacagcagcagaactgcagaagcggtccctctccacagaactgcagaagcagcgcggcgcggccgttaactcggctccctcaccttgctgccccctccgcaggcgcaggcgctcgcttccggtaaaaagtgagctagttcctctccgcaccactatgattgaagattcaccccaagttcggttccacacaaaatttagctctgctcaccgcggtgggccgccgctgcagcgctgccctgccactgccatgcgcgtcgccgctcgggccggtctcaatgccggacgcttcttgcgctcagccgcggccaggtctggtccggtcatccccatcccttacgccttgcgcgccggcgtataggcgtgggtgcgttccgtgcgcgagcgcggattgacccatgcgattgcctgtaactgtgaacagacaacaggttgtcctcaatctagagaaagaagctagaaattgctgtcccttgcttcgttcttgtaacaaattgtagggtgtcgtgaaatactaccgagtgaaccactccgtcttgtctcctgaagccaaagtcccaagcactgattagttgacagagtaaccttactagtttcagagcactaagcaatttgctgaaagttttgcatgcaccaggcaaaatttgctgtgctaatagcagatcgtgctttgccagaattggaggtgccatttgccaggggcgtactccattgattcgggctgagttgtgcaaattgtgatagaactttcccgagattcaagcccatacaatgcagggcatctctatatgcggttcagttgcctcaccccatggagcaaactgcagaagggcttgtgttgcaaggaacgatgtgaggctgccttgtgaagttaatgcagtaagccagggattgcactctctgcattggtggtgtgcacacaaaccgcaaatgaagaacaatggaagaagaatgaatgccgcagtgaaaactaatgccagatggttgtttggaggagatgggcgtagcaatgatgcaaggctggagcgcagtgagtctgctaatgaagatattttgatcttctacttccagatggatctacagacccggatacagtatgcattgaatatagaacaatttgatgtggcaaagcaattgagggaaaaactaaccgagattgaaacagaaattattaggcagcgtgaagctagaaggggttcaccaaagactgaagcccaagacaaagctctaaatcttatacgtgtgcgtgcagacttgcagaaggctattgacagtgaaaactatgctttggcagctggtctccgtgatgacattgccaaacttgaggttgagtctcttgcagtatctgctaaagctcttgcttatcaaaatgtgaaatatgcatttcgattagggcagaaagtacgtcacaatatacatggatatagaggcgtgatatgtggcatggacccggtgtgctgtgaatccaagtcctggatggagacagcaaacgtggagaagctgtctaagggtccaaatcaacctttttatcaggtcctggttgatgtatatgttgatccagaactgctggttgcatatgtcgcagaagaaaatctttctgcagctgaagaatcagaaaaaggaaggtttgatcacccctacattgagtttctcttttacggtgaggacacagctggggatttcattcctatcaagcagctccgtgagaagtatgaccagccacgctatgaagcttctggagatgaaagtgacaacgatggcaacacaaatagctaaaggtcaagtgccttcgtgttgctagagttgttttggaaccattttgattcacctccaccaactcagatgtgaagtgctgaactatctggtacagatgcagatgtaagacaaggcaaccattggcgaactgggcatcctcagtaacctgcagtaattctctgcatatgccgtccaaccttgcagatcgaaaattactcttttagagttttaccgtcaccaatcgattaagccatgcttgagataagctacgtgtgccttgcttttacattataataccatcgataaatataaacgaaggaaagaaaggaagaaagaaagaaagaaaaaaatatatatccctatggatgttctgtgtatagttctctgagatctatctagttctgtactgtaccctctggtggacaattgtgcatatgtaacactggcaacttgtgtggagtctcgaataaattacgcgaagacttcacatgcagttgtttggactctgcattcatggaatcaatcatgtggaaataacattttttgttgac

SEQ ID NO: 6368 - DNA, 2350 bp, Zea Mays
attcagtttgacttgagaatctagatagaatggtttttttttctcattcctaaaataaaatattgagggtggttttggaagactccaaaacactcaaaacaaatcaagagtttgaggtcacatttgtcatggcgcatcctgcatcaagcaaacaatttatttagttttgaatggctatggctgttgccttacaagctgaaagaagtgtcattgaaaagaagaaacccgatatcaaacaaaggagggtggttgtcactggcatgggtgtagtgacaccattgggccatgatcccgacgtcttttacaacaatcttcttgatggtgttagcggaataagtgagatagagaggtttgactgttccaacttccccacgagaattgcaggagagataaaatccttttccactgatggttgggttgtacctaaacttgcaaagcggatggacaagtttatgctatatctgataactgctggaaagaaagcattagaaaatggtggactcactgaagaactgaggaacgagttggacaaaaccaggtgcggggtcctcattggttctgcaatgggcggcatgaaggtttttaatgatgcaatttgaagcactgagggtctcttacaagaaaatgaacccattttgtgttccttttgcaactaccaatatgggctctgcaatccttgcaatggatctgggatggatgggaccaaattattctatttccacagcctgtgctaccagtaacttctgtatccttaacgcagcaaaccacatcagaagaggcgaagctgacgttatgctctgcggtggttctgatgcacctcttatcccaatcggattgggaggttttgtggcctgcagagcactttcacagaggaacagtgacccaacgaaagcttctcgaccttgggacatgggccgtgatggttttgttatgggggaaggggctggtgtcctcgtattggaagaacttgagcacgccaaggaaagaggtgcaacaatatatgctgaatttcttggtggaagcttcacatgtgatgcttaccacatgactgagccacatcctgaaggaagagggattactctctgcatagaaaaggcactagctgatgcaggggtagcaagggaagaaatcaactacgtgaatgcccatgcaacttctacacaagcaggtgacctgaaggagtatgaggctattgtgcgctgttttcgccagaaccctcaactgagggtgaactcgaccaaatcaatgactgggcatcttataggagcagctggtggaatagaagcagttgcttctatacaagctataagaactggttgggtccatccaaatttgaatttagaaaatcctgaggacactgtggtaagctccttggcttgtgtagtctgtgtggcgagtattctcgtggtgttttgccccgcaaggagttgtaagagtcgtctagactcctttttctttctttttaatataatgatgcgtaattctcctgtgtgttcgggaaaaaacaaatcttctttctacttctactaaataagctagatatgaatgaaagagcaaaatctatatgttgaatggtgttttaaatttttaatgttggtcttgatgcaggatgtgggcatcttggtaggatcacagaaggagagatgtgaggtgaaggtggcgttatccaactcattcggcttcggtgggcacaactcatcaattctctttgccccctttaaggaactgccatcttcctcatcgtccaaatagattcatatatctggatctccacatagaagacaagtggactctgcaacttcctcggtgccatagatattacagggaggtccaaactgagcgtatctgagcgaacaaaacatcagcccccctacatgtttcatctatatcacgaagttgcagatatgtggtaactatcaaaaggatttaccgtacctgggccagtgttttcgccttcaccatacctgcccattgtcagtactatttcctagatttggagtagtcccgtagctaatcctcttccctgcggaggtgatgggattttatgttgtattgatgttgtcaacaatgtcgttcttagccatgaattgctggttccactgtaagcaccgctggatgtttatcgctttggctgtttttctgctgttcataactgagttaaagatttgtaaatggcgacgctgttcggcctttgatcatctgtgaaacttgagcggagggagcaacaagtatggcctagcctagcagtacgctagtgcctttgaagaaggcaggctagctgctgctcctcaaagtttagcacctagccgaccatagtctctttctcttttacagtcttctctaaaaaatc

SEQ ID NO: 6369 - DNA, 3725 bp, Zea Mays
ggaggcagtcgtctcactgggactggacctctgcctgttagtttagtttcctcgtcgcgctgggccgccggcttccgccgttccgcggcggagggaagccatgggcgccgccgtcgcagggtggaccgtggcggcagtgctgcttcaggtcgccggcctctccctcttcctctacggattcttccccgtgaagcccacactgcgtggcttcagtggagcggagagctaccgggtgccttcctgcggttccgttagtgctggggagcaggagccggcgcttcccccggatcagctcagatctctgtacagggaactctctgggatccctcctgtgtacgatcgcttagtgttgatggtgattgatggactacctgctgaatttgtacttgggagaggcaggaaacctccaagcaaaaaaatgatggagtctatgccatacactcaatctttgttagctggctgcaaagcagcaggttaccatgccaaggctgcacctcccaccgtcacaatgcctcgactaaaagctatggtgtctggtgcaattggaggttttctagatgtagcatttaatttcaatactcaagccttcttagaggacaatcttcttgatcagcttcatatgattggtttgaagttagtgatgctgggagatgagacatggatcaaattgttcccaaccctattcactagacaagatggagtgagcagtttttatgtgaaagatacagttgaggttgatttcaacgtttcacgccacttagaatttgagcttgctgcaaaagactggagtgtcttggttcttcactatctaggcttagatcatgttggtcatataggtggccgccggagtgttttgatgacccaaaagatgaaggagatggatgatgtcattagacgggtgcatgctgcgagtcttcaggataatctggacagaacacttttggttgtggttagcgatcatggcatgactgatgggggtaatcatggaggatcttcatatgaagaaactgattcacttgccttttttataggacacagcgttgagagcccatattgttcaccctatgaccagaatgaagcacttcaagtggatcttgccccaactcttgctcttctatttggtgtaccaattccgaagaatagttttggtgtcgtgcttccaaagcttttaaattcgttgacaggtgattttatttttacattctattttaggtgcattaaggttcatcatgaatcagaaggaatagatagtttatggtcgtgaacttgaaattattttaataagttttttccagggataattcttggtggcatcataatattgaattagttaccaattatatgattaaatactcttagctttcactgttcggagatgatgagtgcatcttgtttcagatgaccagaaactaaggatgttagagcttaactcatggcaaatcttaagattgctgcaagcacaagtgtctgctttctgccttgaagattgtattaatgtggagagcagtattgaacttgacatccttcctgaatctattgagcaaaagttatgttttttactttctaaagccatttcttctcatcagtcttcacgtcttcatcgaggttctgatttcaagtctgttgaagccgggtactatgggactgctgcagataactaccacaccttcttaagaaatgcgagtgagtggttgtctcacagagcaaccgataaaccattatatttacttgtctctgcaatcatgttgatgacaatgtcatgccttttcctcatgggtactgtgtcttacctatttaagggacgatctctgagtcaagctgatcaccattcagagtcatatttggatcaacgctggcaccttgatgaggttctcgttcttgctgggatgtttctctatgtcatcagtcttggctcaagttcttttgtggaagaagagcagtatacatggcacttcctcacttctactctgtatctaatatttctggccaaggcagttcagtcaatgctaaaaggatcaaatccaacacttggtcataaagcagaaggaaatagctttgacagaagtagctttttctatgctacaagctatgaattaacaccaggcaagagaaatggttacaagttatgtactatccttgttgttcttgttgctggaagagttataagagcttggcatcaaggtggaatcaactgggttcactttcctgatatttccaagttactggcgcaagctgacccttctgttgtaaagtctcttcagattatctcagttcttgcagttgtggtattgttttcaatttcactcactttactcagagcaagaccagagtttgttataggagtatggttgacccacatttcttgtggatttttggtcctactgcatgtttggggaaatcatattggtacttcattaccaattaaccataccacagcatcggtagctcgacaattttatgtcattgctagtgtttcagtatctgtcactgttcttgcttcaccttgggtatttccaatattttctagggaagcaaaatcaccgtcctctggttctagtcctgtaaaggcaatacatggcatcagaaaatcacttgttctcactggaatgacatacacagcgttctggggccttctgcaattgcttcttcaacaaccaatcaatgcaattcctcttttcctcattttattgcaaacagtctcgagtgcagttcatttttctctggacaaaacattacataaacaatgggtacaggttgtggcaatgcatttcttgggaatggctggtcacttcggtcttgggaatacaaatagccttgccagcattgatgttgcgggagctttcattggcatttcaagttactccacagttctttctggtatactgatgtttatgataacatatgcatcacctctcatgttataccttgggttggtccttcatgcatcggtgaaagatgtcgatgatgcctccaatctacggcagctgaaatggagctatattctagacaaaattgtcacattgccatgtttgtttcctttgctcatcaattctcttgcgttgacttcatacaccattgttttgctagccatgaggaatcacttatttgtttggagcgtattctcaccaaagtacctctatgcctgcgcagcaacagtgtgcacatatgtcggagtatccatcatagctatgactgcattatacagttgtgctgttttcaagttcagggcgagaagctacagggataaatccctgtaatcagactaatgattagctgttctgatttaatggacatttgtaagaattcagaaagggagggtatcttggcctattctctcgttgtacaacaacatcgtactcacatgtttccagaccaccatgcaatccctgcaagggtctatacacatttctcgttctctttgctaatcgtattggattaagtttgtcctggacacatgacgtaagcacgttcaagatgaacagggggtatggagtacattgtagcctgagtcctgtttcgattgagagatccatgttaaccatttccgcatatggatctgggcattaagccctaaatacgtatgccgtgtatcatctgttaagaacaatgctaggaatttctgatagcaattagagcattgtatattcctgcgaaggggtgaaacacatgcgagcgaatttattcaaatgaatcgaaatatttacaatcacactgatataccaatg

SEQ ID NO: 6370 - DNA, 1106 bp, Zea Mays
aaacgaaaggactgccctaacctcatgcagtcgtgcccgcttgtttcacttgctcgccttcacccctcgtcgccgccgccgccaccgccgtcgccgtcgcaagcgatgatgctcaacatcaacttgttccgcactgacaagggcgacaacccagaccttattcgcgagtcccagcgtagtcggttcgcctccgtcgagctcgtcgacgaggtcatcgccctcgacaaggcatggcgcgaaaggcagttcgagctggataagatccggcaggagcttaacgctaccagcaagaagatcggcaagctcaaagccagcaagcaagaagaggaagcgaagaagctcatggagagcacagacgaaattaagaaaaggttgacaggcaaagaagttgaggtgtaggaggccaagagcaccctcgacgccaaggtcacgacgattggcaacatcgtgcatgagtccgtgccagtcagcaacgacgagagagtagaggataatttgaagaaccacgtggacctttgcagataaaagttacatggatattgtcatcaaaggtggtgtatgggtcggtcatttactctctggttactccttgccaatggacatgccgtcgcaagtaaatgtaaagagttctgaagaggttgctggaatgtggaagcactccatcaaagtttcttatgaagcaacaaaggcagcatttcctggtggtgaagttatcgcacatcttgatcacaagatgggagagtgtcggatgcttcttcatatactatttcttggtccgtcaaatctgcttgacccaaatgcaagttttgctcaaatgtggcaaaaataattgtctcatcgattgttagcgcgcctgcttccagcaaagtttcagagaaggaaaagatggaatgtaactcaaattttggtggccgcacaagtgtggagacttgaattcatatatacttagttaggctcaatattagtgcaaacagttgataaccaagtttttcaattagtatttagttttggctttagagtacacttatgtatgagttatttgacaatatttatttatgagatattgaatggtacttatctatattatattagttacaatgttatta

SEQ ID NO: 6371 - DNA, 1282 bp, Zea Mays
gcccctgtcgattttctgtgcttgccgtcggtaagccccctatcggccatcgttctcatcacactcttctgcagttctgcttcccacacctcccatggcgcgtcctctcccaaagccctagcgctctagcccccgaatcctgccctcccctcccgccagaagcccgcccgcctaccagccgccactgctcccacctcgcccggagagagtcagtgcgaggccatggaacaccaccacaagccaggcctgcgtgtgcgcctccgcatcaccgccgcgcggcgccgcgcgtggctctccgcctgtctgcgccccccctgccgcaagccgccgcgccgcgaccactcggactccgtccacaaggtcgcgcgccgcgagatcggcggcggccaccgacgcccgccgcggcccgcggcgccctcatcctcctcattctcgtgccctgagaaattccgcaacttccagctccaggggaaaaaatcatcaaagagggcatttagaaagaacaagatgatacaaacaatacgaaagagaagatagcaacctgcattcgaaaggtggtctcataggagtgtggacaacatagagaagtacaagatagaaaagaagactacaagacgagttgtaagtgtggcaaagggtaggccgcatgagggtctttacgaacgtttgagtgcgaaggaaggaaagaatgacatatatgggatgactagggttcgtgagaggaagacaagggacttcaccaagttaagtgcactaaagatgaaataaagcacctcttggtgaaggaggatgagtgttgggggccttcgtcctccgaaggtcctcaaaaacatgatttgacaatgttttccaagtggattatgtgaacaggtaccttcggactcagaattacgaacatgaagtgcggtcaggacgaagcctgaaccagacgaaggacgggctgattaccaagctccacgaaggatggtacacagccgaagctgtgcgcagggaagcttcgtcgcgatagcagagaggggaaccgacttaaagatgaaaagactacgtggaccttgtcagatttccataagttattgacaaatgtaatggacataaatgtaattttacgtgggctgcgtcccgcgtctataaatagatgaacagtactcccgtactgttcacgctgacttggcatttgcttttgcgtcacgcttgtactttttatcttctctcaggaccgaaggtacatttgtaatttgaaatcatttctatttttccatgttaataaaatagaaatgattct

SEQ ID NO: 6372 - DNA, 1874 bp, Zea Mays
caatctcgcagtcctttcttcctccgacctccgcagcgaatcggaccaggggatagggttccgccgcgcctctccaaccaggcgccactcgccagggtctaggctgatcatggaaggaaacgtcgcagccgggaagaggtcccggacggagacggcgaacggggctgccggcggcgggaagcgctccaaagtacgattgggtgcccgtttggtgagggatgtcgttttctgcactttgtccctggcggttacccggcagttgcaaaaatgctcaatctaggtagccctgctgtatctgcgccatcaagaactcatgtggatcacgccgctcttactggcacctctcattcagcttcgtcaggcaagacacgcatgtgcaccaagtacaatactacagaaggctgcagatttggtgataagtgccactttgctcatagcgaaagagaacttgggaaaccagcgtacatgccttatggagaacctcctatgggcggtcgatttggaggccgacctgaacctgtgcagccagctgccatgggccctccagcaggaaactttggtgcctcggcgactgccaagatcagtgtggatgcgtctcttgccggtggcataattggtaagggcggggtcaacactaagcagataagcagagtcacaggcgtcaagctctgtatccgcgaccacgagtctagccccaacctgaagaacattgagctggaaggcaattttgaccagatcaagcaagccggcgaaatggtgagggacctcatcgcgaccatcagcacgagcatgccggcgaaaaactcatctgctgccgtggctccagcaggaggccgaggcggtggtctgggtagcaagagcaactacaagacgaagctatgcgagaacttcgcgaagggtgcctgtactttcggcgagcggtgccactttgcccatggcgagaacgagcagcggagtggtgctgtttgagagttgagtttaaagatgctgggggtttcgaggccttagtcagcgggaagaccactgagatgcagaggatcgatgtcaatgagcgaattgttggacttgagcgcttgaatccgacaccacgccccacaacatcgccgtttctggagggtcgatggaattttgaatggtttggtgatagcagtcctggagcatttgcggcccgccttttgtttgagaggtcgcctacatcggttgcacactttatgggacttgatgtgttgatcaaggatggatactccaagctctcatctaacctcaagtttctaaacacgatacaaagcaaattcctactgactactcaattgtccgttgagggccccatcaggatgaaagaggaatacgttgagggccttatagcgattcccagaatcaatgaagaatcattgcctgaacagttgaagggcttgcttggccaaactgcaggagctctacaacaacttcctagccctataagggaagctgtttcggaggggcttaaattgccactcgattgtcagggacgctgctggagcaccagatgtcttaaccagactagaggggccacaaccgagtccaggtgatggcacagcagatgcagtgatatcagaatatgaaagctaatggctgattactaactgtaactccacacctagttcctgtttacggctcctttctcctttggtcgtttttctcaggcctgcgcatgtataaaggctgtagtgttgtcaacgataacgaccacttgagtgatttttacttgcatccctttcggcggctattctgattttttctgaatgcgagcaataatatcagatgaccatcatcattctttatatgaatcaatgtaaaaaaaaggctctgcttgttcaaagctaactgatacttcc

SEQ ID NO: 6373 - DNA, 1043 bp, Zea Mays
ccgccccccaccccacgtattaacaaaacgcctcccgaagcagacagagcctcactccgcgcgcccgcgcagcgaagctggagggagcatggagctgaggccgccgcgcctgcgaccgtgagcacgctctgtagccagccgggtccggctgggcggccatggcagccaccgttctcttcactccggcgcagtgccaccgcgccaccgcgacgacgagcgggcggggagccccctcgcattgcgccctggcccctgggcaccggcgcccggggcggggatcggtgagggcggtgcctcccgagcagagcagcttgcctcaggcggcggcggctgctgtctacgggactgctggcgacgtcaaggccgcgctgtaccgagcgctggacggcgccaacagggggatattcgggatgacgtccgccaagcgctcggagatccatggcctggtggagctgctcgagtccaggaaccccacgccggagcccaccgccaagctgcaggacaaggaaaaggcggtgaatgtggtagagttcagcgcgagagcactgaagatactgacggggaagctcaccatcgaggcttcgtacagagttaccagccaaacaagagtggatatcaagctcgagagctcaaccatcacccctgagcagctgatgaacatatttcagaagaactacgacatgctcctggacatattcaatccagagggctggctggagataacatatgttgatgaatcgctacggattggacgagacgacaaagaaaacatattcgtgctggagagagcagacctgccagacgtctgatgacgcgcagttcatgcgcacaggcgatccgtaattttgtgacgaggagcgagtgtatgtaacacgcagaaaacatagcctgcaaatatataaatatggtatatccgacagctaggactcttgcatggttattggcagttcgatgcagacaatctaccactcgaagtaaaaacaaacaaaaaaaaacttttcttctcgaataaagtaggtatgtatacgcacaggcacaggccg

SEQ ID NO: 6374 - DNA, 1903 bp, Zea Mays
cgcgctgccgtgtccttgccgcatcctcctcctccggcggctgcggcgtacgcgctccggagtccggaggcactcgccgccgtcgaattattcccattctcatcacgccgtgcgccagggatactactatggaccggcgcaggatcttattcggccactagaacccagctttcagtcccgagacgtcgtaatcgctagatgatcgatgaacgccaagaagattaagctgcacgactatcaccactgctacggatcgccgatgtgtgacccacagctgttcccgcgcgccgccgccgccaccaccgcagggctctccttgcacccggggccggggctcgtgggctccctgccgcagcggcatggcggcggcggcggcggctgggtgcacgaggagcacaccgcgacgaccccgagggcggcgcaggggcagggcggctgcgtcgtcggctccgacgccgccgcgttcttcgccgccgaggagctcatgatgggcacggcgcggttcgactcccctctcggcggaacgacgacggcactccaggagctgacagcgtttgccaagggaccgccgtttggccggccgaggcccacgacggggggcgagcgcgagcgcgagcggctgtacccagtggacccgctgccgctccgcgactgcgcggcggtgaggacgtactacgtccggccgcagcagcgcgacggcgccacggaggcgcctccttcactcgagctgccattccagcggcggcagcagcaacaagtgcacgggctattcggcgacccttccaccggcaggctactcggcggcggcgagcctcaagctcactcctttccagctcacgttccggcgagcacgtttgtccccgcgatggaggcgccgccgggcatgcagagccttatggacaacccgctgtccaggagctgcagtatcatcggtgcggcggcgacccacgcagggagcggtaacgccgccgcgccggggcaaggtgctcccagcaagacgcggattcggtggacgcaggacctccacgagcgcttcgtcgactgcgtcaacaagctcggcggcgcggacaaggcgactcccaagggcattctgaagctgatgaactctgatggcctcacaatctaccacatcaagagccaccttcagaaataccgcatagccaagtacatgcccgtgtcatcgacgtccgaagggaaagagaaacgagctgctgccgccaatgacgtgcagaatctcgaccccggcaccgggatgaagatcacggaagcgctacgcgtccagctcgacgtgcagaggcgcctccacgagcagctcgagatccagaggaatctgcagctgaggatcgaggcgcaaggcaagaagctgcagaagatgttcgaggagcagatgaagacgagcaggaccgtgatggggccgccgcagggcgccgacgtcgccttcatcggcgccggcgagcaggaggaggaggtggaggtggaggacgcgttcgacgacgtgcagctactggcggccgtgtccagcgccagcgtcggctaccgcgacggcggattccagtcgaagataagctagcctgtcgcctccagcctccaggcttcagctggcttgtcggcattgtaattgtagggtttgactacaaatgccatcgtagctatccatggaagatgatgcctacaatgtttgggacgacgacgacgagtgttttggagggaaaaaaaggaaactaaattgttggggatgcaggcaagggacgatcctcgtcgtccacttatgtcgttgattggaaggtgtgatcgtgcacctagcctaaccacttagttttaaaagttctctctgaactttagaatgtgagtgtctatttttgcttatttatttttaataaaaaaccatcaggtctcttataga

SEQ ID NO: 6375 - DNA, 1896 bp, Zea Mays
aacaaaacatagggcaagagcctagactgaggggccaggagagagggagaggccgaggagagagatagagagacaaaggggagagaccaagcgccagtgacacagagaaggggcggaggagagagagagagagagagagagagagagagagagagagagagagagagagagaggagaatcgcgggagggaggcggggtttttgcgtgatttgagttctccggttttccccacgctcccgccatggtgtccgaccaggagatcgccagctgcgtcgagtccgtcctccgaggctccgccggcgggcccggggaggtctcgctcaccgccgtgctgcagcaggcggaggccacgctcggcgtcgacctctcccacaaggcgggctttatccgcgaccagatggacctcttcttcggcccgcgcctccagccgcagccgctgaccacgccacagctggcgcctcccccgcctcaggccgtcgttgcccccgcggacgccgtgcctcagcctcagcctcagcatcagctccccgccatctctcccgtccctgtggtctccgcgccgccggccatggcgttctacccgccgccgccgctcgccttccgctacaccaccggcctcgctggggccgccacgggtgggaccgtctccttccagcagccagcccctggggctgggggcactgcttcccccaccgctgcaccgcaggtcgccggcgacaacaaggaaagttcttctaagcgaaaaagaggtggacctggtggtttaaataaagtttgcgcaatttcacctgaacttcagaccattgttggtgagactgccatgtcaagaactcagaaggtcaacttcatgaagtaaaaagaatgaaggctcccaccatgtctcctcaacctggacgttccattgatcaaccctccatagttatttctgacgcactagcaaagttcattggaacagatggaacatttcctcacgattttgccctgaaatatctgtgggattacataaaagcaaaccaacttgaggatgtcatcaacgaatcaatattatgcgattcaaaacttcaagagctctttggctgtgagagcattcctatgtcaggactatcagaaatgcttggtcaccacttcatcaagaaaacatagcaaatcctcattaactgatctaggattgcagtgtggcagataggcctaacattacaacatggtgttctttacagaatggacagcatagtttatgtatttcttcaattttgttgattatgaattgtgtccggcacatatcagattatttgcggtaagcctgtacattgttatgcgtgctggctactgctgtgttgtctggtgtaagtgtgtaaccttctctactgaattcgtagtgctaattcctaaatgtcattgctgactatgtaaagttaagctttctattcgagtgtcagattgttactcttaagtcttaaaagtcataagtttttctttgactaatattttaatgttgaggaaatccgactaaagtagttcacttccgaccagtctaagtggagtacaaatgtacaatggctgtggtggactgctggtggtctcttcttccagaagaaatttccattgtatttgtcgttgtcctcttcgcttttatggaaggtggtggtgcgcctatgggacttgattaactttattacctgaggggtagctgaaatgccaaagtaaaaaagaatgtcggttggttagatggtctaactagcactttcttagatctgggttcgattttctgtgtgagcgaattctaggctgagattactgtgttgcacatgttctacaatgttgatgagtatgggtggaatatagattcagtttttttaacctgcatcgtagaaagtatttttttcaatataatatttg

SEQ ID NO: 6376 - DNA, 1591 bp, Zea Mays
ctggttttgagagcacagggatttatgtgataccacatgccaaattcgaaaaccgcaaatatattttactcaaaaggagtaacagcaacggtaacccattaatcacaaagaaaacaaaactaatggacctaaagtagtagccgagagcccagcaaagaaggcatccactcccactcggccactccccatgctttccttgcgcaacccagccccggcgccccgctgacctggtcgggtgcgcctccgcagctgccgctccggtgcccccaggccgcaggccgctgtcctcctgtgatgccatggtgatttggagttgctcttcttgtctccatggattcattcccagagcggcatggaggaggcactacccactcttgtctcccaggcctcctgcatcgccgccgcctatccaccacttctcctccgctagacggtccaccaagaaatctgccccaaaggcgccaatgggctcttccattcctgccgcaaaggcgctaatagactcttccagagagcccttctatgtcatccgcaagggggatgtcattggcgtctataagaacctcagtgattgccaagcccaagccagcaaatcggtacttcatccttcagtcactgtctacaaaggctattctctgcgtaaagaaactgaggaatatcttgctgcacgtgggttcaggaacgctgtctgttccattggtgcagcggatgcaagtgacgaattgtttggcgatctggttccctgcccttttcagcaacctgatgagaacacacaatctattttgaaaatgtcacagggacaggagatggaaacaagatcatcagagcatcccaaagttgctgatctggaaccattaccagatagcgaactctcttgtattcttgaatttgatggagcttgtaaaggaaatcctgggaaatcaggtgctggagtcattattcggcggttagatggatctgtggaattcaactccgatgctgacgttcaagctaactttggatgccaacttgctgttgatgaagttcaagagctgtccgtttgaattgccattggcagagaaaacaagacacggtgcttgagagtagactgttaatcaatactaattgacccacgtgatcatatcacagggtgcaaagagctgtttcggctttttccaagagctgtttcgtttttaccggtaaaaagatggattggaaagaggagaaactggtagagagccacaagttctagcttcatgggctctgtgcgctgctaaagtaacaaacaacacgtagccgaagcaggtgagatatgcaccaagacctgcaatattttgctgttggtttggttttgtgttgccatgaggattgaggagcttgattctttgtacatgcaattgtgaactgaattgaagtatacttaactcacaaatacatgatttcagaaattattgagggtttattcgtttctttctcaatttatgtggattggatggatgaaatttaatctctagaaagtcaaaatttcttattttttcaattacatctaatccacgtggaatagcaataaccgaaaacctcaatgaaaacgaccgtgtatccttgaaatctg

SEQ ID NO: 6377 - DNA, 1806 bp, Zea Mays
ctggttttgagagcacagggatttatgtgataccacatgccaaattcgaaaaccgcaaatatattttactcaaaaggagtaacagcaacggtaacccattaatcacaaagaaaacaaaactaatggacctaaagtagtagccgagagcccagcaaagaaggcatccactcccactcggccactccccatgctttccttgcgcaacccagccccggcgccccgctgacctggtcgggtgcgcctccgcagctgccgctccggtgcccccaggccgcaggccgctgtcctcctgtgatgccatggtgatttggagttgctcttcttgtctccatggattcattcccagagcggcatggaggaggcactacccactcttgtctcccaggcctcctgcatcgccgccgcctatccaccacttctcctccgctagacggtccaccaagaaatctgccccaaaggcgccaatgggctcttccattcctgccgcaaaggcgctaatagactcttccagagagcccttctatgtcatccgcaagggggatgtcattggcgtctataagaacctcagtgattgccaagcccaagccagcaaatcggtacttcatccttcagtcactgtctacaaaggctattctctgcgtaaagaaactgaggaatatcttgctgcacgtgggttcaggaacgctgtctgttccattggtgcagcggatgcaagtgacgaattgtttggcgatctggttccctgcccttttcagcaacctgatgagaacacacaatctattttgaaaatgtcacagggacaggagatggaaacaagatcatcagagcatcccaaagttgctgatctggaaccattaccagatagcgaagaaatcctgggaaatcaggtgctggagtcattattcggcggttagatggatctgtgattgctgtactacgtgagggtttgggtattatgaccaacaacgctgctgaatatcgtgcattgatcctggggctaaattatgcttccaagaagggattcaagtatattcgttgtcaaggtgattctaagcttgtctgtaaccaggttcaaggtgcctggcgtgctaggagcgataatatgtctatcttgtgcgatatagccaaggaacttaaggaaacattccttacatttcaaatcaatcatgttttgagggaattcaactccgatgctgacgttcaagctaactttggatgccaacttgctgttgatgaagttcaagagctgtccgtttgaattgccattggcagagaaaacaagacacggtgcttgagagtagactgttaatcaatactaattgacccacgtgatcatatcacagggtgcaaagagctgtttcggctttttccaagagctgtttcgtttttaccggtaaaaagatggattggaaagaggagaaactggtagagagccacaagttctagcttcatgggctctgtgcgctgctaaagtaacaaacaacacgtagccgaagcaggtgagatatgcaccaagacctgcaatattttgctgttggtttggttttgtgttgccatgaggattgaggagcttgattctttgtacatgcaattgtgaactgaattgaagtatacttaactcacaaatacatgatttcagaaattattgagggtttattcgtttctttctcaatttatgtggattggatggatgaaatttaatctctagaaagtcaaaatttcttattttttcaattacatctaatccacgtggaatagcaataaccgaaaacctcaatgaaaacgaccgtgtatccttgaaatctg

SEQ ID NO: 6378 - DNA, 1954 bp, Zea Mays
ctggttttgagagcacagggatttatgtgataccacatgccaaattcgaaaaccgcaaatatattttactcaaaaggagtaacagcaacggtaacccattaatcacaaagaaaacaaaactaatggacctaaagtagtagccgagagcccagcaaagaaggcatccactcccactcggccactccccatgctttccttgcgcaacccagccccggcgccccgctgacctggtcgggtgcgcctccgcagctgccgctccggtgcccccaggccgcaggccgctgtcctcctgtgatgccatggtgatttggagttgctcttcttgtctccatggattcattcccagagcggcatggaggaggcactacccactcttgtctcccaggcctcctgcatcgccgccgcctatccaccacttctcctccgctagacggtccaccaagaaatctgccccaaaggcgccaatgggctcttccattcctgccgcaaaggcgctaatagactcttccagagagcccttctatgtcatccgcaagggggatgtcattggcgtctataagaacctcagtgattgccaagcccaagccagcaaatcggtacttcatccttcagtcactgtctacaaaggctattctctgcgtaaagaaactgaggaatatcttgctgcacgtgggttcaggaacgctgtctgttccattggtgcagcggatgcaagtgacgaattgtttggcgatctggttccctgcccttttcaggtagtagtatctatctcagcagccctcggcaactgcccttgattctgagagccttaccttgtctaacacgacttaagcgttaagctgatcttttcaaagttacatcttcagcaacctgatgagaacacacaatctattttgaaaatgtcacagggacaggagatggaaacaagatcatcagagcatcccaaagttgctgatctggaaccattaccagatagcgaactctcttgtattcttgaatttgatggagcttgtaaaggaaatcctgggaaatcaggtgctggagtcattattcggcggttagatggatctgtgattgctgtactacgtgagggtttgggtattatgaccaacaacgctgctgaatatcgtgcattgatcctggggctaaattatgcttccaagaagggattcaagtatattcgttgtcaaggtgattctaagcttgtctgtaaccaggttcaaggtgcctggcgtgctaggagcgataatatgtctatcttgtgcgatatagccaaggaacttaaggaaacattccttacatttcaaatcaatcatgttttgagggaattcaactccgatgctgacgttcaagctaactttggatgccaacttgctgttgatgaagttcaagagctgtccgtttgaattgccattggcagagaaaacaagacacggtgcttgagagtagactgttaatcaatactaattgacccacgtgatcatatcacagggtgcaaagagctgtttcggctttttccaagagctgtttcgtttttaccggtaaaaagatggattggaaagaggagaaactggtagagagccacaagttctagcttcatgggctctgtgcgctgctaaagtaacaaacaacacgtagccgaagcaggtgagatatgcaccaagacctgcaatattttgctgttggtttggttttgtgttgccatgaggattgaggagcttgattctttgtacatgcaattgtgaactgaattgaagtatacttaactcacaaatacatgatttcagaaattattgagggtttattcgtttctttctcaatttatgtggattggatggatgaaatttaatctctagaaagtcaaaatttcttattttttcaattacatctaatccacgtggaatagcaataaccgaaaacctcaatgaaaacgaccgtgtatccttgaaatctg

SEQ ID NO: 6379 - DNA, 3017 bp, Zea Mays
attcgttctcgtagagctagctgctcccgatctttagaattccgcgcgtcctccgagcgctccaagaacacgtacgccgtcgctggcttctcctatcggattgtggtccaggtcatctccccgttcgctggcttcagcagcagagctcttgctggcaaacaagtgatctttctacagttttagctcggagattatgacacaagcatgactggtccttgaaaactatacacggctttggagagatgggatgtgctgcttccaggttagaagatgaggaagccatcaagatgtgccgggacagaagggacttcatcaagcaggcactggagcagcgcaaccgatttgcatcttctcacattgcttacatcgagtccctgaagcgtgtttcaatggctctccaacggtttgttgctggagatgaccaccatgagctcatcttcgatacattcatctcccctgtcaagcaacagaagccagagacgctcagcctgccttatggttcatatgagaagagaaccattcatgtctcgagatacttgaggtcagggcctaacccatcagtgtcagttgaggagcacccacgaccggtggaaacagtccgtgttgagtcacattaccctatggacaatcacagtggcatggataggttcttacaatcgcactcctcaccggtggtatcgtcttcatactacccaccaccttataccaggccaagctacccatctccatcgtcccaggaaccagttatgaatacttctacctattacatgccttatgacaggccaagatatgcacctccatcaccccaggaggcaatgaggacttcttattatgcatcttatgacaggccaagctaccgaccaccatcatcccaggagccaccgaggaattcttatcatgtgccatatgacaggccaagcttcccacctccatcaccccaggagcaggaatcatcaccatgggactccttctggaacccattctcatcgctggacagctttggatatccccgccctcggagtagctatgacaacgtgaccaatgacgatgaactcgcgaggttacagcgggtacgagaggaggaaggaatcccagaacttgaagaggaagacgatgagtgtcaagagcatgtacaaatgcatagaaaagaagaacaagaagatcatgataatgcggatgatgatgatgaagacgatgaggaagatgacgatgacgaatgtgagcattcagatgagtatatggtttctgacgagggcacttgctctgtcaattttgatgctaatatgaagcaagaaacaaagggatttgaatccaaaggtattcagtgtactgaagcaccagaacctcgcaagacagtagaacttgagttaaaggcacacaagaaagaactgatgagaaacagagtagcaaatgcagaagaaactcctggtttcacagtatatctgaatcgaagaccagcaagcttggttgaggccatgaaggatatcgactgtcagttctcgggaatatgtgacgctgctcgggaaatctcagtaatgttggaggcaagtagagctcagtactcagcctcaaacgatctttctgcgaagatgctgaatccggttgcacttttgcgctctgtgtcgtcgcgttcatcgtcttctcgtttccttcttgctccctctagctcaatagatgatctctttgacaatgagactagcagctgttactctgaagaatcttgtagtaccatgtctggaagtcaccactctaccttagatagactctatacatgggagaagaaactgtacaaggaagtaaaggctggtgagcggttaagaatcgagtacgagaagaggttgacacatttgaggaaccaagatgtcaaaggcgaagaaccttcctctgttgataagacttgtgcagcattaagaagcttgcatactcggctgaaggtgtcaatacagacagttcagtcaatatcaacgaggattgaaattctaagggatgaggagctgcatcatcagcttatggagctgattcaagggctatcacggatgtggcgggccatggctgaacgccacaaagcccagaagcgcaccatcgaggacgccaagcttctcttcctccagcaccacccctcggccgccaccgccatctcccttggcccgctagaggctgcaggtcccccaccggctgccttggaattggagtccgagatccaggcgtggcgaggagcgctggaggcctggctgttcgcgcagcgcgcctacgcgcgcgcgctggccgcgtgggcgcgacggtgcctcggcatcagcaccgcggcgcggccaagtagccacgcgctgccgccggcgttcctggcgtgcatggagtgggggcgcgcggtcgacgcggccactgaggcgcgggtgatggacggtctggacttcttcgtcgccggcgtcgggtcggtgtgctcgggcgcggctgccgggatggagggcatggctgggcgcgtgctgtgtgctggcatggcagcggtcaccggcgccttggcggagttcgcggcggcgtctggcgacagctatgacgccgctgtcgcagctgtcgtcgccgcggcgcgtgcgccggagcgcgggaaagaggacggcgtgggacaagtgccggaacgctaggaaagtgctgcggcggttgctttgttggttgaccggcccccgtgacgtagagtggctctgctcaccttgtgatgacgatgggtagggtaggagatggaattaagcatgcagctacgtatgtagtcttgtgattgataagaatgctattacaaggctatctaattttgctagcgactgcttattatagtgtggtggtcctagaccgacaaatctaagcaatagcaacaattggttgtttgtgatacaagcacaagcgaatgggatggagtttgtttatgagagcaagaaccgctacgcgcggctacggggaaactatccgatacgaggaagacgaaggcttaccggtggcttcaaatgcggcttttcccctcgagccgttct

SEQ ID NO: 6380 - DNA, 1022 bp, Zea Mays
cagcccagcacacagcccataacgatggcccccggcctattcgggctcgcctaccatctctcctccggtccttcctatcataccggcgggcggcgcggggcagctaatcggcaatccggcttcgcctcgtcgcagtccaatccgcactcaccgccgccctcccgcccctcacctgcccgcggcagtgtcggagtaaaccctaccggacctatcgtcacgcgactgcgggagttgcttgcttcttctgccgctctctcgctccgtcccttccgcccatggagacctcgctgcgcttgcgcagtggcggcggcctccgcatccacgccaaggagaagctgcccctcggccacagctcgctgctgcaggctcatgcggagctcgacctccacacaagccccgccggagttactaccccgagttatctcgctctctttgtcaggcacttctactcgcagctatcagccaatctcggagctggcgtccagttgcacaacggcgatgacctcgcctacagttttcgcgccaagaaggccgtcctgttcaaaccagataatgggttcctaggtctgaaccttaaagggcgcctacttaccgataaagagttgaagccgacgaagacaactggatccgttgaactggcatggaccatacttgacttgaaacagggccaagacgtaaggctcaaagttggttacgaattgtgtgacaagctcagagagaacggttggacgctgaatgcttatatggatgggaaatgggatgttagatttgaaatgtgaatccacttgctcagtagtgttaccaattctacttgtctgtactgcacttggaactgttgatctggtaatatgtaaactggagagctttccatattcatctagttctgaagcgtacgttgttggctcactgcatcatcagctttggttctagtagccgctattcatccaaacgtcacaacatgtaatgtgacgtgggaattgagacttcatcatcattattatatacttagggctagtttgtca

SEQ ID NO: 6381 - DNA, 3058 bp, Zea Mays
ccccatcctctctttctccctcgcgcttgactcccctgccaccccttcccgtctccaccccgacgccgaccgcactccgctccccgtccaccatcccagcgtgatggctgggaggaccgcgcctgccccctcccctccttctctctcacgccctactccctcgccgccccttcatcccagatctcgtcatgggcgctaccatgaccaacagttcggtggagcaggcgccgcacgctacgccatgggacggagcccgtccccacccgacaccgaccatctccaccccgagcccgtccgagaagtgagtgatttccatttcttcgattggatggcgtgcggtcgggcctccgcacctccctgtccccctcccctcctgcggcgatagcttcctcgaggagatgagcgtgccgcccccatgatcggtctacctccgccgcccccgcgcgcaccgcaaccaccacgcccctcgtgcaccttctcgcccgagaaggtggtttcctttggtgtccccacgtgtttttgtcgttgcaagttgaactcgccctttcatgcctgatattttgctcagactgcattggagaatggctacacaaagatcatgctgccaacatgtgcttctggaatagcatgccctatgctatctgcaactataaaggctaagctttaccagccgatgtcctgtatgtcgatgcacgatgggaggtacttgtggttcttcaacttcatggttgtctggcctagccgccatccgcccgcgcaaacgcggtacagctccactacagcagcaggaggcggtgacgtcgccaaaggctggcagatacttgatggctcttgataagaagcctattgcaactaaaggccaccacctttgttgtcctcaccctagccgaggacctcatctcccagattcagtggcgacaaaatggtccattagtggaaacaccaagcatcatggagagctgtttcgtcaggagcttcgaacgcgagccatagacggggagttgatgccactgggcttatgggctcttcttttgggcaccaaagcaaagagcagtggataatatttggaatggtcataagtcaaactagacttccctagcgacagcgattcaacgaataagaaccaggccaacagttatgtagtgcagagatctactcccagtcccgggaaccagcttccagtgcctcttgtaccgatcatcagcaagggagtgctagaggaggaggttatggtgagttttgtcgcgactaatggtgagcccacgactacggccacatcaaagctggtctggtggaacctcgtggagcagatgacgatgacgccgacatcctgcacctctgctgcgacgctgccgaccaggacgcgggcccctccgtcgcgcgcgctctacaagtctggatccatcatcgtgctcggcaagactgacttccttaggccagacatgtggcctgattagctacaagaagctcttgttccatggactcgatctctggaccgcactatcgttgcctcaacccctaggtcgtgctgccctctggcctcctcatcgtacaattcaccaacatctccaactctcttcttcaagcaagagatggagctttccttggtcgggctccaaaatgctaggaaaacatcacttgcagcagctcgcagcgacacccccgcctcctcatcatggaagttgtatctgtttcagaataagcaagtgtcgtatttagtaaaccagctcgtgttctaattcttttgcatgcttccattttgttgtaggctacaagaacactttgagtaggtgaagaggatttgcgacactaccacattgtctttggccatgcatcatctcagtgataagataacaagccaactagatatttcaaaattgactgacaagctacagtaagggaaggtagactcaactgcattgacaccaaaggagaagtatgaaacttggaaggagattaaaattatgagtttcagaaaaatagtttctccaatgtgggcaatgacattgcttagcttgtatgttagagttcatgtcaccatattaggcagaatctgacgcctttaatgtaaatggacacaagaccttcgttgcaatggatgattatcttgtcactgacaaaatcactgcattcatagtgcaaacgcaacatgcagcaactgaagtccttaaagaaaagcaaccaaaagactgtatgaaatggaccaagtattgcagacaatattacaaatattggacacgttcatggctctttctgaagatactcatggagaaattatcttgtacctgagaatcccccttatttttgcacaattgatggttgtgtcctgtagtggctttgataattcatcactcctaaacgattttagaaagctataccaactaatgtgtggaggacctgggcaaggggtggtagtcgcgctggttcgctatccacggcggcaagccgcctactcgaagatcccacctccgaggacgccgctacggggaggacatgggcactaatcttgaactaaaactaggggggtgtctatgacggctggttccgcctacaaccacgtggacaacttcttgcccgacatcatctcccagcttgttccacctacaaccgcgtggacaacttttcacccgacatcatctcctagctcctcgcattcgccaacaagttctgctatgagggcttgaagccaacctacgacaatcgggtcacaaccatggtgttggctcttgacgacgcctgatccctcatcgacatcggcctctaggaggcctcccacctcctcgtcacctcgtgcctctagcattcctatgggagcccccaaagtcactcacccacctagacatcgcccgtgttgttatttggtggtcagtatgtcacaatatagtcagttttttttgcttatgttgttggtactgattttattggatgtgaatttatttatcctttcattgtatattggaattcatgacattatctacatatgtacatgcttacatatctattatatttttgtataaatatttttttgatagtttttaatttgtatggcaaagcaagg

SEQ ID NO: 6382 - DNA, 3170 bp, Zea Mays
ccccatcctctctttctccctcgcgcttgactcccctgccaccccttcccgtctccaccccgacgccgaccgcactccgctccccgtccaccatcccagcgtgatggctgggaggaccgcgcctgccccctcccctccttctctctcacgccctactccctcgccgccccttcatcccagatctcgtcatgggcgctaccatgaccaacagttcggtggagcaggcgccgcacgctacgccatgggacggagcccgtccccacccgacaccgaccatctccaccccgagcccgtccgagaagtgagtgatttccatttcttcgattggatggcgtgcggtcgggcctccgcacctccctgtccccctcccctcctgcggcgatagcttcctcgaggagatgagcgtgccgcccccatgatcggtctacctccgccgcccccgcgcgcaccgcaaccaccacgcccctcgtgcaccttctcgcccgagaaggtggtttcctttggtgtccccacgtgtttttgtcgttgcaagttgaactcgccctttcatgcctgatattttgctcagactgcattggagaatggctacacaaagatcatgctgccaacatgtgcttctggaatagcatgccctatgctatctgcaactataaaggctaagctttaccagccgatgtcctgtatgtcgatgcacgatgggaggtacttgtggttcttcaacttcatggttgtctggcctagccgccatccgcccgcgcaaacgcggtacagctccactacagcagcaggaggcggtgacgtcgccaaaggctggcagatacttgatggctcttgataagaagcctattgcaactaaaggccaccacctttgttgtcctcaccctagccgaggacctcatctcccagattcagtggcgacaaaatggtccattagtggaaacaccaagcatcatggagagctgtttcgtcaggagcttcgaacgcgagccatagacggggagttgatgccactgggcttatgggctcttcttttgggcaccaaagcaaagagcagtggagtaaggtcctcaatttttgttgcatgttggagatgggttcaattgggtgacaaatcttaacccaagtcagaagtaatatttggaatggtcataagtcaaactagacttccctagcgacagcgattcaacgaataagaaccaggccaacatgtagtgagaccgagagcatgaggcttcagtacctgtctactaacatcagatgcattagttgatgtcttgattagttgtagcagggaaccagcttccagtgcctcttgtaccgatcatcagcaagggagtgctagaggaggaggttatggtgagttttgtcgcgactaatggtgagcccacgactacggccacatcaaagctggtctggtggaacctcgtggagcagatgacgatgacgccgacatcctgcacctctgctgcgacgctgccgaccaggacgcgggcccctccgtcgcgcgcgctctacaagtctggatccatcatcgtgctcggcaagactgacttccttaggccagacatgctacaagaagctcttgttccatggactcgatctctggaccgcactatcgttgcctcaacccctaggtcgtgctgccctctggcctcctcatcgtacaattcaccaacatctccaactctcttcttcaagcaagagatggagctttccttggtcgggctccaaaatgctaggaaaacatcacttgcagcagctcgcagcgacacccccgcctcctcatcatggaagttgtatctgtttcagaataagcaagtgtcgtatttagtaaaccagctcgtgttctaattcttttgcatgcttccattttgttgtaggctacaagaacactttgagtaggtgaagaggatttgcgacactaccacattgtctttggccatgcatcatctcagtgataagataacaagccaactagatatttcaaaattgactgacaagctacagtaagggaaggtagactcaactgcattgacaccaaaggagaagtatgaaacttggaaggagattaaaattatgagtttcagaaaaatagtttctccaatgtgggcaatgacattgcttagcttgtatgttagagttcatgtcaccatattaggcagaatctgacgcctttaatgtaaatggacacaagaccttcgttgcaatggatgattatcttgtcactgacaaaatcactgcattcatagtgcaaacgcaacatgcagcaactgaagtccttaaagaaaagcaaccaaaagactgtatgaaatggaccaagtattgcagacaatattacaaatattggacacgttcatggctctttctgaagatactcatggagaaattatcttgtacctgagaatcccccttatttttgcacaattgatggttgtgtcctgtagtggctttgataattcatcactcctaaacgattttagaaagctataccaactaatgtgtggaggacctgggcaaggggtggtagtcgcgctggttcgctatccacggcggcaagccgcctactcgaagatcccacctccgaggacgccgctacggggaggacatgggcactaatcttgaactaaaactaggggggtgtctatgacggctggttccgcctacaaccacgtggacaacttcttgcccgacatcatctcccagcttgttccacctacaaccgcgtggacaacttttcacccgacatcatctcctagctcctcgcattcgccaacaagttctgctatgagggcttgaagccaacctacgacaatcgggtcacaaccatggtgttggctcttgacgacgcctgatccctcatcgacatcggcctctaggaggcctcccacctcctcgtcacctcgtgcctctagcattcctatgggagcccccaaagtcactcacccacctagacatcgcccgtgttgttatttggtggtcagtatgtcacaatatagtcagttttttttgcttatgttgttggtactgattttattggatgtgaatttatttatcctttcattgtatattggaattcatgacattatctacatatgtacatgcttacatatctattatatttttgtataaatatttttttgatagtttttaatttgtatggcaaagcaagg

SEQ ID NO: 6383 - DNA, 3304 bp, Zea Mays
cgctcattcccctccccatcctctctttctccctcgcgcttgactcccctgccaccccttcccgtctccaccccgacgccgaccgcactccgctccccgtccaccatcccagcgtgatggctgggaggaccgcgcctgccccctcccctccttctctctcacgccctactccctcgccgccccttcatcccagatctcgtcatgggcgctaccatgaccaacagttcggtggagcaggcgccgcacgctacgccatgggacggagcccgtccccacccgacaccgaccatctccaccccgagcccgtccgagaagtgagtgatttccatttcttcgattggatggcgtgcggtcgggcctccgcacctccctgtccccctcccctcctgcggcgatagcttcctcgaggagatgagcgtgccgcccccatgatcggtctacctccgccgcccccgcgcgcaccgcaaccaccacgcccctcgtgcaccttctcgcccgagaaggtggtttcctttggtgtccccacgtgtttttgtcgttgcaagttgaactcgccctttcatgcctgatattttgctcagactgcattggagaatggctacacaaagatcatgctgccaacatgtgcttctggaatagcatgccctatgctatctgcaactataaaggctaagctttaccagccgatgtcctgtatgtcgatgcacgatgggaggtacttgtggttcttcaacttcatggttgtctggcctagccgccatccgcccgcgcaaacgcggtacagctccactacagcagcaggaggcggtgacgtcgccaaaggctggcagatacttgatggctcttgataagaagcctattgcaactaaaggccaccacctttgttgtcctcaccctagccgaggacctcatctcccagattcagtggcgacaaaatggtccattagtggaaacaccaagcatcatggagagctgtttcgtcaggagcttcgaacgcgagccatagacggggagttgatgccactgggcttatgggctcttcttttgggcaccaaagcaaagagcagtggataatatttggaatggtcataagtcaaactagacttccctagcgacagcgattcaacgaataagaaccaggccaacatgtagtgagaccgagagcatgaggcttcagtacctgtctactaacatcagatgcattagttgatgtcttgattagttgtagcagggaaccagcttccagtgcctcttgtaccgatcatcagcaagggagtgctagaggaggaggttatggtgagttttgtcgcgactaatggtgagcccacgactacggccacatcaaagctggtctggtggaacctcgtggagcagatgacgatgacgccgacatcctgcacctctgctgcgacgctgccgaccaggacgcgggcccctccgtcgcgcgcgctctacaagtctggatccatcatcgtgctcggcaagactgacttccttaggccagacatggatcccataaccagatggacagccacaaagaaaagtggcctgattagctacaagaagctcttgttccatggactcgatctctggaccgcactatcgttgcctcaacccctaggtcgtgctgccctctggcctcctcatcgtacaattcaccaacatctccaacgtaagtgcagcaggttcagtaatgaactcaaaagtggcatcagaatactctaagagttttttgttctttttgcctggatatataccgagggcaatgcattcaaaactcctatagatgacgaatcccatctctccctcttttcccggacatcgatcccagtctcttcttcaagcaagagatggagctttccttggtcgggctccaaaatgctaggaaaacatcacttgcagcagctcgcagcgacacccccgcctcctcatcatggaagctacaagaacactttgagtaggtgaagaggatttgcgacactaccacattgtctttggccatgcatcatctcagtgataagataacaagccaactagatatttcaaaattgactgacaagctacagtaagggaaggtagactcaactgcattgacaccaaaggagaagtatgaaacttggaaggagattaaaattatgagtttcagaaaaatagtttctccaatgtgggcaatgacattgcttagcttgtatgttagagttcatgtcaccatattaggcagaatctgacgcctttaatgtaaatggacacaagaccttcgttgcaatggatgattatcttgtcactgacaaaatcactgcattcatagtgcaaacgcaacatgcagcaactgaagtccttaaagaaaagcaaccaaaagactgtatgaaatggaccaagtattgcagacaatattacaaatattggacacgttcatggctctttctgaagatactcatggagaaattatcttgtacctgagaatcccccttatttttgcacaattgatggttgtgtcctgtagtggctttgataattcatcactcctaaacgattttagaaagctataccaactaatgtgtggaggacctgggcaaggggtggtagtcgcgctggttcgctatccacggcggcaagccgcctactcgaagatcccacctccgaggacgccgctacggggaggacatgggcactaatcttgaactaaaactaggggggtgtctatgtaagttaatactttctctcacatttgcatcaaaatttgttttccgataatcaacagatcttgacatgtttctatgacggctggttccgcctacaaccacgtggacaacttcttgcccgacatcatctcccagcttgttccacctacaaccgcgtggacaacttttcacccgacatcatctcctagctcctcgcattcgccaacaagttctgctatgagggcttgaagccaacctacgacaatcgggtcacaaccatggtgttggctcttgacgacgcctgatccctcatcgacatcggcctctaggaggcctcccacctcctcgtcacctcgtgcctctagcattcctatgggagcccccaaagtcactcacccacctagacatcgcccgtgttgttatttggtggtcagtatgtcacaatatagtcagttttttttgcttatgttgttggtactgattttattggatgtgaatttatttatcctttcattgtatattggaattcatgacattatctacatatgtacatgcttacatatctattatatttttgtataaatatttttttgatagtttttaatttgtatggcaaagcaagg

SEQ ID NO: 6384 - DNA, 1308 bp, Zea Mays
acatgtggccattggctaagtgaacagcgacacctcatcgcctcgccctcctaccacgacaactggaacgtgcgagcctcatcacctcccgactcccctccacgccttggaatgctgcctgcgcagacgctaacacacacgtttcccatggcagcgtccacggcctcgcgcatcttcacgcccttcctccaccggcaccagcggcgcacgaaggcagtcgtggtcgcagccgcgagcccgcccgacgccgaaccgactcctgcgacggcggacggtgcagggccggggaagaagaagacggtggacaccaggatacactggtccaaccccgacgaagggtgggtaggaggcaaggccaagaaggaaggcgacggccgcggcagcagcaagaacgagccgttgggagggaggttcgcggacctcatcaacaacgcggccgagtctcactaccagttccttggcatagcgccagaggcggacatcgaggagatcaagacggcgtaccggcggctgtccaaggagtaccacccggacacgacgacgctgccgctcaaggtggcgtcgcagaagttcatccgcctgcgagaggtgtacaacgtgctgagcaaggaggagacacggcggttctacgactggacactggcgcaggaggccgagagccgccgcctgcagcagctcaggtccaggctcgaggacccatacgagcaggacatcatcaactacaaacccgtgccagacatggttgaccgcctcggcggcaagaacatgaagcttagcgatcaggccatgactgcgctcaccatcgatatcgttatcatcatcatctccatctgctgcatcatctatgctgttttcttcaaggagcagtactgacagcagcataccagcaacagcagcaaggttgcaggagtgtaccatagacagaacattatagctgatataccagctgcccactggtgaagaagagaaggatggcgaagcccaagaggaagcaccatgctggcctacgagggagacaagggtacaaggctcaacccgtgatatcttggtttggtccaagtggatcaacaaatgaaccgtactgtgagggcatatcaaatatgctcgtccgttgctacggatgaatagcacatggaattgatcatgtgttgatcttatttttatattttattttttgtgacgagtgttcaaataagtggagacacagatgactttccaattagaatagtactacatcaaggatcagctttgagcccttaccttcttgccttggtaatggataaggtaacaaaggacatacaaggagat

SEQ ID NO: 6385 - DNA, 1258 bp, Zea Mays
atggatccatttgctcgactcatcatctggggtaacttgagaggtgccccaacatctgttgttgaggtaacttgtacacctactttagacctgtctgaagatcatcaactcccccaccaagacagagtgcaagtcatttcccaggcacaagatgaagccaacccacctaattttgaacaaatacctaataaccagccccctaaaaatgtggtccctaaaaggtgcaagaatttcacagttagcgaagatgaatgcctagtctcagcatacctaaacataagcaaggaccccatcatagggaccaaccagccaataaaaggttactggcaaaggataactgagtactttcacgagcataagagcactccttatgatagatcacagtcttctttgcaacaaagatggggagacattcagaaagaaacttctaggttctgtggattctatgtggaagtagagaggagaaagcaaagtggactcaacgttgatgacaagataaaagaggccatggcgatgcacgagcgtatagttggcacaccgttcaagtttatgcactgctggttaattttacgtcacgagatgaaatggaatgcattgcttgattcaatgaatccaacagatgctaaagaaacagaacaaaaggggacaaatatcatggaagagttgcttccccccaaaattgcacgcccaacgggaagagatcatgataagaatatgaagagcaacatcagctcaagctctttcactgcttgcattaatgtgctccaaaagttgtcaatggagcatggagcatttgaagagaggcaagatgctacaagtagggaggaagcaacacacatggtagtaaggtcggatcgcaaactggccctacaagaggaagttataataattcaaaaagcaagcctcgaaatccagcagcaaatgcttaagctacaagaagaagaacgtgaggagagggtgatgacaatggatgtaaacaagatggagccatgggttcgggagtactacatcaacaagcaaaagaagattgcagcctctagtatgaatgtagaaacatcgagtgcacgtgagccaagttaaatattagttcttctttaagttgttgctactagtatgtagactttaaatcatttagagaatttcttttcctagtatttgtgcaaatattgatatttctattatgttgtacaacaaaaaaactcaatggtatcactgtgtcatggattcattaagaccaatttggatgttccacttcatt

SEQ ID NO: 6386 - DNA, 2016 bp, Zea Mays
cttggagtcaacattttcggtgatggagcggcggaattggacttgcgggagaggtgatgataaaggatatttgctgaccaaacttgcagtatttctccttaaggaaatagaaattggcgtcatgtcatatagaaatatgctctggacacatcagtccgttaatcctgaatgggagcaaggacatgtccaagtccaaccaagaagttcctattatgcaggcactgtaagtgattcatccaacctgggcatgcaagttgctgttggtgttccagtaaatactgttaatgttggtatatgtgatctgtggaatcatgagcgcctgcctgttcataattcatacccacatgccagtgttacatcgagatttgtcctcccaactagtatgtacaacccttgcatgccagcagcagctgtcaacatatatattcctcagactcaaagctttggactgggcaatgtgctaccaccatctttacatagtcaagtttccacaggaactattgatgagaataacagcagtttcaattttggtgatagtgccattggatccatgaaaaggaaaaccgcagtagttgccggaaaccatcacattcttcatggatttgctggctcaagttcatctgttcatgtccctcagaatcctgtgtatgggccatggaatgcttcatctcaatcaaattgtttacccagttctgcagcttcaaacctaccagaataccacaatagtaatgggtggccgttcttagaagaatcttctgcaaatgcttcaaacagtttcacttcagtggatgcttgtccagagttggtacctcatggtaacaatttatatccagcttgtcacataatacagtgcaatacatgggttccacagactgcaagtcatggagtaccacagtggggatatggtaatgtcatggtcaatcctccaggaaccgtagacatgccgaatggaaatattcaggattatcaagctgggcattcttctattcatgggccactacctcatttctgccagattcctttgcgtagtatgcaagtacctcaaatacaagtaccccatcaacagttcatcggtaacaatgtggtgcatggtttaaatccttcagccgcaggccttccgttagatccaagaatgctggctttcccattcaatgatgagcacacttttgggcatcaagtgcatccacctctgataaaccaagccaacaatggggctttaagaattctgccatatcagaatgctacagtgatggatcattcaaggatttatgaagcaggacatgttattgatgaacatagagatatgcgtttagatgtggataacatgacttatgaggagcttgtagcattgcaagagcagataggtgatgtcaatactggtttgacagaaagctatatccaagaaaacttgaggtccacttttcatgttccaggagcagctagcatttctgatcagttctgtgagctttcgttagagaacgatgcttgcataatatgccaggaggagtatgaagctagagaacttataggagcccttgaatgtggtcacaagtaccatgaggattgcataaagcaatggttgatggtgaaaaacgtgtgccccatctgcaagacaacagctttgtcatcagatagaaggaatggatgatcttcgccagtaacattattggttatttaccgcgtggcaagttagcgcgattttgtatatagacagggttgcctttatttgccgtcccccttcgctgtggacataaactgtacagatattattttgtaggatattttagacgttaaatggcaccatggtgtgtaaggctcccatggttgccttggtagatcctcccttcctttacattgtatttatctttactcttcaaaaaagaagcccgaaaacatgtatattttggaagtgaaagaaccgattttttttcttcaattctggagcttttttgctagagctgcatgagatttgccgctgaaatagggacttggttatgtttttttttcgctttctac

SEQ ID NO: 6387 - DNA, 2045 bp, Zea Mays
ttcgtgcggcgtagtatgttattccttttcatttgggatggctgtacagattgagaccctataagcttctacgtagggagaggtgatgataaaggatatttgctgaccaaacttgcagtatttctccttaaggaaatagaaattggcgtcatgtcatatagaaatatgctctggacacatcagtccgttaatcctgaatgggagcaaggacatgtccaagtccaaccaagaagttcctattatgcaggcactgtaagtgattcatccaacctgggcatgcaagttgctgttggtgttccagtaaatactgttaatgttggtatatgtgatctgtggaatcatgagcgcctgcctgttcataattcatacccacatgccagtgttacatcgagatttgtcctcccaactagtatgtacaacccttgcatgccagcagcagctgtcaacatatatattcctcagactcaaagctttggactgggcaatgtgctaccaccatctttacatagtcaagtttccacaggaactattgatgagaataacagcagtttcaattttggtgatagtgccattggatccatgaaaaggaaaaccgcagtagttgccggaaaccatcacattcttcatggatttgctggctcaagttcatctgttcatgtccctcagaatcctgtgtatgggccatggaatgcttcatctcaatcaaattgtttacccagttctgcagcttcaaacctaccagaataccacaatagtaatgggtggccgttcttagaagaatcttctgcaaatgcttcaaacagtttcacttcagtggatgcttgtccagagttggtacctcatggtaacaatttatatccagcttgtcacataatacagtgcaatacatgggttccacagactgcaagtcatggagtaccacagtggggatatggtaatgtcatggtcaatcctccaggaaccgtagacatgccgaatggaaatattcaggattatcaagctgggcattcttctattcatgggccactacctcatttctgccagattcctttgcgtagtatgcaagtacctcaaatacaagtaccccatcaacagttcatcggtaacaatgtggtgcatggtttaaatccttcagccgcaggccttccgttagatccaagaatgctggctttcccattcaatgatgagcacacttttgggcatcaagtgcatccacctctgataaaccaagccaacaatggggctttaagaattctgccatatcagaatgctacagtgatggatcattcaaggatttatgaagcaggacatgttattgatgaacatagagatatgcgtttagatgtggataacatgacttatgaggagcttgtagcattgcaagagcagataggtgatgtcaatactggtttgacagaaagctatatccaagaaaacttgaggtccacttttcatgttccaggagcagctagcatttctgatcagttctgtgagctttcgttagagaacgatgcttgcataatatgccaggaggagtatgaagctagagaacttataggagcccttgaatgtggtcacaagtaccatgaggattgcataaagcaatggttgatggtgaaaaacgtgtgccccatctgcaagacaacagctttgtcatcagatagaaggaatggatgatcttcgccagtaacattattggttatttaccgcgtggcaagttagcgcgattttgtatatagacagggttgcctttatttgccgtcccccttcgctgtggacataaactgtacagatattattttgtaggatattttagacgttaaatggcaccatggtgtgtaaggctcccatggttgccttggtagatcctcccttcctttacattgtatttatctttactcttcaaaaaagaagcccgaaaacatgtatattttggaagtgaaagaaccgattttttttcttcaattctggagcttttttgctagagctgcatgagatttgccgctgaaatagggacttggttatgtttttttttcgctttctac

SEQ ID NO: 6388 - DNA, 1117 bp, Zea Mays
gaaagccgggatctttacagaggaatcggatcgaattgacctattcttcgcggatttgccctgctacgaatggtgtcaaaatggacatactttgtgttcgacatgcaaggccagggtgcacaacaggtgccctacatgcagacaagagcttggtgatatcaggtgcttagcattggaaaaagtagcagagtcacttgagcttccctgtaagtactgctctttagggtgcccagagatcttcccatactacagcaagataaagcacgaagcacagtgcagcttcaggccatatacctgcccctatgctggttctgaatgtgctgtggctggtgatattccattccttgttgcacatttgagggatgatcacaaagtcgatatgcacagcggctgcacgttcaaccatagatatgtcaagtccaacccgcgagaggttgaaaacgccacctggatgcttacgtacttctgcctgcacttcgaggcattccagctcggaatggctccagtctacatggctttcctccggttcatgggtgatgagaatgatgcgaggaactacacatatagcctagaggttggtggtaacgggaggaagatggtgtgggaaggtactcctagaagcatccgtgacagccaccgcaaggtccgtgacagccatgatggcctcatcatccagaggaacatggcgctgttcttctcgggcggtgacaggaaggagctgaagctgagggtgactgggcggatctggaaggagcagaccaacccggacggggcctgcattcctaacctttgcagctgagcaagggagacgtttggaaagcaaaaaagaaagaaaatacggtgctgtttggctggcttgtctcaaaattgccacgttatgctttcatcatagtgtctgccgttgaaatgttgtagtagtaaaatcgtagggtgtaaaatgttttcttgtaaagtcattgtgtataccaaccaaattcaagaaagcttacaagttggcccataaatgcatgtgctacgttcttgtgtagtttgagttctgttatcaaggtattgggctcaggaaatgctcagtgttcatgtttatttgatagactattagtgttatcgcgaagaaaat

SEQ ID NO: 6389 - DNA, 1308 bp, Zea Mays
gtgggatggcacctcctgggcaggctgggagatgattaagttccatctagtgtcaaaatggacatactttgtgttcgacatgcaaggccagggtgcacaacaggtgccctacatgcagacaagagcttggtgatatcaggtgcttagcattggaaaaagtagcagagtcacttgagcttccctgtaagtactgctctttagggtgcccagagatcttcccatactacagcaagataaagcacgaagcacagtgcagcttcaggccatatacctgcccctatgctggttctgaatgtgctgtggctggtgatattccattccttgttgcacatttgagggatgatcacaaagtcgatatgcacagcggctgcacgttcaaccatagatatgtcaagtccaacccgcgagaggttgaaaacgccacctggatgcttacggtaagattcgactagttctgaattattccttatctgctactccatctgtttttaaatgtaaaatgtatgaactaattacttgtcctaaacatcatcatatatttaaaagtggagagatctattttctattgctggtcttatgatccatggttaacaagtaaaatgtgtattctcaaataacttgtcggttcaggtattccattgttttgggcagtacttctgcctgcacttcgaggcattccagctcggaatggctccagtctacatggctttcctccggttcatgggtgatgagaatgatgcgaggaactacacatatagcctagaggttggtggtaacgggaggaagatggtgtgggaaggtactcctagaagcatccgtgacagccaccgcaaggtccgtgacagccatgatggcctcatcatccagaggaacatggcgctgttcttctcgggcggtgacaggaaggagctgaagctgagggtgactgggcggatctggaaggagcagaccaacccggacggggcctgcattcctaacctttgcagctgagcaagggagacgtttggaaagcaaaaaagaaagaaaatacggtgctgtttggctggcttgtctcaaaattgccacgttatgctttcatcatagtgtctgccgttgaaatgttgtagtagtaaaatcgtagggtgtaaaatgttttcttgtaaagtcattgtgtataccaaccaaattcaagaaagcttacaagttggcccataaatgcatgtgctacgttcttgtgtagtttgagttctgttatcaaggtattgggctcaggaaatgctcagtgttcatgtttatttgatagactattagtgttatcgcgaagaaaat

SEQ ID NO: 6390 - DNA, 845 bp, Zea Mays
gagcggtagcggagtactaagggggtggagagagggagcactgtctcatgcatgaaagaaagtctccaaaacaaaagatttggtccagagcgcggccacacgggcccagcaatagcaacgtcacatggtggttgccatcgtcacgtcgagctctccctctccaccaactaatagttcctgacggtggagcagaaattcattaagagcatatagggattcacaagtgattttgagcccaacaatcttgctgccatcgatactcctgaaagacacaattccattttggcagatgcaagtggaggatttggtgacatgttttgctgtgaagtttgcgaaccatggtaaaccaacacctattgctttgatataatcatctcgatcactggttgatgtatttgaacaggacatgaatgatggcaaagttgtatgcgtcgttggatttgcctttctgtttgcagttgatgtaaggaaatgctatgttgaaacttttgccacttttgtgttatcatgattaagcagtgcttcccggctgggaaatgaaagtcttggattgtctttggtggtatggttattctgctcatggaagatctacagggaagaaactgaggtagcatataactgccgcaagggaaaatatggtgtagcagatgaggatataatcttatatggtcaatgtgtttgaattggtccaaccattgatatttcttcgcggttgctagacttgagagtcgcagttttgcatagtcctatattctatctgcactaagagtaatatatacagccaagcggatgtttggtttaacatttacaaggtatgtttggtccttttgtttttggaattaatg

SEQ ID NO: 6391 - DNA, 1167 bp, Zea Mays
gagcggtagcggagtactaagggggtggagagagggagcactgtctcatgcatgaaagaaagtctccaaaacaaaagatttggtccagagcgcggccacacgggcccagcaatagcaacgtcacatggtggttgccatcgtcacgtcgagctctccctctccaccaactaatagttcctgacggtggagcagaaattcattaagagcatatagggattcacaagtggtacatattttgagcccaacaatcttgctgccatcgatactcctgatgcaagtggaggatttggtgacatgttttgctgtgaagtttgcgaaccatggtaaaccaacacctattgctttgatataatcatctcgatcactggttgatgtatttgaacaggacatgaatgatggcaaagttgtatgcgtcgttggatttgcctttctgtttgcagttgatgtaaggaaatgctatgttgaaacttttgccacttttgtgttatcatgattaagcagtgcttcccggctgggaaatgaaagtcttggattgtctttggtggcaggtgacatcaaatccttgtgtttcttgtgagattaatttctttcacatgaaaaaatggcgggctacatagattattagttatgcaccagataggaaatgcacagactttgtaggtgtgacaaagaggcaagataatatattttgtggatgtatcttagattttacaatgctgatgaggtggtgccttgcattttgtgacatggttagtgggtctttctacgtggattgcattatgcagggacgactagttccttacccaaatgtggttaaagttaggaacagtcttctccctgaaattgatttagtgatttcaaacagacttatatgtgtgatgcaggtatggttattctgctcatggaagatctacagggaagaaactgaggtagcatataactgccgcaagggaaaatatggtgtagcagatgaggatataatcttatatggtcaatgtgtttgaattggtccaaccattgatatttcttcgcggttgctagacttgagagtcgcagttttgcatagtcctatattctatctgcactaagagtaatatatacagccaagcggatgtttggtttaacatttacaaggtatgtttggtccttttgtttttggaattaatg

SEQ ID NO: 6392 - DNA, 1158 bp, Zea Mays
atcgcgtattatccgtcaccgtcgtgccgtgcactccatcggcgtctgctacggcacgctgggcaacaacctgccgtccagcagcgacgtggtgcagctctacaggtccaagggcatcaaaggcatgcgcatctactcccccgacgccaaagccctcgccgccctgcgcaactccggcatcgcgctcatcctcgacaccggcaacggcggcggcgtcctgggccagctcgccaggagcgcctcgttcgcggactcgtgggtgcagagcaacgtgcggccctactaccccgccgtcggcatcaagtacgtcgcggtgggcaacgaggtgcagggcgacgacacgcgcagcctcctcccggcgatgcgcaacctggacgccgccctggcgcgcgccggcttcccgggcatcaagtgctccacgtcggtgcgcttcgacgtggtcgccaactcgttcccgccctccagcggctccttcgcgcagggctacatggcggacgtcgcgcgctacctggccggcaccggcgcgccgctgctcgccaacgtgtacccttacttcgcgtaccgggacaacccgcgcgacatcagcctgggctacgccacgttccagccgggcaccaccgtcagggacaacggcaacggcctcaactacaacaacctgttcgacgccatggtggacgccgtcgtcgccgcgctcgagaaggccggcgcgcccaacgtcagggtcgtcgtgtccgagagcggctggccctcggccggcggcttcggggccagcgtcgacaacgcgcggaaatacaaccagggactcatcgaccacgtcggccgcggcacgcccaagaggaccggcccgctggagaccttcgtcttcgccatgttcaacgagaaccagaagggcggcgatcccacggagaagaacttcggcctcttctacggcaacaagcagcccgtgtacccgatccggttcaactaattaagagtggcggatcggaggaataatacatcttcatcaatcaattaacctaataatatgctacatgaataagctgctgcgtgcatgtggccggccggacttgtggaggagcggtgcaattaacttgtatgcacgtactctatctatatatgatgaataaaaagagatagaattctgatgcattcatctta

SEQ ID NO: 6393 - DNA, 2101 bp, Zea Mays
gcgagggcgaggtagggaggatcttggaatttggccgccgtctgcgttgcttgggtggggaaggagcaggcggccaggcgcagagccgcaaaagcagacgcgaaaaagcccaggcccgagccgaagcggggaggcgacaccgctgcacctgcactaccgctcgcacggtcagcgatttgccgcctcgcgggagccagctttggcgtcggcgtcggcgtcatcgtcggcggggagttcccggagagggattccggtgaggatgagcagcggcggcggtggagggggagccaggggaccgtcggggcccgtgccggcgtccgcgaggaagctcgtgcaggggctcaaggagatcgtgaaccgccccgacgcggagatctacgcagcgctgcgggagtgcaacatggacccggacgaggcggtcagccgcctcctctcccaagatacttttcaagaggtaaagagcaagcgtgataggaaaaaagaggttaaagaaactccagagccaagatctcgaggagcaagtaactccagtcgatccagtagaggtggtgtggaccgtgctggacgaggcaattcagttcagtctggatcgagtggcactgattatatggcttcaaggtcatcaatattgggacctgctgtggcagctaccaatgccatgcagaagccaacagttcctagtttgtccacaaacaaagatgtggttcctaatggatcagttggagcacaacaatcatcatctggttttcagcacaattggtttggggtgccagaagagaacaactccactgcagttgaagcaacactgtcttccgaaagacacttggaaattgtggaggatgacaatcatttcaacgacgggttattgcagaactcaagcgcttaccaggctcaagtgcattcctatgttgataatgaagttgggatttccaatgttgatgcagaatcagcttcgatgaacttccagcatttaagcctgcagaatgaagatatagctgcaaccaagtctgctgaggataaccctgcggttatactccctgatcatctacaagctgcaaatgcagattgtgctcatttgagctttggtagttttgaatctggtgccttctctggcttgctttcatcaaaggtcccaaaaggcagtttggaggacgacgaggtgctcattccagatgaatcccgatcagttaatcgaatagatgttaggaatcaagattactatgatgacgatgctctaaattcttcagaaaatgtggatgttgagacaagaattggtaatatggataacattgatggaccttcagtttcagaatctgatgcactgaggcagggtgccatagatgtgcctggtcttcaatatgacctgccatcagtttcaagtcatgcatattcaaacacaacacagccaagtacaatggaagaaccacaaggaaacacacaagcacaacccctttcccatttttctggcttactgcaagcaaatactctacccaataacttgttggggtcaaatcttacccctcttcgggagtttgacttctcccagttccttcagacacagtcagctacaaaatataacccatctgttgcacctaataatctgccaccaatctccatgcaagagacttcaaaacagggaggcttccccaatactcagtctacgcaacatgttcccagtacaagcatttcgtcgggtcttcctctcccacaacaattgcctgtatactctcagccaactctgccccttgggccttttaccagcctggttggctatccatatttgcctcagaactattacctaccttcagcgccattccagcaagcgtactcaagtaatgggcctttccatcaatctgctgctcctgccgtgcctggagctggtatgaagtatccgatgccacaatacaagagcagccctcctgcttcgaccctaccacaaccatcatcactctctggttacggagggttcggaagtgcaaataatatccctggaaatttcagccaaaatcagggtgctcccgctgcacctacaactttgggatttgatgaagctttaggcacacaattcaaacaccccaatcattatgcagcactacagcag

SEQ ID NO: 6394 - DNA, 2037 bp, Zea Mays
taaaaactaggcctaagtagtagagatttgctctgtcgatgaaattccggctcacaaagccctagcgagtagcgacctcaattcctcccgccccccccccccccccgggatgggcgtcggcccctacgctcttcgtctctccccgccgccgcggctcgatgccatgctcttcccacagttgcggcctcacctacgccgccgcgtctccgctcgggtagctgcctctggcaccacctggtctcccgccgccaatgactccgaagacagcttcggcggctggtggtttcccgagtacgagaagcatatgaaacaggggaggaggaggataggtatacaacaactcattgttgcaccattacactatgttcaagataaattgtcaacaatggagtcaacagagataatcaaggaggatgcaagtgagagggaatctgatgaaatcgaagtttctagtgcaacacatgataagaaggctgaagcaataactgacgattcaaggcaaaattacaggacagcaatcgccagccattttctattcagagttcatacagatcctgtacatgaggaggctttctctatattgaagaagcttcagataattgagaaagatgttagctccagtgatttttgtacacggagggaatttgcaagatggtttgttaagttaagctcaaagtttgagaggaaaaggatgtgcaggattgttcctaataaattaacttctgacacagtccaatgtgcctttgatgatgtaaatattgacgacccagatttcctgtatatccaatctttaggagaatctggtatcgtatccagcaagttatcaaactccttggaaatgttgacaagtggctctccttgttccaagggaaataccttgttcctacctgatagttacctatctcgattcgatcttgtcaactggaaagtgcttgttgagcatccacgcgcattgagaatagacgaaaaggaaatactagacgccttcaaccgggcaaacctgtaactaaagcgcaagcagctgctgcactgactagtggccgaatgaaggaagcagttcatgaagaattgaataaacttgaagcagaaaaccaagcccatctttctcttatagctgaaataatggaagagttaattagtaggggagatatacaacaacaatgggagcaaaagatgaaaaaggagcaagaacgggctcttgaagttgacaataatcttcaacatgtattgcatgagcatgcaaatgagaggacagacagagaagaggaactagcagacttgttgaaagaaagagcagctctagaatgccagaatcaggaactcataaatttaaggtcagaaattgacggcatgtatgatagattggcaactgagaacgaagaggtcatggctgatcagcagactttggaaaacctgatgtctgacatgaccagcaagcatcaagctgtcaatgaagctaaatcatatcttgaagctgagaaggaagctcttactatgttaaggacttgggtggaagatgaagcaggacgtgtccatgaacgagctgagacacttgagaaggctttgagaagatggcgaatcccagaagattgatccctccaaactaactgtgctttgcataggaaaagtcttgttcaaagtttttggagctacttggttccagagcatctgccatcagatctgaaaaattctcaatggaatggaatggtcgtgccataatgttctttgagatggttcattatcctttggtgcttcttggcatcttgttgccatcttaggggccgtctgtatcccttcattttggagaaattataatctatttaataaagtaggctatttaactttaaatttaacattccataactttccaaagttcaaatataagcctatcacaaaactatgttactttagagaaattgattttatgtatttctaaacaatgttactctgtaatttataacacactctttgactcacctcctgtagtagaaatatagcaaataaatatctctccatatggtcaacagtggtacacta

SEQ ID NO: 6395 - DNA, 2069 bp, Zea Mays
gtcgatgaaattccggctcacaaagccctagcgagtagcgacctcaattcctcccgccccccccccccccccgggatgggcgtcggcccctacgctcttcgtctctccccgccgccgcggctcgatgccatgctcttcccacagttgcggcctcacctacgccgccgcgtctccgctcgggtagctgcctctggcaccacctggtctcccgccgccaatgactccgaagacagcttcggcggctggtggtttcccgagtacgagaagcatatgaaacaggggaggaggaggataggtatacaacaactcattgttgcaccattacactatgttcaagataaattgtcaacaatggagtcaacagagataatcaaggaggatgcaagtgagagggaatctgatgaaatcgaagtttctagtgcaacacatgataagaaggctgaagcaataactgacgattcaaggcaaaattacaggacagcaatcgccagccattttctattcagagttcatacagatcctgtacatgaggaggctttctctatattgaagaagcttcagataattgagaaagatgttagctccagtgatttttgtacacggagggaatttgcaagatggtttgttaagttaagctcaaagtttgagaggaaaaggatgtgcaggattgttcctaataaattaacttctgacacagtccaatgtgcctttgatgatgtaaatattgacgacccagatttcctgtatatccaatttccagatttgctatttgagaagctcacactgtaaaagtctaattgtctaatttggcgatggaaagctttaggagaatctggtatcgtatccagcaagttatcaaactccttggaaatgttgacaagtggctctccttgttccaagggaaataccttgttcctacctgatagttacctatctcgattcgatcttgtcaactggaaagtgcttgttgagcatccacgcgcattgagaatagacgaaaaggaaatactagacgccttcaaccgggcaaacctgtaactaaagcgcaagcagctgctgcactgactagtggccgaatgaaggaagcagttcatgaagaattgaataaacttgaagcagaaaaccaagcccatctttctcttatagctgaaataatggaagagttaattagtaggggagatatacaacaacaatgggagcaaaagatgaaaaaggagcaagaacgggctcttgaagttgacaataatcttcaacatgtattgcatgagcatgcaaatgagaggacagacagagaagaggaactagcagacttgttgaaagaaagagcagctctagaatgccagaatcaggaactcataaatttaaggtcagaaattgacggcatgtatgatagattggcaactgagaacgaagaggtcatggctgatcagcagactttggaaaacctgatgtctgacatgaccagcaagcatcaagctgtcaatgaagctaaatcatatcttgaagctgagaaggaagctcttactatgttaaggacttgggtggaagatgaagcaggacgtgtccatgaacgagctgagacacttgagaaggctttgagaagatggcgaatcccagaagattgatccctccaaactaactgtgctttgcataggaaaagtcttgttcaaagtttttggagctacttggttccagagcatctgccatcagatctgaaaaattctcaatggaatggaatggtcgtgccataatgttctttgagatggttcattatcctttggtgcttcttggcatcttgttgccatcttaggggccgtctgtatcccttcattttggagaaattataatctatttaataaagtaggctatttaactttaaatttaacattccataactttccaaagttcaaatataagcctatcacaaaactatgttactttagagaaattgattttatgtatttctaaacaatgttactctgtaatttataacacactctttgactcacctcctgtagtagaaatatagcaaataaatatctctccatatggtcaacagtggtacacta

SEQ ID NO: 6396 - DNA, 1278 bp, Zea Mays
agacgaaaaaccgagcccacgcgagaagaaaaaaagtggctaaaaatggaggcgtccgcggaggcggcggccgccgccgccgctgcgcgaacgttgaggtgggctggccgcgcggggcacctgggcggcgtcccgcgcgccgtcgtgttcgccgcggtgggcgcgttcgccaaggcgtgcgcctcgctgctcaacaccaccacggtccacaacgccgacgcgctcctccgcctcgtctcggcgcgggctcccgggacgccgctcctcaccgtcagcaatcacatgtccacgttagatgacccgcttatgtggggattcaagggttttccaacttcggatgcaaagcttggaaggtgggtgctgacagcagaagatatatgcttcaagaatgtagtcatgtcctacatgtttcgacttggtaacatttcatttgaagatatggattgttgccttttgatagaggactacaaggcattttaagggaaatgcataccaatcacgagagggggtgggatttatcaagaacacatgaatgaagcccttgacgtgcttagaaatggaggctggctgcatacattccctgaaggaaaaatagcccaagaagatcagccgattagaagattgaagtggggaacggccagtcttattgtccgagcacctataactccaatagttttgccaattgttcactctggtttcgaaaaggtcatgccagaaaactcgttctttggacggcgaccaccggtgccactctgcagtaagaagatagacatcattgttggagagccaatagagtttgacttgccaagcttgaagcaagaagcatcaacggtaccccatgactcatcctctgaacggaaggggtggccggccattacaccagatgggctggacgaggccgcccagagatggctttaccagaagatgtcagacaaggtccagtctgtgatggagagactgcggaaaacagttaccaaccttaagcagcgttgatcttcatctatcaggcaataccttgttgaactgctgattaggattctttaaccagcttgagttggtggatacagaaatggacaagtggtcgtcacacaagttcgtcaaagtattggtaataatagaattagagctcagattgtttcattttttagtctttttttagttattgttttgaaaggtttcttcattatttacaatcaactgttcaggttgcctgccagttttactgaggcatgaataaaaaaaggcttttgatattcagttgcaaaatcaccatccatt

SEQ ID NO: 6397 - DNA, 1531 bp, Zea Mays
tggagacccaccgaaacctaccagtgtccctacatcgtcagaggggcatagacgaaaaaccgagcccacgcgagaagaaaaaaagtggctaaaaatggaggcgtccgcggaggcggcggccgccgccgccgctgcgcgaacgttgaggtgggctggccgcgcggggcacctgggcggcgtcccgcgcgccgtcgtgttcgccgcggtgggcgcgttcgccaaggcgtgcgcctcgctgctcaacaccaccacggtccacaacgccgacgcgctcctccgcctcgtctcggcgcgggctcccgggacgccgctcctcaccgtcagcaatcacatgtccacgttagatgacccgcttatgtggggattcaagggttttccaacttcggatgcaaagcttggaaggtgggtgctgacagcagaagatatatgcttcaagaatgtagtcatgtcctacatgtttcgacttggtaacatttcatttgaagatatggattgttgccttttgatagaggactacaaggcattttaaggtgtatccagtgaagcatgcaaaataggaaaacgtctagcacaatcctattaaatccagcaaacacctgtctgttccgtacttatgaaatccagtttcacttcaactgccagcaacctttttagaaattcagtttcatggcactcaattcacccaccaagactagcgaattgcagagggttggcatagcttgtcttcttgccataatatcttcagtccctcatttgcagtattgtgtatcagataagattagctgatgcttgctaatctatgtgctgtggtactagtacaagaagcaaatgggaaatgcataccaatcacgagagggggtgggatttatcaagaacacatgaatgaagcccttgacgtgcttagaaatggaggctggctgcatacattccctgaaggaaaaatagcccaagaagatcagccgattagaagattgaagtggggaacggccagtcttattgtccgagcacctataactccaatagttttgccaattgttcactctggtttcgaaaaggtcatgccagaaaactcgttctttggacggcgaccaccggtgccactctgcagtaagaagatagacatcattgttggagagccaatagagtttgacttgccaagcttgaagcaagaagcatcaacggtaccccatgactcatcctctgaacggaaggggtggccggccattacaccagatgggctggacgaggccgcccagagatggctttaccagaagatgtcagacaaggtccagtctgtgatggagagactgcggaaaacagttaccaaccttaagcagcgttgatcttcatctatcaggcaataccttgttgaactgctgattaggattctttaaccagcttgagttggtggatacagaaatggacaagtggtcgtcacacaagttcgtcaaagtattggttgcctgccagttttactgaggcatgaataaaaaaaggcttttgatattcagttgcaaaatcaccatccatt

SEQ ID NO: 6398 - DNA, 1681 bp, Zea Mays
agacgaaaaaccgagcccacgcgagaagaaaaaaagtggctaaaaatggaggcgtccgcggaggcggcggccgccgccgccgctgcgcgaacgttgaggtgggctggccgcgcggggcacctgggcggcgtcccgcgcgccgtcgtgttcgccgcggtgggcgcgttcgccaaggcgtgcgcctcgctgctcaacaccaccacggtccacaacgccgacgcgctcctccgcctcgtctcggcgcgggctcccgggacgccgctcctcaccgtcagcaatcacatgtccacgttagatgacccgcttatgtggggattcaagggttttccaacttcggatgcaaagcttggaaggtgggtgctgacagcagaagatatatgcttcaagaatgtagtcatgtcctacatgtttcgacttggtaacatttcatttgaagatatggattgttgccttttgatagaggactacaaggcattttaaggtgtatccagtgaagcatgcaaaataggaaaacgtctagcacaatcctattaaatccagcaaacacctgtctgttccgtacttatgaaatccagtttcacttcaactgccagcaacctttttagaaattcagtttcatggcactcaattcacccaccaagactagcgaattgcagagggttggcatagcttgtcttcttgccataatatcttcagtccctcatttgcagtattgtgtatcagataagattagctgatgcttgctaatctatgtgctgtggtactagtacaagaagcaaatggtatcaaatgtagcgcctcattatattttgttcaactgatattcagatgtccaggcccttcacattatttggttattcttattttttccatttctaaggtgacaaataactgtgcgcacagggaaatgcataccaatcacgagagggggtgggatttatcaagaacacatgaatgaagcccttgacgtgcttagaaatggaggctgggaaaaatagcccaagaagatcagccgattagaagattgaagtggggaacggccagtcttattgtccgagcacctataactccaatagttttgccaattgttcactctggtttcgaaaaggtcatgccagaaaactcgttctttggacggcgaccaccggtgccactctgcagtaagaagatagacatcattgttggagagccaatagagtttgacttgccaagcttgaagcaagaagcatcaacggtaccccatgactcatcctctgaacggaaggggtggccggccattacaccagatgggctggacgaggccgcccagagatggctttaccagaagatgtcagacaaggtccagtctgtgatggagagactgcggaaaacagttaccaaccttaagcagcgttgatcttcatctatcaggcaataccttgttgaactgctgattaggattctttaaccagcttgagttggtggatacagaaatggacaagtggtcgtcacacaagttcgtcaaagtattggtaataatagaattagagctcagattgtttcattttttagtctttttttagttattgttttgaaaggtttcttcattatttacaatcaactgttcaggttgcctgccagttttactgaggcatgaataaaaaaaggcttttgatattcagttgcaaaatcaccatccatt

SEQ ID NO: 6399 - DNA, 1628 bp, Zea Mays
aactcaatctgcaaacgactggctcacaggtcacctcgcccgccgcaccaagaacttgcgcagttaacttcacagccgctcaattttacagcgcagagcaggaagcatcagctgcacgcctctcgccttgcttgccgccttcgctcctctcttccctagctcgtgctagcccttcttggcaagaaacggtttgctatggccgttcttgcgctcaggcttggtttcgtggctccgcctcatcctaggaccagcagcggcaggttcgccttctcccccccgtcctcccgcgccgtcgccaacgcgggggtagctgcaggaccctcgcgcccgatcaccgtcgacggggacccgcccaccgtcgtctccgcgcccggccgccgcattgtcgccattggcgatgcccacggtgacctctcccagacgagagccgcgctggtgctcgccggcgtcctgagcacggaatcagagggccacgtgtggacaggcggacgcacgatacttgttcaagttggtgacatccttgatcgtggtgaagatgaaattgccatactctcactgttgagctcactcaacatgcaagccaaatctcaaggcggtgctgtattccaggttaacggaaaccacgaaactatgaatgtggaaggtgatttccggtactgtgatccgggaggctttgatgagtgcatgcgcttccttgactacttggatgaatgtgatggcaactgggataacgcatttctcaactgggtaaatgtctgtgaaagacggaagaaagagtatgtagctttgcctaatggtgactggggtccttggaatttcgtcaagaagcagaaaggctttgctgcaagatcatctcttctcaagcgaggtggtccgctagctcatgaattggctcggcatcctgttgtcctcaagatcaatgactggattttttgtcatggtggccttcttcctcaccatgttgaatatgggattgagcgtatgaacagggaggtatcaatgtggatgaaatgttcaggcgaagacagtggtgacgagacagacatccccttcatagctactagaggttatgacagcgtcgtgtggagtcgaatgtactcgcaagaccctgccgaaagaacacgacgcgctttgatgctatcttctattgctgctgaacaaacgctagaagctgtaggagccaaagggatggttgtagggcacacaccacagacgcatggggtgacctgtaaatgtgatggcaaagtctggtgcgtggatgtgggcatgtcctgtggtgttctttgctcaaggccagaggtcctagaaatagtcaatgacagaccaagggttttgaaggagcggagagaattatatgatgagatggaagtgttggactatttgtaaaaccttgagaaacttatgttaccgtttgtctgaaaccagatgcaaacatagatcaaaagcccaaaggcgctttatttgccatggtagaccaaagttttagtggtgcttatttgtatcagcattcaaacattgactctagccttattaagagctgtgggcatcaggaaccgtgcaagttgtagaatgagatggagaacaaatgaatatgctgagctctcatgtaaattaggtatcttcctttc

SEQ ID NO: 6400 - DNA, 1682 bp, Zea Mays
tcacaggtcacctcgcccgccgcaccaagaacttgcgcagttaacttcacagccgctcaattttacagcgcagagcaggaagcatcagctgcacgcctctcgccttgcttgccgccttcgctcctctcttccctagctcgtgctagcccttcttggcaagaaacggtttgctatggccgttcttgcgctcaggcttggtttcgtggctccgcctcatcctaggaccagcagcggcaggttcgccttctcccccccgtcctcccgcgccgtcgccaacgcgggggtagctgcaggaccctcgcgcccgatcaccgtcgacggggacccgcccaccgtcgtctccgcgcccggccgccgcattgtcgccattggcgatgcccacggtgacctctcccagacgagagccgcgctggtgctcgccggcgtcctgagcacggaatcagagggccacgtgtggacaggcggacgcacgatacttgttcaagttggtgacatccttgatcgtggtgaagatgaaattgccatactctcactgttgagctcactcaacatgcaagccaaatctcaaggcggtgctgtattccaggttaacggaaaccacgaaactatgaatgtggaaggtgatttccggtactgtgatccgggaggctttgatgagtgcatgcgcttccttgactacttggatgaatgtgatggcaactgggataacgcatttctcaactgggtaaatgtctgtgaaagacggaagaaagagtatgtagctttgcctaatggtgactggggtccttggaatttcgtcaagaagcagaaaggctttgctgcaagatcatctcttctcaagcgaggtggtccgctagctcatgaattggctcggcatcctgttgtcctcaagatcaatgactggattttttgtcatggtggccttcttcctcaccatgttgaatatgggattgagcgtatgaacagggaggtatcaatgtggatgaaatgttcaggcgaagacagtggtgacgagacagacatccccttcatagctactagaggttatgacagcgtcgtgtggagtcgaatgtactcgcaagaccctgccgaaagaacacgacgcgctttgatgctatcttctattgctgctgaacaaacgctagaagctgtaggagccaaagggatggttgtagggcacacaccacagacgcatggggtgacctgtaaatgtgatggcaaagtctggtgcgtggatgtgggcatgtcctgtggtgttctttgctcaaggccagaggtcctagaaatagtcaatgacagaccaagggttttgaaggagcggagagaattatatgatgagatggaagtgttggactatttgtaaaaccttgagaaacttatacaatttgagtgggaatactgtacgcaacatgctacagagagagagatataatcagaaggaaggttttttcactatggttaccgtttgtctgaaaccagatgcaaacatagatcaaaagcccaaaggcgctttatttgccatggtagaccaaagttttagtggtgcttatttgtatcagcattcaaacattgactctagccttattaagagctgtgggcatcaggaaccgtgcaagttgtagaatgagatggagaacaaatgaatatgctgagctctcatgtaaattaggtatcttcctttc

SEQ ID NO: 6401 - DNA, 1941 bp, Zea Mays
ctgcaaacgactggctcacaggtcacctcgcccgccgcaccaagaacttgcgcagttaacttcacagccgctcaattttacagcgcagagcaggaagcatcagctgcacgcctctcgccttgcttgccgccttcgctcctctcttccctagctcgtgctagcccttcttggcaagaaacggtttgctatggccgttcttgcgctcaggcttggtttcgtggctccgcctcatcctaggaccagcagcggcaggttcgccttctcccccccgtcctcccgcgccgtcgccaacgcgggggtagctgcaggaccctcgcgcccgatcaccgtcgacggggacccgcccaccgtcgtctccgcgcccggccgccgcattgtcgccattggcgatgcccacggtgacctctcccagacgagagccgcgctggtgctcgccggcgtcctgagcacggaatcagagggccacgtgtggacaggcggacgcacgatacttgttcaagttggtgacatccttgatcgtggtgaagatgaaattgccatactctcactgttgagctcactcaacatgcaagccaaatctcaaggcggtgctgtattccagtttttttttgttgattgtaattgaaacaactggacaaaaaagcatgcacatgcagagttgtgggagtgattctaccgttattcctacaaactcggacgccacgaactatattcgccacggtctccatggcacacaactggtcaccatgcactccgtggactcaggcatgcacctgaccaactcaaaacgtgacagtaaagttaacggaaaccacgaaactatgaatgtggaaggtgatttccggtactgtgatccgggaggctttgatgagtgcatgcgcttccttgactacttggatgaatgtgatggcaactgggataacgcatttctcaactgggtaaatgtctgtgaaagacggaagaaagagtatgtagctttgcctaatggtgactggggtccttggaatttcgtcaagaagcagaaaggctttgctgcaagatcatctcttctcaagcgaggtggtccgctagctcatgaattggctcggcatcctgttgtcctcaagatcaatgactggattttttgtcatggtggccttcttcctcaccatgttgaatatgggattgagcgtatgaacagggaggtatcaatgtggatgaaatgttcaggcgaagacagtggtgacgagacagacatccccttcatagctactagaggttatgacagcgtcgtgtggagtcgaatgtactcgcaagaccctgccgaaagaacacgacgcgctttgatgctatcttctattgctgctgaacaaacgctagaagctgtaggagccaaagggatggttgtagggcacacaccacagacgcatggggtgacctgtaaatgtgatggcaaagtctggtgcgtggatgtgggcatgtcctgtggtgttctttgctcaaggccagaggtcctagaaatagtcaatgacagaccaagggttttgaaggagcggagagaattatatgatgagatggaagtgttggactatttgtaaaaccttgagaaacttatgtacataatagaaaacattaattgtcctgagaatcatcgtttcagacaatttgagtgggaatactgtacgcaacatgctacagagagagagatataatcagaaggaaggttttttcactatggttaccgtttgtctgaaaccagatgcaaacatagatcaaaagcccaaaggcgctttatttgccatggtagaccaaagttttagtggtgcttatttgtatcagcattcaaacattgactctagccttattaagagctgtgggcatcaggaaccgtgcaagttgtagaatgagatggagaacaaatgaatatgctgagctctcatgtaaattaggtatcttcctttc

SEQ ID NO: 6402 - DNA, 1916 bp, Zea Mays
gttttcacttatagagcatcacccctttacgtaatgcttggcgtcatgataatcaacaaatctcaccagtttgccgtccgcaccatagccgtccgcaccacggcgtcagactcagacccttcacattcccagttccctctgcgccccgtaaaccctagccgcgattcatggcccgcaagcgccgcgcgccttcgcctcctccgcctccgcaggaggagtcgtcctctgaggaatctggctccgaagagttggaggagcctcctcgcctccccgagctccgtagtcctccgcaggccgcggccaacaacgccgactcgtcggaggcggacacggactccgacaccgacgctcaagctttccagatgcgccaggtgccccgctccctcactaagcatacgcatccagttccccagccagaatccgatcccgaagaggaggagggcgagtcatcggagtcggagcatgagaaccctgtgcctgtggttcagaagaaggctgcggcggcggccgtgttgtccaaggcagagcaggaaaggaagagacccccctcggatcctgctcctaccgggaaggcaaaaaagatgaaggctgtggctacccctcttgccaaggcgaagaagggcaaggccgagctagagaagccggcgcctgaggccactccagcaggaaatgcaaagaagggcaaagctgagctagagaagccgacgtttgatgccattccagcaggaaaggcgaagaagggcaaggccaaggaggcagctcctgaggccacgccctcaggcaaggggaagaaggatggggacaaactagagaagtcagcagcgctagatccctcacattcagacagcaagtctgagaagcctgtgcgccccacatgggggaaagatgatgagatgaagattttggaggcccttgctgcgcatgtcaagcgtgagggtgagctgccaaagactgatttacttcttgctagtgttcgtgaccacctcgtcaggaagaactgcacctactcagatatctatgagaaggtgcgaaggctaaaggaacggtacaagaaagcagcgagcacgggcattgtgccaagtaaagaagatgggctccagatgtataatctctcagaagcaatctggggagagaaggcaatggaggctgctgctgccgttacgtctcaaaagggtggtgctgttataaagggtaagaagggccaggctaacaaagagaagatgcttgaaaatgcaaagagtgacgtgacaaaggagtctgcccctagtactgccaatcaaagtggtgattctcagaaagcaagtaagaaggggcaagccaggttgtcagaggaggctaccaccactgcctccccaagtaagagtaagaagcaggaaagtcacaatggggaattaaacaaagatgatggtaatttggctaagggaaagaaggggaaaactgacaaagggaagatggacatagatatggatcgtctgacaccaaaggaacccgtaaatgcaaatcagaatggtggcattgtgattaggagtaaggaaggagaaataaatgatgagggaacagaaggagatgctaatgtgcaaggtgtgcacagacgttttggtgagctccagaagttgtattccaaccttgctgtttatgtggaggagattgagacccatcatccgtgcggggaaactctgaaaagagtatttgagttcattgctgatgagaaggcagaagatctggaatccaagatcaagaagctaagagtagcacaggcgaaggcggaggtccgtcaagggaacataaaaaaggagatgggcggatagaagatttgatcaacaaaaggtgatgtgtgttgaatttatgggaaagatgcgagcagtgagcatattttgcaatttcatggtgttgtgcacgctgaaatggactgaagg

SEQ ID NO: 6403 - DNA, 3072 bp, Zea Mays
ctatagacttttctgagttttctcgttgagcaaagtagaaatgtacaagtttctctactccgaacgcatttcatggcaaaaaatcacaaatcaaaagcatactatcagcatagaggcatggttcctggggttcttgattcgaaatctccatctcatcgccatgcacacttccttctgtgcagcatcttcatattaatctcctccaacacagcaacgctatcatcagcgcaggccagcaataggtcagaggatgaccggcaagccctcctttgcttcaagtctggtctctccgggaactctgctggtgtcctaggatcatggagcaacgactcactgaacttctgcaaatgggaaggggtcacctgcagcacggccatcccaatccgcgtggcatccttgaagctaaggtcagtgcaactcagaggaaaactatcaagttgcgtagcaaatcttacttccctagtgcagatggatctctcaaacaattcgatttctggggagatacctgatgaaataggttcactacccctacttcagactctaatcctctcgaagaacctcctatcaggaactataccacctgagataggaaaacttgtgagtctcacaaaacttgccatggaccaaaacatgctttcaggaatcattccctggactattgggaatttatcaaatttggttgtcctggcactgtccacaaacagcttgtcaggtgaaatcccagccagaattggctatctccctcaactgatccagctttacctggatgacaatacgttatctggacgcataccagcacaactagtgcagtgcacaaggttggctatgttaaatttatcagtcaatagccttaatggatccataccaagtgaaatcctcagtatttcttcgctttctttggggttggacttatcaaacaacaatcttataggaacaataccatcacagattggaaaactgatcaatcttggcttactgaatgtttccagcaacaagttatctggtgaaataccatctgaacttgggcagtgtgttttattgttatcccttcagatggaaggcaacatgctcgatggggttattccacagtctctcaatacactgaagggcatacaacacatggatctctctgaaaacatcttatctggtcaaattccagatttcttcgagaacttcagtaccttagattatcttaatctatcatacaacagactagaaggaccaattccaaccagtggtatcttcacaaattctaatgcagtcatgttagaagggaagaataacccagccatctgaaagctacagagagacaatgaagaaggtgtcttatggagacattcttaaagctaccaattggttttctccagtcaacaggatcagctcaagtcatacagcatcagtctacataggtaggtttcagtttgatacagaccttgttgccatcaaggtatttcatcttgacgagcaaggttcgctcaatagctttttggcagagtgtgaagtgctaaaacatacccgccatcgcaatctcattcaagcaattactttgtgctcgacagttgattttgagaacaatgaatttaaagctctagtatacgaattcatggcaaatggtagcttggacatgtggatacacccaaggcaagaccaacgtagccctacgagggtgttaagtttaggtcaaaggattagtattgttgcagatgtagcttctgctcttgattatatgcacaaccaattgacacctccattgattcactgtgatttgaagcctagcaatgttttgttggattatgacatgacctcgcgcattggggattttgggtcagcaaaatttctctcttcaagtcttaatagtaccccagaagggttggttggagcctcaggaaccattggatatatcgcacctgaatatgggatgggatgcaaaatctcaaccggtggtgatgtttatggttttggggtattattgctagaaatgctcacagcaaagcgaccaactgacacactgtttggtaatgacctcagccttcataagtatgtagacttagcattcccaaacaaaattaatgagattttagatcccaaaatgccacatgaggaggatgttgtttctaccctttgcatgcaaagatatatcataccgttggttgaaattggccttatgtgttccatggaatcaccaaatggtagaccaggaatgcgagatgtttatgcaaaacttgaggccatcaaagaggcatttgtcgaaaccttttgatagtggcagtggcaatgcaattatgcagatggaattttggcaaagaacaataatttaaggagactggagggatgtatcatggacagggagaaggaagatggctctctaattaggatatatattttgcatgcatatatggtcaaaagtcggaaccattaaccctggatgggtgactacttagctcatcaaacatctaagcatggagacatgtaatacagtgaaatatatattcaagtgatattttttctagaagttagtgatgacgatatatatagcagccttccaaggcaagcagatctctcttaactatattatatatttattctcaggtattcgtaatttttgcaaaatcgcacagtaatggtttttgtaaccaagtaaacagtaaaagccattttacctggccttgtgctttgcaataatcaggtcatcccagtgtgtgcatcaaaatacacattgcaatatccaacccaatgtacagcataagaagcttgttcaccctttcttcagtggcatgaaacatcataaacacctgaaatgcagcgacctgtcaaatccgctgcattttggagttatataatgaacatgttgctgaacaagcaaacagaggaggctgataagctcggcctgagaggcggcgggtggtggccacgagagcaaagtgtggttgctttgcctagcagctttgactgcagtcgccagaatgcgccccgcgcctggaacggtggccggcgggtttgggaggcaccacgcttggcttggtcggccacggattggagtggccttttcccttttgcgaccgacactttgcg

SEQ ID NO: 6404 - DNA, 5212 bp, Zea Mays
taacaccagcaggggaggttataagggctagctgatgtccctgagcaaccgaggcagccctttcgatcatatgagaccaagatgttttctggtcccaaaaccatgaaggcttcggcaatcttgcctaccacagaccctttacttcaaaatacagggaaacggaaatccttcattggctcttctcatcttggctcacaggcagtacatgaataccagtttcttcctgagcagccaagtgatacatatgagagggcaagccagtcacacttctatgattcttcagcagaagcgtcaaacttgagggtagctccgctgtctacaggatcacgctttctccatggagttgagcaggcacctagctatacatttcacagtcaatcatctggttctagccatttgactcaacgtggcagtggcaggtcacctattgcatcggcattgacagatcatgagggggctttgtcaaatattaatgctagcacaactccaatccacggccaacttggcatccctcaagttgccggattcgaaagccccctggcatcccctgaaagattgggttatcatgatgaagatacatatcacatggacagaaagcgcaagcataatgaggaagctaagattgctagggaggttgaggctcatgaaaagagaatcagaaaggagcttgagaagcaagatctgctgaacagaaagagagaagaacaaatgcggagagaaatggagagacatgatcgtgagagacgtaaggaagaggagaggttgatgcgtgaaaggcagagggaagaagagaaattccaaagggaacaaagacgcgaacacaagcgcatggagaagtttatgcagaaacaatctatacgagctgaaaaactgagacaaagagaggagcttcgacgagagaaagaagctgcgaggcagaaggctgctaatgagagggctacagctcgtagaattgcgcgagagagtatggaactgatggaagatgagcgcttggaactattagagttggcctctcgtagtaaagggctgccctcaatggtttctcttgatagtgacacattacagcagcttgattcattcagaggaatgctggggaagttccctcctgaaactgtgagactgaaggtgcctttttcaataaaaccatgggcagcttccgaggatattattggaaaccttttgatggcttggaagttttttgttaccttcggtgatgttcttgggcttccgtcatttacgttggatgaatttgtgcaggctcttcatgattatgattcaaggcttttaggtgaattgcatgtttctctgctgaaatctgttataaaagatattgaggatgttgcccggactccttcagttgctttaggtgtaaatcagagcagttctgctaatcctggaggtggtcacccacaaattgttgaaggggcctatgcttggggcatcaacatactcaactggcagagacacttgaactttcttacatggcctgaaatattgcgccaatttggtttatgtgctggttttgggcctcagttaaagaaaagtgatgctgaaattgtccatcaccgcgatgataacgagggtcgtaatggtgtagatgtcatttccattctgcgaaatggttcagccgctgtgaaggctgctgctttaatgaaagaaagagggtatactaatcgtcgtaggtctcgacaccgtctgacacctggaacagtaaagtttgctgctttccatgtactgtcacttgaagggagcaaaggtctcacaatattggaagttgcagaaaagatccagaaatctggacttagagaccttacaacaagtaagacaccagaggcatctatatctgcggcattgtcgagagacactaagctttttgaaagaacggcaccttcgacatattgtgttaaaactccttacagaaaggacccagatgattctgaggctgtgttggcagcggcacgtgaaaaaatcagggcgtttcagaatgcgcttccggagtgtgaagaagtcgagaaggatgtggatgaggctgagagggatgatgattctgaatgtgatgatgccgatgatgatgctgatggtgatgatgtgaatattgaagacaaggatgccaagtcgccccttgttggagctcaatatggtgcacaaattacagtagttggtgacataaagaaagaatcaaacatcgtgatgaacacatcagtgccaccaagcattcagattaaatctagtgcaagtgtaccatttcatactttagacagtaaagcaagtagttcaactgatccagaggttggagatgatgctaaagacattgagatagacgaaagtaatcaaggggagtcctgggtacaggggctagctgagggtgactactgtgatcttagtgtagacgaacgcctcaatgctttggttgcacttattgccgttgctaacgagggaaattctatccgtgcaattctggaggaacgcctagaagcagcgagtgctttgaaaaaacaattgtgggctgaggcacaacttgataagaggcgtataagggatgactttactagtaagatgcagtatgattcttatgtgagtatgaaggttgatacagatcaagaaaataatgctgctgaaattacccttacaccagtgcatgaccctattaaaaacaataacggaaatgccaatttgatgaacaatggtttgcttgttgataagcagaaccagcttactactggtgatgtatatcatcagcggaatggtgcaagccgagaatcgagtactaacgcagaaagcttgtctgttcagcaatatgcttcatctgagaaaactcgatctcagttgaaatccttcataggtcacaaggcagaacagctttatgtgtacaggtctctaccacttggacaagaccggagacggaaccggtattggcagttctctgcatcttcatcatcctatgaccctggttcgggaagaatcttttttgaatctagagatggatactggagggtcattgatacatcagaggcatttgaagctttggtagcttcccttgatactcgtggcatccgcgagtcacatttgcactcaattttgcaaagtatcgagccaaccttcaaggaagctgttgagaggaaaaggtgtgctaatttagaacacccaactggacggacttcggaaaatggaagtaatgaaagtccaaattgcaacaatgaatttggaagtccatgcagtaccctttctggtgttgcttctgataatcttatggcacattcagatattttcaagatagaggttgggcgcaatgaagctgagaagaattctatctcgaaaagggcttccgtgtttctgaaatggatctggagagagtgctacagtcaccaatctacatacgccatgagatatggaaagaagcggtgtcctgagttgattcactcttgtgattattgctaccagatatacttagctgaagaaaggcactgttcttgccacaaaacattcaaacacattcacaatttcttggaacactcatcacaatgtgaagaaaaacaaagaacagatcccaattggaagatgcaaactgtggacctttctgtacccgtaggattgagattgctaaggctgctcttagctaccattgaggccttagtaccggcagaagctcttctacctttttggacggatgggtatcggaaatcttggggtgcgaagttgtattctgcatcatctgccgaagaagtcttgcagatgcttagtgtgctggaaagtgcaataaagcgagactacttatcatctaactttgaaacgacaactgagttgcttaattcaagcacacaagattttgctactcagaattcggctggaggttctggatctgccactgcacttccatgggttcctgacactactgctgctgtagccttgagattgttagacttggatgcttccatctcatacacccttcatccaaagttgggttcaaataaggagcaagaatctggagatttcatgaaacttccaccgagatatccttctatgaataagggcaaacaagaaatagaacagttcaggcctattggttttgatcaacaggatggaacgttgctacctaacagcaatggtcgtagaggtcggggaaggggaggtagaggaggcagcaggggaggtagatctcgtggtcatggtggtagggttcccagaggtattggcagctcttccaggattcagttcagggatgacaatagtatgctctatgggagagccccacgaaagaatgcacgtggtggccgcggccgtggacgtggacgtggacgtggacttcgaactgttagacctcggcaaccatccgagctcagtgccagatcaattccaaaggcaaacctattgggcagttttagcatgttaagtaagacaaatcacactggcactacgcattctcccgagagctcaggtgcagaagagtgggcctttgagaggagggaatatgtgaaggatgatgagaacaatttggtctctcaatccgatgagtctgaggaaaatgtcgaacctatgaatgaggaatatggtgagcatatttcaggctatccaagagacaattccgactccagacccgtacagatgatgggtgatgggagcgacgataatgatgaggatgctgaaggagatgagggtgaggaagatggagaggactatgaagctgaagatcctggtgatgaggatgatgacgttgagatggatggggatgatgatgtcgaggtggatgaggatgatgacattgagatggatggggatgatgacattgaagatgatgatgacgacgacggtggagatggagcagccaacggagatgaggatggaggtggtacatcatcatattcttcagagtatagtgaatgatgagtgattgaagttgtgcaggcttgtggtaaatgatgtaacagaggctttggtgggctcaccaacgctaatgctgacttgaaaaactatttaggaggttgccagttctaaactgtcttgtgtggcttgttattagatagaagccactcaacattagaagatcggccttgtgtgtatacatacataccaattatcaaaagttgaaaatgagggtcgatcagctgtctgttttatgttcagctacttttttcattgttatatattgggagcgttctctttaagacggttgacatatttctaaactcactctcaattttgattttgtagcaag

SEQ ID NO: 6405 - DNA, 3935 bp, Zea Mays
tttgctctgttatagagtagtaaaaacttcacctttggatcatttacctcactctctacaactacaagtctacaaggtaatgctcatgtaaaaaattctctttgaagggcttaacgaagagttttacagggataggcatgcaaatcctaaagctatatccgcttaaaaaaatctaggaatccgtaaacagtgtacaggtcaaaacaaaagaaagaaaaaaaactgcacacgacgtcaatcactctcactgcctctttccaccctgctgtagactgccctttctaccgttatatacccagcacaggatgtcgcgaccgatcggtttcccgagctgcagaggaattcttgcgtggatgctcgtctcttgcctagttgtttgtttcttgcagaggaattttttcctgaacttgtccccgccgtcttgaaggtttcttgtttgggagcagggcggaggcgctcctttccttcttggccgacgatggtatggactgggcagcggcgcgcgcgagcgatttttgcggcaaaccccctgcgagaaacatcgtccgcagaacacctcactttcactttttgtactcttccgtctctgccctcgcgttattgcctcgtctcgctcgcctggctggctcgtgccttgccttgctcagcgtacgcgaacgcagcgagaaggaggagcaaggaaatagagagagagagaaaaaaaaatcaagtcatccccctttcctctaagctcgttccatggagaactcttctcacaagcggacgcgggaggcggccgacctcgccgccggaggctgtggagaggagggctcgccgcaggccgacgccaagaggctgcggccgcaggacctgctcgacatgctggaggacgacaccgacacggccgcggtcggcgacctaccgtcggtcatgcggagcctgtaggaggagatagctagcttcgacgaggccgcggagacgccggcgccgacatcggggcagcagccagagctgggcttcctactcgaggcctcggacgatgagctggggttgccgccgacgggcgccgcctcctcttcgtcggaggaggctgggcgcgcgggggcaccggagcccgcgctcgacggccagatctggggcttggagggcggaggtgctcctttccttcttggccggcggcggcatggactgggcagcggctttcgggtctccgtcgtggagcgcggtggcgacggaccctggcccgaccatgctgtccttcgcaggcccgtcctcctccgccaccgacgccgaggtgcgactccaggatttcaccgtgggtcgcatggaagcggaggcgacggtcgcgagcatcacgcacggatgggggcaggcgatagcacggcatgcagacgcccaagtccagcaatgctggggcatcacgagcgggcgggggtaccgcggcgtgcgtcacggggacggggcgggcgcacgggcgggcatcgcgatgacgggtgcgggagcaggcgggggcacgcgaatcacgggagtggagccacggtggtggtggacgccctcgttagtgtcttatagagtagtagagatagagattgtaggcgtccacaattcccagtggcgcacggttctgctgtccctccatcctcccgcgctccctccgtgctacatcaacgcccgcaggttctgcctctccctgtcactacgccgcctgcccccgccgcacccctccccgttactaggtgcggcgccgcgccgcgccgcctcctcggcctcgcctccgcgctcgccgacgactcgtcctgctccgacctcctcccgctgttcccagtccccgccggctacgccgcctctgacgccgcggatccccgatgccgagagctgcccgtcgcccgctgccgtcagcagcgtcttcagtaagttccgcgacccggcgccatctcctgtgacccctgacgacgctgcggcggcgcctgacgagcccagggatcttggcttcgacgatgacgacagtttcgacgccgattctattctgtgcggcgtccaccagagcgcggccgagggcatcgatggcatcatggcttctggcaggatcagaatatcatcatcaatcaagcgctgaagcggcatagtgtcgatcctgaatggtggatgtgccctgccatacctgtgaaagacattaccccggcaccaccgccttcagtggcaatggcgaaggaagactaagaagaagtcactggggacaatatacgaggaggggactcctgagcctgccaatggcgacgacgatggagctttggcactgccagagacaggattggggcttagcttgaatactgatggggtgctcaaggcgtggtgtggcagaggctctgcgtttgctgatggcaatgggcctgacttgccattgtcccctgctcatgtggtagtaagtatttccagcttatctaaagatataaaagatcttacatttccagttaaaaattaaagatggctagagctcttggaaccctgagtagtacctgctattagttcatatcgtctggtaagtagaatctatttcacttcagtagaagtacagatcgtctgttgttttatatcagcagtgatcagaaaaatcttggcatgcattgctttgtttcagtcccttcgcatttcttgtcaatggaagatttctcccagaagaaaatctgtgtctgaaatttgctaatatgaaatagtacagtatgcccaccagtacttgactttactggctcaatgggccaggcagaaggaaattccaattggttgttttctttgagttgaatcattataacaaacttagccctcattatgttgtatctgcagtttttgaattcaattgaagtaaaaggaaatatcatagtttggtcctttcgcgaattttttttgtccaattttttgtccttgtaggtttttccgttgcattagaaaacactgtaggctgcttccttgcgttgcctctccgtttgcaggaacaagagaccagtttttatgtcatagacatgaactactttcctggtatgtggctgctttcttgcgttgtctctccgtttgcagggaagggtgctcccagcccccgtcatgccccttggcccctcccaaccctcgtcgtcataacggagggtgctgcgacaagccagcggatgagcgtggcgatcccgctggagcagtccatcacgccggtgctttaggactttatgaatctcaacatatgctatctaccagtgtattactgtggagcctcgtcgtcgactcccacgtccatgagaccacctaggagttgctcgtgtacagctagctctaccaattcgagggatacataagtgggagtactgagggaggtgccgggggagaaaatttttctcagtttggtgctgatttatcaagacgaatgacttattgccacagagctaaggatgacagtagagaaagttggggcagatttccggcttcaatttatgtccttatcagcactacaacagcaacgacgagcacagtagcaaagcagtccgagccttgtggaggagagcctccacaagaagtgcctcgacgggttccctacctccgccgccggtatcgtgtcattgatgggccacttcatcgctatctagcacaaggtgcaacacccccttccctcgctccttcgctcttcctggctccaatctgatacaccctctacgttagggtatgagtgaccgagtgacacttgatctgtcgactttaaccggggcagtcgacaaagcacgcgcctggatgccctactatatgtattgagtacataggattattagtacacttcctttgcactgtcacagcgatctagatctccacgaactaaatgtggatcctctctcttggcgtgcacaccgatcttttcattcacactgcactcaccgtcatggcatccaccaaggacttctcgttcgtctctgccttcaggt

SEQ ID NO: 6406 - DNA, 806 bp, Zea Mays
attttaaagacgggaaatgtattttactcatatagataatcttatataaaaataggtttatatatcctggtgctcttgccatggctggtgcatcgctcctctccccatcctgcacgctcctccgcctgattcccagcgcgtcgcacttcaagagattcgatcgggttcgccggttcgcgcccgccgccatggcgacttcctcaggaccaaaggaggcgccagcgaataaccctgggctccagaccgagatgttacgtgtgaaggacccaaaagtgagccttgacttctactcacgtgtgatgggcatgtcgttgctgaaaaggttggattttgaagagatgaaattcagtttgtattttctaggttacgaggatgtgaccttagcccctgatgatcatatcaagcggactgaatggacttttaggcaaaaagctactcttgagctcacccacaactggggcacggaaaatgaccctgaattcaaaggttaccataatgggaactcagaccctcgtggttttggtcatataggagtaactgtggatgatgtccacaaggcatgtgaacgctttgaacgtcttggggttgagtttgtgaagaaacctgatgatggaaaaatcaaaggcatcgctttcatcaaagatcctgatggttactggatcgaaatatttgaccagacgattgggacggtaacttcttcagcatcatgatgaacagtagtggttccttatatgagcgagagacacttcatcgagaccaatttcatttgatctttatgacaagaacttttcaccaatagattgaca

SEQ ID NO: 6407 - DNA, 3914 bp, Zea Mays
gttcgctgtctgagtcgacacgcgaggacaaaagaaaagatgtcaatggcatcaaaattttaccagcatgctccaaagaaattttgccagatcatgaggtttctttcacattgagcctctatgagagaggttatctcatttcaaagtcagcacccatggatcctagtcagacctcaattcaggacggcaaaacactgcatccctatgatagagcatcagaaaagttgttctctgctatcgaagctgggaggctacctggcgatatttttgatgagataccaagcaagtactataatggatcagttgtttgtgagatacatgactaccgaaagcatgtgtccaaccaagcgcctgcatcatctgctgagctaggatcaccaattgtgaataaagtacgactgcgaatgacctttgaaaatgttgtaaaggacattacccttctatctgatgattcctggagttacagggattttatggaagctgaggcttgtattttgagagctctacaaccggaactttgcttagaccccacacctaaactggatcgacttcatcaggatcctgttccgcataagggaaaaagaggaggctgaggcaaaatcctgaagttgtcacatccagtcacatgtctcatggtaaaaaggtttgcattgataggttacctgaaagtgccaaagctgatgagatgggcatcactagcagtaatgcagctcagcaggttggtggtaacattaccatccaaaatatgtcagtctcaggtggttctcagacacttagaccaaataattcttcacaagatgctgccagaacgcttttgcctcaatctggtctacagcaaaccttgtgttattctgctgctggtaatgatcatatggcaggaccacctgccaatttttctggaaccagttcatgcatttcatctcatcagagcctgattggttacagtgactctgtggctgccaacagccttctatctgtgaagagggaaatgcaggatgcctcgcttcaagatcctaagagaataaagcgaactggtggtattgatgatgtacagcagcagcagataaggcctcaaccccttggtgggcaggagatgcaatggaagaaccatcaactgcatccacaattagatgttaaggggatgcagtatgcatcttcactgagtggtcagagatatccttcttcgatgatgaacaacatgcaagatccaggatcttccttatattttagtcatcagcaaaatttgagatacgatgctaagcaagagcagatggatggttctgataagtcaaaagacaccttgcagtctatggcacctgaaacttccatgctggatcagcagcaatcccaatctcaacatttaccacaacaatcagtggcaagaaataatgttccaaacatgggacagtggcaaaatactcggttcgcagctgagaaggacttcaaaaaagaagacataattcagagaagaaagttagcacctagctctcgtgcccctactgggcctgtgattcagtctccagtgtcctcgaaatctggagagttatcaggcagttcaatgggtggccagtttggttctgctgtgacatcagctgtaacaggggtacagaaagataaatttgctgcaaattccggtactgcagttggatttccttctgtagcttccagtcctagtgattccatgcaccgaatacaacagcctgctgttgcttcctcaaagaggaaaacaaattctgtccccaaaactcaaccgccttttctttggaagtctgtcatgggagactttttaaggaagttttgggttgcacggtaccagcttttcaataagaagaagtttgataaaatatctcaaaagaaaaccattatcaatcgaaaccaaaatgtagctggttgtctcaacagttgtttccattctgaggattatatagataccacaagacctctttgtaattctatgattagtggaactataaacacatgcaagggtagggtaataaactttgtgagcacaaaagacatgtaccaaggtcattcaaggccattcccggttgattttaacgaactgtctgatgaaactgtaagaatgcaatatggagatataaaagattttgatgatccaaattcatatggttgtgtattcatattaccgacaaagcactatgctgacttgtttgcggggcagcttatttcccttatgttgcaagatggacattctaaagctgacgatgaagttgtgcgtagcaccccttttgctaacatcagtacaccctttggacctttaccaaacaacgtagtgagtgatgtaaagcaagagggaggtgtaagccaacaacttaatgccgcagcccatgcaaatgtggcacctggaacacaaatgcaacagcttcctgtcaataggatgcttccatctgcaaatggcaaccagattctagcaatgcagcaaggttatatgcaaggggcagccatgcctccaaggagccagcatcttgaccaaaatttggttcagcagccgcagcaccaacagccacaacagcaaccactgcagcaaaatgctcaagcccaggtgcagcaaccatcatctcttccactgaaccagatgcaaagacctcaggttctgcctacgagcccattatctcagatgttggggcctggctcaaatctcccaatgggctcaagtcagataggtaagaataaggctcctcccacatctttgcagcttcaaatgctacaggcacaaccccaacaacctatgtctaggaaagtgatgatggggcttggctcagccatgaacatgggcaatatggttaacaatgttgttggtcttggtggcctcggaaatgttatgggaatgggcaacgtgcggccaatatcttcccccatggcatcgatgtcaggcttaggtaacaattccaatccaatgaacatgggaatggcatccaatcttgctgcagctggacttcggccaggcatgaaccctgctgctattgccaaggtgcgtatggggttggcacagcaaagggcagcaggcatgtaccctggaatggttggaatgcctggaagcagctcatcaatccttcctagttcagctggcttgtctatgatgggccagccgctaaacagaggcaaccttggccccctccagagggccatgatgtcgtctatgggccctccaaaaatgccaggaggtaactttcagctgaatgctcaacagcaaatacacctccagcatcagttgcagcagctccaacagaacccacagcagcagctccaacagctacagcaacagcaacaaatacaacaactgcagcagcagcagcagcagcagctccaacaacagcaactgcagcagcaacaacaaatgggatctccgttaggccctcctccaagcccgcagctgagctccggtcaacagcatagctaactccccgatggagcagctgcaaggcgccattaagggaggtcctggtagtagtaaccggagtccacttcttgcctatggaaggtgtaaacactgaccaagatcactctgttctcttgtttgctgtggtaaatgaggttaaattaggtgtgttataagttataggccatagaggacagctttaaggaccagctttatgcttggatttttatgctgtacattgtagttagtaggaatggtgtgttggagctcggtaatcagttctatgcaagcattattcaattggacagttttctactcttgtagcttcatgtttaaatttaaattaaattcatcaaaattgtggacttgttacgtaaccattgtggttaccgataagtatcttcatttgttcgccaacaattttgtaacgttgtcaaattcaattttggctgtgtatatgggtctgactggatatcggcattagcctatatccaggctgtgtgtttggttgcct

SEQ ID NO: 6408 - DNA, 1667 bp, Zea Mays
attaaccgtacacgcggacgggcgcggggcgccgtaggcccctagctgcggtgatccgccgctctcgcagcaccgtcgcgctcgcctccgcccgcccgctcgtcgagtggacgcgcgctgcaccgcgactccagtcatggctagtgttaccgattctttcgtggcggatcttgatgagctattggagtataggacagagaagactatcctggagatgaaaacgcagagacagaaaacttggaagatgatgctaatgatagtgtccctgacctgaaatctcttgatcttgatagtgtctaaaaacatcagaaggcacaatggtataaagacataatgaagacatgatcacaatggcagaaacgacaactggtggggagcctctttctgaagataatttagtaaatactattgaagcatccgacagagctcttaaccttgatgccgacaaagaagatgatacttgaatttttgaagggcagaatgggatacgttgcacgaaaccttgccgccattgttggcagtgctgttgcctcgaaaccgagtcgtgctgccgtgttggtggtttgggagcactggccaaaatgcccgcttgtaatgtgctgcactgctgcttctcggtgcaaaaaagacaaatctgtctggattctctactgcgtcagtgcagtctcgtattggttatctagaacaaactgaagtattatttgaaagcacacctccatctttaagatttcagtctagtagacttatagctgcaaagtcaacactagcaacaaggatcgattgtataaggctatcttcagcagtttactcattctcatctcttattttaacctacactctataaacagtgcattttacagtacaaaacagtgttttacatgttcatatgcacgatctgctggctatagcctaagagatgatccaactagaacggttgtgcagaacttgttagaagaaattagtaagaagattgaaaactggcaacaactaccacctgcaaggcttccaaagccaattccaattccagactttatgcctaaaaagaaacgaggggttgttggctccggaaaatgaaggaaagataatttatttgaaactttctcatgtccaaattgattaaaactattgtacttcatgtaaaagattgctatataatgcccattcacatgtctcatttgcattttgcaatttgttatattactcgagttccctggttgcattacctgtttggctgtttgtcttagttgcattttgcaacttactttgttatatcactctgagtgacccttcaatttcctcttacctttttgtatttgggaactcaattgtgaagatatgcacagaccaacacgatgaagcttgtgaatcggatgaagtttagcatgccagaggagagcacattgggtgatggcttagggaaaggttacggcttgcttgggcaggctggaagcgggaagctacgtgtgtcagctggtcaaagcaaactttctactaaaattgctaaaatgggcgaagctacttggttagcggtggatgcacatacatcccttcaaatccaaaattcagttataataatcaaaatttcaccatataagcatctctcatatcctattcttatgcacccacaagagagttgcaccccctttatatccataactataacaaaa

SEQ ID NO: 6409 - DNA, 4446 bp, Zea Mays
cagttggggagttttctgccttttcttctccccttctctgttttccttcaccgcgccaccgggggcgaatcgcggacgccgctcacctcccccatctcctccccaccacgtcgcaaacccatcgtcaccatcaccgcctccggccgcggctcccatcctcgcgtggccgtcgcgatccactacgagcttctctcgtccggtcttccgagtctcggctacctgctcctacgtcgaatcctcgggccctgctgtcgccaccgccgaatcctgctgcactcgccgcagccggggaacgcggacggcctgcgggagcttggcgcctcctccttcgcgttgcgtcgtcacgaggtggagaggaaaatggcaaactggaattcgatgctgtagagtagattgtcctttacctactctaagggcaaaaccaacacatgacaggaagagctatgttgtcgttttcttcccacgaacaaaaacttattcttgggtagacatgctacttgttcttccaatagaggaatgtcctttgccacttgtaaatggaactcatcgtaaatggagaaagctggtgaaggatttgaacattcctcgacgattcaacatgcaaaatcttgccgtttttatgataaatttaattgatgagcttcatatcgaggaacttcgacagtcccttcatgggaacaagcttaaggaattgaggaatgcatcagtgcagcctgaattgatccctgagtggaacagatggaaacaagaattgataaaacagtacttttcattgcatcctgctggtaatgttggaaactttgagaaaaacaattgttatgatgatccagctttagatcaacaaggtagtagaaaacgtccaaaacttgaggtccgaagaggagagatacaaatttcacacatgggtgaggctgactacaggactccaaccgaagacccaaaccaaaataaccttcctggtaactctgtcatgcatgaaaatgtaggggcattaggatcaacagatcaaaataattctgtcacgttgcctggaagttttggcaccaacgaaaacacaatatccagtagtgccaatgcagctttacagaatgctagacttgatttagattcattcaagagttctcggcagtgttctgcacacattgaagcaaaggggaggcaatgtggtaggtgggcaaatgatggtgatatttactgttgtgtgcatcaaagtatgcattttcttgaccattcttcaagggaggacaaggcacttaccattgaagctccgttgtgcagtggtatgactaacatgggtagaaaatgcaagcatcgagctcagtatggttctactttttgtaaaaagcaccggctacagacaaacttggatgcaatgcacccagaaaatttgttggatccatctgaggtactccatatgggtgaagaacctccgaataagtgggtggaagaaatttctaagtcgcaagcaatgtatagcatagacttggaaacagacaagaaagtccaggatgctgtaaaagtgaaattgatgacaattgtgtctatagagaactctggtgaaaaaggcgcaatggagaaagctgatatgtgtgtggcatcaacttctataacaaatactgatgatacttctctttgtattggaattcactctcatgatagtattgttgaatgccaggattatgccatgcaacatactctttattgtgagaagcaccttccaaggttccttaaacgtgccaggaatggtaagagtcgactcgtttctaaagatatcttcgtcaatctactgaagggatgcacatcaagaaaagataagatatgtctgcaccaagcatgtgaatttctttattggttcttgagaaacaacctttctcatcaacacactagtcttgctagtgaacatatgccccagatattggctgaagtgtctaaaaatccagatgttggagagtttttgttaaagttgatatctactgagagagagaaactagcaaatatctggggctttgatacaaatagatctaagcaaatatattctgaaaacaaagaagggtctctagtgttgcataaagagggaactaatctttcatctggtccgaagtgcaaaatctgtgctcaccagttctctgatgatgaagctcttggattacattggacaactgtccacaaaaaggaagcccggtggctgtttagagaagggacaaatggtctgtccctttatgatagccacaacattgaggatgccaatggctctcagaagttcatctgcagattatgtgggctcaaatttgatcttcagccagatcttggccgccaccataaagtcgctcatatggactcagatgttgttggccacagctcactgggccgtgggaagtatcagcttaaccgtggccgacactactattccgctttcaagaaaagtttacgaccaacaagtacattaaagaagaggagtagctctggaatcgagaaaaactttaagtttcagagttctgccctaacatctcaaataattcaatctgaaacatccagctttggtaagttacaggattttcagtgctcagatgttgcgcaaacattattttccaagattcaaaagacaagaccccatccaagcaaccttgatattttatcggttgcccgcactgtatgctgcaagacaagtcttgctgctgcattggaagttaaatatggatctttacctgagaacatatttgtgaaagctgcaaagctatgcagtgacaatggcatccaaattgattggcatcaagaggtatttatatgccctaaaggttgcaaatctagatataattcaaatgctctgcttcctatgcaactcacggcagttgattttcctgaagctccttctgttgatcctcttaatgatgatgaaatgtgggcaatggaagaataccattatgttcttgattcaaagcactttggatggaagcctaaaaatgagagtgtcgttctctatgaagacataagctttggcagggagaaagttccaattgtctgtgtcattgatatggacgcaaaagattctttaggcatgaagcctgaagaacttttgtcacatggcagttctgtgccttggcaaggtttccactatatcacaaagcgtttgatggattcatctcttattaattcagagaactctatgcctgggtgcgcatgttctcatcctgaatgttctcctgagaaatgtggtcacgtgagtctcttcgatggtgtctatgctagtctggtggatatcaatggaacaccaatacatggcagatttgcatatgatgaaaatagtaaaattattttacaggaagggtatccaatatatgagtgcaattcatcatgtacttgtgactcatcctgccggaataaagtattgcagaaaggactgcttgttaagttggaactcttcagaactgagaataagggttgggctattagagctgccgaacctattccacagggtacctttgtctgcgagtatattggtgaagttgtgaaggccgacaagaccatgaaaaatgcagaaagtgtgtcatcaaagagtgggtgcaattacttgtttgacattgcttctcagattgatagggaaagacttcggactgtaggggctattgaatacttgattgatgccacaagatctggaaatgtgtcccgctatatcaatcacagttgttccccaaatctcagcacccgattggttttggtagagagcaaagattgccagcttgctcacattggcttgtttgctaatcaagacattgccgtaggagaagaacttgcctatgattaccgacaaaagcttgtagcaggcgatggctgcttctgccattgtgggggtaccaattgccgaggccgtgtctattgacttcgcaggaagacactaactgttcaacgcttggttgcagaactcgaggtttctacagctgtgtaggctgctgagcgatttagcactgcaattttccagagctcgagtgcaggactaggatcccattcttcatgctacaaatagggattgtgatataggactcacaggcaagcatcaggcaacaacatagtgtcgattttagtcatggtaccatcgtgcataactgattatttgtttgacgcagccagaaatgaagtgattcaggctgctttattcgtaggcgagaattctttcagtaaaattccttcattcatattttattgctcatgggcaccatcatcgacgtcaagtaataaactgcttatcccatttttgcgtttgttcatattagacgacggcctgttgtgcaggtaatattttgtagttgtattaattgcgtgatggctatcagaatcaatgaaaagataagtcttgtttctttaatggcgtatttgtattttgcagttgtattaattgtgtgatgggtatcagaatgaatcaaaagatagtcttatttctctaaatgcgtg

SEQ ID NO: 6410 - DNA, 894 bp, Zea Mays
gcgttctcgtcaatggcccatataaagcccagcccaccatcttcctcctctcccctgcaacaaagacgacgcaagccctcgcctgtcctcactcctaaccctcgcccgactcagatctatctgccccgcgccgccgtcgccatgccgttcactccgggtccctactctggcgtcagcaccctcgcccttgtagcgagggcatcggtcttcggcttcggtgtcgtctacgggagcatcaagctctcaatcctcaaggtacgcctagggttgtgaattggctcaatcttagtcttgtgaattggctcaacctcaggcttgtgaattgtctcagtttggtagcggaggggttatagatgctatgactcccgcaaccagcaacactttagcatggtttaggaatcagctaaggatacatgatgtgaggattttatggaatggcgagctttttttattctgggtgaaattaacctttacctatgttgatgacttgatgcccttaggccttgttcgtttgtgtcggattgcacccggaatcgttccactcaatcaaagtttatataaattagagaagcaatccggttaggatttgttccgacccaccaatccgacagaaacgaacaagaccttagtggatcggtttcgagcctcactcgtctggatagtcatagagtgaagggtacctttatggtggtattaatcaccgagttcaaattaatgacgagctgatgcttgacatcgttgacaaagtattttgccgggtttgtttcctctgcatgtttgtggacactagacatgatattcttcttcactgaaagttccccaaaagcatgtattggaatttattagatagaatgacatgacatttcaatgttgtttactgatttgttttttaac

SEQ ID NO: 6411 - DNA, 3503 bp, Zea Mays
gaaaaaggtcactttttttctgtagcaggaatccaatcgcaatttgcgagggcacaaagctgctctaccatttccgtgccccacgagtacctgtctttccactctcgcatccgctgcttcctcaaaaagaccccctacgaatccgcgccagcatctggttactcttgtcccccactaggagctggaaccaagaaccccgaatgcggcttcgtggcgctcgcctgtggacgtggattgtctccgtccgcttctcgcttggttctggcttcctagttcgcaccacggcaccgcaaagcagatggtagtcggtaagcaccaggtcttcattttcgttggattttaggagcgctgagcgcgcagagcttactgaatttggttttgtgtttctatcgcagactagggattaaccccagctctgctcgccattccggtccgtcgagtatttcgtcgaacagttggtaggggacctctagaacggatgggcagaggacaggatgagtcggtttcgtgattctcgaaatctagtcatgccttcagctttctcgcggtcaatcaatccatcgctcatccggttgtaattgccgaatgggtagtcaagaaaccagatgagctcttcgggttcctgtatgcgacctctgtcccccgtttcatgctctgcggactacgtataactgaagaatctgttcggacaccaaattaaggtcgttggcaagacgggtactcttttcttggtcctcgggaagatgggctctgctcactttgctgccctgcttctgtgcgcctgcttgttcgtcagtggaaccgtggcagctgaccagaacggtaacctcacaaggccagctgaggtgcgcatcggtgcactgttcacgtttggttcggttatcggaatggcggtgagacctgctatcgagctcgccgttgcggatgtcaatgctgaccctagcttactctgggggacgaaactgagtgttcttatgcaggacaccaattgcagtggctttgttggcaccatagaagcattgcagcttctggctaaagatgtagtcgccgtattaggtccacaatcctcggctgttgctcatgtcatttcccatgctgtcaacgaactccatgtcccacttatctctttcgcggccactgatcctaccctttcttcccttgaatacccgtattttgtgagggctactcagagcgattactaccaaatgggtgctatcgctgccatcattagtcaatatgaatggaaacaagtcattgccatatatgttgatgatgactacggtagaggtggcatcactgcactaggtgatgcccttgcaaaaaggaagtgcaagatatcctacaaagctaagttgccacctggtgctgcaaaaactactatcgaggatatcttgatgcaggtaaatgacatggagtctcgcgtctatgttatccacgttaaccctgactctggtcttaacgtgttctcagctgcaaaatctttgggcatgatgagcagtggctatgtatggattgcaacagactggctttctgcagtgatagattcttctgtgcatggtattcctgatgtgatggaacttacacagggtgttcttgtgcttcggcagcatatagctgattctgatatccagcatgcctttttgtccaagtggaataatctaactaggaatggaagctcttactttatgcatgcttatgactctgtatggctagttgctcatgctgttgagcgctttctgagagaagggaatgccatgtctttttctgctgacccaaaattgcaagctaaaaagggaagtagccttcagttagattctctgaggattttcaacagtggagataaactactggagaaagtgtggagtgcaaacttctcaggggtttctggtccagttcaatttactttggaccgagatttggtacacccagcctacgatattctgaatattggtggtacgggattaagaaccattgggtattggtcaaattcttctggtctctcagctgttgctccagaaaacttaagctcatcagcacgggactcttcagccaacaatgtacaactccgtggtgttatatggcctggtcagacttctgagaaacctcgtggttgggtgttttcgcatcacgggatgcctatgaggatcggggtaccactccgaacgagctacaaagaatttgttatgcaagacgatggtcctgacggagtaaaggggttcgcagttgatgtcttcaaagctgcaataagtttgttgccctacccagtctcatgcaagtttgttttgttcggcgatggtttgaagaatcctagctacagtgaacttgttcagaaggtatctgaaaatgagctgacttcagggatacagggcctcgatagcttgatatctagttcgagtgcgattggctaccaagttggatctttctccagaaactacctcgtggacgagctcagtatcgcagagtcccgtctggttgcactaaacagcccatcggattatgcgagagcgctagagctaggttcaggaaacggtggcgtcgccgcaataatcgacgagctcccgtatgtcgagatcttcctgtcgaaatactgcaagttcaagacggttggtcaggttttcacaaaaagcggatggggatttgccttcccaagagactcccctctcgccgaggacttgtcgacggcaatcctggcgctatcggagaacggcaagctccagaagatgcacgacgagtggttgagcgggacggagtgcagtgcagacaacggggctgggccgtcgaactccttgagcctgtcgagcttctggggcctcttcctcatatgcggcctcgcatgcttcctcgccctcgtgattttcttcctccggatattctgccagtacagcagatacagtaaccaggtcgaggcgcagttcgctgagccccgggttctgaacaggccggcgaggctaactaccatcaagtcgctgatctctttcgttgataagaaggaggaggaggtgaagaacgctctcaagaagagacccaatggtaccggtcagcagcatccaagcactcccaacgcggaagaacagcccacattaccaccgtgaggtctacgtaacgtcccgctgcgtaactaatgactgccaaaataatgtggaatcctgctttgaagcgaaagttgtactaacgcacaggcctagttgatgctgctgaaggggtttttcctgtatgtggctttctggctgtggaaacatagcatcggaatcagcttcagactattgtcttcagagaaaatgcaactgcgttaggttaggttgtatttttccaacagcagcgaatctgggcctcctaggccctagcagcaatatctgggagaagtagaattggacttccgtcaatatgtgggcagttgtgcatgtcccttcatattgtctgttaagaagtagcatatcaaccccttccttccactgtgactacacaaggtgaccatttcagagcagaagctctgacctcgccca

SEQ ID NO: 6412 - DNA, 4110 bp, Zea Mays
gtgaaaagttgcttgtgaatgtaggaggtctagatggacgtaggcaaaaaaatacaggatctgtcaaacaaacagtgtagttcgagaataccatccacatccaggccgaccctgagggatgtgactccgaccgtctgagcgctcacagttctttgtgatcctttttcacgagagagagagagtagagggaacgaaaaaggtcactttttttctgtagcaggaatccaatcgcaatttgcgagggcacaaagctgctctaccatttccgtgccccacgagtacctgtctttccactctcgcatccgctgcttcctcaaaaagaccccctacgaatccgcgccagcatctggttactcttgtcccccactaggagctggaaccaagaaccccgaatgcggcttcgtggcgctcgcctgtggacgtggattgtctccgtccgcttctcgcttggttctggcttcctagttcgcaccacggcaccgcaaagcagatggtagtcggtaagcaccaggtcttcattttcgttggattttaggagcgctgagcgcgcagagcttactgaatttggttttgtgtttctatcgcagactagggattaaccccagctctgctcgccattccggtccgtcgagtatttcgtcgaacagttggtaggggacctctagaacggatgggcagaggacaggatgagtcggtttcgtgattctcgaaatctagtcatgccttcagctttctcgcggtcaatcaatccatcgctcatccggttgtaattgccgaatgggtagtcaagaaaccagatgagctcttcgggttcctgtatgcgacctctgtcccccgtttcatgctctgcggactacgtataactgaagaatctgttcggacaccaaattaaggtcgttggcaagacgggtactcttttcttggtcctcgggaagatgggctctgctcactttgctgccctgcttctgtgcgcctgcttgttcgtcagtggaaccgtggcagctgaccagaacggtaacctcacaaggccagctgaggtgcgcatcggtgcactgttcacgtttggttcggttatcggaatggcggtgagacctgctatcgagctcgccgttgcggatgtcaatgctgaccctagcttactctgggggacgaaactgagtgttcttatgcaggacaccaattgcagtggctttgttggcaccatagaagcttctggctaaagatgtagtcgccgtattaggtccacaatcctcggctgttgctcatgtcatttcccatgctgtcaacgaactccatgtcccacttatctctttcgcggccactgatcctaccctttcttcccttgaatacccgtattttgtgagggctactcagagcgattactaccaaatgggtgctatcgctgccatcattagtcaatatgaatggaaacaagtcattgccatatatgttgatgatgactacggtagaggtggcatcactgcactaggtgatgcccttgcaaaaaggaagtgcaagatatcctacaaagctaagttgccacctggtgctgcaaaaactactatcgaggatatcttgatgcaggtaaatgacatggagtctcgcgtctatgttatccacgttaaccctgactctggtcttaacgtgttctcagctgcaaaatctttgggcatgatgagcagtggctatgtatggattgcaacagactggctttctgcagtgatagattcttctgtgcatggtattcctgatgtgatggaacttacacagggtgttcttgtgcttcggcagcatatagctgattctgatatccagcatgcctttttgtccaagtggaataatctaactaggaatggaagctcttactttatgcatgcttatgactctgtatggctagttgctcatgctgttgagcgctttctgagagaagggaatgccatgtctttttctgctgacccaaaattgcaagctaaaaagggaagtagccttcagttagattctctgaggattttcaacagtggagataaactactggagaaagtgtggagtgcaaacttctcaggggtttctggtccagttcaatttactttggaccgagatttggtacacccagcctacgatattctgaatattggtggtacgggattaagaaccattgggtattggtcaaattcttctggtctctcagctgttgctccagaaaacttaagctcatcagcacgggactcttcagccaacaatgtacaactccgtggtgttatatggcctggtcagacttctgagaaacctcgtggttgggtgttttcgcatcacgggatgcctatgaggatcggggtaccactccgaacgagctacaaagaatttgttatgcaagacgatggtcctgacggagtaaaggggttcgcagttgatgtcttcaaagctgcaataagtttgttgccctacccagtctcatgcaagtttgttttgttcggcgatggtttgaagaatcctagctacagtgaacttgttcagaaggtatctgaaaattacttcgacgccgcggtaggggacatagctatagtgacgaatagaacaagacttgttgattttacccaaccatatatagaatcgggtctcatcattgtagctccggcaagggtgattgaatcaaacgcttgggctttcttgaaaccattcacattccagatgtggtgtgttctagttgttatattcctctttgtgggtgcggttgtttggatactcgaacaccgcagtaataccgagttccgtggacctccaagccaacaaatcatgacagtgtgctggtttagtttctccaccatgttctttgcacacagagagaacacagttagcgcgcttggcagatttgtgctgcttatctggctcttcgctgtgctcattattaactcgagctacacggcaaacctgacatcgcttctcacggttcaggagctgacttcagggatacagggcctcgatagcttgatatctagttcgagtgcgattggctaccaagttggatctttctccagaaactacctcgtggacgagctcagtatcgcagagtcccgtctggttgcactaaacagcccatcggattatgcgagagcgctagagctaggttcaggaaacggtggcgtcgccgcaataatcgacgagctcccgtatgtcgagatcttcctgtcgaaatactgcaagttcaagacggttggtcaggttttcacaaaaagcggatggggatttgccttcccaagagactcccctctcgccgaggacttgtcgacggcaatcctggcgctatcggagaacggcaagctccagaagatgcacgacgagtggttgagcgggacggagtgcagtgcagacaacggggctgggccgtcgaactccttgagcctgtcgagcttctggggcctcttcctcatatgcggcctcgcatgcttcctcgccctcgtgattttcttcctccggatattctgccagtacagcagatacagtaaccaggtcgaggcgcagttcgctgagccccgggttctgaacaggccggcgaggctaactaccatcaagtcgctgatctctttcgttgataagaaggaggaggaggtgaagaacgctctcaagaagagacccaatggtaccggtcagcagcatccaagcactcccaacgcggaagaacagcccacattaccaccgtgaggtctacgtaacgtcccgctgcgtaactaatgactgccaaaataatgtggaatcctgctttgaagcgaaagttgtactaacgcacaggcctagttgatgctgctgaaggggtttttcctgtatgtggctttctggctgtggaaacatagcatcggaatcagcttcagactattgtcttcagagaaaatgcaactgcgttaggttaggttgtatttttccaacagcagcgaatctgggcctcctaggccctagcagcaatatctgggagaagtagaattggacttccgtcaatatgtgggcagttgtgcatgtcccttcatattgtctgttaagaagtagcatatcaaccccttccttccactgtgactacacaaggtgaccatttcagagcagaagctctgacctcgccca

SEQ ID NO: 6413 - DNA, 1815 bp, Zea Mays
cggccacgaccagttcgagaaaggcgtgcgcatgccgtctatggcgcctccgctataaggaggagaagcaagcgcgcaaggccagcaaaaagcgtcgcggagccacgaccacgacccctattttggcacgcccgtcccccgcttatacgccgcgccggcgaggtcgctgctccgaatcaccttcccttcctattccctctctctctctctctctctctctctctctctctctctctctctctctctcccgcccgctccgcggcctcctcctctacccgccccacaaaccaaggccctccgctgtctgcacggcgacggcggtgcatgggcggcgggcgcgccgggacgacgacgacgacgaccgcgccgccatgaccaccaccaccacggccgcggccgcggtcgcgcagctctgcgccgggccacggcggcgcaagcaggcagcaggggctcggctcgacctgcgctgggcgcgcctgctccgcctcgccgtcgtcaccagggtgctccgcctcgcgcgcgaccagctgctcgcctgctcctcctgcgggggcggcaccgccgcccgccgccggtaccgccgcctcggcccgcccaccagcgccagcgccggtcccgtgctgtcacccgtcgacagggacgacgactgcgccgcggacgccgaggccgcggcccctcgcgacgcggccgacgacgaagacaacgttgtcagcctcaaggttaagtatgtgggagatgacggggaggagcagaacggcttgcagatgacgggcctgaatctcatggacaagacgatgcccgtcaggggagcaaggattgcctacagcatctgggatgtggcaggagaccaccagtccgtcgaccacgtcccaatcgcgtgcaaggacgccgtggcgatcctgtacatgttcgatctcacgagccgctgcacgcttaataacattgtagattggtacgggagggcgaggaaatggaataagacggctattccaatcctaatcgggacaaagtttgatgactttgctcagcttcctcttgagatgcaatgggccatcgttaaccaggccagagcatacgcaagagcgatgaaggcgaccctcttcttctcgagcgcgacgcacaacatcaacgtgaacaagatcttcaagttcatcacggccaagctcttcaacctcccgtggacggtggagcgcaacctcaccatcggcgagcccatcatagacttctgacgaccccttcctctaactagtaactcggcagcacacgcacgacgacccttggtatatatcatgggttgacagggtcgtgtctttcgatcctcttgccctgtgcgagccgccggagccatgaagtgaccgagcatgcccgtcgtcctcttcctcctggtggccggctgcagcaggcaagatgccctttgtaaatatagccataggtgacggtcccgcgtgcgtgcggccgtgcgggagcgtcgtcaaatgggaagaaaaccgcgaggtgtgactgtgatgtaacaccccgtctgtaacattcgccagagtatataggaaatccatgttaatataccctccattccaactgacaaaggcatgcgctggcgcgtggcggcttgctgccggtgcagaacctcttctttctcctcacccgggcctatttggttcagcttttttctgaccagtttttctgagaatctagctgtggaaagaatctggctgtgagagaatctgagtattgtgtggattacgtgcggaggaagatgaagtggtccaaagggttcaggatctagaaagcaataaattcctactatcatgacgattc

SEQ ID NO: 6414 - DNA, 2570 bp, Zea Mays
agccctccctcctttgggcttgtctctgcctctctctctcctcccttctcccacccacccctctctcttgctgtgggtgtgctgtggagaggagaaaggaagtagagcaagaacaagaactaataacaccaacaagagctgctgccaactcctgcacagcctgggctctcatcactgattgcccacctattaccttcctcttttgcgatttagaatcacccatatatctacctgctctcggtcctctgtgaactctctcgtcttctaggtttcccaggcctcaagataggcctctggaccaaagcttgaaagcagctgctgttcttgcctctttttttaattcttcatttcgtggttcctggatttttgggttcttaggtttcttgtatcttcccccaaccttgcaaaatcttgtggtgaagtttcttgcgttcgctgtttcgggaccatggacgaaaggattccgccgccgtccctcttgcaatactcgcagtcccctgctcattcttccccccatcccctcaattctatgaggtattcttcctctgaaagagaaaggtgagtgttgttcttgatttttttttatttcttttgtcactattgttctccctgttgttcttggtgagttttgttttgtttttgatcctgccctttcggaatccttctgaggagcacgagatttgatgctgcggtggagatttccgcttaattctaaacttccggatgccatgtttccccttgatcaatgctgccgattgttatggaggagtgatctgtaatcgtagggacttcttttgtgatggctcgctgatagatttgttactgctgtcctaaacggagctgtatggttgactcgctgctaatgggtgtaaactttgtgtgtaacaaatcgctcattggcgatagtcacatgtaaattttaatttgatggatcgttctgtatatatcatatcaaagtttccttttacatttcatttctgcgggattatagctgctttagttttagatcctccaaattatgtttcttcttttgtatcacatggataataaatttagcattggctactgttatcctaacgttgattcttgtttggcagatatctggctgagttgcttgcagagaggcagaaattggccccatttgtgcaagttcttcctttctgtaccaggctcttgaaccaagagattttgcgcgcatcttctatggcgcctaaccataactttgttgatcctgagagaattgagcatggtagcccattaaggttacctggccacccagtgaatggtcagccgatggatctggagggctggtcagggattcaaacagagcatatgggggttctacaagcatcatcaatgggctggaatggtgctcctgtacttgctgccactcctgttgtcaagaaagtcatgaggctggatgttccagtagacaagtatcctaactacaactttgttggtcgtttattggggccgcgaggtaactccctgaaaagggttgaagcttcaacccaatgtagagtttacattcgaggacggggttctgtgaaagactctgttaagacaagctgagggataaacctgggtatgaacaccttaatgaacaactgcatgtgcttgtggaagcagagtttccagcagatatggttgatgtgcgtcttaatcaagctgtgtccatcctagaggatcttcttaaaccaattgacgagtccatggactactacaagaagcagcagctgagggagctggcgattctaaatggcacactgagagaggaaagcccaagccctcacctcagccctagtgtgtcccccttcaactccaccgggatgaagcgcgcaaaaacagggcggtaatctctgttccgaaagccttcatccccccaaatcaatcatggttcaatgcccaattattacacaagctactgctggagatgattggtgatgcatatgctgggatcatcagtgatggcctatgcctgtcatgatctgtgcgctttatcgacaagcacacaaacatgcctgtgctgtgcttggacgaatggtctccgggcttgttgtttgactctactattatttattctttgtgcttctgactgcctaagtattattaacattattggtttgggaaagttaacaaggcccggttggccagtcgctgtagaaagcttggggagaggaggggggggggggggggtgtcaatgtgacggacaataataaggtttcgttggtgtacctgagatagttgtaatatgtcatgtgctgatgcttttgtgtggtgctagtacaagacaaccagacagctatagttgaggcaatgattattttgcgttcataaaatgcatatcggtgtgctttcttcatggttcatgtaccggaaccagtgtaaaatagttcctccgtcccaaaatgttttagctcttgatttttatgtctgtatttataatatataacacatacatcaagtctttcgtgaatccactatttgtctaaaatggattttattttggcacacagaggaagtatcctgtttgagctggtctgtgtgccaaatataaaggtgtatggag

SEQ ID NO: 6415 - DNA, 4478 bp, Zea Mays
agggaaacagcttatgaggtccttcttgcttctctatttgtcagtggaaaagtacacttctctgaagaaaaaagagaaaagaagcacaaattcttgaagggacgaagaactaagactgaaggatcaaatccatcacctcaggtggaagatggctatgcccacattcttgatctgacccgagtacaaatggagatttcagaatctatggacatcctgactaaacgagctttaagacatattagtttgaagacggtgaaagaaacgcttgatgtgccccgtatatcactacagctcttaagttctgttggcaaacttgattttccaaccgaaagattgcgtgggcaatggcagaaaagacaggcgaatgttcttgaagaactacttctcttctcagcatctcttgagtatgatacgagcaacacattacggatagttctctctaagctaaaaagtacagaggattgggttgtgactgttcctgagggccgtgtcgaggtcctgactatcattgaaagatacaacacaaaactttgttcactgacgaagaagtttgacattaaagatgagacctaccattggacccataattatcattttaattttaggttatatgagaagttactttgcagtgtgtttgatattctcgaagatgggcaacttgtagaggaggctgatgagatactggaaataacaaagctgacctggcctatattgggcgttactgagaagctgcaccacatattctatgcctgggtgcttttccagaagttttctcaaactggggagattcttctactgaaacatgcaagccttcagatacgggaatttcgattgtaccatgacgttaaagaaatagagttatatacaaacagttttatttgttctgtggatgcctatggtggcaacaaggttctaagtttggttgacagtgtcctactcaaaataaatgtttggtgccgcagacagctaggcaattatcatgcacactatagtaagaataactactcgatctttgaggccacactgaacttggtcttgctattggtgacaaactccagtgaggacgattttgaagaaaccatgttcattgagagcccagtagggagtacaccagaactgaagttgatccatttactcattgtcagatccatccatgctgcttataagcaagcactaatttcatcaaatggccgatcagattcagaatttaagcatccattgacaattcttgcaaatgagctaaaggcagtggcagagaaagagtgcactgacttcagtccaatacttaacaagcactatcctgaagctcaaagagtagctctaatcttcttacacatgctatatggaaaacaattggaacttttcttggaaaggacagataattcggagaactcaaaagagatactggcagcatcaaataattttgagctctttatagctcagaagctttactcagtgtatggggaaactgttgggtcttcattctccaactatttaaagccatacatggtaggtcacttttcttcaccccttgttctccaatggcttcatgctcaacacgagaatgtcttggagtggacaaaacgtactattgagatagaggattggacacctttatcagctcacgagaaacaagcaagatctgtggttgaagtattccggattgtggaggagactgttgatcagttctttaatacgagcctgcccctggaaattgtccacttgcgaagtctactcatcggaatcactaggagtcttgaagtctatttgcttcacatggaaaatcaacaagtgcctggatctactcttctccctagtgctccagtcttgacacgttatgcagaatcaatgaatccatttgcaaagaggaaacttattgagcctacggttcctgaagaaaaggttgctatgaagttgaacaatttggcagtgcccaaattatgtgtgaaactcaacactcttcaattcatcagggatcaacttgatgccatagaagaaggtgtcaaacaatcctgggtctctgtcttgtcagctgtcagattgttggattatttgtcttgtatggctagtggaagagctctttcagaaagtttgacatcatctgatgaatcggttgatgagttgtttacaatatttgatgatgtgcgaatgactgctgtgaagataactgatgtgatcttgaactttattggaacaagggctgtattttgggatatgcgggattcatttattttctctttgtatcgagacagcgttgaaggagcacgcatgcagatatttatccccacaattgaccaagttcttgatcaggtatgtgatttaattgttgatgtgttaagagaccaagttgtactcagaatatttcaagcctgcatggatggactcatttgggtcctactggatggaggcccatcacgtgctttttttgagacagatgtggatttgatgcaacaagatcttgctattctcaaggatctctttatagcagagggtcaaggtttaccaatagatatagttgaaaaggaggctagacaaactcaccagatattggacttatatatgctgaaggccgatgcagttattgatatgctgataaatgcaagtgaccaaatgcctcacgatcctgaagctacaaatgctcgaagaagatatgtacatgatgccaacacccttcttcgagttttgtgtcataagaaggataaaattgcctctacattcttgagaatccagtaccatcttccaaggtgttcagacatgctgaaaagaggtacctcattcaattggtctgagacagggcaacaaagctttagaattatgaagaagaaactgcaagaagctacttggcagtaaagatgggtcttgctaaggaaactctgcttggtttgcagttttttttatatatacaacagcagtgagctgtactcaatcagcaggggaagagcaccccgcgggcattgttttagaagacccccccccccccccccccccacacacacacacaaaataaacagtgcagaccctatagcatcacacccctaaccctggtcactacccacaagaagttgaaatgagtcgttggaggtgctgagtcacaatcactaggctatgaatcctttcaccagtgagctgtactatcgaaggaactctgcacggtcaaggctccatattattcagtataagctcccaaaggtccacaatggtgctcattgtgacggtggccctggttgaattcatgaagtatgactgcaaagcttcatttggagggttttagtttcgaaaatatgaaggacaagcttggtgcagtggtgagaagccttaccagttaccaccgagccaaaggttgttagttctagagttccggtacaatgggcgctagtgcgctacatatttggaaacccgatagattaactattcgaaaatccggaagtaacatgactgtttattaagttatttttctcccccctcccaaaacaactggaagctgaagccaacacaggcggtgccaaagtggcctttaatattttcagaagcacgggagcactgtctatgcacaatccgttgcagttaaatgtctaggttggcaatgcgccaatgtagtgactgtcggatacttgtggttactgagctttaccggctcttggaactcgttactacagtaccaaagaagtgaagaagctgaagccaacgcaagctgtgccaacgaggcacgaaatatttgcacaggctcgggactcgggagctcactctgtctatgcactataagttgcagttaaggttcgttctagctgtcacgtcattatcaatcactagtgttagtttttatctacctcaacgatactgttgagaatcactattggtgatcaacaccattacatgtctcaatttcttccttattttcttggtcatctatttttaattctttggacaattctttaatggtcaaatgtggatcattttcatgtcattatttatttggtcggtgttatgattcatcgatttatcgttcaaacaattttatataatttaacttcatgttatctatatagaggtgtttcgctatggccttcttttggtcagaggtctaggtgcgttgcttgcactttgcattgcgctctagccctatcgcgaccaaacagggcgtggtggttcgacactatcggactttggagtcatagtatcgcatgcatcacttcggttagtgacaaagtgcacaatacatgtgctctagccagaaccagtttgtcgggcctgccatggaagtcatcctttgcaacttgaagcagctaggcatcatctaatctgcttggctgggtcgtaggcaagcagttgtggatgttgttgaagagggtgatatttcaattgtttgtggaccatcgatccttgagctcagctacatgatggtacacttgcgagaaggctcagtagtggagttgtatgtggttgtttagcttgtacacaagcatggcactttgatctcc

SEQ ID NO: 6416 - DNA, 1556 bp, Zea Mays
aagaggaggaggtcgtctggccctttccccttctttgcccttggcccttggcctcctttcgtcgagagagagagagctgtgctggctgctgctgccccgggtccgtcgggacgggtagatgaggaggaagagaacagctcgtgactgactgactccctccctcagcgaccaggacctggagctgatgctgatgcctccacacacaatgccaatgccgctcaccactctcaacctccaagaggtttcaccgattggagcgcgtccaacagtgccttcgccgccgttgcctcacagcccgcacctgctaccaccaatacacccttccattacaacctctcccagtcttatgccctatggacccattacatgcttaacaagaatgtatcctactctacttaccctacaccacatgaggagcatccccacccattgcgccatacccacatccaggagaatccccacccattgcgccatacccacatcccggataaggattcaggttgtgcatctagccttggatttgactctttcactacaatgtcccttggaccaaatatttgttcccacatgacgcccatggaaggatctatatctgccaaagaacccgagaattcagaggatttgcctgcaatagttaggagcagtgatgaaatggacactagaaacagtggcaaagttcatcgtgacacagttggcactcttcctgagtcgaagcagagccatgaaagttgtgcttccgtgaataataagttcaactctggagagtaccaagtcattttgcgcaaggagttgacaaagagtgatgtcgcaaattccggacgaattgtgcttcccaagaaggatgctgaggctggtcttccaccattggtgcaaggggatcctctgatactgcagatggatgacatggtgcttccaattatatggaaatttaagtatagattttggccaaacaacaaaagcagaatgtatatcttggaagctgcaggtgaattcgtgaagacacatggccttcaggcaggggatgcgctcattatctacaaaaactccgtgcctggcaaatttattatccgtggggagaagtccattcagcagacaaacccctagacacaatttgatgtgactgtgcaccatcagatatggcgtccgaggatacaccatatgttcacgttccagttgttatcgacttttctaatgtctcaccgtcacactgagataagtcgaaaaaggagatacaccgtgtggatggagaaaaggagaagaaattttgggagacattggaagtgctgccagtgagcctacgtctaagctcagaacaaatggtttatgttttttcccctaattcggtcgtatttggatgcttgagtcctgcattgcatgatgaagaacattctcagtctctctttttttgtaaatattttaattcaggatctataaggtaaaggaagtggtttggaagcagatttctgattcagcgttctcttgtctcattcattttaccaacatttttgttaaatttgtgattgtgctatgctcgtagggcgtatgtctattgtccc

SEQ ID NO: 6417 - DNA, 3313 bp, Zea Mays
ccccctcctctcctttctccccgcccgcgtgagatcggctcgaatccaatcctctccaataatacgcaccggcacccatttgcgccatgctgccgcggccggccaccacgacgagccaagaacacgcgcggcatccctgagccacccacccaggcttaccaaaacggattccttttccctcttggatcccagccgctcccaagcgtgcgcgcgaattctctgcttgcctcgcccaggtgagcttctccccccaccccccacccctgccatcagtttcttccttttctaatccctcattattccccctctaccatcatcaatcaatctattggtttcgacgagatatgtggtggtgaattcggcgggtcttgagagggggaagggatttttaaaaaaaaaaccctgaaattttgtcagcggttccttggcctggctgcccgctttaataatggccgcgcggctggttggcttgccaggccagatgcattgctcaggaggcaggagcgcttgggccgtgcgagctgcgggatttgggagatgcgtgcagttgaatgcgtgggattcgccgtgatttgtttatgctgatcgccctctcctcccgacccgtgctccctccgcgtccgctctctccctttttctcgtccccagttgccgccgagccaattcagcgccgctttactgttatataagccgcgcctccgcaccggaccagggctctgagatgtgtttatctttctctcctcgcagcgccgtgtgctcttgtgctgaagatccatcccatccatggaagggtgccaactgctagtaggctgtaggatggagatggaggaggaagcgttctttgactcgcgagaggagctcacggcgtcgccggcgcccagcccgggccctgcattgccgtggtcgggaagcctcgacagtgtgtgtcagaggagggagcggttcatgagaagcatgggcctagagtgctgcccggctcccctgcaggccgatgccgtggccaccgtgggcgatgtcgacaaggaggaagaggctgtgccggaatttgggagatcgtggtcgcagtcggatgagaacgactgctccatgtcgagttggtccacggaggagacgaagagcttagaggatggtgtctcggatgacaattctgtcagtggatccagccgggatgatgctagcagcaaggtgagcaggagtttcagttcgttgtccttcatccagaggctcatgagccgcagtggtaagctctctggtgttcccaaggcggtcgagaggaggagaaacggatggcttcggaggctgggcttgaggtctggtatcctcgatcatggaggcgatgaggctagcaccagctcctcagagagtgagcaaaacaggggtggaaggtatgaaagggtcaaggtccgcagctacaggaagcggtcgaaagaactgtcagcagtttatcaaggccaagtgattaagggccatgatggtgccatcctggctatgaagtttagtccggatgggcagtttcttgctactggaggggaagatggagttgtcagggtctggggcgtcgcgcagtctgaggactgcaaaatcccaatggatgatccttcttgtgtttacctcaaagctcatcgccagagtggcttgggtcctgttgatgctgacaatgagaagaaatgcaaagttaagggcgtgaagcaatctgcagattctgcctgtgttgtgattccaacagtggtgttccagatctcaaagcaaccactgcatgagttccgtggtcactctggtgacgtactgagtctgtcatggtctaacaacaagcatctactgtcagcatcaacagacaaatctgttcgcttgtgggaaattggatctgcaaactgcatcactgtttttccgcacagcaactttgttgaatccaaccaatgagaatcaattcatcagtggatccatagatggcaaaatccgtgtgtgggatattcccagatgcagtgtcattgattgggtggatattagagacataataacagcggtttgctatcgacctgacggaaagggagcagtggtcggaaccattactggaaattgtcgattttatgatgcatcagataatctcctgaggtttgaaacacaagttgcactcagtggcaagaaaaagtcttctcttaaaagaatcactgctttcgagttctcaccaagcaacccaagtaaattaatggttacctctgctgactcgaaggttaaaattcttgaaggaaccactgtgactcagaattatagtggactccgtactgggtcttgccagtccttggcaacattcactcctgatgggcagcatatagtttgtgcaagcgaagactccaatatttatgtatggaaccatgaaaaccaagacgaggcttcactgaaacatgcgaaaaccatatggtcctcagagcgcttctactccaacaatgcagccatcgcaataccatggaatggcccgaaacccagaaacccggtctctctggcctcccaaatcttgtcaccacaaggagataacttgtggtgcatgagtaaggctgtcaagtgcagttcgagtcagagcgaagattctgctatcaacagttttgtgtcaaggtttgctcctggtattttcaatttgaatcaggagttctcctctgagtccacttgcagaagttcagcgacctggccagaggaaatcctgccgtctcgctcgattcgtgcaattctggacgagtcgcagtacaagttcctaaggaactgtttccagagcacaccaaactcgtggggtcaagtgatagtcactgcaggatgggatggcaagatcaggtcgttccagaactatggcttaccggcgcaccagtgaacaacagctggagcatctgctgaaactacaccggcagttttggcacctcacatggcgtgtggtttgttggtacaagacatcacatgctcagtgctcctcctgctgaattgtacatggaccagtgttgtacataatcaacctggtggtcctttgagatctccgcgtcagcggttgttcatggcaggacccgtggattgtacctttttgtagaaattttttgtgtgtagatcagatctgactctctccctttgcccccccttatcaattgctcattgatatatatactacagaaatgttagtctcagctgagtgtaagttcccctcccattgtattgcgggaacagccagatatatatatgtgccactcaagtatacaaaattctttcatttttttttgaacttttcctgctctgttgttctgcaagttttcattttgtcgatcgaatttcagat

SEQ ID NO: 6418 - DNA, 1785 bp, Zea Mays
atcgttcacacgcgcaaacgccgggagccaccgcgatgtcgcccaagccggcgaagccgacacccgccaccgagttcgagtactgcgagctgtgccgccatcaccacgaccatggccggcgccatcgctacatcgtcaagcacaggagaaatctcgacgccgcgctcacctgcttccgctccaagctctccgacctccgccgcgccttcctccccggctccccctcttcccagccgccgcggacccgtctctggtgccccttctgctccattgacctcgtcgacctcgacagccgctccgctggtgagcacctgaagggtgtgaaggatttcctgtggaagcacgggggacggatggatcaggtggtctcgcttaggatttcagaggatgtgcttgccaagtgggagaaaggccctgaatgcttgagcacaggaacgaagaaggggactgaagagctgattggaccatctctgaagcagataaaagatatccaaaatgaatatgcatgtgacagtttggatagttttgcacaaaacaatatcccatcttttagtaacactgcatcatatgttgttatgcctttacaaaattctaccaatggggcatatggctctattagtacagcgtgtcatggagcttccagttctggaagtgcttcacattctgctccatatggaactgtcggcctgcccatcacaccttggggatcggccgaaacacataagctgcagggtgcactgtctacaaactggtttcacagcagtggtactgaaacaaaaggccatcagtctactgtctttgtgaatggcgcaagccaatcactttcttgttctgatcatatgttacctttgcgggttcaacaaagtcacactggaggaaatttgagcaatggctcaaaagcaaatgtgcatacgggtgctcctcctccctggttaaaagctaacgaacacgatccaaagaatttgtcactcaaaagctgtggtctttcttcccggaaagggaaattgaggaaactcaatccaaacagggttggtgctgcatgggcagaaagaagaagagctgagatggaaatggagaagcaaggtgaaattgttccagcaacatctgattctagttggctgcctaattttggtagtgtctggcaatctggcacaaggaaggaatcaaggaaagaatttgagaaaagccacaagattcatgacacgaagagcgaccatgacttatccttggagataaaaccatatatcagcaaacggatgcgtgtaggtgctgagaaagcttctgacaaagctgaagagcttggcagccacctaccgcagtaaacagatgtacaacccggtggatgtcgtcgcgtgggcgtctctgcggaaaaagccgccagggcgcgcggcttgattagcgattggtttggtttccatgtcaggtcgcgcctgggaagcccgccgcgagtacggaatgccaagccagtagtagtttttgttctcggcacgaagccatttgatgttcgttttgtgcgacggtttgcggcttgatcgcgattggcctcgtagcctttttgaccgaacgagagaagcagcagctctgcaaagctacctccaggttcattcgagacggtaggctgggagggatagcgtcattgcggccaatggttttcggttcttttccacttgtgcacgacgtcataaacccgagaaaatgtttacagcctcacagggcacctctcagagaaccagagactccggttccttgggggtaaaaccgtaaaatggccgccgcttgtcttgt

SEQ ID NO: 6419 - DNA, 3070 bp, Zea Mays
gcttccttcctccctctcgttgccatatactagcttccccggctcgtcgagcctgcggccactaaatgtcctcgaaactgaaccaccacgaactgtctatctgcatccatctcttggccacacccactgaccgcgccacaccacacctgtggctctccgcctcgagatgctttacacggtgtagctggcaagaagccaggaaccttccctgttccctcccgggcgcaaaggggctcacttttaatttcctcgagaggggactgcctcctttctccggcggggtgtcgctcaagatggccggcttctgcgtcgtctgggcgctattctggctcgccggctccgccaccgtgagcacgagcaccaccgccttcgccggcggcgaggcggtggtcatggacgcgcggtccgtcgtcgccgtcaccgacaacgacttcgtttgcgccacattggactggtggctgccggagaagtaggactacgacacctgcagctgggggctggcctccctgctcaacctgcgttctcccccttgaagctccgcctgggcggctctctgcaagacatgtacgacaccggcgacgctcgccagccctcctgcgccccgttcgcgaagaacgcgtcggccatgttcggtttctcgcaaggctgcctgccgctgcgtagatgggacgagctcaacgccttcttccagagaaccggggcaaagattgttttcgggctgaatgctctgaatggccgggtccccatgcctgatggctctctaggggggccatggaactgaactaccacgaacgcggcttctttcattggctacaccgtgagcagaggatacgatgtacatggatgggagctcggaaacgaactgagcggcagcggagtcggagctcgggtcgacgcagaccagtacgcagcagacgtgatcgcgctgaaacgcatcatcgacagcacctaccaccagagcagcagcccggcaaagcctctggtgctcgcgccaggaggcttcttcgacgcggcctggttcacggagctcgtcggcaagacgaagccggagcagatggacgtgatcactcaccacatctacaatctaggccccggggtcgacgatcatctggtccagaagatccttgacccttcttacctcgacggcgaggccagcacgttcagcgatcttgaggggatactgaggtctgcaggtacgtccaccgtcgcctgggttggcgaggccggaggggcttacaacagcggtcgccaccttccacatgattggttggtgtactaagaagcgtatggcgcgagccagcctcgtcgagcagagaagctcgctctctggatctccacgtatgcaggctgaaggtgagaaatataactgagttgtatgtgtgtgtacgaactcgggtcattacatgcaggtaatcaatcacaagcacatacggcgtgattggttgctttctcgaagcagcctgcccgctcgggccagcttccgttgagcctggccgcccagagacggaaatgaatcatgtttcccacgggcctggctcggagcgttctgctgcatctctcgggccaaatcagcacacttacccaccaaccaaacagacgtactttggatacgtagatgcagcagatggtcaacgcatctggtgagtctggacgcgcagcaaccaaacacgcggcttgtgactgatgcgtttgtgttcagcttctggtacctggatcagcttgggatgtcgtccaagtacggtacgaagagttactgcagacagaccttggttggagggaactatggcctgctcaacacgactacgtttgaaccgaaccctgactactacaagtggactagccatgcataagtttctctctctcttctctcacaaagctgggatactgagtgataagagagggagaaattgtgtgctcaatcccgccatgaaaacctagcatctttctgctttagggggtttttggttagggggactaaagattagtctctagtttttagtctcatttagtccattttttgccaaacactatgactaaaatatagactaaaatgatttagtctttagtccttcacatatgtgctaaaagagattaaatcatattaatttcacttttacccctcatttagttcaattgtactaatagtaggagaatgttaaaggtcattttagtcttcttacgagtcatttagtatattcttactatttttatcccatagaatcaaaaatgttagggactaaactttagtcccctaactaaactttagtccctagactaaagaaaccaaacatgaccttaattttctctgtagcgctctactgtggcaccgcctcatgggcaccaaggtcctctctgcgacgttcaacggcacgaacaagatccgcgcctacgcacactgcgcgaagagatcgggaagggtcctctgctcctgatcaaccttgacggcaacagcacgaaccgcatccacgtcacgagccaaggcgcacaggcacagagtgcgcggagggagagagcggggggacgcctggtcgcttccctttccctgcgcttggcggagcagccgagctgctcgcaacaagagaggagtaccacctcgctcccaaggacggcgatctgcagagccagcaggtgctgctgaacggccatgttctggcaactgacgccgacggggacatcccagagctggagcccgtgcgggtggatggaacgcagccggtaaccgtggtccgtgggcccttactcgatcgtgttcgctcacatccccggcttctacgctcctgcctgtagctagaatttttacaccccagccttttccttcctggtgtgtatcataggttcggataaatccgggcgaacggcgaagcttgttcgcctgtccgtgcgtgaagtaaagctgcgaggctgaaaggtgtgcgatttgtcattgtttgggaaacaagtgttcggataatgtgtgagcaaaggggaggaaagtggagatgaaaataataaaaggaaaaaaaaggtttcgaatttttctctatgtctctgtcgttttggttgagaaagcagaaaaggcgacagttgcctc

SEQ ID NO: 6420 - DNA, 3291 bp, Zea Mays
ttttgcgttgcctgcttccttcctccctctcgttgccatatactagcttccccggctcgtcgagcctgcggccactaaatgtcctcgaaactgaaccaccacgaactgtctatctgcatccatctcttggccacacccactgaccgcgccacaccacacctgtggctctccgcctcgagatgctttacacggtgtagctggcaagaagccaggaaccttccctgttccctcccgggcgcaaaggggctcacttttaatttcctcgagaggggactgcctcctttctccggcggcaagccttctcctgccttgttgcctgccactcgggctgtcctccttcttgattcttggcaccgtcggtttaatttcgcgaaatggcggcaggggtgtcgctcaagatggccggcttctgcgtcgtctgggcgctattctggctcgccggctccgccaccgtgagcacgagcaccaccgccttcgccggcggcgaggcggtggtcatggacgcgcggtccgtcgtcgccgtcaccgacaacgacttcgtttgcgccacattggactggtggctgccggagaagtaggactacgacacctgcagctgggggctggcctccctgctcaacctgaatctctctaacagaatcttggtgaataccgtcaaagcgttctcccccttgaagctccgcctgggcggctctctgcaagacatgtacgacaccggcgacgctcgccagccctcctgcgccccgttcgcgaagaacgcgtcggccatgttcggtttctcgcaaggctgcctgccgctgcgtagatgggacgagctcaacgccttcttccagagaaccgggtattctgctctactgccttcggccagttccaggaaccgcattctatctatctggacacggttgcctagctctctgcttgcctttgcattgcagggcaaagattgttttcgggctgaatgctctgaatggccgggtccccatgcctgatggctctctaggggggccatggaactgaactaccacgaacgcggcttctttcattggctacaccgtgagcagaggatacgatgtacatggatgggagctcggaaacgaactgagcggcagcggagtcggagctcgggtcgacgcagaccagtacgcagcagacgtgatcgcgctgaaacgcatcatcgacagcacctaccaccagagcagcagcccggcaaagcctctggtgctcgcgccaggaggcttcttcgacgcggcctggttcacggagctcgtcggcaagacgaagccggagcagatggacgtgatcactcaccacatctacaatctaggccccggggtcgacgatcatctggtccagaagatccttgacccttcttacctcgacggcgaggccagcacgttcagcgatcttgaggggatactgaggtctgcaggtacgtccaccgtcgcctgggttggcgaggccggaggggcttacaacagcggtcgccaccttccacatgattggttggtgtactaagaagcgtatggcgcgagccagcctcgtcgagcagagaagctcgctctctggatctccacgtatgcaggctgaaggtgagaaatataactgagttgtatgtgtgtgtacgaactcgggtcattacatgcaggtaatcaatcacaagcacatacggcgtgattggttgctttctcgaagcagcctgcccgctcgggccagcttccgttgagcctggccgcccagagacggaaatgaatcatgtttcccacgggcctggctcggagcgttctgctgcatctctcgggccaaatcagcacacttacccaccaaccaaacagacgtactttggatacgtagatgcagcagatgtatgtgcggacaaccaaacaaccgtaaagtaaaaactgctacatgcgggaatgcatgcgtccgctcagacaaactaccaatcatgcctatatagggtcaacgcatctggtgagtctggacgcgcagcaaccaaacacgcggcttgtgactgatgcgtttgtgttcagcttctggtacctggatcagcttgggatgtcgtccaagtacggtacgaagagttactgcagacagaccttggttggagggaactatggcctgctcaacacgactacgtttgaaccgaaccctgactactacaagtggactagccatgcataagtttctctctctcttctctcacaaagctgggatactgagtgataagagagggagaaattgtgtgctcaatcccgccatgaaaacctagcatctttctgctttagggggtttttggttagggggactaaagattagtctctagtttttagtctcatttagtccattttttgccaaacactatgactaaaatatagactaaaatgatttagtctttagtccttcacatatgtgctaaaagagattaaatcatattaatttcacttttacccctcatttagttcaattgtactaatagtaggagaatgttaaaggtcattttagtcttcttacgagtcatttagtatattcttactatttttatcccatagaatcaaaaatgttagggactaaactttagtcccctaactaaactttagtccctagactaaagaaaccaaacatgaccttaattttctctgtagcgctctactgtggcaccgcctcatgggcaccaaggtcctctctgcgacgttcaacggcacgaacaagatccgcgcctacgcacactgcgcgaagagatcgggaagggtcctctgctcctgatcaaccttgacggcaacagcacgaaccgcatccacgtcacgagccaaggcgcacaggcacagagtgcgcggagggagagagcggggggacgcctggtcgcttccctttccctgcgcttggcggagcagccgagctgctcgcaacaagagaggagtaccacctcgctcccaaggacggcgatctgcagagccagcaggtgctgctgaacggccatgttctggcaactgacgccgacggggacatcccagagctggagcccgtgcgggtggatggaacgcagccggtaaccgtggttcggataaatccgggcgaacggcgaagcttgttcgcctgtccgtgcgtgaagtaaagctgcgaggctgaaaggtgtgcgatttgtcattgtttgggaaacaagtgttcggataatgtgtgagcaaaggggaggaaagtggagatgaaaataataaaaggaaaaaaaaggtttcgaatttttctctatgtctctgtcgttttggttgagaaagcagaaaaggcgacagttgcctc

SEQ ID NO: 6421 - DNA, 574 bp, Zea Mays
tgaatataaaccattttgtcctcttgtgaatctgaaaccaaacgaaaaaaagggaagaggttgctccgtatggttgatgggttgaacttcaaggatttcgttgcgtttctttctacattcagtgcaaaagccagccttcgtcagaagatcgagtttatattcaaggtttatgacatcgatggcaagggaaaaattaccttcaaggatctgctagaggttttacgggacctaacagggtcattcatgtccgaggaacaaagagagcaagtggtaactgaagttctggaagaagcagggtacacgagggattacgcattctcgcttgaagattttatccagatcatcgaccatcctggccttaagatggaggtggaagtgccaatcgactagtgaaatgtggaaaacaagcttccggttttgtctgcagaacatggttagtgtcgtgtagcagggcaatatgaccgttcactttcgtcatcttctttgtttccggtccacttgcctaaacttttgtaacctttgttgacttggccttttcgaatatatcaaaaacaaaacaaattttgccctgcta

SEQ ID NO: 6422 - DNA, 594 bp, Zea Mays
gctgccttgctgaagaacagcgtcagttgtgcttgccataacaacttgaccgataggatacacggctacaacactagaggttgctccgtatggttgatgggttgaacttcaaggatttcgttgcgtttctttctacattcagtgcaaaagccagccttcgtcagaagatcgagtttatattcaaggtttatgacatcgatggcaagggaaaaattaccttcaaggatctgctagaggttttacgggacctaacagggtcattcatgtccgaggaacaaagagagcaagtggtaactgaagttctggaagaagcagggtacacgagggattacgcattctcgcttgaagattttatccagatcatcgaccatcctggccttaagatggaggtggaagtgccaatcgactagtgaaatgtggaaaacaagcttccggttttgtctgcagaacatggttagtgtcgtgtagcagggcaatatgaccgttcactttcgtcatcttctttgtttccggtccacttgcctaaacttttgtaacctttgttgacttggccttttcgaatatatcaaaaacaaaacaaattttgccctgcta

SEQ ID NO: 6423 - DNA, 3025 bp, Zea Mays
ctgtaatatatagctaaataaacttgaatcgaatatatgctgttttcaccataacaaataatttgacagacggctatagtaagtgtgggaatgaattcggtaacatgacttcacacttaaaaatatatatatagggcccttttgtcataaattttctcacaaccatagccggaaaaggcaccaatctagctagtacgcctagcaataatcagcaccttaggccgagtattttctttagatgaaataaaaaaatggacagaatcccatcctcgattcctcatgaaccatactatctcccaagtccaaccctagcaacggcgccactggcaagaacaaggtaactaggggaccatctcctctatataagcactcttccacggggtagacggtaccaccagaacgggtgtagaagcccagccagtaggataagccctcccagatctggccgggcggccggctgctgccttcttccccaattcgggaaagacgactatgaagatcagtttgtgtagcgtggtttggttcttctctctagctgtatctccttgctcccccgcgcgcgctctctctctctccgtgtccagttcttgttgcgtctgcttggtactgtactttgcagcggtggtcgacgttgggatgatgggggcgctggctggagccagcagctcgacggtgtggctgacagaagagagtgagcacgcatcggccagactgcatctatatacggctgctcctggcgaatggatagatgccaaggcgcagctgctgttgcgtgctcacttctctttctgtcagctccctctcctcctagggacttgttccgccgtatgcatccaccaccgtcccagtagtcccacttccgtccatcgcagcgcgccaatgatgcgtcgtcgtcgtcgtccaggcgcagccgttccccttatcacatcggtcgccgttctctgaggcgcctgccggccttgtcgtgtccctacctgaaaccttatcttgtctcccgctcggatttcgatgacctctgctctttggaataaggtactcttaaaatctcagggaagcttagccgcccagcgcatgtacgccatggacccttgcgctgcgggctgcggctggcaacgtttcttttcttttatcggtgaggtcctcgttgccgtctttgtggcttccgatgatggaattttagccagctccgttccgtccttcaggcttcaaccttgggggaagggacgcgtgaaggtttggttaacttaacacctgtgtctttgctctcctccctaggagtccgcttaacggaaagcactgtttgactgctctctctctctcccccctccctctcttatctactcttcctttccgtaaagatttcacacaaaaactattggatcttttccccttttgttgtgctcatctcatgtggttctgtgactgctgagagataggtgggcgaggcagccatggagttgatggtcggaggcagatctgcttggatgcaagtggagagggggctggcgcgccgcacgcggcacctacctccagcagcggcgccagcgccggcggcttcttgtagatctggaagcgccaatattttcttctctagccgtttagcaatcatcatatataggaatgtggacgtgctccatgtacctcttcccctactaatcaagcaaggtagcaagaatatgtactgcttgggaccatgagatgctagagcctgacatgctagagccctcatcctccatgtttgatgtggttatcatctgattcaagtaaccttgtcacttgggcaggtgtcatctaaagaaagaaaaagagaggttcttggaagccaaatccagagttgatgctgacttcagaagaaaggggtaccttgtattagtggattcatacacgaaggtcactaaaatggaatggtttttccacatagatagagcacaaaataattgatctcgatctagatgaagttaattttgtgtacaagttatttttcatgcatggattaatgatcaacacgcgtacttattttcctaaaggtcaacaaggctaatattaacatgcttcgcagggtcgagccatatgttgcatatgagtaagttctcttagctaatttagttcatgtcttgctgcttaatggatgttccactgaaaatacagttgaaaacagattatgctgttgtacttgttgcttgattgaatttatggatttttccttgtttaaatgcatgagtagtattgattcagggattcaaagaacctgaactcgataaatttgagataggcttatatttgaactttggaaagtgttgggttgtcaaatttcaagataaatagcctacttaatttagtagattctgattcgaatggtcccaaactagcctttagagatggtttggtgacaagggaattgtagaggatctataggtgaggaaatcccttgctattcctcccatggatctctccaattctcttgtcaccaaatcagcccttaagagccgtttagagatggtttggtgacaagggaattgtagaggatctataggtgaggaaatcccttgctattcctccccatggatctctccaattatcttgtcaccaaatcagcccttaagagccgtttggatctattgattttggaggaattagaatttacttaataaagtagtcaatttggcttagaatttaacatgccaccatttttcaaagctcagatataaatctatcttaaattcatggggacagtttggaaaataattttatgtatcaacggaatatatttctaccttgaaacttgtaagacactatttgcttcactcttctatagtaataaatatctcccgcatatgtatataaatatatttcgcataaaatcatattacgccccgtttggatcattggaattgaattccattctaataatagtaatttaggcatatatcaattaagctaattcgattttatgcaaaatatatttgtatactattgtcggcgtttcgagaccggggggtccctaagccgacgagtgagtgtgctg

SEQ ID NO: 6424 - DNA, 1112 bp, Zea Mays
cccgcatccccaattcccagcggaaaacccccagccccctagcctcctagcaccttctcctgtccttctaaccctagccgcccaagcccaccagccgccgctagctgctgccgttctccactctccacggaccatggctccacggccagccgccaaccaccaggccacggccgagcagggcgccaagcacctaggccggccgagcggtggctgccagcaagacgaagatctacatggtgcttgagctcgtcaacggcggcgagctgctggacaggattgcggccagtgagggaaagctcccggagcaggagctccccaggtgctaattccttatgccgaatgcctgcaggttctgcagaacagaggattgtactttacttggagctttatgcaagctgtgtggagtacatcacgccgctaagagacagcatgtcatcagtgtttccctcagcacatttagcttttgccagcatcgacctgaatgcacacactgtctttgcgatcacaacggccttggcaattctccaaacagtctgtctcaggaacctcagtctcctctcgtatctttctgctgacggtgtgatggcgacaattgcagtcatcctctgcctgttctgggttgcctgttctgggctctgatactcccatgtgcgtgctacctctccatcaagaagggcgcagtgccattgtgggagatcatcctgtgcatagtcatcataatgatcggcgtcgtatgtgcatgcgtgggatcatacacctcagtcagccagatgattagcagcaccaaatagcgcacgctagctgatatttatctagtgtctacggatccttccaaatgctttgacagagttggaactggcagcttttcgtagctaagtttatttgttccttctttatggcagaaatttggtaagagagagtttagttgtgggaggacaggcggcgaaggagtaatctgagtttagtgtggtgcttttgtgactgatcatctctggagcttttgtgaatgatctagctagctatctgtaaatgatctagttgtgaatgatattataattgtgatgcttttgtgaatatataattgtggtgcttttgtatttatgtgatggatc

SEQ ID NO: 6425 - DNA, 1344 bp, Zea Mays
ccaattcccagcggaaaacccccagccccctagcctcctagcaccttctcctgtccttctaaccctagccgcccaagcccaccagccgccgctagctgctgccgttctccactctccacggaccatggctccacggccagccgccaaccaccaggccacggccgagcagggcgccaagcacctaggccggccgagcggtgcgccgagcgcccgagcacccaggccaccgcccgccgcaccagagcggccaacggggcgccgagccgagcagagtttcaacagtgttcctgaccgtgtgttcttgatccaggtggctgccagcaagacgaagatctacatggtgcttgagctcgtcaacggcggcgagctgctggacaggattgtaagccgccccggccgttcgttcttcctcccttgtgatcacaggcggccagtgagggaaagctcccggagcaggaggcaaggaggctcttccagcacctggtcctttcctctactctactctactcactcactcatcactcccaggcggccaaacagctccccaggtgctaattccttatgccgaatgcctgcaggttctgcagaacagaggattgtactttacttggagctttatgcaagctgtgtggagtacatcacgccgctaagagacagcatgtcatcagtgtttccctcagcacatttagcttttgccagcatcgacctgaatgcacacactgtctttgcgatcacaacggccttggcaattctccaaacagtctgtctcaggaacctcagtctcctctcgtatctttctgctgacggtgtgatggcgacaattgcagtcatcctctgcctgttctgggttgcctgttctgggttgctctgatactcccatgtgcgtgctacctctccatcaagaagggcgcagtgccattgtgggagatcatcctgtgcatagtcatcataatgatcggcgtcgtatgtgcatgcgtgggatcatacacctcagtcagccagatgattagcagcaccaaatagcgcacgctagctgatatttatctagtgtctacggatccttccaaatgctttgacagagttggaactggcagcttttcgtagctaagtttatttgttccttctttatggcagaaatttggtaagagagagtttagttgtgggaggacaggcggcgaaggagtaatctgagtttagtgtggtgcttttgtgactgatcatctctggagcttttgtgaatgatctagctagctatctgtaaatgatctagttgtgaatgatattataattgtgatgcttttgtgaatatataattgtggtgcttttgtatttatgtgatggatc

SEQ ID NO: 6426 - DNA, 2602 bp, Zea Mays
aaaacacctggctccgactccggccctagtgccctacttcccggtatcctaaaccctagccgacatgcgccgcccgcagcgccgcgtcgcggcgaagcagactcgcctgcgggaggtcgacgagatacgcctcctcaacgaatggatcgacgccggcaagcccctcccgcgcaccaaacttctgcccccgtcgaaatcagctggaccggttccgaccgccggggagcacccggagtacggcgcgtgcacactgttcgacgagctgccgctgtcgcagaagaccaaggacgggctgcggaaggcggggttcactgagatgagtgagatccagcgcgccgctctgccccacgcgctgtgtggccgcgacatcctcggcgcggccaagaccggctccggcaagacccttgcctttgtcatcccgctgttggtgcttgacgaggcagatcaaattcttgatcacggattcagaaaccaggttgatgctatcatttctcagattcccaaagttagacaaactttactgttttctgctacacaaacgaagtcagttaaggaccttgcaagggttagcttaagggatcctgaatatataagtgtgcacgaggaggccagaacagccacaccggatacccttgagcagtatgccatgattgtacctcttgagcagaagttaaatatgctctggagcttcattaaaaggcatctaaattcaaagacgatagtcttcttatctagtgtcaagcaggtcaaatttgtttatgaaatttttaagaaacttcgtcctggtattcctttgaaatgtatgcatggacggatgaaacatgtggtacagcaggccatagttgcagatttcaatgaagctacctcagttcttttctcaactgatataacatctcgaggactagatataaagaatgtggattgggtggtgcaggttgattgcccagaaaacattgataattacatccacagagttggccgtacagctcgttacaataagaaaggaaaatcacttatattcctttgtcctgaagaagaagcaatgcttgaaaaattgaaggcaaccgaaagtaaaatacctatacatattcgaaaggttagcagcaggattttctgtttttagtgcttatttgattatggttgatctatgttgctgagacaagcgtttagaatggttattcggtctcaagtgacagaaaatttgacagttgtttatatcatagaactgccactggttcttgcatttcttcttttttattgttgcctactgttcttaatttctttaatgtagccaaaggcagaacaactggagcagatatcgcagagtatagcctcagtgctggttaaatttcccaatcttcaggaattgggtaaaagggcttttgttacctatcttaaggcagtatacctccagaaagacaaaaaagtgttcaacctgagcaggttctctgcagagcagtttgctgcatatgctgcttcgcttggtctgcctgttacccccaagatccgcttcataagccacaagaagaatgtgtcgaagaaggatatggaggacattgatatgaaacagatgaaatccagtttggaacatgaagttaccatcactccaaagatcaacattgatttaactttgtgtgatggagatgatgatatcctttatcccaagaagcccactgcagatgctaatatggatgacagacttgatgatgtccttcatcccaaggagtctgccacagatacaaatgtgactggacttgaaagacccttcaaaaagaagaaactgaagataaacgtgaacaggccatcaggaacaagggtcaagtatgatgatgagggcaacgccatcccacctcttgcatctgtcgctgaagaagtatctttagaacctgtggttcacaaggataaaatttcccagcggtatgcagagatgttgagagaaatgcagaaacacgacaaggaggacaagcttgaacacaagaagaccttgcgggagaagaagctgcagaagaagatgaagcttaagcgcaagaggcaggaagacactggagcagggtcagaggaggatagtggatctgaatcagacagaggccaagacacagccaacaaaggtaaaaagaggtacttcaatagcgacgatgaagacaatgacgcagcaaaggacggtgatgttctcgcccagcaggaggcgttggcactgaagctcctgagtaatatgcacagttagctttgggatctgatggtataggttacccttgaatgggggtttgcctattagcgctccagccaggaaggggctgaaattttgaacgtgtcgcggttttttttttctgataaccgggagttaattcccactttcaggcatacgttcatggatgtatgagaaatcagtgtggccgtattaccccaagaaatcggacttagatgaggttttaagtaaaatgcctttgattttaaaattctaaaattgcgtaaaatgattgttacagcatcttgaggactccgatgaaatttactgacaggtgaaaattgcgtggtcatggttccctcggatgtgctcctgaggacagaaatgtgaatggattgttggggacactctgcaatc

SEQ ID NO: 6427 - DNA, 2611 bp, Zea Mays
tgggatagtgtgacttttatatagctcatgctacccgaaatcctgtccgagctaaaacacctggctccgactccggccctagtgccctacttcccggtatcctaaaccctagccgacatgcgccgcccgcagcgccgcgtcgcggcgaagcagactcgcctgcgggaggtcgacgagatacgcctcctcaacgaatggatcgacgccggcaagcccctcccgcgcaccaaacttctgcccccgtcgaaatcagctggaccggttccgaccgccggggagcacccggagtacggcgcgtgcacactgttcgacgagctgccgctgtcgcagaagaccaaggacgggctgcggaaggcggggttcactgagatgagtgagatccagcgcgccgctctgccccacgcgctgtgtggccgcgacatcctcggcgcggccaagaccggctccggcaagacccttgcctttgtcatcccgcttattgagaagctgtatagagagagatggggtccagaggatggtgtgggctgcattattctctccccgacaaatgatttggctgggcagatttttgaggtgatcaagaaagtggggcagttccataactttagtggtggcgtcattgttggtaagcgcaagggtatcgagatagagaaggaacgtgtgaacagcttgaatatcttagtgtgcacgccagggcgctgttggtgcttgacgaggcagatcaaattcttgatcacggattcagaaaccaggttgatgctatcatttctcagattcccaaagttagacaaactttactgttttctgctacacaaacgaagtcagttaaggaccttgcaagggttagcttaagggatcctgaatatataagtgtgcacgaggaggccagaacagccacaccggatacccttgagcagtatgccatgattgtacctcttgagcagaagttaaatatgctctggagcttcattaaaaggcatctaaattcaaagacgatagtcttcttatctagtgtcaagcaggtcaaatttgtttatgaaatttttaagaaacttcgtcctggtattcctttgaaatgtatgcatggacggatgaaacatgtggtacagcaggccatagttgcagatttcaatgaagctacctcagttcttttctcaactgatataacatctcgaggactagatataaagaatgtggattgggtggtgcaggttgattgcccagaaaacattgataattacatccacagagttggccgtacagctcgttacaataagaaaggaaaatcacttatattcctttgtcctgaagaagaagcaatgcttgaaaaattgaaggcaaccgaaagtaaaatacctatacatattcgaaagccaaaggcagaacaactggagcagatatcgcagagtatagcctcagtgctggttaaatttcccaatcttcaggaattgggttctctgcagagcagtttgctgcatatgctgcttcgcttggtctgcctgttacccccaagatccgcttcataagccacaagaagaatgtgtcgaagaaggatatggaggacattgatatgaaacagatgaaatccagtttggaacatgaagttaccatcactccaaagatcaacattgatttaactttgtgtgatggagatgatgatatcctttatcccaagaagcccactgcagatgctaatatggatgacagacttgatgatgtccttcatcccaaggagtctgccacagatacaaatgtgactggacttgaaagacccttcaaaaagaagaaactgaagataaacgtgaacaggccatcaggaacaagggtcaagtatgatgatgagggcaacgccatcccacctcttgcatctgtcgctgaagaagtatctttagaacctgtggttcacaaggataaaatttcccagcggtatgcagagatgttgagagaaatgcagaaacacgacaaggaggacaagcttgaacacaagaagaccttgcgggagaagaagctgcagaagaagatgaagcttaagcgcaagaggcaggaagacactggagcagggtcagaggaggatagtggatctgaatcagacagaggccaagacacagccaacaaaggtaaaaagaggtacttcaatagcgacgatgaagacaatgacgcagcaaaggacggtgatgttctcgcccagcaggaggcgttggcactgaagctcctgagtaatatgcacagttagctttgggatctgatggtataggttacccttgaatgggggtttgcctattagcgctccagccaggaaggggctgaaattttgaacgtgtcgcggttttttttttctgataaccgggagttaattcccactttcaggcatacgttcatggatgtatgagaaatcagtgtggccgtattaccccaagaaatcggacttagatgaggttttaagtaaaatgcctttgattttaaaattctaaaattgcgtaaaatgattgttacagcatcttgaggactccgatgaaatttactgacaggtgaaaattgcgtggtcatggttccctcggatgtgctcctgaggacagaaatgtgaatggattgttggggacactctgcaatc

SEQ ID NO: 6428 - DNA, 2555 bp, Zea Mays
cgggtaccgtggccggattagttaatgcccgcgagcagctagtcgtaggcgtaattattttaaggcagttgtcgcctctggggactcgtgaaagcttcacctcttttgagaagctccgcaccacgacctcgtcccgcccgcagcccgctcttccccgctccacctccaggcttccagtctctcactctcccgcgcctcttgctgctgctgctggcgatagggatcccagcgccttcaagttcgggtgggcggctagcgcggcgcgtgtcggcgagcatatggtgggcattgggcgggggaaggaggaggaggagcggcaatagatttgtgggcgcagaggcggggatggggggcaacaagtactgcgcggcgatgacgaagaggagatggagggggctggcagcggccgcgtgggtgctagtcgcggtggcttgctccgcggtgatgcactggaccatgcgccgggagagcatggaccgcgccgaggagcgcctcgtcagcatgtgcgaggagagggccaggatgctgcaggagcagttcggggtcaccgtcaaccacgtccacgcgatcgccattctcatcgccaccttcaactacgataagtccccttccgctatcgaccaggacacttttgcaaaatacacggcaaggacatcatttgagcgaccgctactcaatggggtggcatatgcacagcgtgtattccatcatgagagggaaatgtttgaaagccagcagggatggattatgaatacaatgcagcgggagcctgcacccccgcaggttgaatatgctccagtgattttctctcaggatactgtttcctacctcgcacgcattgacatgatgtctggagaggaggaccgagaaaacattttgcgggccaggactactggcaaagctgtgttaacaaacccatttcggttgcttggatcaaaccacttgggagtagttctcacttttgctgtgtaccgccctgatctccccgctgatgcatcagttgagcaacgtgtggaagcaactattggatatcttggtggagcgtttgatgtggagtcacttgtggagaatttgctgagcaaacttgctggcaatcaggatattgtggtgaatgtctatgatgtcacaaatgcttcagaggctatggttttgtatggaccttctagttcggatgagcgcgtgcctttcttgcatgttagcatgttggattttggagatccgtttaggaggcatgaaatgaggtgcaggtatagacaaaagcttcctatgcagtggtctgccataaccaatcctttgggcacatttgtcatatggatgcttctggggtatagcattgccgctgcatattctcgatatgacaaagttacagaagattgtagaaagatggaagagctaaaaacgcaggcagaagctgctgatgttgcaaagtctcagttcctggcaactgtgtcacatgagatcagaacacctatgaatggcgtccttggaatgctggatatgcttttaggaacagatctaactatgacacagaaggattatgctcaaactgctcaaatgtgtggcagagcattgataacgttgataaatgatgtccttgatcgagcaaagattgaagctggaaagttagagcttgaagcggtgccttttgacctgcgttctctcatggatgatgttatttccttattttcttcaaagtcacgggagaagtgcattgagcttgcagtatttgtatgtgacaatgttccgaaggatgttcttggagatccttggaggtttcggcagatactaacaaatttggtcggcaatgcagtcaaattcacagaacggggtcatgtatttgtgcgggtctgtttggctgataactcaaatatggaagccggtcaggtcctaaatggagccatgaatgggaaagatggtagagttgattcaacaactaatggtgccttcaatactctgagtgggtttgaagcagcagacagacgaaatagttggcaatattttaagatgctcctctctgataaggagtcccttttggatgatcttgagggaacaaattctgatcaaagtgattcagaccatgtcacactagcgataagtattgaggacacaggtgttgggataccattgcaagcacaagatcgtgtttttacaccgtttatgcaggctgatagttcaacttcaaggaattatggtggtactggcatcggtttaagcattagcaagtgcctagctgaacttatgggtgggcagataagttttgtcagccgtccttttgttggaagtacattcactttctccaccacactgaagcgctcatacaaagatatttcagttgattcaagtaggagcttgttagaggcactaccaactgcttttaagggaatgaaggccatcttgatagatgggagacctgtacgtagtgctgttacaagatatcacctcaagaggttgggaataattgttcaagttgtgaacaatatgagtgcagtagtaaaagctttccctggacaaaatggagcaactgtttctagtactttccctcacatggaggctcc

SEQ ID NO: 6429 - DNA, 1196 bp, Zea Mays
gtcctccctgcgttcccccaccaccacggcggcagccactggttggcagcggttgtccttctccggtgtccatggcgccgccgctcgcgacacgcggcctccccctcgcctcccgcggcccgccttcttgcgcggcctcctgctcctcgtgcctgccctcgtatctccagctcggtcgccggccaagccgccggttccgctgctcctcgccacaggtcgatgcagcggcggtgccgccggggaagggcggggagtaccggccctctttcgcggacgacctcctcctcgccttcttccggagcaagatggtgaaggaggttggatgggattctgaaaagcctgggtatgctggactaatggaggtagcaaaccgtctcatggtcaagggaaagagtgctttggagactgagcaggctgctgtccgagtactacagtcactgtttccacctctcttgcttgttctttacaaagctcttttagcgccaattgctaatggccaactagccgctatgatgcttgctagggcgacagcaatttcatgtcaatggttgatgggctcatgctcagttaattcagtcactctgcctgatggaaaatcatggtgttcgttgagaaatgcaagtacctggaagagagcaagtgccttggcatttgcatcaacacatgcaaactgccaactcagactttcttcaaagatcacatgggtgttgatttgtacatggagccaaattttgaagactatagctgccagttcaacttcggggtgccgcctccacctcttgatactgacaaagccctcaaggaaccgtgcttggacatctgcacaaacgcaaggcggcgtagagagctcggaagaaatagcagcccagatgagctcagttgcccccaagtttgatatgctccctgtaaaagactgcacatcatagattattgcgcgttgggcttgggcatggtgtgccttgcttgcatttgtcagtcttcgtgcaacgatgtcaagtaatttcggtaataccatttctatgttgcagacacacacgttttcgattggatcaacatgactacatgagtaaataactctcagtctgatccatcagatcaacacccaatgaaacatcacagtgatctggatacaagttcactgggtatacaaaggaacatatacatagcaaatctgccattttacagggcaaacttaa

SEQ ID NO: 6430 - DNA, 1255 bp, Zea Mays
ggagaggctcgctgacctgtgggtcctagcgggccggctattgtcctccctgcgttcccccaccaccacggcggcagccactggttggcagcggttgtccttctccggtgtccatggcgccgccgctcgcgacacgcggcctccccctcgcctcccgcggcccgccttcttgcgcggcctcctgctcctcgtgcctgccctcgtatctccagctcggtcgccggccaagccgccggttccgctgctcctcgccacaggtcgatgcagcggcggtgccgccggggaagggcggggagtaccggccctctttcgcggacgacctcctcctcgccttcttccggagcaagatggtgaaggctgtaggaggttggatgggattctgaaaagcctgggtatgctggactaatggaggtagcaaaccgtctcatggtcaagggaaagagtgctttggagactgagcaggctgctgtccgagtactacagtcactgtttccacctctcttgcttgttctttacaaagctcttttagcgccaattgctaatggccaactagccgctatgatgcttgctagggcgacagcaatttcatgtcaatggttgatgggctcatgctcagttaattcagtcactctgcctgatggaaaatcatggtcaagtggggtgttcgttgagaaatgcaagtacctggaagagagcaagtgccttggcatttgcatcaacacatgcaaactgccaactcagactttcttcaaagatcacatgggtgttgatttgtacatggagccaaattttgaagactatagctgccagttcaacttcggggtgccgcctccacctcttgatactgacaaagccctcaaggaaccgtgcttggacatctgcacaaacgcaaggcggcgtagagagctcggaagaaatagcagcccagatgagctcagttgcccccaagtttgatatgctccctgtaaaagactgcacatcatagattattgcgcgttgggcttgggcatggtgtgccttgcttgcatttgtcagtcttcgtgcaacgatgtcaagtaatttcggtaataccatttctatgttgcagacacacacgttttcgattggatcaacatgactacatgagtaaataactctcagtctgatccatcagatcaacacccaatgaaacatcacagtgatctggatacaagttcactgggtatacaaaggaacatatacatagcaaatctgccattttacagggcaaacttaa

SEQ ID NO: 6431 - DNA, 2092 bp, Zea Mays
cctccctgcgttcccccaccaccacggcggcagccactggttggcagcggttgtccttctccggtgtccatggcgccgccgctcgcgacacgcggcctccccctcgcctcccgcggcccgccttcttgcgcggcctcctgctcctcgtgcctgccctcgtatctccagctcggtcgccggccaagccgccggttccgctgctcctcgccacaggtcgatgcagcggcggtgccgccggggaagggcggggagtaccggccctctttcgcggacgacctcctcctcgccttcttccggagcaagatggtgaaggcgagttccactccatccaccgatcccttagttcctccctccagttagatgatgccaaaccgtgttattagtttttttttgaaactttggaaggacccagtttttaataaaattggtttatagaaattgagtccaaatataccgacttaatttatagaaattatattctcagtttcttaaaaaaccgagaaaccgttctttcctagctaaaagataaaaaccggtttcttaaaaactagattgcttttaaacagagccttaaccatgttattagcttcttttccttaaataagagagaaccaaaaaaactttttttgtgtttagtatagagttctagcatggcagataatggaatcttctgaacattaataatccattcatcgctaggttcagttctgcttggtaattttgatcaacagtctgacaaatcctgatgaattgacgccacgtgcataactgaacttgtgctagctattagtttatcgtattactttaatcgagcttggaactttgtatttctacaaaatggccatttagttttgttgaaatctgagctgaatgctctattttttgaagaataatttgttttcagtttatttatttatttatttatttgttgtgtgagcgaggcgaggggtgctttcaatcataaaacaactaagcaggtccgatccaatgtgagattaaatgttatcatagtttccagacagactgcaactccagaaacatagaataatctcactgtcatatttgaatgagaaatgtacacacttgcatacgagctgaaaattttcctggaagtggctacaaaagaaatttcctgtgctttaggacaaggtacaagtacttagaattcagaaagccagccccctgttgacgagtatctgttaagttttaggtcaatatggaatatcacagttttgcataaaagcaagacatgcagtgcaattacattctgttgattctctgaaaggctgtaggaggttggatgggattctgaaaagcctgggtatgctggactaatggaggtagcaaaccgtctcatggtcaagggaaagagtgctttggagactgagcaggctgctgtccgagtactacagtcactgtttccacctctcttgcttgttctttacaaagctcttttagcgccaattgctaatggccaactagccgctatgatgcttggtgttcgttgagaaatgcaagtacctggaagagagcaagtgccttggcatttgcatcaacacatgcaaactgccaactcagactttcttcaaagatcacatgggtgttgatttgtacatggagccaaattttgaagactatagctgccagttcaacttcggggtgccgcctccacctcttgatactgacaaagccctcaaggaaccgtgcttggacatctgcacaaacgcaaggcggcgtagagagctcggaagaaatagcagcccagatgagctcagttgcccccaagtttgatatgctccctgtaaaagactgcacatcatagattattgcgcgttgggcttgggcatggtgtgccttgcttgcatttgtcagtcttcgtgcaacgatgtcaagtaatttcggtaataccatttctatgttgcagacacacacgttttcgattggatcaacatgactacatgagtaaataactctcagtctgatccatcagatcaacacccaatgaaacatcacagtgatctggatacaagttcactgggtatacaaaggaacatatacatagcaaatctgccattttacagggcaaacttaa

SEQ ID NO: 6432 - DNA, 1547 bp, Zea Mays
aaatacagcgatgtgatggtccgtgtttttgttgttgttgttgctatggttcgtgaaaatcactcgaaaaaaaatgcggtggacttgcggtaataccggtacgtacgcgtccgccacgcctaccgaactttggaccgtcacgaccgcctgcagctgcaggcaggctgctagctgctctagtcaagatgtgccggacatggacagcttcttcttggcaggggcgtttggaaggggatgccatgtgtgtggagccggccggcgcgcgacctaacgcgaaaaaagaacggagaaaagtggggagctaccatctggtggcgcggtctccatgattatgtcgacagttcaaccgcatgaactgcttagaaacaaagaaatctgttcgagttcgccgacaagtacagggggacatacgacagcagcatcgcggaggtgaagagctactacgcgtcggtgagcgggtacaaggacgagctactgtgggccgccctgtggctccaccgcgccaccggcagagatgactacctcgactacgtcgtcgacaacgccgacagcttcggcggcaccggctgggccatcaacgagttcagctgggacgtcaagtacgccggcgtccagatcctagcggcaaggctgctgctgagaggggagcacgcgccgcgccaccggagcacgctggagcggtacagggccaaggcggagcggtacgtgtgcgcgtgcctgggccggaacacggagggcggcgcggacgccaacgtggagcgcagccccggcgggatgctctacgtccggcagtggaacaacatgcagtacgtgaccggcgccgcgctccttctctccgcctactccgactacctggcggccgccgaggccggcggcgccgcccgggccgtgtcgtgcgcggcggcggccgaggaggtgttcgcgctcgccagggcgcaggcggactacgtgctgggcaccaacccccggggcgccagctacctcgtcggctacggctccaggtaccccggccgggtgcaccaccgcgccgcgtccatcgtgccgtacaagcacagcagggagttcatcggctgcacgcaggggttcgaccactggttcggccggcggggctccaaccccaatttgctcgtcggcgcgatcgtcggcgggccggacaggcgcgacaggttcagggacagccgcgacaactacatgcagacggaggcctgcacgtacaatacggccccgatggtcggcgtattcgctaagctgcgccggatggcgtggctggagcgggaacaggggtccacgtcggtgcccgtcaccgtcacgtccacggcggccgaggtgtaaatagataggatgtagaggaagggggctgtacaattttccccattctttagttcatttttttcgagctttgaatttcattttacacagatcgaggttattgtatacgagaaagaaaaaaaagagaaaagggtggaggcgcctacatgcatgtgcaattctgcaaaatgtaaattcactactggtacatatggagaaatttgacattatgaaacacg

SEQ ID NO: 6433 - DNA, 1657 bp, Zea Mays
tcctcctgcggccgtcctgctcctgctagtgctggctataaaccccccacggcccactcgggctcttcactcttccgatcccgacgaggtaaaaacaccgtcgctcaccaccaacacaacgccaaccaacctgccccctcacccccgctggccgctgcttaacaaaccgccgccacaggacaagacaaacttattacagctccacctcagtgctgcagagactgagggccagccaaaccgctcaccgcacacgcggaattcaagcagcatgtacgccgacgccgggttcgccttcgccttcgccgccgcctactcccccaccctcacttcctcgcagccccagccgccgccgccgccgttcgactacgccttctcctccgagccacccctcctctccatgcccgccatggaccacgacgcctacctggggaacttggtacagccatccatggtatcagaatatgacctgggaggagaaggggacctgttcaaagctccagaagccatcatcgaggaaccgctgctcagcctcgatcctgtcgcagctgccttttcaatgatggctggcaatggaagtgctgtcatggatcaaactattaaggacgcaggcatcggcaccatccaaaatgaccccctcctgagtgaggtgctgtacgagtgcgagaaggaactcatggagaagtccacaatcgaagagacaatttctgaacttatggatgttaagattcctatgctgcaagttgaagaaatcccaagccaagctgaacaggttcttatacagaaccagcagctcccggccatggagaaagagaagcaatccgttcctgaatgctcgctccaaaaaagtgttagttctggatgcctcaactcagcagattggatgaatggacctgccaggccaaactttctagacttccaggggctggactttgaggcagcatttgggctgaggagagcttacagcgaaaggagacattcagaaccttggagccaacacgcctcgaccagcagcaaatgtttgtgtgaccatcagtgacctcaagaccgaagaaaggaagcaaaagctttccaggtataggaagaagaagatcaagcggaactttggcaggaagatcaagtacgcgtgcaggaaggctctggcagacagccagccaagagtgcgagggagatttgccaagatcgaagaatgcgacctgctgaagccaagcaagtagatccaacatgctgtgtaataataatctcctccgggcccttgggtgcgagtgaagagctgaaaatttggtatggtagtctagcccccctgtactgtacaaaaggcttgaagatggtaataaaactcagctcccctcttgcttgcttggcattttttttaatgttatctgaatctgactgttagcattgtgctcctgaacatggatcattgggcaacaggaggaaaggtaacagaatatgatcatggtttcatattgtcctatcatgatggcattctgtccgtcaaataataataatgtctaatcccacagctctagaataatatgtacccccaaaaacaagaccaagctatcatgatggtatggatatggtgtaatatagatccaaaatctcatcgcaagtaatgtctaatcacacagctccagaatagcatctaccctctcac

SEQ ID NO: 6434 - DNA, 2098 bp, Zea Mays
aaaatatacggcactaaaaccgcggctcatgctaaccaccgatggaactaaatcctcggcacccaccacccatttagattgagtccagtagtttcctttttcattccacgacatcccctgcacatccttgccggtggcgacttcacctccacatcctgccagcggcgacttcaactccccatcctgccagcggcgactttacctcccatttcttgccggcagcaacttcacatccccttcagcactctgtcccaagatcaggatggctccagggaggatgggatcacgatgcaaaagggatgccctagcagaaactactcctactgaatatgagaaacagagggcagcacatgtgatgaggaacaaccaaatgttccaacggcttgggattaatcagctgcgcacaataatgactgctacaagagtaaggagcaaagatgattgttcagaggaatctgggtctttgtatgacggtgaggacagtgaaggctctgagcaagaggaggatttccaggttgcaaaaggtgtacgtagccacaactcaactcatgttgctgaaaaaactacgcaaggaacacgaggacataaaagggttgtggcccctggtgtaaatgaacaacaaattagaatcactaggcaaaggagtgctaccataaaccaacaatccttcctaaacctaactaccactacacatcctagttcaacagctaccacaaaccaagaatccacccaaaatattacttctgcaacacaatttacttcaagtgcagccgctgaacaaaattacacccaaggcctgactgctgctgcacaagctaattctcccatacaagctgacatcagcgaccacattgcagatgaagaattggtaccaaggcaaagaagtatgggcaaacaacttgaatccttgagcagagggttaggcactaagattccaatccaaatttatgatggaaagcgaaggccagaaccccctattcaggtcgcaaagtttgcatcagagggtgggatcatactcaggcaacatattccaatatttccacactggaaggagtacaagaagcaagagaacgagggtaaaattacagactatattggcaagcttgctggtcaattcaccatggatgtggacagtaaggcagtcaaagatgcatgtgttgatatgataaaaggagggcagcgccagatgaggtataggctgaaaaggaagtacttcaccggggttcctgcaaatcaagtgaggactacatcgcctgttccatgtatgactgatgaccaatggaaagatttggtacaaatgtggtctaccccaaaccacaagaggcaagaaaaatataaagatatggaacctagtgcaattgatcttttcaaggagatgcattgcagcaagaagaaaggatttagtgaggccgttcagaaagctataggtgatatggaagcaatggtggcaacaccagttgaagatggacagcatgtgctgtcttcgacagaagttgtttccaatgtgctatcgagttcaagtaaatttcttcacaatgctggccttttacctacctccaagagaagcaatacaaggactatctcgacaaggatgcaagagcttcagactcaattggacactgagaggcaagaaaaaaatggatttcgagaagaaatggaaaccttaaaggcccagtcacaagcatctgaggcaaccattgctaatcaaacgaccgagattgcagatttgaagaagtccttatcagaaaataacagtctccttcgacaaatattaagcatcaatcgtggccaaatgactcctccttaagtacacttgctagggtgttggtgtcaaccatcctgaagatcgatctcacaaaactttagacctcgttttatccttatgcttgctgtagaaattaataggaactacaacttgttctattgttcacttgttatagaggattatgaatcatgtttaatgttaaaagctatgtgttggatgcattatgcttgaaatatatgtggatattgttactttggatgtttgtaaaaaatatgtgcattatgtgtttgatggttgtgggcatcaagcattagtgacgaatcaaaatgtcag

SEQ ID NO: 6435 - DNA, 1744 bp, Zea Mays
cggttctaccgtcaacgcgccgcggattccccgccctcctccccgtctgctccccgccatcaacgcgcacgcgacctctgctctccgccatcaacgctcactgcatgcctcaccctctccccgccatcaacgcgccgcagatcccccaccctctccccgccatcaacgcgcaagcggatgccacggatccgcctatccgccataaacgccgatccatagatccacgctcgccctgcctcctacgacaccaaccgaaccctcaacctctcctacgacaccttctccagcccgctccccgacgacatcgagcgcctggctttcacagcggcgggacatggaggatgaacgagcaccgggagagagtcggttagatctaaatttccgtggaggtgagcttggacgaggtcaggttcaaacaggcatatctctgaacaccttgggttctctaggctatgagatagatcatggatcgagatggagaatagcagtgtgtcattctaaactgggtgatcagccgaaaagatcccatggataatcattaatgattatgtgagggagggaaccaacaaaggcactccatgggggaatggttgtggccaggtttgttaatggtgttgcggctgcaagcgtcgtgtggcatctgtcgcgaccaagcattacgagacagtctcctccagcgctttgcactgctcctatcaaggtcactcttattggcagtctagaaatgccaaaggatgacatatggcttgtcacagctatcctatctggtctcattgaataatgtgcgaagatataagtcacatctttcttggcctcctatcttcgcctccagctgggatgagtctgtctcattacgatggggtgatcttgggctttctgtttcacatatcttcaggcctgtgcctggatgctgtaccatgcttggtcctatgaatattgaagtaaagcaacggaaagttgtagctgttggtaggaaacggactgcacggccaacagaaaatacctgtcctgaagagcttgctgagtcttcagaggaagtaaagacagacactgacaggaatgtcttagttatgtttgatatcctcaggcgaaagaagagcgcaaaattggaaaaccttgtgttgaataggctttcatttgcccaaacagttgaaaatgtttttgcactatctttcttagtgaaagatggtagggtggaaataactgtagatgatagcgggcatatagtacggccaaggaatgcacctgctgctagcgctatagcctcaggagaagtctcatacagtcattttgtttttagatttgacttgaaggactggaagcttatgaaagaagttgttacagagggagaagagctgttgccacataggacttcccagagcaatctttgcaacgaagaaaacgaccaaccaaatctggaggtacgtgcacaaataatgcctatcaggaagaagagctcgtgcttatctgaacttccagttgtgccagcggagtagggctgtaattataaattgtttgaagttctggtcacatcttgcaactacagaatggtgtttgtagggctgagtgtaactagctagcttggctcgtgttgggtcattaagggtgtgtttggttggatgtatatggagggatggaaagggacgaccacatattctatagtgtttggattagagtcgcgtggggcgagataaacatcggagtaattttttggtggcggtgtgattcaaaaatttgactactt

SEQ ID NO: 6436 - DNA, 1794 bp, Zea Mays
cggttctaccgtcaacgcgccgcggattccccgccctcctccccgtctgctccccgccatcaacgcgcacgcgacctctgctctccgccatcaacgctcactgcatgcctcaccctctccccgccatcaacgcgccgcagatcccccaccctctccccgccatcaacgcgcaagcggatgccacggatccgcctatccgccataaacgccgatccatagatccacgctcgccctgcctcctacgacaccaaccgaaccctcaacctctcctacgacaccttctccagcccgctccccgacgacatcgagcgcctggctttcacagcggcgggacatggaggatgaacgagcaccgggagagagtcggttagatctaaatttccgtggaggtgagcttggacgaggttcaaacaggcatatctctgaacaccttgggttctctaggctatgagatagatcatggatcgagatggagaatagcagtgtgtcattctaaactgggtgatcagccgaaaagatcccatggataatcattaatgattatgtgcttgatcaaacgagaggtactgtcatatccagccaggttgtttctaatttaacagagggagggaaccaacaaaggcactccatgggggaatggttgtggccaggtttgttaatggtgttgcggctgcaagcgtcgtgtggcatctgtcgcgaccaagcattacgagacagtctcctccagcgctttgcactgctcctatcaaggtcactcttattggcagtctagaaatgccaaaggatgacatatggcttgtcacagctatcctatctggtctcattgaataatgtgcgaagatataagtcacatctttcttggcctcctatcttcgcctccagctgggatgagtctgtctcattacgatggggtgatcttgggctttctgtttcacatatcttcaggcctgtgcctggatgctgtaccatgcttggtcctatgaatattgaagtaaagcaacggaaagttgtagctgttggtaggaaacggactgcacggccaacagaaaatacctgtcctgaagagcttgctgagtcttcagaggaagtaaagacagacactgacaggaatgtcttagttatgtttgatatcctcaggcgaaagaagagcgcaaaattggaaaaccttgtgttgaataggctttcatttgcccaaacagttgaaaatgtttttgcactatctttcttagtgaaagatggtagggtggaaataactgtagatgatagcgggcatatagtacggccaaggaatgcacctgctgctagcgctatagcctcaggagaagtctcatacagtcattttgtttttagatttgacttgaaggactggaagcttatgaaagaagttgttacagagggagaagagctgttgccacataggacttcccagagcaatctttgcaacgaagaaaacgaccaaccaaatctggaggtacgtgcacaaataatgcctatcaggaagaagagctcgtgcttatctgaacttccagttgtgccagcggagtagggctgtaattataaattgtttgaagttctggtcacatcttgcaactacagaatggtgtttgtagggctgagtgtaactagctagcttggctcgtgttgggtcattaagggtgtgtttggttggatgtatatggagggatggaaagggacgaccacatattctatagtgtttggattagagtcgcgtggggcgagataaacatcggagtaattttttggtggcggtgtgattcaaaaatttgactactt

SEQ ID NO: 6437 - DNA, 1823 bp, Zea Mays
cggttctaccgtcaacgcgccgcggattccccgccctcctccccgtctgctccccgccatcaacgcgcacgcgacctctgctctccgccatcaacgctcactgcatgcctcaccctctccccgccatcaacgcgccgcagatcccccaccctctccccgccatcaacgcgcaagcggatgccacggatccgcctatccgccataaacgccgatccatagatccacgctcgccctgcctcctacgacaccaaccgaaccctcaacctctcctacgacaccttctccagcccgctccccgacgacatcgagcgcctggctttcacagcggcgggacatggaggatgaacgagcaccgggagagagtcggttagatctaaatttccgtggaggtgagcttggacgaggtcaggttcaaacaggcatatctctgaacaccttgggttctctaggctatgagatagatcatggatcgagatggagaatagcagtgtgtcattctaaactgggtgatcagccgaaaagatcccatggataatcattaatgattatgtgcttgatcaaacgagaggtactgtcatatccagccaggttgtttctaatttaacagagggagggaaccaacaaaggcactccatgggggaatggttgtggccaggtttgttaatggtgttgcggctgcaagcgtcgtgtggcatctgtcgcgaccaagcattacgagacagtctcctccagcgctttgcactgctcctatcaaggtcactcttattggcagtctagaaatgccaaaggatgacatatggcttgtcacagctatcctatctggtctcattgaataatgtgcgaagatataagtcactggctatcaatttctgtgaatcagatctttcttggcctcctatcttcgcctccagctgggatgagtctgtctcattacgatggggtgatcttgggctttctgtttcacatatcttcaggcctgtgcctggatgctgtaccatgcttggtcctatgaatattgaagtaaagcaacggaaagttgtagctgttggtaggaaacggactgcacggccaacagaaaatacctgtcctgaagagcttgctgagtcttcagaggaagtaaagacagacactgacaggaatgtcttagttatgtttgatatcctcaggcgaaagaagagcgcaaaattggaaaaccttgtgttgaataggctttcatttgcccaaacagttgaaaatgtttttgcactatctttcttagtgaaagatggtagggtggaaataactgtagatgatagcgggcatatagtacggccaaggaatgcacctgctgctagcgctatagcctcaggagaagtctcatacagtcattttgtttttagatttgacttgaaggactggaagcttatgaaagaagttgttacagagggagaagagctgttgccacataggacttcccagagcaatctttgcaacgaagaaaacgaccaaccaaatctggaggtacgtgcacaaataatgcctatcaggaagaagagctcgtgcttatctgaacttccagttgtgccagcggagtagggctgtaattataaattgtttgaagttctggtcacatcttgcaactacagaatggtgtttgtagggctgagtgtaactagctagcttggctcgtgttgggtcattaagggtgtgtttggttggatgtatatggagggatggaaagggacgaccacatattctatagtgtttggattagagtcgcgtggggcgagataaacatcggagtaattttttggtggcggtgtgattcaaaaatttgactactt

SEQ ID NO: 6438 - DNA, 3625 bp, Zea Mays
cggttctaccgtcaacgcgccgcggattccccgccctcctccccgtctgctccccgccatcaacgcgcacgcgacctctgctctccgccatcaacgctcactgcatgcctcaccctctccccgccatcaacgcgccgcagatcccccaccctctccccgccatcaacgcgcaagcggatgccacggatccgcctatccgccataaacgccgatccatagatccacgctcgccctgcctcctacgacaccaaccgaaccctcaacctctcctacgacaccttctccagcccgctccccgacgacatcgagcgcctggctttcacagcggcgggacatggaggatgaacgagcaccgggagagagtcggttagatctaaatttccgtggaggtgagcttggacgaggtcaggtatgtcgcctccttctcttcctccaccgacttctacacgctccaggcttgcgctggtgttgccagccattccttgtgctcgacctcgcgtctgcgttggactccgcccctctgccaccgtctccagcgccgacgttgaagagacaacgaaggcgtccacactagcccatgcccccgcctgcctccgtccccgcgacacccagcccccaaacctcgcccgctccccgcgtgatggccgcccatcccgccgtgcccaccccctacccccaccaaccgccggagcctacctcgcctagccacttaagcggggaatccacccgtcggcgccgagagcgaggagcctggatccaggagcgggcaggccgagtgggcgggagggggcgaggacctgcacctctgcatcgacgacagccaggcaaggtggcacgcgccgcccgagcatgctcaccctgcagttcccgtggggtacccgctgctcgcacgcctgtcggtgcgtgggctcaacctcagggccgtcaacaacgccatggttgccatgctcgaggtcatccacctccactccgtcttcctcaccgacgcctcgctgcgccggatggtcgccgtctgcccctgcctccagaaccttgacctccgctactgctgtcgcctggttgcgtcaacttcaccaatgtcggggtgcgcagcctcacgagcttcaccgtcgtcgactacatccacaccaccgagctgtgggtcctggtaccggtcacgccctgcctctgctccttccgcttcagcgagtggcaggctatcacttcactcgatatcaatacgctcgatcagtagatgtagcgaacaatctaatgaagaaatagtatacgatgataaatcatgggctagggcgtgaccggtaccagaggcatctctgtgaaatcgagcggaaggtggtggtgctgaatgactccttgatggccaaatttcgtgatagtttatgggtagtatgtgcacgggcttgagcctttactttatttgagtgaagtgcatgagaagggagttcatgatctgtggagagcgccgacggatgagatttgcctgccactaatggtatcactgtgccaactgaattatttgcgtttgccacgccatgcttgatggctttgcctgctgatcttaagactaaggtattgcattttttacctggggttgatcttgcaaaggttgagtgcacgtgcaaggaaatgaggaatcttgcattagatgatagtatttggaagaagcttgtattcaagtataaaaattatggtaagggctgtagggggcgagcaagagtgcgaaggccatatttggagaagcttggcaggccaataagagatggcagaagaggcctaatccaaccttttggtacaatggctggggaaacaattcttttagccgtccacttaggctgccattgatggtgggaacttagacagacttccttttattggaaatcatggttctgtagggcgtcactttagaaataaacgaaggaatatcttgctaaattgcattcttgatggtcaccggtcaccgccacaacttcctttgaagccatgccaatgagtttgacttgtatattaagagtggtcggtaagtagtgcatagacggttagagcgccttgttcttatcaaatatcaattatcatcaactcacacattatgcatatgccttatcctaataaatcccccagtactcctttctatttacacagaaggcttttgtgactgctagagagtgatagacaaggtcgataattgtatggtttaatttctttccattttttatccaagattttttacttggtaaatgatggtgaactttcggcttagtgcaatcgcaggttcaaacaggcatatctctgaacaccttgggttctctaggctatgagatagatcatggatcgagatggagaatagcagtgtgtcattctaaactgggtgatcagccgaaaagatcccatggataatcattaatgattatgtgcttgatcaaacgagaggtactgtcatatccagccaggttgtttctaatttaacagagggagggaaccaacaaaggcactccatgggggaatggttgtggccaggtttgttaatggtgttgcggctgcaagcgtcgtgtggcatctgtcgcgaccaagcattacgagacagtctcctccagcgctttgcactgctcctatcaaggtcactcttattggcagtctagaaatgccaaaggatgacatatggcttgtcacagctatcctatctggtctcattgaataatgtgcgaagatataagtcacatctttcttggcctcctatcttcgcctccagctgggatgagtctgtctcattacgatggggtgatcttgggctttctgtttcacatatcttcaggcctgtgcctggatgctgtaccatgcttggtcctatgaatattgaagtaaagcaacggaaagttgtagctgttggtaggaaacggactgcacggccaacagaaaatacctgtcctgaagagcttgctgagtcttcagaggaagtaaagacagacactgacaggaatgtcttagttatgtttgatatcctcaggcgaaagaagagcgcaaaattggaaaaccttgtgttgaataggctttcatttgcccaaacagttgaaaatgtttttgcactatctttcttagtgaaagatggtagggtggaaataactgtagatgatagcgggcatatagtacggccaaggaatgcacctgctgctagcgctatagcctcaggagaagtctcatacagtcattttgtttttagatttgacttgaaggactggaagcttatgaaagaagttgttacagagggagaagagctgttgccacataggacttcccagagcaatctttgcaacgaagaaaacgaccaaccaaatctggagggaaatatggagggatcatgatgtggttcaagtactatgatgatcaagatggctacaattcttgagtgaagagtgatgtttaggttgttgtctgtggtgtgtgacaatatctgtgtgttacttgtgtgtatgtgagaaattatgtgactctggagtctggatagtgcaataagtattactcaagtatatgattgaatcttatgtcatactattcaaattatgtcatatgtatcttttaaggtatgtaaacatccacttttagcgatgttaacaaaagaatagaacaataa

SEQ ID NO: 6439 - DNA, 1130 bp, Zea Mays
agccgccgccatcccttctccctctccctcctctcctctagcttctctccctcgcttccctcccctgcagcttcctcacgccatgcttccggacccgcgccaagccttggccacgcagcgagcgcccaacccgacgcagccgcgacaccgaccctgcccctccctgcactcgacgcgcctggagccccgccagccgagtactgtgaagcgcgccaccgaccggcatccagacccgcgtcgagccccagcccgacaccccggcttccccgcgtctacgcagcagcgccctgctcatccgcaagaactggcagcgaagcttgtcgttaaggagatattaatcatgtggagatgcagagctagatctctacgtcagtgcttgatttgatttgtttaacttcccatggtaaaagttgctcagatcccatgtagttcagctttgttttcttatagatcagttggatgtacttgcttttttgtataaaggattgacggagaggaagcaaaaaatgactgtatgggagaatatgcagaaagctgaagcagaagcagccatacaaaaccttgtgataaaacttgaaaagaaaaggccatactcgctagagaggattttcaacacccttaggtctggctctcggaagacacaggtggtacgcagtacatcaaccgcaaatcagaatcagcatatttccagaactatcaaaacggcgccaaacctcagcaagaacggtcaaatgagttcattgagtggatgcttcagacaagatctatagcatggatcataatctggattgtccttaagtttttattgtgctaggggaacataagaaagtatgtagagcaaaatgagaggagctgttgttaccctcaattctttgtgattattgtgctagagtgatgtagttgtttggctttttgaacaatagctggagtgatatgaaacattagtgatctagttgtgaatgatattataattgtgatggttttgtgaatatataattgtggtgcttttgtgtttatgtgatggatctatgactgtggtatactgattaactgtgtatgtctttatgatttgtgtataaaaatctgtgatttatggtgcttaattaaatgtatattattattaataaaaa

SEQ ID NO: 6440 - DNA, 1185 bp, Zea Mays
cctggctcctagcagccgccgccatcccttctccctctccctcctctcctctagcttctctccctcgcttccctcccctgcagcttcctcacgccatgcttccggacccgcgccaagccttggccacgcagcgagcgcccaacccgacgcagccgcgacaccgaccctgcccctccctgcactcgacgcgcctggagccccgccagccgagtactgtgaagcgcgccaccgaccggcatccagacccgcgtcgagccccagcccgacaccccggcttccccgcgtctacgcagcagcgccctgctcatccgcaagaactggcagcgaagcttgtcgttaagggatccaaaaacagataaacaaaattgttttgggctgattccaaaatgacccaaatctgaacttttgcaagacattaaggagttcttttccttttcaggagatattaatcatgtggagatgcagaggtttgtaaaacctgtccaactaggctgccccttctgttttcatgtccatactaattaaatttgtaccgcaggattgacggagaggaagcaaaaaatgactgtatgggagaatatgcagaaagctgaagcagaagcagccatacaaaaccttgtgataaaacttgaaaagaaaaggccatactcgctagagaggattttcaacacccttaggtctggctctcggaagacacaggtggtacgcagtacatcaaccgcaaatcagaatcagcatatttccagaactatcaaaacggcgccaaacctcagcaagaacggtcaaatgagttcattgagtggatgcttcagacaagatctatagcatggatcataatctggattgtccttaagtttttattgtgctaggggaacataagaaagtatgtagagcaaaatgagaggagctgttgttaccctcaattctttgtgattattgtgctagagtgatgtagttgtttggctttttgaacaatagctggagtgatatgaaacattagtgatctagttgtgaatgatattataattgtgatggttttgtgaatatataattgtggtgcttttgtgtttatgtgatggatctatgactgtggtatactgattaactgtgtatgtctttatgatttgtgtataaaaatctgtgatttatggtgcttaattaaatgtatattattattaataaaaa

SEQ ID NO: 6441 - DNA, 2566 bp, Zea Mays
cggacacgcgcggcgcggtgctttcagttcgtgctccagcttttccgtctagtttaatggtttttcctagtcgtcctccgtcctcctcagctctggctgccaaccccaagaagagaacagccttgcctagtcactaggccctagtgtgcccattgcctagggaaggaggaacccaaggagaggtgcgcggctggtggcatgcgagtggcagcggtgccgcgggactcttctcctcgctggccgtgcgcgccgtgccccgacggaatccaggtgacaccctgatattgatgtgaagttttgtggaacctcctgcatccttatatggtattaacaataatttaattgtctgggtgatccatttgagcaaatggaaggcaacgacctaccccctggaaacatgttgcaaggggctccctatgatagtttagacttacatggcgactctatggcaaaacatgccccaaactcaggaaaacagatcttcagcagctcccagatgccggggactttcacaatgtctatgaccagggctacagaacctgatgactttcctgggtttcagttcaaagaacatggaaagagtgatgaccaccaccaccaccaataccatagtcatcaccaaaagaactgcatgagtgatggtgaagaacatgatatggctgaagatgctactgataccccaagtggaaaaggcaagaagggctctgcatggcatcggatgaagtggacagattcaatggtaaaacttttgattacagcagtgtcttacactggagatgatcatggtgctgattctggtggtggcaggaggaacattgcaataacgcagaagaagggcaaatggaaggcgatatcgaaggttatgggagagagaggttgccatgtgtcaccgcaacagtgcgaggacaagttcaatgaccttaacaagagatacaaaaggctgatagacatccttggcatgggcactgcttgcaatgttgtggctaatccagcacttcttgatagcatgaatcatctttctgataagatgaaagacaatgcaaaaaagatacttagctcaaagcacttattttatgaggagatgtgttcctaccacaacaacaaccgtgcaaatttgcctgaagatcatgcacttcagcattcactactgcttgcccttagatgtaaagaggagcatgatcttcggagagcaagtggagatgctgatgaagacgatcgaagtgcggattctgattatggggagaatgatgaagagcaatatcctgtgcatacacgcatgagggagccctcaaccaccaaaaggaagcgccacagagatgtggctttggtcacatcaaactctcatgaaggcagtgagaggtctgatccccatgatgtaacagtggacatcaacaaggctttcacagatgcaaccaacatggttttgttgcaacaggacttggcttcacaagccatagagattcagaaacgtcgcttgcagattgaagcaaaggaactggaactcacaaagcaacgtcacaagtgggagcggttcaggaagaagaaggacagggagatagaaagaatggcactggagaatgaacatatggtgattgagaacaaacgcttggaacttgagctgagacataaggagttagagctagagcttaagctgaaaggcaaggggaaccatccataacttaattcttgatcaacactacaatatttaagatggtaaacaagcatctcttcctaccagctacttcgcagaagccctgaacactgctacccatctccttaaccaccggagggagggcgtgcgggggcccctgtcgacagagggtgaggggccttgcctccggagggcgcccgaccaccagatggcacaccgtagagggctatggtggaggcaggggactaagtctccaaggtcacggttgagcttctggaagataaaggtggtagattagagcagaacctgacaaccatttctgtgcgtatgacttttgttctgtgtttttctgccctgtgtcatgtactggttgggcctcctgcatgtttaccctttctgcggcagtagtattgggcttgatgtgatctgtaagactgttacttccatcttgcccagtgtttcaatttttttcgtcagcatgtatatcgaggtgatgcgatgatgtgaaggtagtggaaggtctgctgatccacattggcttcaaaacgtagcattaccagagatagcagcaactgacactacactgaacccttggatggcccacgcccttgattagtacggcgagaacgaaactcagctaacttctctggatacttaagaaaacattgatcagaccgatgcgtaggctcaaagtagccaccttttccatcatacttgtgagaagctgctaacacattatgggacaaaggagtatgaggtacatacatagatgagaggtgagtctcctcagcaagcaaatcatataaagcctctgtcatggtcagacttgtagatctatgaagcagcttggtacgaatagcctcaaaatctgtcctgagacccataataaatctatatgtgaagactttttcaata

SEQ ID NO: 6442 - DNA, 2353 bp, Zea Mays
aactattactagtagattattcaaacacccgtctagttctacttgttggaagggtgccgctctccacgagatccaaacccccgcacccgcggcgccggcgacgcagggaggaggcgatgcacggccgcccgcggcgaccggccaagctcgaggacgaggaggcggcgtcagcgaaagccgccaagcttcgggacctccaggcccaggtcctgcacaatcaccatggccgcacgtacacaaaggaggcaattgggctgagcttcaagctgctcgagataaatccagaggcctacaccgcatggaactaccggaagcttgcgtttcagcacaatgtcaaggagctttctgatccggaggccatcaagtctgctgttgatgatgagctgagagtggttgaggttgctttaaggcaaaacccaaaatcctatggagcttggtatcaccgtaagtggttgctatgccaaaagctagcgcccgtggatttcaaacgtgagtttggcctcttggataaactgttgaaggtggacgccaggaattttcatggatggaactacagaaggttccttgcaagattcatgggtgtgtcagatgaggaggagctaaagtatactatggataaaatcagcgacaacttcagtaattactcagcatggcataatcgtagagcaaaggttttgagtcaaagcagaagattttttccgaggagtttgaacttgttactcaagctctttttacagatccaagtgaccaaagtggatggttctatcacctttggcttttagctcaaacgtcttgtccagataacccccagctgattgcttcatggccttctaatgctgcaaagctcagttcctctttgatcaaggaaaaagctgagcagcacagacagtcatccatcttgtcaaggactgtacccattgttctttattttaatgagcctgtcaaaggattaaatcaatcaagtgttaacttaaagtctgatttggagttcagtaaggatattatatggaggcccctcacaatggcagactctgggtattctaactgttgggccacagatctccagattataaatgaatgtagcagtttgcaggaatattctgttgaagtgagcataccctgctcgaatggcattgtatctagaagtggctctaactacaattgtcctgtgcattttacatttggcattgaattgatcagcaacgatccagtacagggtttagatatgtttgataagccagttgcctggaattgctcagaatcattccagcctcatgggaaccgtgatcctatcccttttgatctgctaaagattactagtgccttgatcgagcatgactcaaattggcattttgaaagactatctgaggaaatagatcttttcagagagttacctgatgacaacagcaagtttgggaagttgacattagcccggttattgcttgcttgttctgctataaaatctcgtggaagatctctaattgaaaggaagggatactgtgaagaggcactggggctcttcactgacttgattcacctggatccatctcataagcagtactatgaggatgaacggagcttagtcctgatggataaattaacatgtgacatggagactttcatgaagcactgttcagttcaggttcaaccaaattcagctcccctgaatcatgtgcagctttgcagattatctctaacatgcattggatttgctgaacgcctgttgtgggttcaaatgctggacctaagccataatagtctgagatcagtcgaaggattggaggctttgcagcaccttgtgttcttgaacatcagcaacaaccagatcagtggtttcacagcacttgaatcccttacgaagataatctcattgaaagttctggatttatctttcaacaagattggagctcactcaattgacacaacacggtatatctgctcgtctccattctcacacaaaatggaagcaagtgaagcttttgaagcgtaccagaaggtaaatatcaacgtggaggaatactgggatgccatactgtttttcagatctctgaagttggcacagcttgatataaaaggaaatgcagttgcaagcaaggagaacttcagaactattgtcatgatgctcattccttgtctaaaatggtttgatggtgaagatgtcaattaaaatggagttgagcaatgatagtgtcaaggctcacgctgtaaaccattttttgctagaaggcattgatttgcatcatatgtactgctatatttgtttaaaaaactcggccggtaggggaaagaccgtccccctcctgtattatattaataagaagttcaatcgcagccccgatcgagtaagatcacg

SEQ ID NO: 6443 - DNA, 2380 bp, Zea Mays
aactattactagtagattattcaaacacccgtctagttctacttgttggaagggtgccgctctccacgagatccaaacccccgcacccgcggcgccggcgacgcagggaggaggcgatgcacggccgcccgcggcgaccggccaagctcgaggacgaggaggcggcgtcagcgaaagccgccaagcttcgggacctccaggcccaggtcctgcacaatcaccatggccgcacgtacacaaaggaggcaattgggctgagcttcaagctgctcgagataaatccagaggcctacaccgcatggaactaccggaagcttgcgtttcagcacaatgtcaaggagctttctgatccggaggccatcaagtctgctgttgatgatgagctgagagtggttgaggttgctttaaggcaaaacccaaaatcctatggagcttggtatcaccgtaagtggttgctatgccaaaagctagcgcccgtggatttcaaacgtgagtttggcctcttggataaactgttgaaggtggacgccaggaattttcatggatggaactacagaaggttccttgcaagattcatgggtgtgtcagatgaggaggagctaaagtatactatggataaaatcagcgacaacttcagtaattactcagcatggcataatctatacttctgtccaacctactgatccagcagagcaaaggttttgagtcaaagcagaagattttttccgaggagtttgaacttgttactcaagctctttttacagatccaagtgaccaaagtggatggttctatcacctttggcttttagctcaaacgtcttgtccagataacccccagctgattgcttcatggccttctaatgctgcaaagctcagttcctctttgatcaaggaaaaagctgagcagcacagacagtcatccatcttgtcaaggactgtacccattgttctttattttaatgagcctgtcaaaggattaaatcaatcaagtgttaacttaaagtctgatttggagttcagtaaggatattatatggaggcccctcacaatggcagactctgggtattctaactgttgggccacagatctccagattataaatgaatgtagcagtttgcaggaatattctgttgaagtgagcataccctgctcgaatggcattgtatctagaagtggctctaactacaattgtcctgtgcattttacatttggcattgaattgatcagcaacgatccagtacagggtttagatatgtttgataagccagttgcctggaattgctcagaatcattccagcctcatgggaaccgtgatcctatcccttttgatctgctaaagattactagtgccttgatcgagcatgactcaaattggcattttgaaagactatctgaggaaatagatcttttcagagagttacctgatgacaacagcaagtttgggaagttgacattagcccggttattgcttgcttgttctgctataaaatctcgtggaagatctctaattgaaaggaagggatactgtgaagaggcactggggctcttcactgacttgattcacctggatccatctcataagcagtactatgaggatgaacggagcttagtcctgatggataaattaacatgtgacatggagactttcatgaagcactgttcagttcaggttcaaccaaattcagctcccctgaatcatgtgcagctttgcagattatctctaacatgcattggatttgctgaacgcctgttgtgggttcaaatgctggacctaagccataatagtctgagatcagtcgaaggattggaggctttgcagcaccttgtgttcttgaacatcagcaacaaccagatcagtggtttcacagcacttgaatcccttacgaagataatctcattgaaagttctggatttatctttcaacaagattggagctcactcaattgacacaacacggtatatctgctcgtctccattctcacacaaaatggaagcaagtgaagcttttgaagcgtaccagaaggtaaatatcaacgtggaggaatactgggatgccatactgtttttcagatctctgaagttggcacagcttgatataaaaggaaatgcagttgcaagcaaggagaacttcagaactattgtcatgatgctcattccttgtctaaaatggtttgatggtgaagatgtcaattaaaatggagttgagcaatgatagtgtcaaggctcacgctgtaaaccattttttgctagaaggcattgatttgcatcatatgtactgctatatttgtttaaaaaactcggccggtaggggaaagaccgtccccctcctgtattatattaataagaagttcaatcgcagccccgatcgagtaagatcacg

SEQ ID NO: 6444 - DNA, 2479 bp, Zea Mays
atggcgtccccgtgccacgaggaatctgggagagggagaggacccatcgccatggccatggccagaggtcgcatcgccatgggtggcagtggcctccactgtgcatctgcaatccactgcggaaagagaagaggaacttgttgctctacgcaatttgcggatactttagggaatcgtgattcgaacaatatttcattagagaatgccaaatcatacaagatagaagcattcaaggctcaaatgcagctaccattcccgaaacttttgtgtctaatgacgatgcaagctgccaaagatccgcgcgtcgacgagaggggcggagtcggcgacgagcagatggccggaggcggccccgccgcgtcggcgctttcaagcccctggagggctctgctccagcgagcgctggacgccaacgcccacctcaggctacggtgggcgccgccggcaggccggcgaaccgcaccgtcgtgttcaggggttttcaggaactctgtgataagattcagattaacacggacgcccgaaccaacaagattggtgagatcaagagctgcccctttggtgagatttgttggtacttcacagatagctgggagcaattccgtatcagtggcagcatagatgtgattgatgcttctactacagaccctgccaagctccagcacaaggagaaagcatggttttcaagttcagtgaagtcgagatcgcagtacttaggaccacagccaggcattccggttctagatgatgagcatgttaaggacgttcatctcgatcctttagctggcccagtagatgccttttgccttctggttcttgatccggaaaaggttgattatttgaatctgaaaagcaatcaaaggttgatctttacaagaagacaaaaggatgatggatccaatgattggatggcagtaaaagttagtccttaagctgctgcaaaaactttatttgtgagcttctcttggtaactagactatcatgattcttctgtgttttcatatcatttgaaatgttaggtgcatatcattatgtatatttgagaggccttttcatagtcatacatttatatattgggaatgctttgtaatctcagggatttgttattttttgttaccctcaaatatagaagataaagactgtaaggtatttaggaaggagtcaaagcaggctgtggctattcatgtttgtcaaagccgttggtcttgagatttgtttgaagatgagcgtggctcgtgtttgccactcgtgcttgtttttgtgcataagttatctgtgtgagcagaatgcagagacagcatgtgttggctttaataaactaccagcatattccatgggaagtattaaagctgtgtctacacttgcaattgcaacgatgtgctgagaacaagccgttggatggttggagaacttcaggtccgctgcgcaagtcatgaatgtggtcttggaaatcaaagctgattgctgttatcctgcaaaaaccgtcaggcagacacaccacatgatctgccctttttatctaacagtgcagactgccgagcaataaacacatattgattaccgaaagaaccctttggctgtagtgggcagtgggctcctgattatgaacagttccagatgaaagcgtgctaatggcattatgtcgttgcaaaagtaaatggtagtgaactgtcgcagccatgttttgtctgaggccccacccagttgcaaagcgtaagtgttgatgccaaatctagaacttgtcacgggggaccgaatgactattggttcatcttgactactaccgcgtctcaatcatctggcactcgagaggaatagataatcatggtcacctttgaaggccagtcaaaatgctactccattgcggctgattggagaggtcaaaggtggctgttaaattggatattcggcttttgcatcgaggacttttggcagccttttcttcctccatctctctactccatctggtattgtggcggtgccaaacataagtcatggctcatcacttttgcaaagcatgcaagggacatgtttgggcataaagcagatgtttgaggtcaacagcaagtctgagctgcaagttgttaatggtgggttcgttaaaaaacgactgtgaaggccttctctggtttcgtctttggacagtggtccctttttgcctattgggcctttactggtctaaaggcctggaagatgtgggccatgcacagcttggcatactcacctagtggataactctcggtctccactctgcagaaggtgttctgaaggcctggaagatgtgggccatgcacagcttggcatactcacctagtgggtaacactcgttctccactctgcagaagatagggtgtggttatcatgcacaaacacaacaagaggaaggaagaattgcagatagcggcggcacgctctccatccgtcccggtgtcccacaaagccaagcagcgagttcctggagacacgggcacccatccaa

SEQ ID NO: 6445 - DNA, 1739 bp, Zea Mays
cgagagcgagttattatggaagtccgcgaacaaaggcattaaatcatttttgttaggatagtggaatgaagttctagcattgtccttgtgatgttacatgacacatggcaaaaaaaaaactagcagatggttcgcatactcgttactactaaagctaaatcatcaatgcaatcaagaatcaaaccgttcccaatgtgctgtaacctcagtcaaaggaagaagaaaaccaccatcatatatgtctccaacagtgtggctctaataatttccctgcagacaaagtacattacacctgctggcaggactactagtaccacgccacagtgtttccagcattattattattattattattattatttttacctatgggtactgccacactgtatccatctttctctgcccggcgcttatataacgcctccccatgcttctactcctttccaatctgtgtttgtctttgcttgccccccttctcccccctcatctccccccttttcttgttcctgtgcctgtgcattggctggcgatggggtccacttctccttcaggcctggagctcaccatggctgtcccgggcctcagctcctcctctggctcagaggggtttggatgcaacaacaacaacgggagcgggaacgggaacaacatgagggacctggacatgaaccagccggcgagcggcggcgaggaggaggagttcccaatggggagcgtggaggaggaggaggacgagcgcggcggcgccggcgggccgcaccgcgccaagaagctccggctgtccaaggagcagtcccgcctcctggaggagagcttccgcctcaaccacaccctcacaccgaagcaaaaggaggccttggctgtcaagctcaagctgcggcccaggcaggtggaggtctggttccagaaccgcagggctaggacgaagcttaagcagacggagctggagtgcgagtacctgaagcgctgcttcggctcgctgaccgaggagaaccggcgtccgcgctcaccatgtgcccgcgctgcgagcgcatcaccgccgcaacggccgcgcgcaccccacgcccgccgcccgccgcgagccccttccacccgcgccgcccgtccgcggcgttttagcctagtcccaccgcatgcgactccggccggtaggggaaggagccgagagagtttggttgttagggccaggggggcaaagtggttgtgctgtgtaaatttgatgatggatggagaaaaccagcgcgggcccgtgtagctttttaggtgtaggtgtagggtttggaccttggagtcccttcgcgtcaacgtccccgtgttccgttccatgccgtgcatggctgatggatcaaaagtttgtactagcttcctatcgttgtcactccattcatgaattgccttcggacccccgcttcgatctagatatctgatgatgggcccgtttctgtttctatatggctgttcgaagcctcttgttgtgtttccacgcttgcggtcccaccttgttgggccttgtggatcgtgcgacggttcaatcggtattctgtttgggcttctactccaagtgacgccaataatcctgatatatatattgtttcattggttcctctaccatttaaggtcttattcagttaatcctgttacccatagattagatggaatttaaaaaaaattaagaagaagtaatataatgggctgccggttttaagaaatggccatcaggccatgccaggccatgcgag

SEQ ID NO: 6446 - DNA, 3644 bp, Zea Mays
aaagaaatcaatgttgattttcatgcccccctggaaataaatgaatcttgattcaaatcccacgagtttgcatccgcgtcaaatgggctgcgcgtctccgtcgtttcttccgagcacacggcagcccaccggatcggtcgatctagagatggtgtttgtttgtcgcagtcgcaaccgaatcacactgctcccatataaatagaatggcgccggcgaccggcgttgcccacttcacattcacaagaccggaggagcccactcctgcatgtaactcagatactccacccgagagtccgcaccaactcacatcacacctcaccttccactccagaagaagaagccagaccggaatcccgagagccctgcccctgctccctcggttcctcctccgttgggcgtttggccgccgggggtggtgggccgagaccgagatgatatcgtggaacgatgtatacacggtgctgaccgcgatggtgcccctgtacgtggccatgttcctggcgtacgggtcggtgcggtggtggcgcatcttcacggcggaccagtgctccggcatcaaccgcttcgtggccatcttcgccgtgccgctgctgtccttccacttcatctccaccaacgacccgtacgccatgaacctccggttcctggccgcggacacgctgcagaagctggtcgtcctcgcggggctggccgcgtgctcgcgcctgccctccaggctggcggcgccgcggctggactggtccatcacgctcttctccgtgtcgacgctgcccaacacgctggtgatgggcatcccgctgctgatcgccatgtacggtccctacgccgggtccctgatggtgcaggtggtggtgctccagtgcatcatctggtacacgctgctgctgttcctcttcgagttccgcgccgcgcggacgctcatcgcggaccagttcccggacaccgcggcggccatcgcgtcgctgcacgtggacccggacgtggtgtcgctggagggcgggcgcgccgagacggaggccgaggtggcggaggacggccggctgcacgtgacggtgcgccggtcgtcggcgtcgcggcggtcgctgctgatggcgacgccgcggccgtccaacctgacgggcgcggagatatactcgatgagctcgtcgcggcagcacagcccgcggggctccaacttcaaccacgccgacttcttcgccatggtcgacggcgcgccgcccccgccggcgcccggcgcgcgcgcctcgagcttcggcgccgccgagctgtactcgatgcactcatcgcgggggccgacgccgcggcagtccaacttcgacgagcgctcggcctcggcccggtcgtcgaggcccgcggccgtgcccagccacgacgccaaggagctccacatgttcgtgtggagctcgggcgcctcccccgtctcggacgtcagcggcctgccggccttcaccggtggtggcgcgggtggcgtcaacgtcggcgccaaggaaattcgcatggttgtccccgccgagatgccgcagaacggctcggccggcaaagagaacgagaacaacggtgcagcagcagcagcgacgggggaagccgagggtttcggcttcagatcaggcggcaagacgacggcggaggacgccgaggcgggagaagcagcagggcccgagcagctaacgaagctggggtccaggtactcgacggccgagctgcgcgcgaaggacgacggcggtggcgcgggctcggcggcgcagcagatgccgccggcgagcgtgatgacccgcctgatactaatcatggtgtggcgcaagctgatccgcaacccgaacacgtactccagcctcatcggcctcgcctggtccctcgtcgcgttccggtggcacatctccatgccggcggtcgtggccaagtccatcgccatcctctcggacgccgggctggggatggccatgtttagcctgggattgtttatggcgctgcagccgaagctcatcgcgtgcggatggcgcgccacaggcgtctccatggccgtccgcttcctcgccggccctgccgtcatggccgccgcgtccctggccatcggcctccgagggacccttttgcggatcgccattgtgcaggtaaatccatatacggtctggttaatttggatgcatatgtactaatctctctgtccacgtatatgaatttgagaggttattattagagcggttagatatagaatttaaatttaaaatttacactaaaccactctaacctatatggattgaggtaaataagttctacttgtctgctttagagaattactagtagccttcaaaagtgagttctcgtcttgcccaattcaataatcactggtccaggtagacaataactgatcaggtggagctcctggctttatatcaatcctagtggcaaccacaatatgtttggagatacatggtctagtatcagtgacattagatgaaccaaacagcaccttagtgcatatgaactgcttttgtgaaatgcattgtggttgctctaagttagtgtccctatttcttacccaaggctcctacattatagcattagcatacatcctttctaggctcaatttttagcagtaggccactactagccccaaatcaggatcttactttcatgactccattgtcagtcacatctcagctccttttcttctctctccaatcttgcaccactgtccatagccaccgacttttgttgtcacctgccatgcatggccctcttactgccgctggctgtcatcattgctccctcgctccacagttgttagtcagagaggttaggcttccagtagagggacaattaacctataggaggtgaggtttaggctggaagggagagtctccttgcctctttgctggaggaccgccaagagggcacgtacgcatgtgaagagcgcggagctcatgcagaggctgttgtgaggatgcaacaacggcggctctaccgcaagggatcgtgcccttcgtgttcgcgaaagaatacaacgtccacccggccatcctgagcactatggtaatttttggcatgatgatagcgctgccgattaccttgatctactacatccttcttggactgaagccagtgtagtgtagctgcttcgttcgtcctgctgcacacacatgatgaggcatgcatgagcgaggtcctagtagaccaccatggacgacgctgagctggttgcactcgagcgtggcccacatgcatggctggagccttgtaattttgagtcagctccagtgttccctttgtgggggtgattagacatgcatgcggtttttgttgcttattactaatccatcttgtcgtttgaggattgcatgtagtgtcgtccatgcccatataaaccctagtttaagctttgagggccctctatcctagagatctcgatttgctcgtagcgagaaatgaaccatacatgcgtgacgatatttgctcgctgcattgggatttgggaaacggatatactgcgaagacgagaagtttactgtgcgcatcatcggtttgtgcgaagctgagttcaaaggaaaatacagtcaatatatactccctcctatttgcattcacaattgatctcgtcttgtattcttcgtctatattcttatgagagtttgatggtgcacatt

SEQ ID NO: 6447 - DNA, 3059 bp, Zea Mays
ccctctacctcttcgctggggggctcctttccctcccctcgcgtggcgtctgtggcggctatcctcgcctcgtctcccctcccccctccctagggtttatcctccaccaccacctacccaccgcctctccccaccacagataagaattatcttatcgattttttacaccggccttgaatccgatccaggagcagtcgtttggtgttggtagctgcggcagacgtctgtcctagatcgaattgactcgcgagaagaagccatgtcgacagttgctcctgcccctagcgctgctgaccagaccaccaatcttctgcagaagctgtctctggagggcaaggatggctccgacactgccaagaagccttctgggatgccatatggaggatctacccacgctggagatgcacagagcgctgcttcacaggtggacaggtcgataacacctctactacaggaggccatggatcctaatttcttctaccagcccagtgcatatgcctctccagcctattacttccctagtggttatgatggctcagccaatgaatgggactcaaggtatgctggtcatgaaggaatggagatgccccctcagaccgtgtatggagacatgtaccttggatatggctatgctccatacggcccatatccttcgggttctccagtaccaactgttgggcatgatggccagtcatatggttctcagcaatatcaatacccgtctcaatattatcagcaaccaacaccaacaaacgcaaaacatggtctaaatggtgccagttctcaacctgaaccgccctctgttgccagtcagcaggcacgagttttggtagatgcaacaaaagcaactccaaacgtgagggctaatggtatgacaattgctcacaacagttcgctgccacgtaagcaaacccacctgaatgtatcggtagcaaacagtggtttatatggaagaggacctatgcaaggcagtggaccttctgcaagcaattatggtcacaatggtgttcgttctccagctcaatggtacgatggtccagtttactcgaatgggcatcagataccaactgctagttccacatcttaccgttccaattcgtcttctatgagaagtcagagccagcatccaacaacaaacctcatgggtatacatgcacagatgccttcgtctggaatgggtctgacctcacctagatatccttctaggatgtacccagacaacagattatatgggcagtatggtcagtatgggaacacactgaagggtggccttggttttggatcaaacatgtatagctcgagaaacaatgggaggtggggagttgtggataccaaatacaagcccagagggcgtgcaccttttggttttagtggtgagaaccaagatggctttaccgagctgaacagaggaccaaggtctggtggtttcaagcaccaaaaacaattcggtcctactgtaactattgctgtgaagggccaagccctcccttcagtggggaaacagaacagtactcttccagacaaaggccaatttaaccaggaagggtttcctttaacctacaaggatgcaaagttctttgttatcaaatcatatagtgaggatgatgtgcacaagagtataaaatacaatgtgtgggctagcactcctaatggaaataagaagctggatgctgggtaccgagaggctcaggagaaatccagtgactgcccggtgttcttgtttttctctgtgaacacaagtggtcagtttgttggtgttgctgaaatggttggtcctgtcgactttgataagactgtggagtattggcaacaagacaagtggaatggttgttttccactcaagtggcacatagtcaaggatgtgcccaacaacactttgaagcatattacactggataacaatgataataagcctgtgacaaacagccgtgacacacaagaggttaagctggaacaaggtcttgaaatgttgaagattttcaaagaacatgttactaaaacgtcaattttggatgattttggtttttacgagaatcgccaaaagttgatgcaggaaaagagggcgaatcagcaactgcttcaaggccagggggccgatgtttctcaagagaaagacaaggatgcgactaatggcaaaccagggtcacagaaacaggcaacgagcaaggaaggcactcctgctgaggtggcggcggatgcctccaaaccagtagctgaaagtggaatatcaaatgacaactaagcatcatgcatactggtcggcaccataccggtgcaaatgctgcaggttttgcggtatctgcaaatcaaaacctattgattctgcctgaattctggacttctttcggtactggagttcgtgagatggggctcatcatgggagtgaatcagattttacttattgtcgctttgctagttgtgtgactggtttttggtgtcttggaacccgtgttaggcttcttacatacccctgtgacgacaccgagtttgttgtaacccttgtttttttttgcctttttgttttagttctatcattgttaacgaagcagcctatttcctatactttgaacaacattaaggtagttttttttgcatgttgcggtactgtggagagtaataagacaaaaagactctaggtttaaaaacactaagaaaaatacaaaataagatggagttgggttgactgaaaaacatatgtatgtagcatttgcaataaaaaaaatacacatcaaaccgcttgctgcttgcctacttgctggacccaaattttcgttgaaatcccagtggcgtgtttgtagggacgccgccttcggctggcggcgcggcgtggatctcctgggacagtttccccattggcatccccgaccagcttggtcacgccgtccaggaactcgataagcactgggtcttgcaccggcgaggactacacgcagcaaacccgctcaatgccggtctcctccatgctcccagtgtgcggtccatccgaccactgcaccgtgaaacggcacgcgcaccgctccatgccatcagcgatctggtgagccgctgtaaacacctgc

SEQ ID NO: 6448 - DNA, 1089 bp, Zea Mays
gtagaaggcgaaagaaggtcggaccaatggcaagataagtgtctcaaaaagaaaactagttactacaaggcaaggatattttgtctcttcctcctccgatcgaagtgtgcttgcgtcctgatcccaccaaccgcagaggacagaggaccatggagagcggcacggagcggcggcggcggcggcaccacttcgtgctggtgcacggcacctgccacggcgcgtggtgctggtacaaggtggccacactcctgtcatccgcgggccaccgcgtgacggcgctggacatggccgcgtgcggcgccagccccgggcgcgccgaggaggtgccgtcctttgaggagtacagccggccgctcctggccacggtggccggcctggcgcccgaggagaaggtggtcctcgtcggccacagcttcggcggggtcagcctcgcgctggccatggagcagtacccggacagggtcgccgtcgccgtcttcgtcgcgaccggcatgccctccgctgggaagccgatggcgttcgtcttcgagcagagtacccagcggaccgctacatggactgcgaattcgaaaccagcggcgacccccagcgtcccgtggagacatttcggttcgggccacagtacctgaagcagagactgtaccagctcagtcccccagaggacttgaccctggcaatggcgatggtgaggccgtcacagcggttccgagacgacgcgacgatgaaggggggtatcctgacggcggaacggtacggcggcgtgaggcgggtgtgcgtcgtcgccgaggacgacgcgtcagtgccggcaggcttccagcggcggatggcgtcgtggaaccccggcacggaggtgacggggttgcagggagccgaccatatgtccatgctctcgaaaccaggggagctgtcagaacttctcatggaggttgccaacaagtacagctgaaacttgtatcatgtaaatggctatcagcaaaatggttgttcaggtacgcttgtttcagatgaacaaatggagacggaagtttgaagtaacacgatgaaataagactagattttgtatccaatgcagttgtaactttctaaggt

SEQ ID NO: 6449 - DNA, 1971 bp, Zea Mays
aagccgtgtgcccaaaccctaacatactattcgtattcagatctgaatctaattgtatatgcattttgtggataagggtcttttaagtcttcatatgaaactatccttttgatatacagctgaaggacaataactatcatggatgctactgcaaattcagatgtgcaaagggctgaggaatttaaacttaaggcgaatgatgccttcaaggcaaacaagttctcgcaggctatagagctttacagtcaagccattgagctgaatagttcaaatgcagtttactgggcaaaccgtgcatttgcacacacaaaattagaggaatacggaagtgctgtgcaggatgctacaaaagccatcgaaattgattctagatattcaaaaggttattatagacgaggcgcagcttatcttgccatgggaaagttcaaggaagccctgaaggattttcagcaggttaaaaaaatctgcccaaatgatccagatgctacaagaaagttgaaagagtgcgagaaagctgtccaaaagatccgttttgaagaagcaatatctgctggggatgatgagaggcggtccgtggcagactctattgactaccatatcatagaagtagagccacattatgcgggaccgagaattgatggggaagaaataacgatagagtttgtcaaagcaatgttggatgaatttaagaagcagaaatgcatacataaaagatatgcttaccagattgtgctaaaaaccttggatttgctgcgatcgatgccttcccttgttgatgtggatgttccaaacggtggacattttacagtttgcggtgatgtgcatggccagtactttgatttgctcaacatatttgacctcaatggccttccatcagaagaaaatccttacctcttcaatggcgattttgtggaccgaggatctttctccgttgaagtcatactcaccctttttgctttcaagtgcctctacccaaaagctatgtaccttgcaagaggaaatcatgaaagcaagagcatgaacaaaatatatggctttgagggggaagtgaggtcaaagctgggtgagaagtttgttgaactttttgctgaagtcttttgttggttacctcttgcccatgtcatcaacaacaaggtctttgtggttcatggagggctatttagtgttgatggggttaagctttcagacattaggtccattgatcgtttttgtgaaccacctgaagaaggtctaatgtgtgaattactatggagtgaccctcagcctcagcttggaagaggtccaagtaaacgtggtgttgctctttcctttggcgcagatgtgactaagaagtttttacaggaaaataacctggatcttattgtccggtctcatgaagtaaaggatgaaggccatgaaattgaacatgatggaaagcttataacagtcttctctgcgcctaattactgtgaccagatgggcaacaagggtgcatttattcgcttcacagctccagaaatgaaaccagatattgttactttctcagctgtgccacatcctgatgtgaagccgatggcatatgcaaataacttcctcaggatgtttcaatgacggaatataacaacattgtttagcaatttttatcagatgagtctgttgtgtgtcagctcccaaatcacatttcttggctaggtttaagtatatgctcccttgtacaacaaatcaaatgatgcaagggattcaactgtcgatttacttggatggtacatccatttttgtgcacgagttgtgattcttgtaactatccgtaaagtcttagatcattagattttagtttacttgtaaaattgctaaatcgtcatttcctgtcttgcttatcagtgagttacacacgtttagtgcttttatcaaattacatgtgtttcagcggtacaattcctaatatctgagtaatccttccattttaacccacaatgttcttacatagtttgg

SEQ ID NO: 6450 - DNA, 702 bp, Zea Mays
ccccgatcgagactctggagcgcagagacggcagagagcacagtagccaagcgagtggaggagagttggagactcatcactggagagcatccgaagccgcccagtgctcgcacaaccgctcccgattcccaacccctccgtccgcccaaggggcgccgcaccatctccagcctccaggcctcgatccctaccggaccccgtggccctgctgtgttatctggctggagatccggccggagtggcattcctgctctcggtcaataagtattctggaatgtttttccgagctcaaatagagaacttctggagctggatatcagtattctgttagggatatgctccaaccaagggaagctgatgtgcctgcactctttcttgtcttcattgtacttcccgtggtagcttattttcttcttgggagatggcatgactctgcaagtaagaaggcaagggcaagtgtgcttgcacagcgagctgcagaagaagcctatagagaggaaacgatggcgtgcccagacattattccgccaggcccttccttgagaactatgccctatttcaaacctgcgccttcgttaagacaggaataccatgagtgtgcaacttgccatgcccctgcaaagactcgttgctccagatgcaagtctgttagatactggaccatgcttattacgccaagatttctacgacccagtcaaattg

SEQ ID NO: 6451 - DNA, 3356 bp, Zea Mays
gctccctggtatggtaccccgtttcctttggaagcctagcaaattcaccactccccccgatcgagactctggagcgcagagacggcagagagcacagtagccaagcgagtggaggagagttggagactcatcactggagagcatccgaagccgcccagtgctcgcacaaccgctcccgattcccaacccctccgtccgcccaaggggcgccgcaccatctccagcctccaggcctcgatccctaccggaccccgtggccctgctgtgttatctggctggagatccggccggagtggcattcctgctctcggtcaataagtattctggaatgtttttccgagctcaaatagagaacttctggagctggatatcagtattctgttagggatatgctccaaccaagggaagctgatgtgcctgcactctttcttgtcttcattgtacttcccgtggtagcttattttcttcttgggagatggcatgactctgcaagtaagaaggcaagggcaagtgtgcttgcacagcgagctgcagaagaagcctatagagaggaaacgatggcgtgcccagacattattccgccaggcccttccttgagaactatgccctatttcaaacctgcgccttcgttaagacaggaataccatgagtgtgcaacttgccatgcccctgcaaagactcgttgctccagatgcaagtctgttagatactgctctgggaagtgtcaaatagtacactggaggcaaggacataaggaaacatgccaaaaatggcttggtagtggttctagcagctttggtggatctagcactgaggctactgaacagatgccgttcttggctaacttgaattcacctcttccaggtggtgacattcacttgcgtgacatgaacttcgatactttatcagaaccatcctttcccacaactgatggttacaatctagatactgacccatttccggcagatagaagcaacatgaatagatcaaatcaaggtattcatatgagcgaaaatggtgctgttggtgtatcttttgaaaagaataattataatgctgctgatgaaatacactcttcggagattttatctggaaacaaggtgtcaaacaactattttggttcagatgcaatgagtggtaatggggatgcaacttatcctgccaaaagtaatgcacagcagcctagcagttgtgctcctgacgtgagaaaacaatcaaaagcaagcatcacagtttatcagcctgacatgagtgtctatttaacttctgacatggtcagttcttgtgagggatcatatgtttctgccggtgagccactgcaaaggagcttgtcatctggaagaactattgggaaagtaactgtggtgaataaaaggccttcttacccatcaagtaaggtggtctcagcacaaaagtcacaggataaggtgtctacatcatatcaaaatgatgcccatgagaagaatccttgcaacaaaaatgaccaaagatctacccccacatgtgaatcaagtcaatcaacaagcagcaatctactgaagtctggaacatccaaggttgaagttttaaagaagccttcaaaatttctcaaaaccagccttgtggcattgatcaatgataataagaggaacaaggtattgttcccatatgaagatattgtcaagttttttcagtatgaagcacggggtgtttcccctagaggtcttttcaattgtggaaacagctgctatgctaatgctgttcttcaatgtctcatgtgcacaaagccactgatgatctaccttcttctgagattgcattctaaagattgttgttcaaaaaattggtgccttatgtgtgaacttgagcaatatgcttcaactttacgtgaaagtggtggacccttatctccaagtagaatcctttctaatctgaggaatattggatgtcgcttgggtggtggaactcaggaagatgcccatgagtttctaaggcatcttgtgatgtctatgcaagcagcttgcttggatgggctgggtggtgagaagcacgttgaaccaagtttgcaggaaacaacactgatacaacagatgtttggtggccgtcttaaatccaaggttaagtgcctcagatgctatcacgagtctgaaagatatgagaatataatggatcttactttggagattcatggctgggtagagtccttgcaagatgctttgacacagttcactgctcctgaagatttagatggtgataatatgtataaatgtggaaggtgttctgcctatgttaaagctaggaagcaactgagcgtgcatgaggtgccaaacattttaacagttgttcttaaaagatttcagtcaggaaaatatggcaagatcaacaaatgtgttactttccctgatatgttggacatggttcccttcgtgactgggtctggtgacaatccccctctttatttcttgtacgccgtggttgtacatgtcgatacagaaaatgcatcattctctgggcactatatatcatacgtcaaagatatgcagggtacatggttgagaattgatgattcagaggtccaggttgtatcagtgaatcaggttatgtcagaaggtgcatacatgcttttctacttgaggtcttttccccgaccaccaaggatatacatcgagaaggggctgccggttacatccgcaaagcggcacacgtcgaaatcttccaagggctctaaacacgatcgcaagcagacagagttactctttcctgcaaacgatcaggcatatggcgtctatgatttcagacccgatggcgaaggctatgcccaagatcagcatgcagagctgaggtccagagctttccatcacgccgacgatgcctttgcagactcggttagcgcggacttctcggaagcgacatcaagtgaatggtcgctgtttaccagctccgacgagtcctcgttcaccaccgagagcacaagggattcgttcagcgtcgtggactacggagacaacgccggcctggatccgatttcctccatattcgggccaagctatgctccggagcacggtgctcccggcagtttcgtctcgcgcacaaggttctcaccttccagtccacagacaagatgaggcttattgaatttttagctacatgtcgtttctaggggtagctcgattcgatgtagcgaaaaaaagttagattatgtctatatgcaggtgaaattttagagcatggtgacaagctctgtggcaaccgttttccaatgctaatctcgtaaccctggctgctgcttctggtcttagattaatgtatgtcccaagtgattattccccagcttgttactttctcggaacgttcatgcatttcttagagagaactta

SEQ ID NO: 6452 - DNA, 1801 bp, Zea Mays
agcagcgacgcgaaaaggagcagagtacgtatggaaacccgtccagtctcccaagaccccaagtgagacggacgactcgacccagtcacaatccggtccctagtagaaacggcgagatcgtcagcgagaattttccgatgaccggcggcggcagcagcacccgccgtccggccgccgtggccaggagccgcgggaggccctctgaggcttctgaaccagatcccggcgctcgacgagccgcggccgcagcggcgcagcgccgtggccgcggcaaccctggccccttgcgcctgatggacgtgaggccccgaaccctcgcgtacttcgtggttgcttccttcgccctcgtgtcagtcacattcgtggtgtatactggtgggtggtgggaggaggtggaaggagagggcgcggcgacgctgcgaaaggtcatgcgctccgtaacgccgctgccggcgcccaggatgatggatctgcctcagtttcaaaataaccacaaggaaagtttgtattggggcacttatagaccaaatgtgtacctcggaattcgtgcaagctcacaatggtagggattatgggcgtcaagtgctggttgatcatggtcttttcctaactactagttttctgaaagagaaaggagagagcagtggttatggtggagactgggccgttcgattggatgctaacaatgagaggtcaggtttaagtgatgctgaagaaagcaccacacatctttttttctatattgctgatgaaactggaaatccgatcactatgggttcatatgaaccttcatcaagaggctctgttcttttggcatctgggttgcatgaggagattggtggttgggaattgtacttgagatctgaggacaatttggaaattcacagagctggattcaaatcaatgagtatgcataatctgagcgacttagtgcaacaagccgttgctactaatgcaatgcaatctggaaaccttaacctaccagacattactgaagattcttcaaatataatggtctatcaggtttccataaagtctcctgctcaaatagacatagtatttttgtcagggtccgcctcaaagtctccagtgattgaagagcggattagcaagctaacaggtcccatgctgagtgaccgtcttgaaacaaaacaaaaggaatttgaagagagatatgatcaaatctttaatgtgaacaataaggttgattccaaagagttatctgttggtagagctgccttatcaagtcttctgggtggtgttggctacttctatgggcagtccaaaattgcactcccgaaaggttttacacaaaaaaatggggataagtacatttcatattggcctgctgcattatatacagctgtccccagccgctctttcttcccaaggggatttctgtgggatgagggcttccatcagttagtcatttggcgttgggatgtgcatatatctatggatatcattggacattggttagatctgcttaattcagatggatggattcctagggagcaaatcttaggagctgaagctttaagtaaagttcccgaggagtttgttctgcagtatccttccaatggaaatcctcctactttatttcttgcgatacgtgatttagcaagtggaatacatgcacagcagttttcagatgaggaagcggaaaagatttcaagttttcttgaaagggcttatatacggctaaatgcttggtttcagtggttcaacagtacacaatcaggtaagtatgaaggcaccttctattggcatgaaaacgaatcaagctgattcatcaacgtag

SEQ ID NO: 6453 - DNA, 1854 bp, Zea Mays
agcagcgacgcgaaaaggagcagagtacgtatggaaacccgtccagtctcccaagaccccaagtgagacggacgactcgacccagtcacaatccggtccctagtagaaacggcgagatcgtcagcgagaattttccgatgaccggcggcggcagcagcacccgccgtccggccgccgtggccaggagccgcgggaggccctctgaggcttctgaaccagatcccggcgctcgacgagccgcggccgcagcggcgcagcgccgtggccgcggcaaccctggccccttgcgcctgatggacgtgaggccccgaaccctcgcgtacttcgtggttgcttccttcgccctcgtgtcagtcacattcgtggtgtatactggtgggtggtgggaggaggtggaaggagagggcgcggcgacgctgcgaaaggtcatgcgctccgtaacgccgctgccggcgcccaggatgatggatctgcctcagtttcaaaataaccacaaggaaagtttgtattggggcacttatagaccaaatgtgtacctcggaattcgtgcaagaacccctctgtctctaattgctggattaatgtggattggcttgaaaaatggtcaatattttcttcgtcatgtttgccaagattctgatgagctgagaacatttgggtggacagctcacaatgagaaaggagagagcagtggttatggtggagactgggccgttcgattggatgctaacaatgagaggtcaggtttaagtgatgctgaagaaagcaccacacatctttttttctatattgctgatgaaactggaaatccgatcactatgggttcatatgaaccttcatcaagaggctctgttcttttggcatctgggttgcatgaggagattggtggttgggaattgtacttgagatctgaggacaatttggaaattcacagagctggattcaaatcaatgagtatgcataatctgagcgacttagtgcaacaagccgttgctactaatgcaatgcaatctggaaaccttaacctaccagacattactgaagattcttcaaatataatggtctatcaggtttccataaagtctcctgctcaaatagacatagtatttttgtcagggtccgcctcaaagtctccagtgattgaagagcggattagcaagctaacaggtcccatgctgagtgaccgtcttgaaacaaaacaaaaggaatttgaagagagatatgatcaaatctttaatgtgaacaataaggtacaggttgattccaaagagttatctgttggtagagctgccttatcaagtcttctgggtggtgttggctacttctatgggcagtccaaaattgcactcccgaaaggttttacacaaaaaaatggggataagtacatttcatattggcctgctgcattatatacagctgtccccagccgctctttcttcccaaggggatttctgtgggatgagggcttccatcagttagtcatttggcgttgggatgtgcatatatctatggatatcattggacattggttagatctgcttaattcagatggatggattcctagggagcaaatcttaggagctgaagctttaagtaaagttcccgaggagtttgttctgcagtatccttccaatggaaatcctcctactttatttcttgcgatacgtgatttagcaagtggaatacatgcacagcagttttcagatgaggaagcggaaaagatttcaagttttcttgaaagggcttatatacggctaaatgcttggtttcagtggttcaacagtacacaatcaggtaagtatgaaggcaccttctattggcatgaaaacgaatcaagctgattcatcaacgtag

SEQ ID NO: 6454 - DNA, 1873 bp, Zea Mays
agcagcgacgcgaaaaggagcagagtacgtatggaaacccgtccagtctcccaagaccccaagtgagacggacgactcgacccagtcacaatccggtccctagtagaaacggcgagatcgtcagcgagaattttccgatgaccggcggcggcagcagcacccgccgtccggccgccgtggccaggagccgcgggaggccctctgaggcttctgaaccagatcccggcgctcgacgagccgcggccgcagcggcgcagcgccgtggccgcggcaaccctggccccttgcgcctgatggacgtgaggccccgaaccctcgcgtacttcgtggttgcttccttcgccctcgtgtcagtcacattcgtggtgtatactggtgggtggtgggaggaggtggaaggagagggcgcggcgacgctgcgaaaggtcatgcgctccgtaacgccgctgccggcgcccaggatgatggatctgcctcagtttcaaaataaccacaaggaaagtttgtattggggcacttatagaccaaatgtgtacctcggaattcgtgcaagaacccctctgtctctaattgctggattaatgtggattggcttgaaaaatggtcaatattttcttcgtcatgtttgccaagattctgatgagctgagaacatttgggtggacagctcacaatggtagggattatgggcgtcaagtgctggttgatcatggtcttttcctaactactagttttctgaaagagaaaggagagagcagtggttatggtggagactgggccgttcgattggatgctaacaatgagaggtcaggtttaagtgatgctgaagaaagcaccacacatctttttttctatattgctgatgaaactggaaatccgatcactatgggttcatatgaaccttcatcaagaggctctgttcttttggcatctgggttgcatgaggagattggtggttgggaattgtacttgagatctgaggacaatttggaaattcacagagctggattcaaatcaatgagcaatgcaatctggaaaccttaacctaccagacattactgaagattcttcaaatataatggtctatcaggtttccataaagtctcctgctcaaatagacatagtatttttgtcagggtccgcctcaaagtctccagtgattgaagagcggattagcaagctaacaggtcccatgctgagtgaccgtcttgaaacaaaacaaaaggaatttgaagagagatatgatcaaatctttaatgtgaacaataaggtacaggttgattccaaagagttatctgttggtagagctgccttatcaagtcttctgggtggtgttggctacttctatgggcagtccaaaattgcactcccgaaaggttttacacaaaaaaatggggataagtacatttcatattggcctgctgcattatatacagctgtccccagccgctctttcttcccaaggggatttctgtgggatgagggcttccatcagttagtcatttggcgttgggatgtgcatatatctatggatatcattggacattggttagatctgcttaattcagatggatggattcctagggagcaaatcttaggagctgaagctttaagtaaagttcccgaggagtttgttctgcagtatccttccaatggaaatcctcctactttatttcttgcgatacgtgatttagcaagtggaatacatgcacagcagttttcagatgaggaagcggaaaagatttcaagttttcttgaaagggcttatatacggctaaatgcttggtttcagtggttcaacagtacacaatcaggtaagtatgaaggcaccttctattggcatgaaaacgaatcaagctgattcatcaacgtag

SEQ ID NO: 6455 - DNA, 1908 bp, Zea Mays
agcagcgacgcgaaaaggagcagagtacgtatggaaacccgtccagtctcccaagaccccaagtgagacggacgactcgacccagtcacaatccggtccctagtagaaacggcgagatcgtcagcgagaattttccgatgaccggcggcggcagcagcacccgccgtccggccgccgtggccaggagccgcgggaggccctctgaggcttctgaaccagatcccggcgctcgacgagccgcggccgcagcggcgcagcgccgtggccgcggcaaccctggccccttgcgcctgatggacgtgaggccccgaaccctcgcgtacttcgtggttgcttccttcgccctcgtgtcagtcacattcgtggtgtatactggtgggtggtgggaggaggtggaaggagagggcgcggcgacgctgcgaaaggtcatgcgctccgtaacgccgctgccggcgcccaggatgatggatctgcctcagtttcaaaataaccacaaggaaagtttgtattggggcacttatagaccaaatgtgtacctcggaattcgtgcaagaacccctctgtctctaattgctggattaatgtggattggcttgaaaaatggtcaatattttcttcgtcatgtttgccaagattctgatgagctgagaacatttgggtggacagctcacaatggtagggattatgggcgtcaagtgctggttgatcatggtcttttcctaactactagttttctgaaagagaaaggagagagcagtggttatggtggagactgggccgttcgattggatgctaacaatgagaggtcaggtttaagtgatgctgaagaaagcaccacacatctttttttctatattgctgatgaaactggaaatccgatcactatgggttcatatgaaccttcatcaagaggctctgttcttttggcatctgggttgcatgaggagattggtggttgggaattgtacttgagatctgaggacaatttggaaattcacagagctggattcaaatcaatgagtatgcataatctgagcgacttagtgcaacaagccgttgctactaatgcaatgcaatctggaaaccttaacctaccagacattactgaagattcttcaaatataatggtctatcaggtttccataaagtctcctgctcaaatagacatagtatttttgtcagggtccgcctcaaagtctccagtgattgaagagcggattagcaagctaacaggtcccatgctgagtgaccgtcttgaaacaaaacaaaaggaatttgaagagagatatgatcaaatctttaatgtgaacaataaggtacaggttgattccaaagagttatctgttggtagagctgccttatcaagtcttctgggtggtgttggctacttctatgggcagtccaaaattgcactcccgaaaggttttacacaaaaaaatggggataagtacatttcatattggcctgctgcattatatacagctgtccccagccgctctttcttcccaaggggatttctgtgggatgagggcttccatcagcgttgggatgtgcatatatctatggatatcattggacattggttagatctgcttaattcagatggatggattcctagggagcaaatcttaggagctgaagctttaagtaaagttcccgaggagtttgttctgcagtatccttccaatggaaatcctcctactttatttcttgcgatacgtgatttagcaagtggaatacatgcacagcagttttcagatgaggaagcggaaaagatttcaagttttcttgaaagggcttatatacggctaaatgcttggtttcagtggttcaacagtacacaatcaggtaagtatgaaggcaccttctattggcatgaaaacgaatcaagctgattcatcaacgtag

SEQ ID NO: 6456 - DNA, 1945 bp, Zea Mays
agcagcgacgcgaaaaggagcagagtacgtatggaaacccgtccagtctcccaagaccccaagtgagacggacgactcgacccagtcacaatccggtccctagtagaaacggcgagatcgtcagcgagaattttccgatgaccggcggcggcagcagcacccgccgtccggccgccgtggccaggagccgcgggaggccctctgaggcttctgaaccagatcccggcgctcgacgagccgcggccgcagcggcgcagcgccgtggccgcggcaaccctggccccttgcgcctgatggacgtgaggccccgaaccctcgcgtacttcgtggttgcttccttcgccctcgtgtcagtcacattcgtggtgtatactggtgggtggtgggaggaggtggaaggagagggcgcggcgacgctgcgaaaggtcatgcgctccgtaacgccgctgccggcgcccaggatgatggatctgcctcagtttcaaaataaccacaaggaaagtttgtattggggcacttatagaccaaatgtgtacctcggaattcgtgcaagaacccctctgtctctaattgctggattaatgtggattggcttgaaaaatggtcaatattttcttcgtcatgtttgccaagattctgatgagctgagaacatttgggtggacagctcacaatggtagggattatgggcgtcaagtgctggttgatcatggtcttttcctaactactagttttctgaaagagaaaggagagagcagtggttatggtggagactgggccgttcgattggatgctaacaatgagaggtcaggtttaagtgatgctgaagaaagcaccacacatctttttttctatattgctgatgaaactggaaatccgatcactatgggttcatatgaaccttcatcaagaggctctgttcttttggcatctgggttgcatgaggagattggtggttgggaattgtacttgagatctgaggacaatttggaaattcacagagctggattcaaatcaatgagtatgcataatctgagcgacttagtgcaacaagccgttgctactaatgcaatgcaatctggaaaccttaacctaccagacattactgaagattcttcaaatataatggtctatcaggtttccataaagtctcctgctcaaatagacatagtatttttgtcagggtccgcctcaaagtctccagtgattgaagagcggattagcaagctaacaggtcccatgctgagtgaccgtcttgaaacaaaacaaaaggaatttgaagagagatatgatcaaatctttaatgtgaacaataaggttgattccaaagagttatctgttggtagagctgccttatcaagtcttctgggtggtgttggctacttctatgggcagtccaaaattgcactcccgaaaggttttacacaaaaaaatggggataagtacatttcatattggcctgctgcattatatacagctgtccccagccgctctttcttcccaaggggatttctgtgggatgagggcttccatcagttagtcatttggcgttgggatgtgcatatatctatggatatcattggacattggttagatctgcttaattcagatggatggattcctagggagcaaatcttaggagctgaagctttaagtaaagttcccgaggagtttgttctgcagtatccttccaatggaaatcctcctactttatttcttgcgatacgtgatttagcaagtggaatacatgcacagcagttttcagatgaggaagcggaaaagatttcaagttttcttgaaagggcttatatacggctaaatgcttggtttcagtggttcaacagtacacaatcagatacacatctgatttgcagaagtgatctccggttgctccatattttatactctccctcaagtcggtgaaaaaaagtatatttggttctaaa

SEQ ID NO: 6457 - DNA, 1951 bp, Zea Mays
agcagcgacgcgaaaaggagcagagtacgtatggaaacccgtccagtctcccaagaccccaagtgagacggacgactcgacccagtcacaatccggtccctagtagaaacggcgagatcgtcagcgagaattttccgatgaccggcggcggcagcagcacccgccgtccggccgccgtggccaggagccgcgggaggccctctgaggcttctgaaccagatcccggcgctcgacgagccgcggccgcagcggcgcagcgccgtggccgcggcaaccctggccccttgcgcctgatggacgtgaggccccgaaccctcgcgtacttcgtggttgcttccttcgccctcgtgtcagtcacattcgtggtgtatactggtgggtggtgggaggaggtggaaggagagggcgcggcgacgctgcgaaaggtcatgcgctccgtaacgccgctgccggcgcccaggatgatggatctgcctcagtttcaaaataaccacaaggaaagtttgtattggggcacttatagaccaaatgtgtacctcggaattcgtgcaagaacccctctgtctctaattgctggattaatgtggattggcttgaaaaatggtcaatattttcttcgtcatgtttgccaagattctgatgagctgagaacatttgggtggacagctcacaatggtagggattatgggcgtcaagtgctggttgatcatggtcttttcctaactactagttttctgaaagagaaaggagagagcagtggttatggtggagactgggccgttcgattggatgctaacaatgagaggtcaggtttaagtgatgctgaagaaagcaccacacatctttttttctatattgctgatgaaactggaaatccgatcactatgggttcatatgaaccttcatcaagaggctctgttcttttggcatctgggttgcatgaggagattggtggttgggaattgtacttgagatctgaggacaatttggaaattcacagagctggattcaaatcaatgagtatgcataatctgagcgacttagtgcaacaagccgttgctactaatgcaatgcaatctggaaaccttaacctaccagacattactgaagattcttcaaatataatggtctatcaggtttccataaagtctcctgctcaaatagacatagtatttttgtcagggtccgcctcaaagtctccagtgattgaagagcggattagcaagctaacaggtcccatgctgagtgaccgtcttgaaacaaaacaaaaggaatttgaagagagatatgatcaaatctttaatgtgaacaataaggtacaggttgattccaaagagttatctgttggtagagctgccttatcaagtcttctgggtggtgttggctacttctatgggcagtccaaaattgcactcccgaaaggttttacacaaaaaaatggggataagtacatttcatattggcctgctgcattatatacagctgtccccagccgctctttcttcccaaggggatttctgtgggatgagggcttccatcagttagtcatttggcgttgggatgtgcatatatctatggatatcattggacattggttagatctgcttaattcagatggatggattcctagggagcaaatcttaggagctgaagctttaagtaaagttcccgaggagtttgttctgcagtatccttccaatggaaatcctcctactttatttcttgcgatacgtgatttagcaagtggaatacatgcacagcagttttcagatgaggaagcggaaaagatttcaagttttcttgaaagggcttatatacggctaaatgcttggtttcagtggttcaacagtacacaatcagatacacatctgatttgcagaagtgatctccggttgctccatattttatactctccctcaagtcggtgaaaaaaagtatatttggttctaaa

SEQ ID NO: 6458 - DNA, 2094 bp, Zea Mays
gccgacactactccccagccactccgggaggtgtgagtccacctcctgcccggttcgctgggatcaaccgcgggcgcgtttcccgctcctgtaggggttgcgttggggttttctcattccattttttgggtgctggaggggcgatcttgcaatgcagacgaataatagcaactatggggagcttacccgcaatatccgagaaaaccagcttggaggggtgatctttggttgcaaacacgatacgattgaagaatgcttcagaaaacagctattcggtctgccttcagtccattattcatatgttagaaatgtcaaacctggcatgcctttatttctattcaattatagtgacagaaagctccatggaattttcgaagctgcaagtcctggtgagatgtatattgattcatatgcttggagtaatgatggttgtttaaggttcgtatttgcacaaagactcggtatccacctctgctggagagccaatttaaaacattgcttggtgacaactattacaaccatcaccacttctattttgagcttgaccatgcacagacaagagctttaatttctttgttcaaatcacttgctccgtctaatttcattcaagttccagctgtttcaagcaaaaggaatcttgcagttcctgacccaaagaaaatcacagcaaattctaaggaaatcaatccatttagtgttctatcaaatacagccgctccagttaactgggctgatgatgtggaaaatgctagtaactcggatgagaagaaatctggtggttcagtttctgattatgacaatttggatgacaattttcttcaaaatcaatttggtcctcattcaaatccagatgaggtcagtcaaacttcctcaggcaaaattgatggccaaggactggagcttattgaatgtaatcatccacttgtcaatactgtgaatggtaaaagaatcataactgatgaatcaatgcttttgaattcacacaatgagcataatggtgctgtggaagttgatgaagtggagattgaagttcacaataacccaggtggtggtgttgggctacagccagaaagacagactgtcctagaaaagctgaaaggattatctttcctacgacagcaggatgccataacttccaaggattgtactcattctggttcagatcaacgggtacctgatgaaacacagatcaatccaaacctttcctgtggcccatttgatgctacaatggaagataaaacctcttttgatgagtgcagccatggaaatgctgaggtgctgcaaatcatcactgatttacagaagaggactgaagcactggagaagaaactgattgggtcagacaaagaaatactttcattgagggaaatttttaaagactcaggaagaaaagtccagcaactggaatacattgtagatgagttacagttcaaacttgactcttccctggctcaccttggaaacatgtgcaatacactagccaccccatcaatattcctgattggtggttataatggcgtgacttggttatcatctcttgattccttttctcctgagaaagacgcggtcctaggtctcacaccaatgagttctccccgctcatatgcatctgctgctgtgttggatggacacatatttgcttttggcggtggcgatggcatgtcatggtataacacagtggaatgctatagctcaagaaataatgagtggacggaatgcccctccatgaaccagaagaaaggaagtcttgctgggatctgtcttaatgagaaaatatacgctattggtggaggagatggaaatgaattttattcagaagttgagatctttgacccctaccttgggaagtggatatgtagcccatctatgctaacctctcggtttgctcttgctgcgtccggactaaatggagtcatctatacatctggtggctatgatggaaacatgtacttgaaatcagcagaaaggtatgatccaagggagggcttctgggtccggcttccaagtatgagtactaggagaggatcccacaccttaactgtccttggagacaccctatacgtaagagcatcttgttcttaaatcttggaaaga

SEQ ID NO: 6459 - DNA, 542 bp, Zea Mays
tcatgtttttaagcaggctatgcgttctttctccgagaaagatattctttctccaattgctaaacttgtactaaggggtgttgaacaaggtgcagccaccgtttgttatctggcattgcatcctcaggttgctggagtcaccggcaaatactttgtggatttcaatgctgttgaactaaaaccgcctgcaactgacaaggagttgtccaaaaagctctgggattttagtgtcagcctactccagtgatataactgccgattagttctcctacgccagctggtaaataaaggtcgatctgaatgagagatcatgtttcagtaatagaacaaggtgatccagcagtgtaatatctactactacttattgtttgactagatatggatgccatatgtttgtaatttgaataaattgattggatacatttctgcacttgtttgaattgtggcaatgtcggacatgtctaaagatgtgatactattgagtgttgagatgcacatttttttttaaatcctttgtccataaaatttccgtttatgtgctg

SEQ ID NO: 6460 - DNA, 1269 bp, Zea Mays
gcgtgcgccaaacaatcaaaccgggacttccttgtcacagtccatgtcgtagctattatgacatgggaatgggatggatgctgaaactttgctagctagctagctgaaaggctccggccgggcctggctggtacacacgcccagatccttgttgtgcacgtacgttccaaacttgctcatactactcagagcgcggcgacatgttcggctttctgaaacaacggaggcagaccccgtcagggttctcgtcgtcgtcagccgccgaggaggtcaccgccggcatcgatggctccggcctcgtcgcgatcgtcacgggcgcgtctagtgggatcggtgccgagacctgccgagttctggcgctgcggggcgttcgcgttgtgatgggcgtgaggacaccgtctgccggtgagcgcgtcaaggaagagatcgtgaagaacgtccccgctgccggccattttctactcactaatcttttacttgaaaagatgaaaatcacggccatggagagtggaatagaaggtagggttgtgattgttgcttctgacagctacaagcacacgtatcgagagggaattcgttttgataaactcaatgatgcatcaggctataaaggcatcctggcttatggccaatcgaagctggccaatatattgcgttccaatgaactttcttgccgcttgaaggaagaagatgcaaaagtagtagtcaactcactgcatccgggagttgttgccaccaacatcacgcgccatctgggtatcataaaagatattctttctccaattgctaaacttgtactaaggggtgttgaacaaggtgcagccaccgtttgttatctggcattgcatcctcaggttgctggagtcaccggcaaatactttgtggatttcaatgctgttgaactaaaaccgcctgcaactgacaaggagttgtccaaaaagctctgggattttagtgtcagcctactccagtgatataactgccgattagttctcctacgccagctggtaaataaaggtcgatctgaatgagagatcatgtttcagtaatagaacaaggtgatccagcagtgtaatatctactactacttattgtttgactagatatggatgccatatgtttgtaatttgaataaattgattggatacatttctgcacttgtttgaattgtggcaatgtcggacatgtctaaagatgtgatactattgagtgttgagatgcacatttttttttaaatcctttgtccataaaatttccgtttatgtgctg

SEQ ID NO: 6461 - DNA, 3485 bp, Zea Mays
ctggaacaccatatattctctgtcaggttacacgtttgtgacacactaagagcgagtgtgactagtctaggatgcagggagaataatggcctggttatctctaatgacaacacattgaagcagaccgtggaggtagaaaaacaggggaggcaaggtaaggaggtcttagtggttcatgaattggatgagtcgaatgaggattctgggtcattggatgagccgccgggttggcttcctgacggttggactatggaggtttgtcaagaagacaatggctccatctacaagtactacacttccccaatgtccggatacatgttcacatcaaagatggagacattgcattatcttttctcaggggtggaagaacgcatgttggagttgcaggcaagcgccgaggacaacgagcttcatgagtcacatacatggcttccacgtgggtgggtgattgaagtcagagccggtgggaagaaaatggacaaaatgtacaaggtaggttggagatttgttgcacaataacatctagggatgcaaggaggcttgtccgtgaacccactaacagccttaatttttgaagttctccgcggaacccacaaaaatcaagcatatttgcaggttcacggataagctcacctgtgtgggcctttcattacatccatatggtgtggtactttactgcaactatacatattggatataaaaaatacaacagtcttccaataagatgtagctggcaagacaagatgttcccttctaaaagcgagtacaaaaccgaaagaacaattggggtaggtattggctgcaggcacacactggcatgcttggtcaggagccaaggtgatgaagcttgatgtcacctcaaccttggatggtggctcatagcatcctctggttttaccagatagatgcagaggatacatgtcatggagggttaggtgagtgaggcaatgccacagctgtggatggaatggaagaagatatccaaagaaaaaaaataaagcaggagttcacttgtgactctctcaatgcttattattttcagctcaacataaaccatgatatcaatcaacattgtacacgtagttaccatatcaatggaattctagggttcaaggggatcatctgcagttgtttgaatggttgaaataaatcttctcttttataattcagggttgaattttatgtctttaagagtgggtgttgttagaatacaagtgaattgcccatctcttctatcagcttgagcttttgggttgaattggttggataaaagattgaagtctcgagttcgaatcttggttagcgcaattaaataaaataattgttgcttgcttttattccacgtctgaggcttgagagagcctcggcatcaggagtgttagaatacaagtgaattgccatgacttaatttgtgtaggggcaggaggtataaatctttgctcgttcagaagaaagctgttaggttgagagtgaggaggaagttttagttacatggtggatatgttagttccttggaggaaattgaagtcacacaaacgttagatgagatatgagcatatgacatttctttttgttttgaagcttatgccttctgcagttttatgttcacctacctactgggcagcgattcttatcaaaagcatggtggatatgttagttccttggaggaaattgaagtcacacaaacgttagatgagatatgagcatatgacatttctttttgttttgaagcttatgccttctgcagttttatgttcacctacctactgggcagcgattcttatcaaaagcagaagtattgcactttgttaataagggcatggtttctacatgtgatatggatgtgctgtgcgacactagcactgatgataatatacttgctcatgtggaattcaatcctgatggtttaccagatggatgggtgaaagaaacgatatctagaaagttcaatgatggaatcagaaaagaccagtactataccgatcctgttagtcaccgtgtatttcgcacgcttaagtctgtattgagctaccttggaaccggagaaatatctaggcattcctatttaccaaggagaaatgtcattgacatgtattcatttgataagtgtgcagatctgcccaaaagcatggtgaaaagattgaaagcaaaaggacaagcaaagaaaaaattcatgagagcacaggttttagacaaggacttatctaatgggcagacttcaaatcactgtgaaggtgctattgggttaactcaatctgacccggaaggagataagtttggatctatggaagcggcatgcgaaaaggggaccagttcagagactatgaaacagcgaatagggaggccaaagaaaatcttgaagcaaacaaatgatagcatttcggatcgtgacaagggttcacatcaggagcacatcgaggccaaagaggaagttgatatctgtggtgggaaagacttgacgcatttgaaaactctggagcgtaccgaggctcagaatagcacaatgataaccaaggaagtaaacaacaacgacacagcagagaaaaacctatccaagatagagggagacaactcggatctggtaaccggcacgggtttgcacaagcaagagaatagcagattaactgaagttagtgagaaggcaacattctccacaggttacaaattttacaagaggagaagttgcaataagacatgaggttcaagaaaagcataaaattagatcaagttatctggtcagtagtccagaatacaggcactttgttatactatcaaggaacgttcttgcggcttctgtagcaatcaactcaactgtgagcagttgtaaggagccaggctattttgcttttcatatcctaactgacgctcagaacttctatgccatgaaacactggtttgccaggaattcgtataaaaatgcagctatctgtgtcataaactacgaagcaattattttggagaaacttccaaagtatactatccggcagctgtatttgccagaggagttccgtgttctcattaggagcattaagcggcctactgaaaacacaagaatgaaatacctgtcactgttcagcccctcacatttcgttattccagaaatattcaagtatctaaaccttgacgcatccacaacgttggaatatatatgtactcatattcggattatagaatacaggcttatctgtagaaaattaatataaaaataacaaatttgatgtttgtgtactgatgctaacacaggaatatgggaatagtttttttttcatgtgcttttatataaaatcaaactggtgagactacaaaattcatgtattaatttatataataaccttgcattccaaataggccatcgtataagatagtcaattccataggagttttaaaaaaattaatacgtaagattcaataatttattccagagactcttagaaacctctggcagcaaaagccccaagacaaaaaatatacctaatgagttattt

SEQ ID NO: 6462 - DNA, 4225 bp, Zea Mays
cccatcagtgggtttgtaacacaaatggatgaagtgaggagagttaacaaatggatgaagtgaggagagttagcagaagatgcagcactgtagactgaccaaattccccccgcgggcgacgaagaacatcactgtagggctgatttggtgaccggggatcccgaggggaagaaatcctcttgctattcaaaattgaattgcaaggggattcctcccccatggatcccctagggatccctaatcaccaaatcagcccgtagactgaccaaattccccgcgggcttgcggccaaacctttcaccgaggccgcaccctcccgtgcatgtcactcctgccggcgccgggcgtcctatggtagagactcgccgctcagcgcggaggagcggcagcggttcgctcccggccgacggagcgccgtccgagccggcctccgacctctcaggggagaataatggcctggttatctctaatgacaacacattgaagcagaccgtggaggtagaaaaacaggggaggcaaggtaaggaggtcttagtggttcatgaattggatgagtcgaatgaggattctgggtcattggatgagccgccgggttggcttcctgacggttggactatggaggtttgtcaagaagacaatggctccatctacaagtactacacttccccaatgtccggatacatgttcacatcaaagatggagacattgcattatcttttctcaggggtggaagaacgcatgttggagttgcaggcaagcgccgaggacaacgagcttcatgagtcacatacatggcttccacgtgggtgggtgattgaagtcagagccggtgggaagaaaatggacaaaatgtacaaggttcacggataagctcacctgtgtgggcctttcattacatccatatggtgtggtactttactgcaactatacatattggatataaaaaatacaacagtcttccaataagatgtagctggcaagacaagatgttcccttctaaaagcgagtacaaaaccgaaagaacaattggggtaggtattggctgcaggcacacactggcatgcttggtcaggagccaaggtgatgaagcttgatgtcacctcaaccttggatggtggctcatagcatcctctggttttaccagatagatgcagaggatacatgtcatggagggttaggtgagtgaggcaatgccacagctgtggatggaatggaagaagatatccaaagaaaaaaaataaagcaggagttcacttgtgactctctcaatgcttattattttcagctcaacataaaccatgatatcaatcaacattgtacacgtagttaccatatcaatggaattctagggttcaaggggatcatctgcagttgtttgaatggttgaaataaatcttctcttttataattcagggttgaattttatgtctttaagagtgggtgttgttagaatacaagtgaattgcccatctcttctatcagcttgagcttttgggttgaattggttggataaaagattgaagtctcgagttcgaatcttggttagcgcaattaaataaaataattgttgcttgcttttattccacgtctgaggcttgagagagcctcggcatcaggagtgttagaatacaagtgaattgccatgacttaatttgtgtaggggcaggaggtataaatctttgctcgttcagaagaaagctgttaggttgagagtgaggaggaagttttagttacatggtggatatgttagttccttggaggaaattgaagtcacacaaacgttagatgagatatgagcatatgacatttctttttgttttgaagcttatgccttctgcagttttatgttcacctacctactgggcagcgattcttatcaaaagcatggtggatatgttagttccttggaggaaattgaagtcacacaaacgttagatgagatatgagcatatgacatttctttttgttttgaagcttatgccttctgcagttttatgttcacctacctactgggcagcgattcttatcaaaagcagaagtattgcactttgttaataagggcatggtttctacatgtgatatggatgtgctgtgcgacactagcactgatgataatatacttgctcatgtggaattcaatcctgatggtttaccagatggatgggtgaaagaaacgatatctagaaagttcaatgatggaatcagaaaagaccagtactataccgatcctgttagtcaccgtgtatttcgcacgcttaagtctgtattgagctaccttggaaccggagaaatatctaggcattcctatttaccaaggagaaatgtcattgacatgtattcatttgataagtgtgcagatctgcccaaaagcatggtgaaaagattgaaagcaaaaggacaagcaaagaaaaaattcatgagagcacaggttttagacaaggacttatctaatgggcagacttcaaatcactgtgaaggtgctattgggttaactcaatctgacccggaaggagataagtttggatctatggaagcggcatgcgaaaaggggaccagttcagagactatgaaacagcgaatagggaggccaaagaaaatcttgaagcaaacaaatgatagcatttcggatcgtgacaagggttcacatcaggagcacatcgaggccaaagaggaagttgatatctgtggtgggaaagacttgacgcatttgaaaactctggagcgtaccgaggctcagaatagcacaatgataaccaaggaagtaaacaacaacgacacagcagagaaaaacctatccaagatagagggagacaactcggatctggtaaccggcacgggtttgcacaagcaagagaatagcagattaactgaagttagtgagaaggcaacattctccacaggttacaaattttacaagaggagaagttgcaataagacatgaggttcaagaaaagcataaaattagatcaagttatctggtgagttttatgggtcgccgcccaaaagttgtatcatacttcttcagggaacaaatggaaccaaagttgatctggtgtgtccaggttttcatttttttcgttttgtttattcccttctgcatgcttctgcttctagttgatgtggagggtgtctagtggaagtaatctgtttgattcttgtatcataggaattaatactggttgtagagagcaggatttaacacttgacagcaggagcatcaaaggaatcaaatttaagaagctttcgttaacctgagggctgagacataaatgccgtcaatacggacataaatgccgtcaatgagcatattttctttcttcattatctgctccagagttcaggtgaaagaaaataaatagtaaacaaggtattgttaaaccatcacattcagagattaagtgctgacgatagtgacccagcaacacgtgcctttgaaaaggaggtgattctagattgcatgctgtacgaacttaaggtcagtagtccagaatacaggcactttgttatactatcaaggaacgttcttgcggcttctgtagcaatcaactcaactgtgagcagttgtaaggagccaggctattttgcttttcatatcctaactgacgctcagaacttctatgccatgaaacactggtttgccaggaattcgtataaaaatgcagctatctgtgtcataaactacgaagcaattattttggagaaacttccaaagtatactatccggcagctgtatttgccagaggagttccgtgttctcattaggagcattaagcggcctactgaaaacacaagaatgaaatacctgtcactgttcagcccctcacatttcgttattccagaaatattcaagtatctaaaccttgacgcatccacaacgttggaatatatatgtactcatattcggattatagaatacaggcttatctgtagaaaattaatataaaaataacaaatttgatgtttgtgtactgatgctaacacaggaatatgggaatagtttttttttcatgtgcttttatataaaatcaaactggtgagactacaaaattcatgtattaatttatataataaccttgcattccaaataggccatcgtataagatagtcaattccataggagttttaaaaaaattaatacgtaagattcaataatttattccagagactcttagaaacctctggcagcaaaagccccaagacaaaaaatatacctaatgagttattt

SEQ ID NO: 6463 - DNA, 3063 bp, Zea Mays
tgcatccctcttgtccggcaagttgggaaaggatcgtttttttctccttttttgaccaggggttccgcaaaaataacaaagaaacaatacacgagttccacgtctggacagtgacaaaatccccaacggatttccaatttcacatgcaaaaagtcgttcaaatgcgatgaaccttaacgtgctcgtccgatgtacagtaattaataactgatgagagtgactgggactgatgatgaacctcacctcacctcacgtaaggagtggccgtcagttgctgttgcgggggtgtggtgtggccgccgagccgaaagcggcagcattcgtcgtctcccagatgcgcatgcggcggtagctagcttccgtcaccgctcccccagtaggccagtaccaccaaatctctagcgaggccgcccgcaaccgtgtcccggggttgaggatctgcgcggggccgtcctcgcgcgcgccgccgcatccccgccgtcccactccggcgaggctggctgcgttccgtcgtcgtcccccgcaccgccgctgactcctggaacaggaaccagcttcttcgcccccaccatctcacgtccagcgtcgcgaactcgcgatggcgggcgccgccactcctcctccgtcgtcgtcgtcgtcggcgtcgtgtggcacggacgctgcctacctgctgttccgcggggagacgctgctccccgacggcgtccacgcctccctctacgccgtcgctctcgcgtactgcttcgtggggctgtccgcggtcacggcccgcttcttcaaatccatggagcagatcatgaggcactcccgggaggtggtggtcggcgtggacccgcgcaccggggcgcccgtcgtgaggcgcgacaaggtgtggaactacaccgtcgcggacattgctctcctcgccttcggcaccagcttccctcagatctccctcgccaccatcgacgccatccgtaacctcggtcaactcacagcaggaggtctaggtccaggcacacttgtcggctctgcggcgtttgatctgtttccgatccacgctgtctgtgtgcttatgccaagggcgggatcaaagaagaagatctcggacctgggcgtttggttagtcgagctcttctggtctttctgggcatatatctggctctatgtcatcttagaggtgtggacgcctagagtgatcaccctctgggaggcatcgctgacagtcctgcagtatgggctgcttctactccatgcgtatgcgcaggataaacgatgtccatttgtgtcgatcccgtttgcgagaggtgagaggcctgaagattgggttccaccagaagatgtttctgctgtttattacgccaaatgtgatggcattgacgagacactccctatgggtgctgacgggaacgatgggattgtagacatcttctctgcacattcctactacgatgcagcagagtacagtcaacttgcagaagaggatatggaaggatcgtcaacaatggatcaagttgtaaagaacacacaagataacatgtcctggctttctatttggtggcaacaatttgttgatgcttcaatggtaatttggttcatttcatttatgggacagatgtgcctaacccttttaatacattggacaccataactagcatggtgcatggactgggaaatatgttctagacttttattttacaaatagttgatgaatttatttctaggtgctgctgagacaaatttgtttcccagagatagttatattgaaatagtttaatccacaccccttcccatctagccaggagaaaattcagtagcattaacatttgtcatttgccagtcttaaaactgagccccaatattaagaactttctgttttttttggcatagtaattgtttttttagcaatacatgcagttggagagccctgagtcaatgaagatggattctgtctgcctgaggtacaccagaatattttggaacttgatcattgcgccttggaagtttttgtttgcttttgtgcccccataccacattgcacatggctggattgcttttatatgctcactgatcttcataagtggtattgcttatggtgttactaagcttacagatcagataagctgcgtcacaggagtaagtccatatgttattgcattcacagcactggccgctggaacctcatggccagatctagttgctagcaagatagctgctgagcgtcaagtcaccgcggactctgcaatagccaacatcacttgcagtaactcggtgaacatatatgttggcattggtgttccatggttgattgatacagtgtacaacttcttcgtttaccgggaaccattgtacatagataatgctgccggtctcagcttctcccttctagtcttcttcgcgacatcatttggatgcataacggttttggttctgcgtcgtattatactcggtgctgagcttggaggccctaggctatgggcttgggttacatcagtctacttcatgatcctttgggttgtttttgttgtgttttcctctttaagagtatctggagtaatatagacaggaattaaaaaaaaaaggtagtgggggcttcgattttccataaattttgttgcaattggttttcatatccacaaagaaaacaactattgcgggtgaaaattagggtctgtgaattagggattatagatacaagtgcttgttctatataatgattactgatgaagccaacaatatattgtgtagtataattgaagttattgtatcagaaagaagggagaacagttggatagctcttaaattttttattcaatcagagtgttgcattatcaatcatacatgtaaatatcgaggcttatgttttgctagcattgtactactactattatgtttttatgggttaacaacagtacattggacataggctgcctcacattcatatgttttgctagtaactagagactgtataaggatatagaattcttaattcttgcactccctccgtttctttttattagtcgctggatagtgcaattttgtactatctagcgactaataaaaagaaacggagggagtatcata

SEQ ID NO: 6464 - DNA, 1433 bp, Zea Mays
gaacagcctactccagcctccagcgcctgctacgccgtcgcccacctccctcctctcctccagcgtcgcccgctcccgatcgtccaccgccacgcacctccctcctctgtcctctcctccaccccctcctccatctctagggcccgcctccctcttccagcgcccgagcaccccctcccctctcccacgtccagagtcggtctgacgttggcccatcgcccgataggtcctctagcagccaacgttgcctgcagctgcattccagagttccagagtttcagctacaaccacgaagttccaacgtctcctgcagctgctctatttgcacatacattgtttccagcaagcaacagtggaaaagatgatcctgggcgtgcctgccaatgagcaagaagaggaagcatctggatccagcgaactcgttgaaagacagcgaacaagtagtcgcctcagatttcataagaggagacgatcttgatgacctattatcgaagcttatcaggagtgtggagattgccaaggcttcaaggggaggcttaccagaaaagatatggatgaagcaacaatttgctatcggcgtcaatgatgtcacaagggttcttgagcgaatgccgcattctgtcactgctcatcctgctcaaatgtctaatgaagcaccaactgtctcaggccgacgtcaagctcctttggtgccattgcaggctgtccttgtagctgccgactgcaatcccaaatggttaacaaaacacataccaacactagcgtctacaaggcaggtaccggtattgtgcgtgaaggacaacaagggaggctcagtaaggttaggccatgtggtgaatgtcagaacagcccttgccattggagtaaaggccaaagatagcgttctcaacaagaccattgatgagttcctgaaagacagtaaactggttgccaatgaaccataaagtaaccccaagtctagtgacacgtttgtactaaaaagcctgtacttccgggcatgcaacatcccaggatcatctcataaatgggtttaagtttgagaagggggtcaagtatcttgagcagattgtggcaatatcaatttggagggacttcttgagagaacagtcatgggaaataggacagactatttgtttggtccgtgcaatattgtttgactggtgaacctagttatccattgtgatctagaacttgtatcaaactccaatgtaacgagatgttaggatccttgtttattgggtacagttttttcttcttctcgaggctcgacaccggtacattaatttttcttgttttttatattctatagtatatataataatgtgaaaaggcttatattgtgatggttaagtctttcgagtagcatcgacgaatttttagcttgattaaaaaatcatctcgttatgccttgccagctcccggattatgtcctg

SEQ ID NO: 6465 - DNA, 1895 bp, Zea Mays
ttttattttaacggtgaaacacagacgaaaggactgttttatcgaatcctaaattatagagactattacatcgaagccggttaaaatggggtttataatagcaaaaaaattgccccagcctcctgcagtcctgtggtcgcacggtccttcactcctgcgtcctgtgcctcggtgcctcccagacccaggcggccaggatcccagcctcccaggtccccggtggcggcagcagcctcccagtcccagatggccaccagttctaaaccctagccgccaaaccaacacgagcagctgtcgccctccaggccggccgagcggggcgccgggcaccgtcgcgccgagctgagcggagagtggagcacctgcaccgagcggccagcggtgcgccgacgcgccgtgcgccgagcacctgagtggccagcggggcgcccagcactcgtctagtcgtcttctctgaccgtttgggccgatttggatacagcccatgaaaggagaacagcccaacttacctctcgcttcatgcgtgagcgtgacgttgacggcgtaggctagcgcctagcgctagacccgcccgcggcccgccgcaccctcgcagtcccgactcctgcacaacgacgctgtcgagcctgcctggcgagtgttgtccggcggccggcaacggggaagagagcgtccgacggcgacgcactcgagcggcacccctcccaactcgctccctcctcggcccctgcagccctgctccgtggcgcgcatcactgggcggctcgccgtacaatcagcgagcgggtggcggctacctccatactagcaagactcaatcggcgaaatcctgggcgtgcctgccaatgagcaagaagaggaagcatctggatccagcgaactcgttgaaagacagcgaacaagtagtcgcctcagatttcataagaggagacgatcttgatgacctattatcgaagcttatcaggagtgtggagattgccaaggcttcaaggggaggcttaccagaaaagatatggatgaagcaacaatttgctatcggcgtcaatgatgtcacaagggttcttgagcgaatgccgcattctgtcactgctcatcctgctcaaatgtctaatgaagcaccaactgtctcaggccgacgtcaagctcctttggtgccattgcaggctgtccttgtagctgccgactgcaatcccaaatggttaacaaaacacataccaacactagcgtctacaaggcaggtaccggtattgtgcgtgaaggacaacaagggaggctcagtaaggttaggccatgtggtgaatgtcagaacagcccttgccattggagtaaaggccaaagatagcgttctcaacaagaccattgatgagttcctgaaagacagtaaactggttgccaatgaaccataaagtaaccccaagtctagtgacacgtttgtactaaaaagcctgtacttccgggcatgcaacatcccaggatcatctcataaatgggtttaagtttgagaagggggtcaagtatcttgagcagattgtggcaatatcaatttggagggacttcttgagagaacagtcatgggaaataggacagactatttgtttggtccgtgcaatattgtttgactggtgaacctagttatccattgtgatctagaacttgtatcaaactccaatgtaacgagatgttaggatccttgtttattgggtacagttttttcttcttctcgaggctcgacaccggtacattaatttttcttgttttttatattctatagtatatataataatgtgaaaaggcttatattgtgatggttaagtctttcgagtagcatcgacgaatttttagcttgattaaaaaatcatctcgttatgccttgccagctcccggattatgtcctg

SEQ ID NO: 6466 - DNA, 782 bp, Zea Mays
atgaaatgaatcctcttttaaatcgccgaccacccaaataatagtggtccgacagtgctggataccatgtcggcgcaggaaccattcgtccacatccccgaagaaacgatccgggaggcgctcaaagttgtccttgacgtgagaaaccagccggtcctcatccactgcaagagaggcaagcaccggactggctgcgtcgtcggatgcctgaggaagctgcagaagtggtgcctgtcctccgtgttcgacgagtacctgcacttcgcggcggcgaaggcgaggaccaccgaccagaggttcatggagctgttcgacgcgtcgagcctgatgcacctgacggcggcctcgcagtactgaccactgaccagagcggggcgagtggttcccgagcggtcccgatcctgccaccatgccgcatcaagcaagccgtttccccctgctgtttccgaagcaactcggcagagaataatgctggaaccatgagtgtgctgtgttgcgtgagtgctgtggttgcttcgtgttcaactggtttcagattctgaactggcacggcctgcattcacttgaatcactgaaaaccgaacatgtctgaactctgaactgaagctgttgctcagttcagacgttcccgccaatcttccgatccgaccagatggcacgaagtcatataccgaccatcatttttctgtactgttcttgggccatcaaaaacgcgccggtccatatataacggcccacacgaaagtacgagaaccagaagcacgtttttttttcttcgaaaa

SEQ ID NO: 6467 - DNA, 2549 bp, Zea Mays
cagaacccaattccctcgcgcgctcccccttcggcccttgagcccttccaccctctcccaggcatcacacattccaccaccaccgccgccgccatcaccactgtgaccaccagccccacactcgtatgtgattattggcacccggacgccaccgcctccgcctccaccaccgactgcgccatgggcgactcctcggtggccggcgcgcttgtgccgtccgtgcccaagccggagaccgcgccgtccggtgacaactctacggcggcgctggcgctgccggaagaggcggggacgcgcgcggcgtcggcgtcgccgcagggacctgcggaggaagagggccccgccgatagggacctcctctgcccgatctgcatggccgtcatcaaggatgccttcctcaccgcctgcggccacagcttctgctacatgtgcgtcgtcacgcacctcagcaacaagagcgactgcccctgctgcgggcactaccttaccaaggcccagctctacccaaactttctccttgacaaggttctgaagaaaatatcagcccgacaaatcgcaaaaacagcgtcaccggtcgatcaatttcgatgtgcattgcaacagggaaatgaaatgggagttaaagagttagatagccttatgactttgattgctgagaagaagcggcaaatggaacaacaagaatcggagacaaatatgcaaatattgttagtcttcttgcactgccttagaaagcaaaagctggaagagttgaatgagatccaaagtgatctacagtacatcaaagaggatataagtgctgtggagagacatagggtagaattataccgcacaaaagaaaggtactccatgaagctgcgcatgcttttagatgagcctactgcacaaaaaatgtggccctctcctatggacaaagctagttgtcgctttcctcccaactctcggacaccacttggcggatcatgtccaggaactttacagaataagaagcttgatccgaaagctcaaagacgagttcaagcacagttcaatgagcttcaagaatactacctgcaaagacggcgtactggagcacaggcacgcagacaagaagaaagagagaccgttgcaatgaatagagaaggctatcatgcaggtcttcaggatttccagtctgtgctaacaacattcactcgatatagtattgaatttgatcgtgatgatgaactatttgctactgctggagtctcgaaacgtattaaagtcttcgaattttctactgttgttaatgaaccatcagatgtgcattgcccggttgttgaaatggctaccagatctaaacttagctgcctaagctggaacaagtactcaaaaaatattatcgcaagcagtgactatgagggtatagtaactgtgtgggatgtccagacccgccagagtgtgatggaatatgaagagcatgagaaaagagcatggagtgttgatttttctcgaacagagccttcaatgctagtatctgggagtgacgattgcaaggtgaaagtgtggtgcacaaaacaagaagcaagcgtgatcaatattgatatgaaagcaaatatttgttcggttaaatataatcctgggtcaagcttctatgttgcagtcggatctgctgatcaccatattcattacttcgatttacgtaatccaagtgcgcctgtccatgtttttggggggcacaagaaagcagtatcgtatgtcaaattcttatctaacaatgagcttgcatctgcatcaacagatagcacgttacgtttatgggatgtcaaggataatttgccggtacggacattcagagggcacaaaaatgaaaagaacttcgttggattgtctgtgaacaatgagtatattgcttgtggaagtgaaacaaatgaggtttttgtttatcacaaggctatctcaaaaccagcagcaagccatagatttgtatcctctaacctggatgatgccgatgatgatcctggttcttatttcattagtgctgtctgctggaagagtgatagccccaccatgttagctgctaacagtcagggaaccataaaagttcatgtacttgctccttgatgtcgtggagggcgttcaagagatttacagccagcgcgtgtatgtcgtactgtccaggtgttccctttcgtgccattatattccccaaaagcgagaatggaggcattattgatctccggttagggcatgaatttttgcagacgatggccagctgacgtagggttttgaggtatcagaatgtgcataatcatgtttatgttgtacaggtgtaaatcagccaagttattgattacaagtgtgacatgagaaatacacattaataaaaactccagctcggttgtacagagattgtgtttgaacccagaaattcatgtggttatgtcgtttgataatatatgtacctggcaggggtgaagctaggcctttttttgtcagctggccttgataattttctggatatctaatgaaaaaacgatgtcaataacaagagttgtataatgaagatctagtagataatactagataat

SEQ ID NO: 6468 - DNA, 2723 bp, Zea Mays
attccctcgcgcgctcccccttcggcccttgagcccttccaccctctcccaggcatcacacattccaccaccaccgccgccgccatcaccactgtgaccaccagccccacactcgtatgtgattattggcacccggacgccaccgcctccgcctccaccaccgactgcgccatgggcgactcctcggtggccggcgcgcttgtgccgtccgtgcccaagccggagaccgcgccgtccggtgacaactctacggcggcgctggcgctgccggaagaggcggggacgcgcgcggcgtcggcgtcgccgcagggacctgcggaggaagagggccccgccgatagggacctcctctgcccgatctgcatggccgtcatcaaggatgccttcctcaccgcctgcggccacagcttctgctacatgtgcgtcgtcacgcacctcagcaacaagagcgactgcccctgctgcgggcactaccttaccaaggcccagctctacccaaactttctccttgacaaggttctgaagaaaatatcagcccgacaaatcgcaaaaacagcgtcaccggtcgatcaatttcgatgtgcattgcaacagggaaatgaaatgggagttaaagagttagatagccttatgactttgattgctgagaagaagcggcaaatggaacaacaagaatcggagacaaatatgcaaatattgttagtcttcttgcactgccttagaaagcaaaagctggaagagttgaatgagatccaaagtgatctacagtacatcaaagaggatataagtgctgtggagagacatagggtagaattataccgcacaaaagaaaggtactccatgaagctgcgcatgcttttagatgagcctactgcacaaaaaatgtggccctctcctatggacaaagctagttgtcgctttcctcccaactctcggacaccacttggcggatcatgtccaggaactttacagaataagaagcttgatccgaaagctcaagtaagccatcaaggatttcaaaggagagatgctctaacttcttctgaccctcctaactcctctattcaatcgggtaatgtcattgctaggaagagacgagttcaagcacagttcaatgagcttcaagaatactacctgcaaagacggcgtactggagcacaggcacgcagacaagaagaaagagagaccgttgcaatgaatagagaaggctatcatgcaggtcttcaggatttccagtctgtgctaacaacattcactcgatatagtattgaatttgatcgtgatgatgaactatttgctactgctggagtctcgaaacgtattaaagtcttcgaattttctactgttgttaatgaaccatcagatgtgcattgcccggttgttgaaatggctaccagatctaaacttagctgcctaagctggaacaagtactcaaaaaatattatcgcaagcagtgactatgagggtatagtaactgtgtgggatgtccagacccgccagagtgtgatggaatatgaagagcatgagaaaagagcatggagtgttgatttttctcgaacagagccttcaatgctagtatctgggagtgacgattgcaaggtgggtggatatatcagacaactcactgcagaaatgatagtagtttcagatggtcacagtgattcatgaatgcaacaacaggtttttggtgtgaaagtgtggtgcacaaaacaagaagcaagcgtgatcaatattgatatgaaagcaaatatttgttcggttaaatataatcctgggtcaagcttctatgttgcagtcggatctgctgatcaccatattcattacttcgatttacgtaatccaagtgcgcctgtccatgtttttggggggcacaagaaagcagtatcgtatgtcaaattcttatctaacaatgagcttgcatctgcatcaacagatagcacgttacgtttatgggatgtcaaggataatttgccggtacggacattcagagggcacaaaaatgaaaagaacttcgttggattgtctgtgaacaatgagtatattgcttgtggaagtgaaacaaatgaggtttttgtttatcacaaggctatctcaaaaccagcagcaagccatagatttgtatcctctaacctggatgatgccgatgatgatcctggttcttatttcattagtgctgtctgctggaagagtgatagccccaccatgttagctgctaacagtcagggaaccataaaagttcatgtacttgctccttgatgtcgtggagggcgttcaagagatttacagccagcgcgtgtatgtcgtactgtccaggtgttccctttcgtgccattatattccccaaaagcgagaatggaggcattattgatctccggttagggcatgaatttttgcagacgatggccagctgacgtagggttttgaggtatcagaatgtgcataatcatgtttatgttgtacaggtgtaaatcagccaagttattgattacaagtgtgacatgagaaatacacattaataaaaactccagctcggttgtacagagattgtgtttgaacccagaaattcatgtggttatgtcgtttgataatatatgtacctggcaggggtgaagctaggcctttttttgtcagctggccttgataattttctggatatctaatgaaaaaacgatgtcaataacaagagttgtataatgaagatctagtagataatactagataat

SEQ ID NO: 6469 - DNA, 2752 bp, Zea Mays
cagaacccaattccctcgcgcgctcccccttcggcccttgagcccttccaccctctcccaggcatcacacattccaccaccaccgccgccgccatcaccactgtgaccaccagccccacactcgtatgtgattattggcacccggacgccaccgcctccgcctccaccaccgactgcgccatgggcgactcctcggtggccggcgcgcttgtgccgtccgtgcccaagccggagaccgcgccgtccggtgacaactctacggcggcgctggcgctgccggaagaggcggggacgcgcgcggcgtcggcgtcgccgcagggacctgcggaggaagagggccccgccgatagggacctcctctgcccgatctgcatggccgtcatcaaggatgccttcctcaccgcctgcggccacagcttctgctacatgtgcgtcgtcacgcacctcagcaacaagagcgactgcccctgctgcgggcactaccttaccaaggcccagctctacccaaactttctccttgacaaggttctgaagaaaatatcagcccgacaaatcgcaaaaacagcgtcaccggtcgatcaatttcgatgtgcattgcaacagggaaatgaaatgggagttaaagagttagatagccttatgactttgattgctgagaagaagcggcaaatggaacaacaagaatcggagacaaatatgcaaatattgttagtcttcttgcactgccttagaaagcaaaagctggaagagttgaatgagatccaaagtgatctacagtacatcaaagaggatataagtgctgtggagagacatagggtagaattataccgcacaaaagaaaggtactccatgaagctgcgcatgcttttagatgagcctactgcacaaaaaatgtggccctctcctatggacaaagctagttgtcgctttcctcccaactctcggacaccacttggcggatcatgtccaggaactttacagaataagaagcttgatccgaaagctcaagtaagccatcaaggatttcaaaggagagatgctctaacttcttctgaccctcctaactcctctattcaatcgggtaatgtcattgctaggaagagacgagttcaagcacagttcaatgagcttcaagaatactacctgcaaagacggcgtactggagcacaggcacgcagacaagaagaaagagagaccgttgcaatgaatagagaaggctatcatgcagtcgtctacgtgtcattgcggaactaagacatggagacttgtttcactctgccaatattgtgtccagtattgaatttgatcgtgatgatgaactatttgctactgctggagtctcgaaacgtattaaagtcttcgaattttctactgttgttaatgaaccatcagatgtgcattgcccggttgttgaaatggctaccagatctaaacttagctgcctaagctggaacaagtactcaaaaaatattatcgcaagcagtgactatgagggtatagtaactgtgtgggatgtccagacccgccagagtgtgatggaatatgaagagcatgagaaaagagcatggagtgttgatttttctcgaacagagccttcaatgctagtatctgggagtgacgattgcaaggtgggtggatatatcagacaactcactgcagaaatgatagtagtttcagatggtcacagtgattcatgaatgcaacaacaggtttttggtgtgaaagtgtggtgcacaaaacaagaagcaagcgtgatcaatattgatatgaaagcaaatatttgttcggttaaatataatcctgggtcaagcttctatgttgcagtcggatctgctgatcaccatattcattacttcgatttacgtaatccaagtgcgcctgtccatgtttttggggggcacaagaaagcagtatcgtatgtcaaattcttatctaacaatgagcttgcatctgcatcaacagatagcacgttacgtttatgggatgtcaaggataatttgccggtacggacattcagagggcacaaaaatgaaaagaacttcgttggattgtctgtgaacaatgagtatattgcttgtggaagtgaaacaaatgaggtttttgtttatcacaaggctatctcaaaaccagcagcaagccatagatttgtatcctctaacctggatgatgccgatgatgatcctggttcttatttcattagtgctgtctgctggaagagtgatagccccaccatgttagctgctaacagtcagggaaccataaaagttcatgtacttgctccttgatgtcgtggagggcgttcaagagatttacagccagcgcgtgtatgtcgtactgtccaggtgttccctttcgtgccattatattccccaaaagcgagaatggaggcattattgatctccggttagggcatgaatttttgcagacgatggccagctgacgtagggttttgaggtatcagaatgtgcataatcatgtttatgttgtacaggtgtaaatcagccaagttattgattacaagtgtgacatgagaaatacacattaataaaaactccagctcggttgtacagagattgtgtttgaacccagaaattcatgtggttatgtcgtttgataatatatgtacctggcaggggtgaagctaggcctttttttgtcagctggccttgataattttctggatatctaatgaaaaaacgatgtcaataacaagagttgtataatgaagatctagtagataatactagataat

SEQ ID NO: 6470 - DNA, 2179 bp, Zea Mays
tcctcatttcctcctcaaccatttcattccttccttccttcccctcgctcgccttcctggcttcttcctccccagcacgcacacgcacacgcacacacccagccttttggctgccctgccggccgtcagagagagaaaccgagctctaactaactgaagtggcggccacatagctagctactcttctgatcctgagcgcgcacgcgccatggctcaggaggacgtgcacctggacgacgcaggcctcgcgctgggcctgtccctcggcagcggcagcggcggcgcctctggtgcggcgcgccacggtggtatcagccgccggctgagcagggaggtgcggctgccgtcgccgcacccgctggagccgtcgctgacgctgagcttgccggacgaagcgaccgcgaccgggtccggcgggggcggggccgcgcacagcgtgtcgtcgctgtcagtggcgggcgtgaagagggagcgcgtggatgacgccgagggagagcgggcgtcgtctacggccgcgttgccgcgggcctgcgccggcgccgaggacgacgacgacgacgggagcacgcggaagaagctgaggctgaccaaggagcagtccgcgctcctggaggaccgcttcaaggagcacagcaccctgaacccgaaagtcgcgttggcgaagcaactgaagctgaggccacggcaggtggaggtgtggttccaaaacaggcgagcaaggttagtattaaccaggcgacacgcacggacaccggcccatggcatccgaaggcgttgttgtcgtttttttttcaataatattgccatgcatgcacacgcaaataataaaccagcagcgagcccacagaagcagatacgacatgcatgctaattgctatgcttgggttttgtttaggactaattaagctctgacggctgatcgacatattaacgtggtttagccgcgcgcgcaggacgaagctgaagcagacggaggtggactgcgagctgctgaagcgctgctgcgagtcgctgacggaggagaaccggcggctgcagcgggagctgcaggagctccgcgcgctcaagttcgccccacacccacaggcgccgccgtcgtccgcgacgcaggccggcgcggcggcgggcgtcgttccggcgccgccgccgccgttgtacatgcagatgcagatgccggccgccgccacgctgagcctgtgcccgtcctgcgaccgcctggccgggcccggcgccgccgccaaggccgagcccaggcccaaggcagccgccacccaccacttcttcaaccccttcacccactccgccgcctgctgatgatgagggcagggcagcacgcagccacgcaacgcagcggcagtaaacagagcaccgccccgtgcagataataccacgtctgtacgtgtcacaagtaattaacaaacgtatggtcctcctctctatctattttcttgatccggagggctaagttagttgttttcgtgtcgatcccaaatgcatcagctaatccatcaatcataggcttgatagagtagtcgaaaaaaatagccgtagctttcctagcactccctccgccccccccccccccccccatccatgtatatttctgttgtaattctgtccctctctcgcggtctacttgctcccttttcgattggagtacgtagctcctttgcctttttgtttttggttttttgtttctgtttctgtttgagacaggttaatataatcgccgtcgtccgagggtgtagtgtcagggattgatatccctgtacaccgattattggattgagatgcttctagctagtcttcgtactgataagcgtgcgtgcgtacgtcagagcaccacagtgctggaatggatgatgacatgagagacaggtagagaagcccagctgcgtggctcttggacctttctgcaggtgtacgtggtgtgtacacacgcacacccttttttatagtacatatatacggctcaatgattgtgcgtgccggggctctcgactctccaaattgctgtcgcttttgctcgttttaattattgggagcgcgagcgcggcagcccgctcttgtcttgagcatgcccacccctcgctggcgcacaagccatcagttctctgcaccgtatatgcatggctgcccggccacggacgaactttcagtttcagcagtctaatgatcc

SEQ ID NO: 6471 - DNA, 1703 bp, Zea Mays
ccctaacttagggtagggagatgtattaatagactcaggttgttgggcttgacccattacataggggtataagactatccgcaacggttccctttaaatttctccccctatatcactttttttttgtgtcacatcattaatagtttgttccctactttttcatctcccgcagcggtttcccctataccccactacaaccataaaatatcatttcctatacttttcatctactatcaatttttcatccactaacaattactcttggacccactactacaagaatgaacagtgatggagaggatgaacagtgaaccgctatatacggagggagagagaagagggccgacgcgtagggggccgaccaggggtcagcgctgcgggtctaggggcgctccctgtagccgcatgcaagaggcgggggctggcacgcggagaccgctgtggccagcctaactgtaattacaatgggctaaccctaaaaccctaaacgggtactctaacaccgtgggccgggtcaaaggggccactgtgcctacatatctgggagggagcaccggcgccatggacgaagacgaagggcacaacgcagatcgaagaagggcgttgttgctattagtggagacaaagggaacattgacgtctgcagctcttggaggggggaggcggcgactgcagcacttggttgtggcggcggtgtctacctctcgttgggggcagagctcggggaaaaatggtgcgagaaagaaaagaaacggctgcaggagaaatattgcacgtggaactgatagattgagatggcagttcttcgactggaattagagaactgtgccgatttttggtgttgccaaaatattgggctacgagttggatactgttggagcagtgattttttcgccttatttgccaaaactagttttgggggacatttattaggagctcttggagatgctctaatagtcagtgcaccggactggatggaaacacaagaaaatctctcataacctaaaatttcttgtatggtcacaattgtcaattatctttatggtaattgcgacatgcacgagtcatgcatttttattagcacaagaggttcacttgctgacttatgtgcagtgatggtggactgtactgtacagctttattagacaaaaagaaaggctgtcctgttgtagtgaatggcttttcatgcactctaaaaaggcccatactgtaaaggggaaaatactgacgttattttcttttccccgtctatgtgcattatcggtttgaacttaaaaacaatgcaggttgggttgattgcaacaccagatgtccattcctttgaacttactaagaaagaccatttcatcattctagggtatttggaccaggtgatgctgtcgaatttgttcagaatcagttgaaggagacctcatcagccacacttgcggtgcgccgcctcgtgaaggaagctgttcgcgagaggcgatgcaaggataactgcactgctgttttgatcgtcttcaggcactagcgatcggcctaattcccttttgctttcgtcaggctggaaagaattagctgataaagaacaatgtttgaagtgtagcgagttgaacttggaactcttgctttgtctgttttgatttgatgtgacctattaatacaccatccatattcatttggaaattactctatccgtccaaaagacattgtttaagttt

SEQ ID NO: 6472 - DNA, 2260 bp, Zea Mays
agatagaaatgctggaaggaatgagtatgcaacaccataccatggagaatcagagttgaaaaggagaaggtccagaagcagggatcatgatcgagaaagatacagtaggtctatctcaccgccactaagggaacaaaggtataattaccgtggacgtgattttggcaatcctccttactactctatggagaaatcaagggggaagtatgctgaagttgataaacaaagatcgtcggggagtggtggatacattggtgggttgcaccagagatatgaaagccggcttggtggatactcaccaaggaaaaagaaaacatcactgcaagctgagcaggcaactaccaagactccttccaagatggctcctactccattcagtttcagcgtgataaaggacccttcaactacagctgtgacaatgttggcagctacagaggataagttgattgactgcttgaatgacttcttattgtctactggcagtaaactccagcggtctaaaccatgcctcagttgtacgataaacagagaaaaacgtcaggcttttgtggaatttcttacaccagaggatgctacagcagctatttcttttgatggaaggtctctaaatggatctgtgttgagaattcgacgccccaaagaatatgttgaaacggtgaatgttacccctaagaaggcagaagagactgctttgatatctgatgttgttgcagattcaccatacaagattttcatagcgggcattgctggagtgatctcatctaagatgctaatggagattgttagtgcatttggcccattggctgcataccgctttctttttaacaatgagctcggtggaccctgtgcatttcttgagtacgccgaccgctccgttacttctaaggcatgtgctggcctcaatgggatgatgcttggtggacgtgtactgactgctgtgcatgtgtttcctaatcctcatgtggaggctgctaatgaggcttccccattttatggtattcctgacaatgctaaattgcttctgaaagaaccaacaaaggtcctgcagctaaaaaatgtgtttgaacgagaagagtatatgctactttcaaaatctgagctggaagaaacattggaagatgtacgtgttgaatgtacgaggtttggagcagtcaaatctgtaaatgtagttgagtatcctgctgctggtgtcagtgctgcagaggagaacatagttgagctcaagattgaatgcactgaattttctgatacggaaaacattgcaaaggctgtatcagaatattctgtaccgattattccgagcatagatgttctaaatcattctgtcgcttcggatactaaagatgtggatcttattccagagagtcaggatcagaaggacaaacacctcccttcaaatgcagcactttgtgagagtgaggcacctgtagcagatgaggacgcagagcttgatgaaactcagtctagagctgctctccccacaccgcaacatgctgaagctgatcatacggaagcagctgtggatgagaataaacatacaggagcagggaaggttactgctactgcaacggacgacgatgcagtagaaaagagtcatggagacccaagaacctcagagacctgcaatcctgctggacctacagacaaagcggagaaacctggaaggtactccgaacaaggcgctggtgatgtgactgaagatcgtccagaaaaagaagcccaagctgttgggaccagcgacactggtttcgtgtttgaacctggttctgtgcttgtggagtttttgcgggaggaggctgcttgcatggccgcacattccttacatgggcgtcgcttcgggaacagaactgtgcatgctggatatgctccgtatgatctctacttgcagaaataccccaggtgattctgcgtttgcgactgcatgagttgcgatacgagctttgcctatgtgccagtatttcacagaaacttcagacttgtagttttggcttttgagcctttggatggttcttccggtccagatagtggtaccattagttgaacgaaatatttggaaatgttgttccacagtagatatcggatggacaataggatataagtactggatagagacacaagttgtcgttaacatcgttctttacttcgctattaatgtttttgatgacgtcagacattagtgtggatggatggatggaatggatttattgcaagattttgactgctataatctcatttttttactatctgctcacttgtgctc

SEQ ID NO: 6473 - DNA, 2416 bp, Zea Mays
agatagaaatgctggaaggaatgagtatgcaacaccataccatggagaatcagagttgaaaaggagaaggtccagaagcagggatcatgatcgagaaagatacagtaggtctatctcaccgccactaagggaacaaaggtataattaccgtggacgtgattttggcaatcctccttactactctatggagaaatcaagggggaagtatgctgaagttgataaacaaagatcgtcggggagtggtggatacattggtgggttgcaccagagatatgaaagccggcttggtggatactcaccaaggaaaaagaaaacatcactgcaagctgagcaggcaactaccaagactccttccaagatggctcctactccattcagtttcagcgtgataaaggacccttcaactacagctgtgacaatgttggcagtaaactccagcggtctaaaccatgcctcagttgtacgataaacagagaaaaacgtcaggcttttgtggaatttcttacaccagaggatgctacagcagctatttcttttgatggaaggtctctaaatggatctgtgttgagaattcgacgccccaaagaatatgttgaaacggtgggtattttaattgggtgtgtcataattcacgttcagcagcatcgtgaagcaaaggaattgtaaagcaggcttcctggtgtagtgcaaatactatgtgattgctgctacttcagattttcattggctgattacagtactgcagacaggcagagtccttatggtgttcagttcatggaaacattaggaagacagcttgtacagcatggttcaaaatgttacccctaagaaggcagaagagactgctttgatatctgatgttgttgcagattcaccatacaagattttcatagcgggcattgctggagtgatctcatctaagatgctaatggagattgttagtgcatttggcccattggctgcataccgctttctttttaacaatgagctcggtggaccctgtgcatttcttgagtacgccgaccgctccgttacttctaaggcatgtgctggcctcaatgggatgatgcttggtggacgtgtactgactgctgtgcatgtgtttcctaatcctcatgtggaggctgctaatgaggcttccccattttatggtattcctgacaatgctaaattgcttctgaaagaaccaacaaaggtcctgcagctaaaaaatgtgtttgaacgagaagagtatatgctactttcaaaatctgagctggaagaaacattggaagatgtacgtgttgaatgtacgaggtttggagcagtcaaatctgtaaatgtagttgagtatcctgctgctggtgtcagtgctgcagaggagaacatagttgagctcaagattgaatgcactgaattttctgatacggaaaacattgcaaaggctgtatcagaatattctgtaccgattattccgagcatagatgttctaaatcattctgtcgcttcggatactaaagatgtggatcttattccagagagtcaggatcagaaggacaaacacctcccttcaaatgcagcactttgtgagagtgaggcacctgtagcagatgaggacgcagagcttgatgaaactcagtctagagctgctctccccacaccgcaacatgctgaagctgatcatacggaagcagctgtggatgagaataaacatacaggagcagggaaggttactgctactgcaacggacgacgatgcagtagaaaagagtcatggagacccaagaacctcagagacctgcaatcctgctggacctacagacaaagcggagaaacctggaaggtactccgaacaaggcgctggtgatgtgactgaagatcgtccagaaaaagaagcccaagctgttgggaccagcgacactggtttcgtgtttgaacctggttctgtgcttgtggagtttttgcgggaggaggctgcttgcatggccgcacattccttacatgggcgtcgcttcgggaacagaactgtgcatgctggatatgctccgtatgatctctacttgcagaaataccccaggtgattctgcgtttgcgactgcatgagttgcgatacgagctttgcctatgtgccagtatttcacagaaacttcagacttgtagttttggcttttgagcctttggatggttcttccggtccagatagtggtaccattagttgaacgaaatatttggaaatgttgttccacagtagatatcggatggacaataggatataagtactggatagagacacaagttgtcgttaacatcgttctttacttcgctattaatgtttttgatgacgtcagacattagtgtggatggatggatggaatggatttattgcaagattttgactgctataatctcatttttttactatctgctcacttgtgctc

SEQ ID NO: 6474 - DNA, 2666 bp, Zea Mays
agatagaaatgctggaaggaatgagtatgcaacaccataccatggagaatcagagttgaaaaggagaaggtccagaagcagggatcatgatcgagaaagatacagtaggtctatctcaccgccactaagggaacaaaggtataattaccgtggacgtgattttggcaatcctccttactactctatggagaaatcaagggggaagtatgctgaagttgataaacaaagatcgtcggggagtggtggatacattggtgggttgcaccagagatatgaaagccggcttggtggatactcaccaaggaaaaagaaaacatcactgcaagctgagcaggcaactaccaagactccttccaaggtcattcagtccccagaaaaaaaatcagccacatgggatcagcctcctgttaaagcaaaccaatctaactttcctaccactttcctgccaactgttggccagatggctcctactccattcagtttcagcgtgataaaggacccttcaactacagctgtgacaatgttggcaggtaatagtttgactgcagattctgtccagcttacacaagcaacgcgcccactcaggaggttgcacattgaaaatttgcctgattcagctacagaggataagttgattgactgcttgaatgacttcttattgtctactggcagtaaactccagcggtctaaaccatgcctcagttgtacgataaacagagaaaaacgtcaggcttttgtggaatttcttacaccagaggatgctacagcagctatttcttttgatggaaggtctctaaatggatctgtgttgagaattcgacgccccaaagaatatgttgaaacggtgggtattttaattgggtgtgtcataattcacgttcagcagcatcgtgaagcaaaggaattgtaaagcaggcttcctggtgtagtgcaaatactatgtgattgctgctacttcagattttcattggctgattacagtactgcagacaggcagagtccttatggtgttcagttcatggaaacattaggaagacagcttgtacagcatggttcaagtaaataatgttacccctaagaaggcagaagagactgctttgatatctgatgttgttgcagattcaccatacaagattttcatagcgggcattgctggagtgatctcatctaagatgctaatggagattgttagtgcatttggcccattggctgcataccgctttctttttaacaatgagctcggtggaccctgtgcatttcttgagtacgccgaccgctccgttacttctaaggcatgtgctggcctcaatgggatgatgcttggtggacgtgtactgactgctgtgcatgtgtttcctaatcctcatgtggaggctgctaatgaggcttccccattttatggtattcctgacaatgctaaattgcttctgaaagaaccaacaaaggtcctgcagctaaaaaatgtgtttgaacgagaagagtatatgctactttcaaaatctgagctggaagaaacattggaagatgtacgtgttgaatgtacgaggtttggagcagtcaaatctgtaaatgtagttgagtatcctgctgctggtgtcagtgctgcagaggagaacatagttgagctcaagattgaatgcactgaattttctgatacggaaaacattgcaaaggctgtatcagaatattctgtaccgattattccgagcatagatgttctaaatcattctgtcgcttcggatactaaagatgtggatcttattccagagagtcaggatcagaaggacaaacacctcccttcaaatgcagcactttgtgagagtgaggcacctgtagcagatgaggacgcagagcttgatgaaactcagtctagagctgctctccccacaccgcaacatgctgaagctgatcatacggaagcagctgtggatgagaataaacatacaggagcagggaaggttactgctactgcaacggacgacgatgcagtagaaaagagtcatggagacccaagaacctcagagacctgcaatcctgctggacctacagacaaagcggagaaacctggaaggtactccgaacaaggcgctggtgatgtgactgaagatcgtccagaaaaagaagcccaagctgttgggaccagcgacactggtttcgtgtttgaacctggttctgtgcttgtggagtttttgcgggaggaggctgcttgcatggccgcacattccttacatgggcgtcgcttcgggaacagaactgtgcatgctggatatgctccgtatgatctctacttgcagaaataccccaggtgattctgcgtttgcgactgcatgagttgcgatacgagctttgcctatgtgccagtatttcacagaaacttcagacttgtagttttggcttttgagcctttggatggttcttccggtccagatagtggtaccattagttgaacgaaatatttggaaatgttgttccacagtagatatcggatggacaataggatataagtactggatagagacacaagttgtcgttaacatcgttctttacttcgctattaatgtttttgatgacgtcagacattagtgtggatggatggatggaatggatttattgcaagattttgactgctataatctcatttttttactatctgctcacttgtgctc

SEQ ID NO: 6475 - DNA, 3799 bp, Zea Mays
atggagagtgcttttaagcaaatgaaaggggaatttgttggtttgctaattagaagggaggttatgcagggcaggttctcctcatttctgcttttttgggtcgaaccacgtggagtaatacctctggagctcagtggctgcatcagccaggtgtggtcgccatggttcaaaggcgacccgtgcgtcggcgcggccacggacggcacgtccatctacgccgacaaaatgaacccgggcatcaagtgcgactgctccgaccacaacaacaccatctgccacattaccgagctgaaaatgaacaaactggatgtggttggtcctatacctgaggagctgaggaacctcagccacttgacaactctgaatttacaacagaattacttaacagggcctttgccatcgttccttggagaattaactgctttgcagcagatgtcgctttctggcaatgcattatcaggaactattccaaaggagctggggaaccttgtgaatctcataatcctgagtttaggcacgaacaatttaactggctcccttccttctgaattgggtaacctggttaaactagagcatatgtacattgatagtgctggcttaagtggtcctataccatcatcattttcgaaacttacacgattgaaaacattgtgcgcatcagataatgactttactgggaaaataccagattacattggaagctggagtaatttaacagatttgcggtttcaaggcaattcattccaaggtccacttccaagcactcttgctaatcttgttcagctaacaagcttaattttaaggaattgcaggatatttggtactttggcattagtgaacttttcaaaatttacaggattaacattattggatttgagttttaataatatcataggtgaagtaccacaagctctactaaatatgaattcactcaccttgttagacttttcctacaactacctctcaggaaaccttccttcttgggctagtcataatttgcaatttgtcttacctgcggggctggagtgccttcagcgaaacacgtcatgctttcttggctctccacaatcttcctcctttactgtagactgtgggagtagtagatctgtatttgcttcagataattccatgtatcaacctgatgatgccaatcttggtgttgcatcatattatatttcaagcccaccaagatggggtgttagtaatgtcgggagattcatggatacatcaaacgggagttacatagtcaacagttcacgccggtttcagaataccctagattccaaacttttccaaacagcaaggatgtcagcatcaactttaagatactatggttttggacttgaaaatggggactacacagtcacacttcaatttggagaatttgactttgaagatttacaaacttggaagagcgttgggagaagggttttcgatatctatctccagggtgagcgtaaggagcagaactttaacataaagaaggcagcaaaagaagctggcgaagcaagcacatcgtacactgctgtcaagaaacaatatactgtacctgtcacaaaaaacatcctagaaattcatctcttttgggctggaaagggcacttgttgcatccctaatcaaggcgattatgggcctacaatatcagctttgagtgcaactctaaatacaaaaaagaagggtaataaaataggtgtaattattggagtcgtgattggtgcaacagttttaggactagcaatacttgctacactctgtgtgtggaggcacaaaaggagaaaagtatcactagagcagcaaggtaaaatgatatgctagattgctaggctaacgcaatccttaaactcagcaaataggttttttcttacaaactaacagtatgtggtgtttgcagagctctacaatattgttcgaatacctaatgtattctgttacacttatggtgaactaaggaccgctactgaaaattttagttctgctaatcttcttggtgaagggggatatggatcagtttataaggtttgttcatttgtagtacacaatgcatgatttgaatctgctagggatcttttgtggcactgtaggttaatagtgaacaacgaatttgttttcattgtgcaaatttggctagagttgtgttgtttaattctactttgttcaatgaaaattccttttatcatttactcatttaacgtacttctccaattatcttactaacatcagtgcataataaatctgggatattccctgttattttccttttccccctgttttgcacgtggtcagtaaaatgagattgattgggtactctagtgcatttactctattacatgatattgattttacttggtgcttataactcttttttagaaaaattcaccttctggcagggtaaattagttgatggcagtgtggtggcaattaaacaactatctgaaacatctcgccaagggaagaaggaattcgtagctgaaatagaaactatttcccgagtgcagcaccgtaatcttgtgaagttgtttggtttttgccttgagggaaataaaccacttttggtttatgagtacatggagagtggaagccttgataaagcattgtttggtatcaaccatttcattcagtttatccagcggcgactagtctaggactcttatataaatctgacatctgaaatgttcattggcatgcaggaaatggaagattgaacttgaattggtcaacacgatataaaatatgcttggggattgcaagaggcttagcttatctccacgaagagtctagcatccgcattgtgcatagggacataaaggccagcaatgtattacttgatgccactttgaaccctaagatttcggatttcgggctcgccaaactttatgacgataaaaagacacatgttagcacaaaagttgctggtacatttggctatctttcacctgagtacgccatgagaggtcacatgactgagaaagttgatatttttgcttttggtgtggtcatgttggagattattgctggaaggccgaactatgatggtaagcttgaccaagacatggcttatcttttagaatgggtctggcaactttacgaggaagaccatccgctggacattgcggatcccaagctcacagaattcgatagtgtcgagttgctccgtgccatccgcatcgccctcctctgcatccagagctcacctcgtcaaaggccatccatgtcgagagtggtgtcaatgctcacaggagacagcgaggcgcctgaggcagtgtccaagcctagctatgttgccgaatggcagagcaacactgaagggacgtcaagctcagtgtccacagcagaggctgtgtccgtggctccattcctaaaccccgttgtggacgatggccggtgatgatggccatcgctaagatcatcttatgtcaagcactcaagccacagattgttttcttggagatccacctttaaaggccccattatttaggttgaatgtggatgacagatttatgttgttgactggatgagatgtcctagggtttcctcacgttgtagaatacaactctcacaagtataagaatctaggaacatattccttcgatgtaacatacctcttttgtttaatctgttttgtaagagaaaccagaagaacaccttgtatttcggttgatattttgaaacccacagccaattgaatgctgggtgtgtaggcatatatatgaccaataggttgattgtaagctttactacaatagtggggcggtctcgaagtatattgccagatatgttgcagttcattttctaacacgag

SEQ ID NO: 6476 - DNA, 3905 bp, Zea Mays
atggagagtgcttttaagcaaatgaaaggggaatttgttggtttgctaattagaagggaggttatgcagggcaggttctcctcatttctgcttttttgggtcgaaccacgtggagtaatacctctggagctcagtggctgcatcagccaggtgtggtcgccatggttcaaaggcgacccgtgcgtcggcgcggccacggacggcacgtccatctacgccgacaaaatgaacccgggcatcaagtgcgactgctccgaccacaacaacaccatctgccacattaccgagctgaaaatgaacaaactggatgtggttggtcctatacctgaggagctgaggaacctcagccacttgacaactctgaatttacaacagaattacttaacagggcctttgccatcgttccttggagaattaactgctttgcagcagatgtcgctttctggcaatgcattatcaggaactattccaaaggagctggggaaccttgtgaatctcataatcctgagtttaggcacgaacaatttaactggctcccttccttctgaattgggtaacctggttaaactagagcatatgtacattgatagtgctggcttaagtggtcctataccatcatcattttcgaaacttacacgattgaaaacattgtgcgcatcagataatgactttactgggaaaataccagattacattggaagctggagtaatttaacagatttgcggtttcaaggcaattcattccaaggtccacttccaagcactcttgctaatcttgttcagctaacaagcttacgaataggtgacattgtaactgggagttcttcgctggcattcatcagtaacatgacatctttgaacttattaattttaaggaattgcaggatatttggtactttggcattagtgaacttttcaaaatttacaggattaacattattggatttgagttttaataatatcataggtgaagtaccacaagctctactaaatatgaattcactcaccttgttgtatgttttgtatccctttcaatgcttattttgggggcataatgaatttcattgtttatcttgctaattgtagcacatgcattccgatcagatttcttgggaacaatagtcttacaggaggccttccaagctctataggaccttctattaagtacttagacttttcctacaactacctctcaggaaaccttccttcttgggctagtcataatttgcaattgtaagtattaagttatgtaatttattgttggtcaaccgaacttttagcccaattgtcttttcaaagcataatgtagcccaacttgaaatatatgcttatagtacatgtatttattaaaatatatttttgaatgttcaatacatctaaaaaaacttgtgttgaggcatttagcttatatttctttttagatttgttgcattttgaagcaacctattattctgaatctttgaagaagtagacatacattcccttactgcttaactccaaaaaggcaaaaaaaaagtttgttgctttagtgtatcttgattctaggaaataaacacactgttaatatgctccaagtccaaagacctctcaagttttttgcgtgtctcattatgcatagaaatttggtggcaaactacttcgtgatcaacaagtccaaagatagtgtcttacctgcggggctggagtgccttcagcgaaacacgtcatgctttcttggctctccacaatcttcctcctttactgtagactgtgggagtagtagatctgtatttgcttcagataattccatgtatcaacctgatgatgccaatcttggtgttgcatcatattatatttcaagcccaccaagatggggtgttagtaatgtcgggagattcatggatacatcaaacgggagttacatagtcaacagttcacgccggtttcagaataccctagattccaaacttttccaaacagcaaggatgtcagcatcaactttaagatactatggttttggacttgaaaatggggactacacagtcacacttcaatttggagaatttgactttgaagatttacaaacttggaagagcgttgggagaagggttttcgatatctatctccagggtgagcgtaaggagcagaactttaacataaagaaggcagcaaaagaagctggcgaagcaagcacatcgtacactgctgtcaagaaacaatatactgtacctgtcacaaaaaacatcctagaaattcatctcttttgggctggaaagggcacttgttgcatccctaatcaaggcgattatgggcctacaatatcagctttgagtgcaactctaaatacaaaaaagaagggtaataaaataggtgtaattattggagtcgtgattggtgcaacagttttaggactagcaatacttgctacactctgtgtgtggaggcacaaaaggagaaaagtatcactagagcagcaagagctctacaatattgttcgaatacctaatgtattctgttacacttatggtgaactaaggaccgctactgaaaattttagttctgctaatcttcttggtgaagggggatatggatcagtttataagggtaaattagttgatggcagtgtggtggcaattaaacaactatctgaaacatctcgccaagggaagaaggaattcgtagctgaaatagaaactatttcccgagtgcagcaccgtaatcttgtgaagttgtttggtttttgccttgagggaaataaaccacttttggtttatgagtacatggagagtggaagccttgataaagcattgtttggaaatggaagattgaacttgaattggtcaacacgatataaaatatgcttggggattgcaagaggcttagcttatctccacgaagagtctagcatccgcattgtgcatagggacataaaggccagcaatgtattacttgatgccactttgaaccctaagatttcggatttcgggctcgccaaactttatgacgataaaaagacacatgttagcacaaaagttgctggtacatttggctatctttcacctgagtacgccatgagaggtcacatgactgagaaagttgatatttttgcttttggtgtggtcatgttggagattattgctggaaggccgaactatgatggtaagcttgaccaagacatggcttatcttttagaatgggtctggcaactttacgaggaagaccatccgctggacattgcggatcccaagctcacagaattcgatagtgtcgagttgctccgtgccatccgcatcgccctcctctgcatccagagctcacctcgtcaaaggccatccatgtcgagagtggtgtcaatgctcacaggagacagcgaggcgcctgaggcagtgtccaagcctagctatgttgccgaatggcagagcaacactgaagggacgtcaagctcagtgtccacagcagaggctgtgtccgtggctccattcctaaaccccgttgtggacgatggccggtgatgatggccatcgctaagatcatcttatgtcaagcactcaagccacagattgttttcttggagatccacctttaaaggccccattatttaggttgaatgtggatgacagatttatgttgttgactggatgagatgtcctagggtttcctcacgttgtagaatacaactctcacaagtataagaatctaggaacatattccttcgatgtaacatacctcttttgtttaatctgttttgtaagagaaaccagaagaacaccttgtatttcggttgatattttgaaacccacagccaattgaatgctgggtgtgtaggcatatatatgaccaataggttgattgtaagctttactacaatagtggggcggtctcgaagtatattgccagatatgttgcagttcattttctaacacgag

SEQ ID NO: 6477 - DNA, 3976 bp, Zea Mays
atggagagtgcttttaagcaaatgaaaggggaatttgttggtttgctaattagaagggaggttatgcagggcaggttctcctcatttctgcttttttgggtcgaaccacgtggagtaatacctctggagctcagtggctgcatcagccaggtgtggtcgccatggttcaaaggcgacccgtgcgtcggcgcggccacggacggcacgtccatctacgccgacaaaatgaacccgggcatcaagtgcgactgctccgaccacaacaacaccatctgccacattaccgagctgaaaatgaacaaactggatgtggttggtcctatacctgaggagctgaggaacctcagccacttgacaactctgaatttacaacagaattacttaacagggcctttgccatcgttccttggagaattaactgctttgcagcagatgtcgctttctggcaatgcattatcaggaactattccaaaggagctggggaaccttgtgaatctcataatcctgagtttaggcacgaacaatttaactggctcccttccttctgaattgggtaacctggttaaactagagcatatgtacattgatagtgctggcttaagtggtcctataccatcatcattttcgaaacttacacgattgaaaacattgtatatccattagacacattttttcaatagtattgttctatgccactcaacgttatatgttattccactttttgtttaggtgcgcatcagataatgactttactgggaaaataccagattacattggaagctggagtaatttaacagatttgcggtttcaaggcaattcattccaaggtccacttccaagcactcttgctaatcttgttcagctaacaagcttacgaataggtgacattgtaactgggagttcttcgctggcattcatcagtaacatgacatctttgaacttattgtattcccaattaatcattcactttatgaatcaaactgcgccttcatttgctccattgtaaccgagttgttatatacttaaattggtgacattattcattgcagaattttaaggaattgcaggatatttggtactttggcattagtgaacttttcaaaatttacaggattaacattattggatttgagttttaataatatcataggtgaagtaccacaagctctactaaatatgaattcactcaccttgttatttcttgggaacaatagtcttacaggaggccttccaagctctataggaccttctattaagtacttagacttttcctacaactacctctcaggaaaccttccttcttgggctagtcataatttgcaattaaatttggtggcaaactacttcgtgatcaacaagtccaaagatagtgtcttacctgcggggctggagtgccttcagcgaaacacgtcatgctttcttggctctccacaatcttcctcctttactgtagactgtgggagtagtagatctgtatttgcttcagataattccatgtatcaacctgatgatgccaatcttggtgttgcatcatattatatttcaagcccaccaagatggggtgttagtaatgtcgggagattcatggatacatcaaacgggagttacatagtcaacagttcacgccggtttcagaataccctagattccaaacttttccaaacagcaaggatgtcagcatcaactttaagatactatggttttggacttgaaaatggggactacacagtcacacttcaatttggagaatttgactttgaagatttacaaacttggaagagcgttgggagaagggttttcgatatctatctccagggtgagcgtaaggagcagaactttaacataaagaaggcagcaaaagaagctggcgaagcaagcacatcgtacactgctgtcaagaaacaatatactgtacctgtcacaaaaaacatcctagaaattcatctcttttgggctggaaagggcacttgttgcatccctaatcaaggcgattatgggcctacaatatcagctttgagtgcaactctaagtattctcttttgatacaatcatggctttaatattgttcagataatgtccttacgttcaacaatttcattatatacaatttctaccacgagaagtactgaagactaaaaagactggaattttagaaatgcctaacataaaagccaaatattgtttatattgatgtataatcatgctttctaacaaatgcctctcctacagatacaaaaaagaagggtaataaaataggtgtaattattggagtcgtgattggtgcaacagttttaggactagcaatacttgctacactctgtgtgtggaggcacaaaaggagaaaagtatcactagagcagcaaggtaaaatgatatgctagattgctaggctaacgcaatccttaaactcagcaaataggttttttcttacaaactaacagtatgtggtgtttgcagagctctacaatattgttcgaatacctaatgtattctgttacacttatggtgaactaaggaccgctactgaaaattttagttctgctaatcttcttggtgaagggggatatggatcagtttataagaaaaattcaccttctggcagggtaaattagttgatggcagtgtggtggcaattaaacaactatctgaaacatctcgccaagggaagaaggaattcgtagctgaaatagaaactatttcccgagtgcagcaccgtaatcttgtgaagttgtttggtttttgccttgagggaaataaaccacttttggtttatgagtacatggagagtggaagccttgataaagcattgtttggtatcaaccatttcattcagtttatccagcggcgactagtctaggactcttatataaatctgacatctgaaatgttcattggcatgcaggaaatggaagattgaacttgaattggtcaacacgatataaaatatgcttggggattgcaagaggcttagcttatctccacgaagagtctagcatccgcattgtgcatagggacataaaggccagcaatgtattacttgatgccactttgaaccctaagatttcggatttcgggctcgccaaactttatgacgataaaaagacacatgttagcacaaaagttgctggtacatttggctatctttcacctgagtacgccatgagaggtcacatgactgagaaagttgatatttttgcttttggtgtggtcatgttggagattattgctggaaggccgaactatgatggtctggcaactttacgaggaagaccatccgctggacattgcggatcccaagctcacagaattcgatagtgtcgagttgctccgtgccatccgcatcgccctcctctgcatccagagctcacctcgtcaaaggccatccatgtcgagagtggtgtcaatgctcacaggagacagcgaggcgcctgaggcagtgtccaagcctagctatgttgccgaatggcagagcaacactgaagggacgtcaagctcagtgtccacagcagaggctgtgtccgtggctccattcctaaaccccgttgtggacgatggccggtgatgatggccatcgctaagatcatcttatgtcaagcactcaagccacagattgttttcttggagatccacctttaaaggccccattatttaggttgaatgtggatgacagatttatgttgttgactggatgagatgtcctagggtttcctcacgttgtagaatacaactctcacaagtataagaatctaggaacatattccttcgatgtaacatacctcttttgtttaatctgttttgtaagagaaaccagaagaacaccttgtatttcggttgatattttgaaacccacagccaattgaatgctgggtgtgtaggcatatatatgaccaataggttgattgtaagctttactacaatagtggggcggtctcgaagtatattgccagatatgttgcagttcattttctaacacgag

SEQ ID NO: 6478 - DNA, 2145 bp, Zea Mays
aatgaatgccacctattcttttttctccgcagccaaaacacgcttctcccttcccatcttttcctttcctctccctcgtctcgtctcgtcttcgttcccctttcctcctgcgcaccccgtcttctcctcaccgcgtcaaaccccagcacaaatcaaccgcccgccgcctccgctcccctcccgtcccgaatcagccgctgcggtgcccaatccggccgatcccccctcctatccgccgcagaggcggcgcctctgggcctaccccgatgtatagcaacttcaaggagcaggcgatcgagtacgtcaagcaggcggtccaggaggacaatgccggcaactacgtcaaggcgttccctctctacatgaacgcgctcgagtacttcaagacccatctcaagtacgagaagaaccccaagatcaaggaggccatcaccgccaagttcaccgagtacctccgccgcgccgaggagatccgggccgtcctcgacgagggcggcgcggggccgggggccaacggaggtgacgcagccgtcgccacgcgccccaagaccaagggcaaggacggcgacgggggcaacggaggggatgactccgagcagtccaagctcagggcggggctcaactctgccatcatcaccgagaagcccaacgtcaagtggaacgacgttgctggcctcgagagcgccaagcaagctctgcaggaggccgtcatattgccggtcaagttcccacagttcttcacgggcaagcggaggccttggagggcgtttcttttatatggccctcctggaacaggaaagtcttacttggcaaaagccgtcgcaaccgaggctgattcaacatttttcaggcaagagagcttttagctaaaaaacgaataacttttgcaaaactccgaaagttgtcgcttgaaagtatatcttcttcagatctggtttcaaagtggatgggtgaaagcgagaaattagtcgcaaatcttttccaaatggctcgtgaaaatgccccttccattatctttattgatgaaattgattctttatgcggtcaacgtggagaaggtaatgaaagtgaagcatctaggaggattaagactgaacttcttgtgcaaatgcagggtgttggtcataatgatgataaagttcttgttcttgctgccacgaatacgccatatgctctggaccaggctgtgcggcgaagatttgacaagcgtatctacattccgctacctgacacgaaagcaaggcagcatatgtttaaggtccatctcggggatacaccacacagtttaactgaaagcgatttcgagagcttggcccgtcgaacagatggattttctggttctgatgttgctgtttgtgttaaggatgtcttatttgaacctgtgcgcaaaacacaggatgccatgttcttcttcaaggcagacggtgacatgtggatgccatgtggaccaaaacaaccggggtctgtacagaccacaatgcaggagcttgcatccaagggcctcgctgcaaagattcttccaccacctatctcaaggacggattttgagaaggtcttgtcgaggcagaggccgacagttagcaagaaggatctggaggtgcatgagaggttcactaaggagttcggcgaggagggctgatacaccgcgcgcggacacacacccatgcacagctgcaccacagaaatgtatattgtttatcacttcgattgttctgcttggaagttgcattcacaggattgtacatttggtagcccaactatgagtaatcatggcagctgctttaccgtgttgggctaccgatgggcctctgttgtcaacttatttcaatttttatttatgcacatgaaaattttccgcaggtgtattattgaataataattcttaacgtggagcccttgtggttgctagtttctttttctaacgttccttagttttcacgccgagtttcttttccttcagtttggtttacttgcagggccattttattagacgctacatactgaaggtgaacttcttgttctcaggcgttttatttgaggtatctagctctggtagaatctggccatgtcagtaatggtttacatttttatagtttgtatgtatctaccacaaacttcatcagttttgaatgatctgaatctaca

SEQ ID NO: 6479 - DNA, 762 bp, Zea Mays
gcgagaattacggcccattagggttcacttccaaactcggcatctataaacacttctctcacgccccgccgccgcctccgctcgccaccgtcgtctaagttaggctagggttcgaccagctagcggaaatggtggccttcaggttccatcagtaccaggtggtggggcgcgcgctgccgacgcccggcgatgagcaccccaagatctaccgcatgaagctctgggccaccaacgaggtccgcgccaagagcaagttctggtacttcttgaggaagttgaagaaggttaagaagagcaacggccaggtcctggccatcaacgagatctttgagcgtaacccgacgacaatcaagaactacggcatctggctgcgctaccagagcagaaccggctaccacaacatgtacaaggagtaccgcgacacaaccctgaatggcgctgtggagcagatgtacaacgagatggcctctcgccaccgcgtgaggtccccctgcatccagatcatcaagactgcgacggtgcacttcaagctctgcaagagggacaacactaagcagttccacaacagtgagatcaagttcccgctcgtgcaccgcaaggtcaggccgccgaccaggaagctgaggaccacgttcaaggcttcgaggcccaacctgttcatgtgatttagctgtgcgagcttggtgaaccaatcgacgtgttgcgggttgttcgctctcggcatacttgaagtgattttcaccttgttcatgagaagctctg

SEQ ID NO: 6480 - DNA, 1725 bp, Zea Mays
agcttgatatccaggaatcacaaatatgttccagctccaacatcaattcttttgtacgcttcatttttcaacaaccagacttcaagttatatttggcttgatattcgctgggctagtgaaacctcatctgtagtgagggaccagcagctgtatagtgattcctgtatacattggagctatgttcttataaaataaaaagcttcagattttgttctcttatttgacatgccggttcgtttcatcatgataagaaaatgatcctcgactcctgctaatccctgtgttgtctgcagatctaagttttttttggttttgtgagttatccaaagttggaccgcaaagatgagtactgctaatcactatcagcacatcaagtcaaccaagcctgttgtaggcaaagcaagaaaattgaaggatctcatgataaaaagtgataataggatatgcgctgactgtggtgcacctgatcccaaatgggcatctactaatattggagtgtttctttgcttaaaatgtggagatgttcatagggcacttggacctgacatttcaaaggttttatctgtaactttggatgattggtctgacagtgatatcgactccatggttgaggttggtggaaactcatatgcaaattcaatttatgaggcttttcttccaaaagatcacccaaaacccaaaccagattcaacgatggaatataggacgaaatttataagagctaagtatgagacacaagattttttgaagccaagtttgcgcatttcatcaagatcatcttttaaatctaccaattctgtgaagagtgtagatagcaatttctctagcacttcaaggaaggatatctctgaagatacaagagaatttgttggagagctgaatattacagtcgtgaaaggtactaacttggccgttagagacatgctaacaagtgatccatatgttgttttaacactcggagggcagaaagctcaatcgacagttaaaaaaagtgatcttaatccggtatggaatgaaatgcttaagatttctgttcctcgaaattacggacctctaaaacttgaagtgtatgaccatgatacgttctcagccgatgatatcatgggtgaagcagagatagatctccaaccaatgatcacagccgccatggcctttggagatacttcacgtcttggtgacatgcaaattgggcggtggttcacgaccaaagacaacgccctgatgaaagatagcacagtgaatgtcgttgcaggcaaggtaaaacaggaggtgcacttaaagctgcagaacgtagaatctggtgagctggagttagagctagaatgggttccgatcctctagactatgataactcccctgatccttttgtctaaaaaactatcctcaagatgcatcaaaattttcaagctgtccactttgatgatcttggacatttttgctggatggcttgaatttgttaaaaaaatgtcattgttaaatatcctggtgtaactgtcagctataatcacagcctttcattttcccccctttggttgtcatgccttgtaactactcgccgtctcttgattgttgttgtattgtcccattgaaaggacatgtgtattataagagatgggcaattatagctagtgaactctttatgctgattcctttttggcgcgcgctgcagtagctatcgtgttattggttttcccggagctttctctagccgtgtcttgtccgctc

SEQ ID NO: 6481 - DNA, 2233 bp, Zea Mays
gaccaaccgcctcgcctgccgttcccctccacgtctccccattcccgcctcccgagacctgaaccctgttggggacacatgggccccacaacccgcgctcacttcgtctacaatcgccgccgccgccgccgccgaggcgggcggcacgctgtcgaggaggcttccgacgaggagcagcagcagatggatagctcctcctcatcctccgacgaagaaggagatcaggaagaagatgccgaagcctccggagaggacgtcgatgacgaggaagaagaggaagcggtcgctgccgagcctgcgcccaagcagccacccgcagctgcggcggcgggggagaagaggggccgaaggaagggctcgatcaccattagcctgaagaaagtgtgcaaggcgtgcaaaaggacagggcaccaggcagggttcaagggggctgtgtacatcgactgccccatgaagccttgcttcttatgcaagatgccaggtcatacaaccttgacttgcccacatagagtaacaatggagcatggtgttatcccagcgcctaaaaggaatgcaaacacttctctggattatgtcttccagagccaagtcaagggaaagattcccatggttaagcctaagtttctgatacccaaccaactagagcatggaaacataaaatttcatcagagacgtgtgacatgcttggagtttcatccaactaagaacagtgttcttttatcaggagacaagaaaggacttctgggtatctgggattatgttaagttgcatgagaaaatcacttatgattctgtgcactcctgcattctgaatagcatgaagattgataccaccaacgatggtatgatatatacagcttcctctgatggtactatcagttgcactgatttggatactggtattggctctcccttgttaaatctcaacccaaatggttggaatgtaagtttactttggtcatgttctatagatcactttgttcaaaaagaatttatgaagatgttatttcagtctctctctaccttcccccatcttgttctggtccaagctcttggcacatgatatacgggatggacttaaacactgacaaaggtcttcttttggtggcagataactttggttttctttacttcctggatagacgatcaaagacgagaattggacatccaattcttatccataaaaagggtagcaaggtaaccagcctacattgtaaccctgcacgacctgaagtgcttctaagcagcggaaatgatcactatgcccgtatttgggatacaaggaagcttgaagccaactctccccttgccagccttgctcatggacgggttgttaattcaggatacttttctccacgaagcggaaataagatcttgacaacttgtcaggacaaccgaattcgtgtatgggactatattcttggtgatctgcaatccccaagtagagaaattgtgcacagtcatgatttcaatcgtcacctgactcccttcaaagctgagtgggatccaaaggattacaccgaaacagttgcagtgattggccgttacataagtgagaactacaatggtgttgctctgcatccaattgattttatagatactagttctgggaagcttctggctgaggtgatggaccctgacataataacaatcagcccagtgaacaagctacatccgcaagatgacatcctagctacaggaagctcaaggtctattttcatatggaagccaaaaattgaagatgaacttactgaagaaagagccaagcatgacaatagtagtgatgacgactcaggtggtgattctggcggaaagaacaagaaagcaaagaagactcgcttcactcatgcagtaaagggaaagggcaaatccaaagtctgatgcttggtgtacatagtcggcagcattttgacaagaaagcgtccattaaccagctcctgatgcatctccttttgtaccatcttgccaactccctcaccccccccagctaaggtgctgaagacccgtatgaaacgcatgctgatagaccccatagttgtctcctgcatcaatgctcctaaggagttagccagttaggtttcggactcttttgaatcctgacatgcttatgatcacttgtcatttgtcaacgaggccttttaacggtttaatcctgtatcaacatataaatctcctgtacagttgcctgaatgcaatttgtgcttgtaaaatgtttattggtgctctcatctgtt

SEQ ID NO: 6482 - DNA, 1161 bp, Zea Mays
ttataaatagcttgcattaaattctgtgaaaattatataaaaataagagtgttgataaaaaactaagaacgttgataaaaggctatttatgatctctagataaaagatctaaggagtacaaaaccataatgcataggctccttcaaatccaaaaacatttttgttgccaaacaaatgagcctgcattaataccgtcattcctgtaatgtgcatttaggtccatccccagcaaaatgatacaacgaacactccgggtatgttacctgtggaacctgcagaagaaccaatatatgttaatgcaaaacaataccatgcaatccttaggaggaggcaaacacgtgctaaattggaggcccaaaacaagatggtgaaaaatcggaaggctgcaaaggagggcgagcctttttgggatagcccttggggccgtggaagaccgggatggcatattgaatgcagcgcaatgagtgctcactatttaggacatgtattcgatattcatggtggggggaaagatttgatttttcctcatcatgagaatgagcttgcacaaagccaagctgcttatcctgagagtgaggtgaagtgctggatgcataatggctttgttaacaaggatgataaaaaaatggcaaaatcagataataacttttcacgattagagatatcactgctctttaccatccattggctttaagatttttcttgatgcgcactcattatagatcagatgtgaaccattctgatcaagcacttgagattgcatctgatcgtgtctattacatttatcagatcctgaatacttcctttgtcaaagctttcacttgtctgaaggaagacgtcggccttctgcttctccatcaccatcgttatcatgcaacctgctggaatgccacagcgggacaggagcatggggatgagcaggcgcaagatgatagcaagtggcgccggatcccgacgttcgacgactggaacctgcgggacgacatgcccgtcacccaatacttgcaagcagggacttcttcatcattgtgccgccgacagagaaggacgacgacgaggatctgttcaaggtgcccctgtgttccctgccaagccctacaactacaagaagttctaggagctaactcaggcttacgaggtcctcagtgatcttgaaaatca

SEQ ID NO: 6483 - DNA, 3270 bp, Zea Mays
gcccactcggccactcccgtcgcggctcgcgaggagagagaagagtaaaagagcaccttcttctccgcgtccccatcccaccacacctccggatcagcagcgaagtagcctgcactacgccggtgcctagtagtagtagcaccgctccggctccactgttgaacgttgaacggaagccagaccggcccgcaccttgatgcccgctcctatggcggcttccaccttccccgtcgccccgctgcacgcgccgccgctggtgcgcccccgggtcgtccctccttcccccaccttcggctgctgctgccgctgctccgctccgcgcggggggctcaccttgcgcccgcaggcttgcgctccacgccgccgctgcaaccccgcgatccgcccggtgaggttctgtgcggaagttggttcggtgtggcccgtggtgctcactcgatcgatcagaagggggtttcaaaagggtataagtgtcgcaagggtggatgacaatgctgctggtcaagtcagtttaggtgatgacaacgaggatttagaccatatcaccaacgaaacccttcgtaccacaataaggaaaagcaaggaagtgctggcaaggcacaagatcataatgaatcagatatcagaaaagaagcagctcatctcaactatactagacagttccattcataatgagcaagagccactcagtggtcagagtgatggttccttatcaaacctgaatgcaattgcaaagggcacagagattggttatgaccatcagacataccataataggtctttacagcaatatgaatttgacaccacttatggagaatccatctacgatcagaacacatactatgaaagttcagaagacgacggcactgatttcagtgagaattatcagtataaaagttttcctagagctactcgtagtgtgtatgaactagaagaagataatggtatgaaacaaggctatgtggtacaactaagtcaagcaagtggacatgagcagtcagttaacgagggaacaaatgacaatgcgtctgaagttgatgttatgaatgtcatattggtagccgcagagtgtgctccttggtccaaaacaggtgggcttggggatgttgctggagctttgcctaaggctttggccaagagaggtcatcgtgtcatggtgtgccttttgtgagctattgtgtctgaaagagatttaactaagctcctactagttggaagtggtgcaagttaacatggaagataaacaggatggttgtagtagttccaaaatacggtgactatgaggaaccacaagagataggagagccaaggagctaccacgttgcagggcaggatatggaagtaaagtattatcatgcatacatagatggtgtggattttgttttcattgacaatcctgtcttccactatgttcaaagtgaaatttatggtggggaccaaactgacatctggaaacgaatggttttgttgtgcaaagcagctgtagaggttcaatggtatgttccatgtggtggcttctgctacggtgatggaaatcttgtgtttattgcaaatgattggcatactgcacttctacctgtttatttaaaggcatactatcgtgacaatggttttatgccatatgcccgttcagttcttgtgatacacaatatagcacatcagggccgtggcccgatagatgatttcaggtacctggatttgcctggtcattacatggatcagttcaaactttatgatccattcggaggtgatcatctaaacatttttgcagctggtattagagctgctgatcgtttgcttaccgttagtcatggttatgcatgggagctcaaaacacctgatggcggctggggccttcatagtatcattaatgaaaacgattggaaattccagggtattgtaaatggtattgatactgctgattggaatcctaggcatgatgtccatctacaatctgatgggtacaccaactattctctagaaaccgttcagactggtaaagcacagtgcaaggaagcactacagaaagagcttggactccctgttcgtggcgatgttccggtcattgcttttattggacggctggaccatcaaaaaggtgtagatctgatagcagaggcaatgccgtggattgctggtcaggatgtacaattaattatgttgggtactggaagacaagaccttgaagatacattgaggaggcttgagagccagcattatgacagggtccggggctgggttgggttctctgtccggttggctcatcggatgacagcaggggctgatatactattgatgccatcaaggtttgagccatgtgggctgaaccagctatatgccatgatgtacgggactgttcctgtagttcatgctgttggtggtctccgcgacacagtccaacattataatccctatgaggaggttggagttggatggacttttgagaaagcagaggcaaacagaatgatcgatgccctagggcactgcttgaacacatacagaaattactggagcagttgggaaggtatccaacgtagagggatgatgcaggacctaagctgggataacgctgctaaactctacgaggaagttcttcttgccgccaaatatcagtggtgactgttgttgaactgtccaaggaactgttgatatttgtcattcatagacctgaaggctttctgtcgcatagaagtcaccgactgtttcaattcttttggtgactgcttcacacagctgctgcatgctttgtcctgaattttgcaggacggtgtgcgtcgcaacagccaaattttttttgttgttgccagttcctaataatcgcatcagatgtgaatgtgaattctgagtctacctcctggacaaacacagtggatgaggcttttgctggaaacaggttaatgctggaggaaagattgaggggaagcgtcgtgcactttttgcaagtgtttacgaattcatttgttctacagggagagctcatttagacgctttggtacaggagggtggtagatagcagagaaactgatgctttgtatcttgagtagttttgttgtatctctaaattaggatacttgttacaatgttcagttcttcatatttttttccgtgcatatcctgtagatgatttagtgttccggtcttccgaatgatcgtaaaaaaggggtttgcaggttgttgagaataatatataattatgaaagggcatcggaatccctgaacaatactgaagttctctgaaagaaccgaggccatgaatgtatgtttcggaag

SEQ ID NO: 6484 - DNA, 3842 bp, Zea Mays
acttgtgaactggactactacagactccctcctgtttcgatttagcataccaggtgaggttctgtgcggaagttggttcggtgtggcccgtggtgctcactcgatcgatcagaagggggtttcaaaagggtataagtgtcgcaagggtggatgacaatgctgctggtcaagtcagtttaggtgatgacaacgaggatttagaccatatcaccaacgaaacccttcgtaccacaataaggaaaagcaaggaagtgctggcaaggcacaagatcataatgaatcagatatcagaaaagaagcagctcatctcaactatactagacagttccattcataatgagcaagagccactcagtggtcagagtgatggttccttatcaaacctgaatgcaattgcaaagggcacagagattggttatgaccatcagacataccataataggtctttacagcaatatgaatttgacaccacttatggagaatccatctacgatcagaacacatactatgaaagttcagaagacgacggcactgatttcagtgagaattatcagtataaaagttttcctagagctactcgtagtgtgtatgaactagaagaagataatggtatgaaacaaggctatgtggtacaactaagtcaagcaagtggacatgagcagtcagttaacgagggaacaaatgacaatgcgtctgaagttgatgttatgaatgtcatattggtagccgcagagtgtgctccttggtccaaaacaggtgggcttggggatgttgctggagctttgcctaaggctttggccaagagaggtcatcgtgtcatggtgtgccttttgtgagctattgtgtctgaaagagatttaactaagctcctactagttggaagtggtgcaagttaacatggaagataaacaggatggttgtaaagtccataaaatcactcattcatcctgtagatggttgcaaaaagatttttttgaaaatgcaggagacgtgtttttttatattaagaacaaaaaaagggataagaacccttacacacaccaacacaaaatcagttcagttcacatggttacagagatcaccaatcctaagccttctactgttccccatccggcacaagggaaaatcactttagttcaactaaagaggattgacaattaagtttgtataggtacctgacattgtggccactataaaaccatattgagtggacaaccataattaaccagctgtgcgagtcatgtgctctatggcctccttatacaaagtgggttttcacaaaagactaagatctattcatgatatgttcagcagaactcatatacgtttgggccaaaaatatttgagctatatagaagcatttttctgcagctcaagttgcctaaattctaagcagtgtacctggatattctgtttttcagttttagggctagattgcaatgttgtgctctgctaccttcactgtgcaatctagttaattgtgggagcctactattctattaaacttttgctttatggttccagtaaaaacataccttcatataattgttatgtccaacattaaaaagtacgctcttgaaaagccacaataccaataggcacagtagtttttctaaaaagtaggagctgtattgttaatcttggttagtgcctcatatgggaataactcatgcagtacattccaaagcaaaccagtgttcttatttgagagaacataggctatgtttctgtgatttttggttagaacaaaactaaattttcaatagctacagttggagaagcatttaaatactaaacacataatcattttttatattttttgttaggtagtagttccaaaatacggtgactatgaggaaccacaagagataggagagccaaggagctaccacgttgcagggcaggatatggaagtaaagtattatcatgcatacatagatggtgtggattttgttttcattgacaatcctgtcttccactatgttcaaagtgaaatttatggtggggaccaaactgacatctggaaacgaatggttttgttgtgcaaagcagctgtagaggttcaatggtatgttccatgtggtggcttctgctacggtgatggaaatcttgtgtttattgcaaatgattggcatactgcacttctacctgtttatttaaaggcatactatcgtgacaatggttttatgccatatgcccgttcagttcttgtgatacacaatatagcacatcagggccgtggcccgatagatgatttcaggtacctggatttgcctggtcattacatggatcagttcaaactttatgatccattcggaggtgatcatctaaacatttttgcagctggtattagagctgctgatcgtttgcttaccgttagtcatggttatgcatgggagctcaaaacacctgatggcggctggggccttcatagtatcattaatgaaaacgattggaaattccagggtattgtaaatggtattgatactgctgattggaatcctaggcatgatgtccatctacaatctgatgggtacaccaactattctctagaaaccgttcagactggtaaagcacagtgcaaggaagcactacagaaagagcttggactccctgttcgtggcgatgttccggtcattgcttttattggacggctggaccatcaaaaaggtgtagatctgatagcagaggcaatgccgtggattgctggtcaggatgtacaattaattatgttgggtactggaagacaagaccttgaagatacattgaggaggcttgagagccagcattatgacagggtccggggctgggttgggttctctgtccggttggctcatcggatgacagcaggggctgatatactattgatgccatcaaggtttgagccatgtgggctgaaccagctatatgccatgatgtacgggactgttcctgtagttcatgctgttggtggtctccgcgacacagtccaacattataatccctatgaggaggttggagttggatggacttttgagaaagcagaggcaaacagaatgatcgatgccctagggcactgcttgaacacatacagaaattactggagcagttgggaaggtatccaacgtagagggatgatgcaggacctaagctgggataacgctgctaaactctacgaggaagttcttcttgccgccaaatatcagtggtgactgttgttgaactgtccaaggaactgttgatatttgtcattcatagacctgaaggctttctgtcgcatagaagtcaccgactgtttcaattcttttggtgactgcttcacacagctgctgcatgctttgtcctgaattttgcaggacggtgtgcgtcgcaacagccaaattttttttgttgttgccagttcctaataatcgcatcagatgtgaatgtgaattctgagtctacctcctggacaaacacagtggatgaggcttttgctggaaacaggttaatgctggaggaaagattgaggggaagcgtcgtgcactttttgcaagtgtttacgaattcatttgttctacagggagagctcatttagacgctttggtacaggagggtggtagatagcagagaaactgatgctttgtatcttgagtagttttgttgtatctctaaattaggatacttgttacaatgttcagttcttcatatttttttccgtgcatatcctgtagatgatttagtgttccggtcttccgaatgatcgtaaaaaaggggtttgcaggttgttgagaataatatataattatgaaagggcatcggaatccctgaacaatactgaagttctctgaaagaaccgaggccatgaatgtatgtttcggaag

SEQ ID NO: 6485 - DNA, 2174 bp, Zea Mays
agacaatctaccccaccacacacacacatcctcctctcaactcaagcagactcggatcaccccaccttatcgcgcgcgaagcctttctccctttgtctccactcccgaccgcgatcgcgcgcgcggcgttcgtggccacagacccagcaagccttgcactcgttgcaccaccagccggcggcgaccgcgcgatgagggccaggaaggcgaagacggcgacgtcgtcgtcgttttggaggtcgctcctgggcggctgcctcggcggaggcggcggcggagggcgggcggcgggggacaggcagcggaaggtgcggccgggcggcgggggcgggcggctgtcgttcacggacctgagcggcgccgcggaccaggacctgtcggcgtcgctggtgggctccaacctgcacgtgttcagcgtggcggagctgcgcgaggccacgcgcggcttcgtctccggcaacttcctcggcgagggcggcttcggccccgtctacaggggcttcgtcgccgacggcgccaagaaggggctcaaggcgcaggccatcgccgtcaagctctgggaccccgagggcgcccaggggcacaaggagtggctggcggaggtgatcttcctggggcagctgcggcatcccaacctggtgaagctggtgggctactgctgcgaggacgagcaccgcctgctcgtctacgagtacatggagcacggcagcctggagaaccacctcttcaaacgtctgaccaagccaagatttgactgtactcgctgcccaaatgcaggacgcatggcgttgttattgtattattagcaggatgccgagctagcatttgaccagtaatggtaggctgcttgcttgcttgcttgcacagcacgcaggatagggacaggggctcccgcgcgggtcagaagctggtgaagtcacgtatagttgctggatcaatgtcgacgatcaccggctgatccgttcttgcccagattcctgccgtgctgccctggtcgacccgactaaacattgcagtaggcgccgccaagggtttggcgttcctccacgacgccgagaagccggtcatctaccgtgacttcaaggcctccaacatcttgctcgactcggactacaaggccaagctgtcagacttcgggctggccaaggacgggccggagggcgacgacacgcacgtgtcgacgcgcgtgatggggacgcacggctacgcggcgccggagtacatcatgacgggccacctcacggccaagagcgacgtgtacagcttcggcgtggtgctgctggagatcctcacgggccgccggtccgtcgacaagacccgccccagccgggagcagaacctggtggactacgcgcggccgtgcctcaaggacccgctcaggctgggccggatcatggacccggccatggagggccagtactcgccgcgggcggcccagagcgcggcgctggtcgcgtaccggtgcctcagcgccagccccaagaaccggccggacatgtccgccgtcgtccgggcgctggagccgctgctcgacctccacgacgacgtgcccgtggcgcccctgggccacgccggccccgtcgtgctgttcgtagcggccgccgccgaggaggagaagaaggagcgggccccgaggaaggacgtccacgtccaccggcgcaggcccatgtcgcccaaggcgagccccaggaagcgccccggcaccggcgccggcaccaaggaggagttctgggtgtggcatctgccggtgccggccgaccataagacacgtccgaccttgggcggcggcgttgtgcaagcgtgtgcgtgagccaaggtgctattggggctcagattgtgccttggaccaaattgttgtgtttttcagtctgctgttacagtgagatgagatgcagagtgactcgagcaaattgtacaccggaagccatcgttctctactccagtatacccttgtatacgcttgtattcagatgaagcgacgatggcaattcgcaaacgaacagaaacgtttgcgtacgtacaggccatgggcatgtgacaagagggtataaatcatggagcagtgattggcttttggcatcatgatttcttctgattgactatactctcttggtgatttacaaaccaaacaaaacggtagtacaagaaaaatccttttcatggagatgtgacgg

SEQ ID NO: 6486 - DNA, 1104 bp, Zea Mays
caatcagtgtctactctctccacaggcccaaaacgcctccaagccgtccaagggtactcgagctcgagctacactcggcgtttacggcgccggcgatcacccaccgcgtcctccgccttgtcctctttcctcaacctaacccccatccagcgaggtttctccgctctcatatagaatcagatatgaagagggcggcgccgtctcaggagcccctcgacgtttcttccggggactcctcgggctcggattccgatcaattaggcggcaaggataagggcgggagcgcctctaaagctgctgcaggggctgaagatgtgaagagggtggtgctgcataaggaatcccaggacgtatcttctgatgatgaccttagctcggattctgatgatgatgctgggaaggggaatgcttggaatgcctttgggctgcccaattcctccaaagctgcttcgacggcagaagccaggtcaaagaagaagaagaaaaccggtgtggatttcagcgctctgagccggcacggataccatggcggcccatccgtcttgacagttcgtccggcagcggaggaaccgaactggtcctggtccactgggaaagaccgcgacggcaaagaggacgcacacgcacccgagtcctacgaggaacgcgagcgtaccagggccgcagtaaccgaaggggagaagttcatcgggctgcagaacgcgccgccgaaccagctgttgctggagaaagacaggaaggagaaggacgcctccttctcgcagaaagagaagcggaagagggaccggggccaagccagcagggggaagaactacgtcgaggaggagaagcggctcctgaggggcagcggcgtgtactctggctttgacacttagcaaataccaagagctctagcatgtgtgcataccgagggttagctgcctttcatcgtgtgctttggctgtgtttatttgggctttggatgtagctatgcattgcgttcaaatagtaccgctgccatattctgtgtgccatgtcttgctgcattcgcgagttgccattgatataaaaaaaattggaacttcaaatatcttatgaacatatttgcttcaaattggaagttac

SEQ ID NO: 6487 - DNA, 1417 bp, Zea Mays
tgcactattaaatatattttttgtttgttttatttgaaaccaatgtatcactagacactggaacattttgaaatgtcatactaagataataaacacagaatcaagaagaatagaaattaaaaagagatcagaaaaagagaaattgctaaaaaagaaaacgcgaaacggcccaggacaaggcccgtgggccgtggtgagctctccgtgtccgtcggccgagccgaaccctcggactgggctaccgccgcatgccccgtcccgaatccattccgttcaccccgtccccctcgttctctctctcgttgcgacgactgtgtggagtaccgcccccgccccctcaccctcaccccccgacgccgacgccctaggcggctacgccaggtcccgagggacgggcccttcatcttcgtcagtctattcgccgggcgacgagcacccgccaggtttcgtaatgatttgtgcaacaattgtaagcgtcctgggcattttgctagagagtgtcctagcgtggctgtctgccatacctgcgggcttcctgggcacattgcagccgaatgttcttccaaaggtgtttgctggaactgcaaagagcctggccacatggctaacagctgcccaaatgaagggatatgccgtaactgtggcaagtccggtcacattgcaagagactgcaccgctccaccagtgccgccaggagaagtgatcctttgcagcaactgctacaaaccagggcattttcgtgaggaatgcaccaatgagaaggcctgcaataattgccggcagagcggccaccttgcccgtaactgcaccaatgatcctgtttgcaacctgtgcaatgttgctggccatctggcccgtcagtgccccaagtctgatacattgggtgagaggggtgggcctcctcccttccgtggtgttggcgctcccttccatgatgttggcgctcccttccgtggtggcttcagtgacgtggtctgccgggcctgcaaccagattggccatacgagtcgtgattgcatggctggtgccttcatgatctgccacaactgtggcggccgtggccacatggcttatgagtgtccctctgccagtctcatggaccggttcccccctcgccgtttctgaaggaaggacatccaagggctgttcagatggctgttgttttcagcccattttgtcaggagcacctgttttgctttgctttatgtatttctaaacccgaatggattctagatatttcagattcataactcgtcagcgctatttgtaattctggatatgttacccgactccgatgttcttgatgataatgtttgaagacggggatacttgcccttacgaactcaaattcatctcatgagttttaaataatttgctccctgtgcaaattattattaaataatttgctccctgtgca

SEQ ID NO: 6488 - DNA, 3302 bp, Zea Mays
caccagcgaggagagaagccgcccgcgaagagagagagagagagagagggcgagaggggcggaggagagagaaacccctagtctccagccgcctcgcctccccccatcgccgcctcagcctccgcctcggcgcggggcgaggaggaggaggagagaggaagccctagaaggttcgcgccgcggacggcggcgcttgcgcctgcgccaggccacgagatctcgtggcagcgccgccggctggtgtatcggggtgcagcggctggcgggcgctgggcggtgctggttctcggtgagtccgctcgatcccctcgccgcgggagctttcgctcgagcttccccgccccctcgaatcgagggttctggttagggggtcgcctcctgctcccccggcgaccgcggaataagctagccccccctctcgtgtctcgcctcgggggggcttagggttaggttcttatccggaattgcgggcgaaattccacggccaaggcggcgcattgctacccgggaggaggaggctacgcagtgtgtctccgcagccgcagccagcaatgatggggaagacgaataggttctccaagggccaccagctcggcttcgtgcctgactaccggcatggcgtggaggctatgggggagtccaaggggctcgggagccccccgaggatcgactcggggagctcctgcgcgccgcccaagaggaagtgcgtcagtgtgaattcagaggagggggaaggcgcctcggggttcagcatgcctcgggcccgggaggtgttctcgctgcccaggatgactcgtctggacaagaaggacctagagatgaagctccgccatgagcttgcacaggtgagggacgtccagagtaggctgtttctgagagggtctgcggtcagcatgaatggtgcagcggtcgcgtcggtccccgcaggcgatgtgcaacccaagaaaaaggttgagaagctcaagcggagcgattcggtgcaaacggacaggggagcgccgccaccagcggccacggtcgtcgccgcacctgttgctagctctgttaactacacatcatcgtttaaacaatgtgccaaccttctcaagtccattatgagccatgtatgggcaggcccgtttcttgttccggttgatattgtgaagttgaacatacctgactatttccaaatagtcaagcagcccatggatttgggtacgatccagaaaaagttgaaggcagggatgtactctacacctcgggaatttgcagctgatgtgaggctcactttcagcaatgccatgaattataacccagtcaataatgatgttcatttaatggccaaaactttgagcaagaactttgaaactcgatggaagcttattgagaagaagctccctaaaccagacgataagcctcaaccagttgagaagcctcctgtgagggagcctacagaaaagaattcaactaagggagttgccgttgagaaagaagacatcaccaagaaaaaaccctcaaagaagagtgtacctaagcaagacatatttcaggaaggatattcagcggacaatccagttttgcaaccaaagaaaaggaaaacatctcctttgatacaagatgcttctttggtagaggatgttgttccaaccggaaagagaatgatgacgagtgagcaaaaatatgatattagtgcaagattacaatcatttggtgcattcattccagaccatgtagttgagttcataaggagtcgcgttgatgattgcgatgctgatgaagaggaaatggagcttgatattgatgttcttggagatgatactctttttgaattacagcagctacttgatgactatgacagggttaatccgtcgagaaaccttacaaaagaggaccctcacgaagctgagtctcggagtcaatatgaactcatcaatccatcagtgtgtaacgatggcaatgagctcattgacgaggatgttgatattggggagaatgaccccccaattttggctcttcctcctgtggtacttgaagatgaaacagcagacagaaacagcaagcatagtacatccagcagttctagtagtgactcagaatcatcctctagtgactcagattcaagtagctcttctggaagtgatgccgatgccaaagctcctcaacaaaacagcgggtcaaaggaaaaagttctacctgtcgatggcgtggatcaggaaaaggattcactgagcacattaaatttaccagagcaaagtacaaaccctatatctgtttctgctgatggtgaggggggaaatgtatctgagaagcaggtctcccctgacaagcaaatacgagctgcccttctgagaagccgctttgctgatacgatccttaaggctcgtgaaaaggcccttgatcagactacaaagaaggaccccgagaagcttcgacgcgaaagggaggaacttgagagggtacaaagagaagagagagctcggttgcaagctgaggctaaagctgcagaggacgttcgcaagagggctgaagcagcagcagctgctgaggctgctgctgaagctaagcgacaaagagaacttgagagagaagcagctcgcaaagctttgcaagaggtgaacagatacccaacttggttggtgaaacaagtcctgggtttcaaatgggaagcaacacactagaaaagctcgggctgtacatgaaaaacgatgaggatgatgaggatggtgatttcacagatgaaccagtggctgatgttgaagagggagaaatagattaactgtgtttctggaccatttttgatacgttacaggagacctgttggcatgactgatctgcatagctttcctttggtatacaaagtgacctgacgaaagatcgtgtcgcatcgaacctgaaggtctggtattcatttttgtaactgcctaagttttggagccaagttggcaaatgacagcgagcctcagacatgttggaagttcgtcgtgctgcatgtgaggagagcatcgagcgtgcgtatcgtttggattgagaattctctctggactttccatatccatacaatggaacggcgagtttattgcatatatgatgaggccataaaaggggagagggttggaggagggaccacaaggagtgatggtgatggttcttggctcttgcacaggtgcgagccgtttttgaggggtagttttagagccatttccgtgttgtgaatgtaacatcggaaactgtacaaaagttagcctgatagatggaaaacattgacttgaatttatgcagtgcctgttcttcatcgatcacttttttacgtacttgttttcatg

SEQ ID NO: 6489 - DNA, 2531 bp, Zea Mays
ttttttttgattgaaatcctatagaaagtttttttatctggtcttttagaacaaaggattaagttgctataaatcctataaaatttctattgaatggagtatcatgtgattttggaggatttttaacatgaggtccaatctcttggaaatttctatgtgaaattgaaggtgttatataactctattcctatttttttctatccctatgttttacttatactccgttcctaatactccgttccaaaggaggccatagatcttgttcagcagcttggaatatcatgcatggaatctgaactatccaggtctgagctagctttgaacctgagctacctagattgaccacgtgataggtatgtccggttgataggcataggctagctagctgactgactggctaggctccccggccgggtcgtcgtcgtcctcgccgagtacatcagctctgcgctagattattgctttcgcttgcacagtcgttgcacttgtagtacaattcattcattcattcattaaaagcaaggaagaagacttggaactctgctagctagcagtagccagtagctagtgctaccttcccctgctccgacctctatctgtcgttctgtctatctcgtccgtcgccgtcgagccggctatggagatgcagccacagctcggcgactcttctccggaggacaagctcgccagccgccctctgacacccggagggcgctggccggactcgcagtggcggcccgcagaggagaaggccatcgacgactggctccccatcaacgcgcggaggaacgccaagtggtggtactccgccttccacaatgtcaccgccatggtcggcgccggcgtgctcggcctcccctacgccatgtccgagctcggctgatggtggagatgcacgagatggtcccgggcaagcgcttcgaccggtaccacgagctggggcagcacgcgttcggcgagcggctgggcctgtggatcgtggtgccgcagcagctggtggtggaggtgggcctcaacatcgtctacatggtcaccggcggcacgtcgctgaagaagttccacgacacggtctgcggcgacgacgaccaccggtgcaagggcagggacatcaagctcacctacttcatcatgatcttcgcctcctgccacttggtgctctcccagctccccaacttccactccatctccggcgtctccctcgccgccgccgtcatgtcgctttgctactcgacgatcgcgtggatcgcgtcggcgcagaaggggaagtcgccggacgtgcactacggcctgcgcgcgacgacgacaccggggaaggtgttcggcttcttcggtgcgctgggcgacgtcgcgttcgcctacgcggggcacaacgtggtcctcgagatccaggccaccatcccgtccacccccgacaagccgtccaagaagcccatgtggaagggcgtggtggtcgcctacgtcgtggtcgccgtgtgctacttccccgcctcgctcgtcggctactgggccttcggcgacggcgtcgacgagaacatcctcgtcacgctcaggaaacccaagtggctcatcgccctcgccaacgtcatggtcgtcgtccatctcattggcagctaccaggtgtacgcgatgccggtgtttgacatgatagagacggtgctggtcaggaagtttgggttccgtccgaccctcatgctccgcctcgttgcccggagtgtctacgtcgggttcacaatgttcgtagccatcaccttcccattcttcagtgcattgctcagcttcttcggtggattcgccttcgcgccgacgacgtatttccttccatgcatcatgtggctgacaatatgcaaacccaagactttcagcatctcatggtttaccaactggatctgcatcgtcctaggtgttctgctgatggtactgtcaccgatcggtgggcttcggcagatcatcttgagagccaagacataccacttctaccaataaagtcgattcatttaacaccaaaaaaagaacccaaggtttgcgtcagatttattttgcagacgctcagcgtgtgtgtctcgagttttgaatcggacttcatcacctttatctccatcgtggcaaaagaaaagaaaagaaaaagtcaaattggacgatgtatggggcgtcatggttctgtgatacccctaggtaggagtttgttttgtgataccatacgcatgtgtatacatcttgtttatatgtattctagagaaagagtgcgcgttactagggagaatgagtgatgacggtttgtatttctttcatccatacttccttcactcatagtcgttcccaattaatgtcacgttacaactcaaacaacgtttatgtatatatccatcaattcatgcttctaaaggggccagtaaatttgtaaagagaaatcacaacgaaatccacaatcagggccatatgaaccatacatcactcaatccatttctccattattgtgacctagctcaatttaccaatacaaaacatacgttagttataataatcatatgttg

SEQ ID NO: 6490 - DNA, 773 bp, Zea Mays
cgcccttaggaaatcgagtcacactagatgctgacaacagaacagctctacgattaattgaataacttcgataagatgggtcgtggtattagcagtgggggtggtcagagttccttgggctatctctttggcagtgacgaagctccaaaatcatttgagaagcctgcaccagttcaaaagccaactcctccatcctctgcagagagactaaaagatatcgctgctggtattcaaagtagtaaatcaaacaattacaaaagatctgaaggccagaactgtggaaatttccttacggaccgtccgtcgaccaaggtgcaagcagctccaggtggcgactcttcactcggttatctttttagtggcagcaaagatggcaagtgatgtacacctgctgttagtgttcgccatgatcatgggagaaggtttctgcttaacaaaggaaaaagggaaaagaatcttgtattcccatgagtaaatatcaaactgctcatggtatctatgttgttgggattgcttgtatgtgtgtacatgttcgtgtgtgtcgtgtgttgatccacagctactggtagcaagagcttctatccctgctgatggaattgtgcgcaatgccaatgttgacattatcgtgggtgatgctattatgttgtggtgtattattggatatgtttgctgtttaatacacattgttgtagaaaaaaacatccacagttctgttcaatttcagagtgtcctgttcaattttcaccgaaggggtggtatgcgccgaatagttg

SEQ ID NO: 6491 - DNA, 5201 bp, Zea Mays
gattaggtatgtctcttgtcttatccgccacacacgacacgacacgcgccggccacagaaacagcgcttcactcccctccgcgccgcggcgaccatggagctcgccaccgtcgccgctgcagtcgcctccgccgctgcgcgcccgcacgggcctttctcctctccccgcgcagtctctgcctccgtctcgtggaccagtctctcgctcgcctacacctcccgctgtctctcctccacgtcctcgcgacggcggctgcgctggctccccgtcacctcggccgccgtggagctccgcgaggccactgccgggggcggagactcgctccgtgtcaccaagacgccgcagcctggatccagtttcagcgtggaggtgcctacttccatcattcacgagtgctaccaatccacgctacaggagtacgccaaacgtgttaaggttcctggatttcggcctgggaagaccattccagaaaacgttcttataaactatgtaggaccgcaacatgtacaggatgccacgattgaagctatcttaaaacatacgcttcctcaagcactgtcctcggtagaggagagggcattagaagattctgttcgcattctgactcaatttgatgatatgagaaattctttctcactcgacaatgtgtttagatatgatgttgctgtggatgttgcccctgaagtccgatggttatctgaagacaaatataggaacctcaaagttgtcgttgaaatagatgaagctgttgatgcggaaaaggcggcagagaaagagcttcagcgtcgtcataaagctctaggcttacttagaattgtggctgacagaggcctccagattggtgatctggtggtgctggatatatttgcggaaagcattaacaatgatggctctagaggtgaaaaaatttcatcggctgagagtacaggtttccacttggacactgaggaaaatagtaaccttgttcctggatttcttggttcgttgattgggattcgtgctggtgagactagatcatttcctatccagttccccgagtcatttgagcgagaaagtctacgaggtgtccgtgcacagtttactgttgtgtgtaaagagctgttctacagagagttgccagtaatggatgactcacttgctgtaaagcttcttccaggatgcactacaatagacgaggttcgagagcgtattttgaaaagatgtaaagaagtggagaagacggccatagaacaagcaacagacaacgcgatccttgaccagctcgggaagttggtcgaggtcgacgtccctcgtgccttgtttcaagagcaagggcagcagctttatggagccaagcttctgcagcttcaggcggaaaggaagctggataaagaccagctagcttcgttatcaaccaagaggtcagtgcaggcgtacctagaagatgagaaggagaacattacaagaatcattaaacagatgctggccgttggcgatattttcaaatccgagaacttacagtactcgactgatcagctcgtcaaggaagttgagaactccatagcggagttcaaacagtacaaccaagactatgatgaggacaacatcaggcagcaggtccaggatgtcctagaggcggcgaaggtgcttgaatggctcaaggagaactgctcggtcgagtatatcaggcgatgagtcccacgatgctgggtcaaggaaagctcctctgaacgtgagaaagatggtggctggtgtggcggtcggcagttttgcgagtggccttggtccttgccaatgccaaccagcctagagcagtgcagtgattaagaggtgtggctaacaaacatttgtctattgactcggttcatgatataaattcggatttggagctttagtaactagcatgttttcggtagagacaatcacatcgcattagagggcgtgtttgtttgtgtttataatctccccagattatataatccaacatatttatattttgaactttataaattcatactgtggccgattggtcgatcttgcgcaaggataatcatggaattaagaacgctatacgaagtgcataaatataaaataccaatcggtgtatactataagctaaatttgaggcaccagtattgcacttaaataggataaacataaactaaaataaaataaaataaaataaagcctgagaagcctacgaatcgccaaccatgttattatcagagttctgtaaagtcgtagctaaacggagccacgacagcggtccggcaggcgctggcgctcagcggtaggacttctggaacctggcgcgggcgccgcggccgccgaacttcttgggctcgcagcggcgggggtcggcgacgaggagggtgcgctcgtagcgcatgaagatgtccttgatctcctttttcgccgcctcgtcgacgtacttctggtagtatgccacgagacccttggcgacggcctggcggatggcgtagatctgcgacgtcttcccgccgccgcgcacgcggatccgcatgtcgatgtccttgaacctggaccgccccgccagcagcacgggctccatggccttgagccgcagcatctcgggacggagcagctcgatcgggacgccgttcaccttgatcatccctcggcctggcttcgtgtaggccacggccacggccgtcttcttgcgcccgaaacactgcactgtgcccggggtcgggcgcttcagcacgggacccatggttgcgggtatagcagcaatggaggcggcggcggcggctagggctgcgaaggtgaaggtggcggcgcgctagggctgcggtggcttggaaacgttgctgcggtggaggcttttatagtacggatggatggaagcggtttccgggatcgccggcgccgacgaatgacttgttgggccgggccttagaaggaaggaaacccggtggctggtgaggcccaggtattcgttgtgataaaatggccactggtcaagggcggagaagctagggtttcggccctcacgaacactacttgatcttatccgagcgcgccgtccggcagcaccgcgggcggcggccggagtcgcctccccgtgcccgcgttgcccccgccggcctgcaagggttggtgggttggtggcgcggttcgtcgggaagaggcggcgcttgcgcccgcggtcgctgccggcgacgagcgatgacgactgcccgcggtcggagcgcgcgcgatgatggccgcgcgggttccccaaacacactacacgagatacttcgcgatgttcttttcctttgacatgttcttttcctttgacatgttcttttttcgaaaaatttgaagtattctttattaaaaaaaaaggctttttatgtgtgtttaatcccgcttgtcttctgtttgtgcttagtcgttctattagtgtggtttgattttgtatcacgctcgtcattgacaaagtgattccgttccggaatgatactaacaaagaatgtgccttctactctgttaccacgggtggtcttgggtccttacccttcagatgttcttgttaacggttcttctctcttcgtccagcacattgaactttatagtacacttagtatcattacattggtccttttaggatggagggtgaactattagagttattattaagatggtggatgttagctacgctttcatggtggatgtttactatgttttgtcatgtaaacaactgcatgtctttaaatttgtctatcagtataaatagtcactgcacatgcttaataaggttagattacaacatctggtgcagtcctctccatatctgatatttttctgttgcatcgatagccctcatggttattaaaaaatgtacttgtttgccatgtatgttgctcaatatatgatttgtgactcaccttgcttgacaagttggtatgattaagcgttttttggatcatgagggtgagatgataaacaacctttggtccacataattggattagtgaggtggaagcttcggatatagcggtgggctttacggttgccctaatagtgaacaggtccagcacatttactaccatatttttcccttcgtaatctaatcactaaggaggatcgaaattttttcatgcatagctttggttccctctcaactgattattcacttcaactgttttttaaattcgttaagatggaatgaaattgcttatttaaccacctatgctgccaatttgtccattagggtttcagtttatcctgacatttcatatatttgggacttttaagttgcccctatggctttttgctgtgcctgtgggatgaacatgtcccaacatttactccatttattcactttgtcagctaatagccatacatgttttatgtttagctgatcattaagaatgggaaatttacactttccatactgtgttatacatgttatgtttgcctgcttgaacaccccttgttttgaggtatcgtttgggagcaaaataggtgttctggtggcaacagcagtgccggtgagatgagcttttgtcccagtttaccaccaagtgtgtcacttggttgttagtgtcctatgggttctttgtagccttctgttttcctactttgtatcttgaatgtgatttcatggtcgctggttttttatcaagaggagctgggttcaatcgccacttagatcagtgttttttgtgattctctaatgcaacaacagcaaccttgtgcttggctaaagctacaataaggataatattctgaacttatttgccctggtgatgttgtaggtttacagaagagagaaattctggcagatccaattgctgttgccgtcattctgatacaacctgacttgatgactctcaatgaagctgaatgctgaaaggtgttgctgccttgcagaatgaagctttgagttcaatacatggaattcatatttggtggtggtgttttggaacttgtttatctgctaggtgttgctgccttgcagaatgaagccgtccacattgtccttgtttatctgcaagatgcatgcctgctctatttcttgctcttcagtcttgactgatgcctactgcctgagtgcagattcagtgtgatagttagattctgctgatgtgttaacatgttcattgtaaacaaatttcttgttaaacatgtgtgatctcttcaagaccatgtgtctttgacctaatatattgcgaaacattcttcagttgtgtggtgttatcggtttacatgt

SEQ ID NO: 6492 - DNA, 4226 bp, Zea Mays
tctggatcttcagttccacggccccacccagccgcgtctgcctgcctactgcctcctccaggctctccagctgtccgtgtccagcatcccgcactccgcagcaccactcgcccgccccacaccaccacacggcctccgcccacgcgcacggcgcacccgtcctgtgctcacatcaccacgccacacgacgcgctcgtcagtcgtcacgcaccccacgacgccccaaccgtcccaaacccagatccttccccgcctcgccaccgccaccgccaccgccaatccaccaccatgcccatggacaccgacgagcgccccctcgtcgagctcgcctccgctgcggccgccactactctcgccgcctcctccacctcctccgcccccttccccgcccctgccacgcctgggttctcccgcgcggtccgctgcaacgcccccgcttcctcgctcccggccgatggcggggccggcgcgcagccggcctacccggagaacgcgatctcgacaaccaagtacacgcccgcgagcttcgtgcccaagtcgctcttcgagcagttccgccgcgccgcgaactgtttcttcctcgtcgtcgcctgcgtctccttcagccctcttgcgccctaccgcgccgtctccgtcctgctcccgctcgtcgtcgtcgtcagcgccgccatggccaaggaggccgtcgaggactggcgccggaagcagcaggacatagaagtgaacaataggaaggttgaggtgtatgatgggatccaatcatttcatgagacagaatggaagaagcttcgagttggcgatataattaaagttaaaaaggatgagttcttccctgctgatcttattttcctttcgtctagctcttgtgatggattatgctatgtggagacgatgaatcttgatggtgagacaaacttgaagcggaaacaggcattagaggtgactatgggcttgaatgatgaccatttccatagtttcaaggctttcattcggtgtgaggatccgaatgagaaattgtattctttcttaggaacactatactacaatgggcaacaatattctctgtctccggaacaggtcctgctaagggattcaaaacttcgtaatacaatgtatatatatggcaccataatatttacgggacatgatacaaaggtgatgcaaaatgcaatggagccaccatcaaagaggagttcagttgaacgaagaatggataaaataatatatctcctttttgtgattctctttgttattgcaacgtttgggtcaattgtgtttggaatgagaacaaagcatgagataagtccaggaagctatgcatggtacctcaggccggatcaagcaaatatattctttgatccaaacaatgcatcgtttgcagcattctgccattttcttacaagcctgatgctgtatgtgtgcttggtgcctatttcattgtatatatcgatagaaattgtcaaggttttacagagcacatttataaatcaagaccagaatatgtattgcgccgagtctgataaacctgcaagagctcgcacttcaaatttgaatgaagaacttggtcaagtccatactatactgtctgacaaaacagggacattaacatgcaattcaatggagttcttgaaatgttccattgctggtgttgcttatggaagtaggcctacagaagttgaaacgtgttatggagaaatagttgaaactaatggcagttttgggcgcaaggacactactgaattcaagagatcagtcaagggatttaatttcactgatagtcatttgatgaatggaagatgggccaaagaatgttctagggatgctatagaaatgtttttccgagtcttagctgtttgccatactgcgattcctgtggcagatggaaattctgctggtatgccttatgaagctgagtctcctgatgaagcagctcttgttacagctgcaagagagtttggctttgaattttatcataggacacaaacaactatatcagtgcatgagtacgatcctgtcgttggtggaaaggttgatagaacatataaactactcaacatcttagaattcagcagtgctcgtaagcgtatgtctgttattgtgaggacagaagagggtcggctatttctgttctgcaaaggagctgacagtgtaatattcgaaaggctctccaaggataatggaacagctcatctgaccaaaacaaagtgtcacattgatgagtattctgaggcaggtctccggaccctggcacttgcatattgtgaacttactgaagaacaatatgttgtatggaatcaggattactcgtctgccaagaattctgtacatactgatcatgttgcagctgttgagaaggtgtcagaagacattgagaaggatttggttcttttgggtgctactgctgtagaggatagattgcaaaatggggtccctgagtgtatttataaacttgcacaagctggaattaagatctggattttaactggagacaagttggagacagctgtaaacataggttacgcttgtaacctactgaggaaagagatggaggaaatttttatcacactggagaactcaagtacaagtgcttcagaggggtccagtggagaaggaaacaaaattgccacatttgaggaaattgatagaaaattaaaagatgctagaggaaagatttcccaaaaaggaacttcaacttcatttgctcttatcattgacggcaatgctctgacacatgctctcacgggcagccttaagaactcatttctggatctagcagtcaactgtgcatctgttttatgttgtcgggtttcaccaaaacaaaaggcactggtcaccagattggttaaaattaggacaagtaaaactactttagctattggtgatggagcaaatgatgttggtatgctacaagaggctgacattggggttggaataagtggtgctgaaggaatgcagatatgctattttttcttcaagaacatcacatttggctttacgcttttctggtttgaggctcatgctatgttctcagcacaacctgcgtacaatgattggttcatatctttctataatgttgccttcacatctcttcctgtcatcgccctcggtgtttttgacaaggatgtctcttcccatgtttgtcttgaggtcccttcattacatcaagatggcgttaataatgtattcttcagttggtcccgaatactcagttggatgttaaatgggatgtgctgttcaataattatttactttggttccctcaacgctattctggttcaggctgtccgacaggatggtcgcgttgctgggtttgatatccttggggtgaccatgtacacttgtgtagtgtggactgtgaactgccagcttgctctctacatcagctacttcacctggatacaacattttgtcatctggggcagcatactgatttggtacactttccttgtcatatatggtctattttccccagcaatatcaaccactgcatatcatgtttttgtggaagcttgtgcacctagccctttgtactggctatccactctaatgattgtggtgacagccttgatcccattctttgtctacaaaatatcgagaacactctattatccacagtatcatgatcaagttcagagggctaactcaaagaattggtagtgcctgttgtataagatgctactgaatgaggggatgtacagtcagtaatttggtttaacataccacatgctttgctttgtagatcatgatgcagaggtagtgtatataaacaaagttggctgtttaacagatcttgtatttacggtctatgcccacaaagttacagtttcaggttgtggcagtgcgtctgtcaaatatcagaacacaatggtgacttcgcagtcacgcgaaggaactgcaagcggcaaattgattctttggacctattaccccactaggacacgtttttcttcggggtgccatcatggaagcagattgcaattaggatttatatagaatgatgtatagcatgtcgataactcgaacatgacttcctcgatatatgtagtactgtcttccaaaaaatagcattcttgtagcatcaaacggccaaacctatgttcgtggaagcatagttaataccctttattgctccaatggtttgtacatagttgtatgaatatatgagatggatcttgatgttgtttaacatttgatatgaaatgaataaatgatatgatgttatctct

SEQ ID NO: 6493 - DNA, 4564 bp, Zea Mays
tctggatcttcagttccacggccccacccagccgcgtctgcctgcctactgcctcctccaggctctccagctgtccgtgtccagcatcccgcactccgcagcaccactcgcccgccccacaccaccacacggcctccgcccacgcgcacggcgcacccgtcctgtgctcacatcaccacgccacacgacgcgctcgtcagtcgtcacgcaccccacgacgccccaaccgtcccaaacccagatccttccccgcctcgccaccgccaccgccaccgccaatccaccaccatgcccatggacaccgacgagcgccccctcgtcgagctcgcctccgctgcggccgccactactctcgccgcctcctccacctcctccgcccccttccccgcccctgccacgcctgggttctcccgcgcggtccgctgcaacgcccccgcttcctcgctcccggccgatggcggggccggcgcgcagccggcctacccggagaacgcgatctcgacaaccaagtacacgcccgcgagcttcgtgcccaagtcgctcttcgagcagttccgccgcgccgcgaactgtttcttcctcgtcgtcgcctgcgtctccttcagccctcttgcgccctaccgcgccgtctccgtcctgctcccgctcgtcgtcgtcgtcagcgccgccatggccaaggaggccgtcgaggactggcgccggaagcagcaggacatagaagtgaacaataggaaggttgaggtgtatgatgggatccaatcatttcatgagacagaatggaagaagcttcgagttggcgatataattaaagttaaaaaggatgagttcttccctgctgatcttattttcctttcgtctagctcttgtgatggattatgctatgtggagacgatgaatcttgatggtgagacaaacttgaagcggaaacaggcattagaggtgactatgggcttgaatgatgaccatttccatagtttcaaggctttcattcggtgtgaggatccgaatgagaaattgtattctttcttaggaacactatactacaatgggcaacaatattctctgtctccggaacaggtcctgctaagggattcaaaacttcgtaatacaatgtatatatatggcaccataatatttacgggacatgatacaaaggtgatgcaaaatgcaatggagccaccatcaaagaggagttcagttgaacgaagaatggataaaataatatatctcctttttgtgattctctttgttattgcaacgtttgggtcaattgtgtttggaatgagaacaaagcatgagataagtccaggaagctatgcatggtacctcaggccggatcaagcaaatatattctttgatccaaacaatgcatcgtttgcagcattctgccattttcttacaagcctgatgctgtatgtgtgcttggtgcctatttcattgtatatatcgatagaaattgtcaaggttttacagagcacatttataaatcaagaccagaatatgtattgcgccgagtctgataaacctgcaagagctcgcacttcaaatttgaatgaagaacttggtcaagtccatactatactgtctgacaaaacagggacattaacatgcaattcaatggagttcttgaaatgttccattgctggtgttgcttatggaagtaggcctacagaagttgaaacgtgttatggagaaatagttgaaactaatggcagttttgggcgcaaggacactactgaattcaagagatcagtcaagggatttaatttcactgatagtcatttgatgaatggaagatgggccaaagaatgttctagggatgctatagaaatgtttttccgagtcttagctgtttgccatactgcgattcctgtggcagatggaaattctgctggtatgccttatgaagctgagtctcctgatgaagcagctcttgttacagctgcaagagagtttggctttgaattttatcataggacacaaacaactatatcagtgcatgagtacgatcctgtcgttggtggaaagaacatataaactactcaacatcttagaattcagcagtgctcgtaagcgtatgtctgttattgtgaggacagaagagggtcggctatttctgttctgcaaaggagctgacaggttcaataattgtttttacatgtgatgaaaatcttctatgtttgacactgcatttcccgtttataagtacatatctaattatctatatcatgatagtgttagccttaaagttgtgcaacatatttaaactattccagctattctgaagtgtacctttcttcagagttgtaaacatcacatgctaaaattttcaaccttcaagtcctgttcaaataagtatcattatcttttcatctctgtgctccagtgtaatattcgaaaggctctccaaggataatggaacagctcatctgaccaaaacaaagtgtcacattgatgagtattctgaggcaggtctccggaccctggcacttgcatattgtgaacttactgaagaacaatatgttgtatggaatcaggattactcgtctgccaagaattctgtacatactgatcatgttgcagctgttgagaaggtgtcagaagacattgagaaggatttggttcttttgggtgctactgctgtagaggatagattgcaaaatggggtccctgagtgtatttataaacttgcacaagctggaattaagatctggattttaactggagacaagttggagacagctgtaaacataggttacgcttgtaacctactgaggaaagagatggaggaaatttttatcacactggagaactcaagtacaagtgcttcagaggggtccagtggagaaggaaacaaaattgccacatttgaggaaattgatagaaaattaaaagatgctagaggaaagatttcccaaaaaggaacttcaacttcatttgctcttatcattgacggcaatgctctgacacatgctctcacgggcagccttaagaactcatttctggatctagcagtcaactgtgcatctgttttatgttgtcgggtttcaccaaaacaaaaggcactggtcaccagattggttaaaattaggacaagtaaaactactttagctattggtgatggagcaaatgatgttggtatgctacaagaggctgacattggggttggaataagtggtgctgaaggaatgcaggctgttatggcgagtgactttgcaatagcacagtttcgttttttagagcgattacttcttgtgcatggtcattggtgttatcgtcggattgcagctatgatatgctattttttcttcaagaacatcacatttggctttacgcttttctggtttgaggctcatgctatgttctcagcacaacctgcgtacaatgattggttcatatctttctataatgttgccttcacatctcttcctgtcatcgccctcggtgtttttgacaaggatgtctcttcccatgtttgtcttgaggtcccttcattacatcaagatggcgttaataatgtattcttcagttggtcccgaatactcagttggatgttaaatgggatgtgctgttcaataattatttactttggttccctcaacgctattctggttcaggctgtccgacaggatggtcgcgttgctgggtttgatatccttggggtgaccatgtacacttgtgtagtgtggactgtgaactgccagcttgctctctacatcagctacttcacctggatacaacattttgtcatctggggcagcatactgatttggtacactttccttgtcatatatggtctattttccccagcaatatcaaccactgcatatcatgtttttgtggaagcttgtgcacctagccctttgtactggctatccactctaatgattgtggtgacagccttgatcccattctttgtctacaaaatatcgagaacactctattatccacagtatcatgatcaagttcagagggctaactcaaagaattggtagtgcctgttgtataagatgctactgaatgaggggatgtacagtcagtaatttggtttaacataccacatgctttgctttgtagatcatgatgcagaggtagtgtatataaacaaagttggctgtttaacagatcttgtatttacggtctatgcccacaaagttacagtttcaggttgtggcagtgcgtctgtcaaatatcagaacacaatggtgacttcgcagtcacgcgaaggaactgcaagcggcaaattgattctttggacctattaccccactaggacacgtttttcttcggggtgccatcatggaagcagattgcaattaggatttatatagaatgatgtatagcatgtcgataactcgaacatgacttcctcgatatatgtagtactgtcttccaaaaaatagcattcttgtagcatcaaacggccaaacctatgttcgtggaagcatagttaataccctttattgctccaatggtttgtacatagttgtatgaatatatgagatggatcttgatgttgtttaacatttgatatgaaatgaataaatgatatgatgttatctct

SEQ ID NO: 6494 - DNA, 812 bp, Zea Mays
ctgagtgctcttggattatctgacatcatttacaatacaagtttttgagtggtaccctatctatagaatccctactggaccaacactcaaggatttggatgcatgtttcttgacatttcattacttatcaacaccttccaaggatactgatcccagtacaccaccatgccccaatttgggggggcttaattgcaacatgaacgccgctggcaaactaacattgcccgtctttggactggcatcatacaaattgaagagctctatttggtcgtcaaataggcctgaggagcagcagcttgcagcttcactgacgcagacagcagatgactggcttcgccatcgccaagtgtaccatccagacttccggttctttctcacccacttcaacacagcattgagatgacatgagatggtcgcatctctcgctgtaaattgtcttcgttagtacaacctccgttctcgaatatttgttgtccactatatttttgaactaaaacgcgacaaataaaaaagaacggaggaagtatattatatgttgttggctgagccaggctacctgtaacactatgtggttgaccgcgtaactagcgcttctctgaacttttttcgtatggttcagtagttcaagccagacagctaatttgtaacttctccaataattcttttgttgtaggtaaacttttgagagtaaacattatggagatctgtaaaacagaaactgatggttataaactttttaaacttagacttgagaacacattgcttataatttagtttaaccttgtattatatgttctcatctaagatccaga

SEQ ID NO: 6495 - DNA, 2160 bp, Zea Mays
agttgaacccaatatcttaaaacaacacaatgattaaaggctttattggagatattctaatgagcccaatgtatttcattaaaatttatgtttgtccaaatccatttcataacattttttggtactttatcataaaccttaatcaaatcaataaaaacatgtgtagatcatccttttgttctctatactggtctatcacttgtcttattaaaaatgactttcatggttgatcttttaggtatgaaaccgatttggttagaagagatcctcgctattccattgagatcgatccatccggcacggcacgcaaccccacccggctatgctcctccctccgtcgccgcctccagtccagacatgacccgcgctgccccatggcgccccgcggccgcaccctcctcccgctcgccgcggccaccgtcctcgtcgcttccaccatcttcctcttcgccgccgccggtgcgcgctggcggcccgccgacaccgacctccccgtcccgccacacgccttccccacggccgtccccgcggccgtgaccgcttcttcttactccaacgccaccgccggcaaggagctctcctttctcgacgagaacggccgccccgatgacccctcctccgcctcagcatccagctccacctccggcgccaccccggccgctggtgtcgtcagatgtgacccccgcgacgccgtcagggtattcatgtacgacatgccgcccgagttccacttcggcctcctcggctggtcgccgccgtcccctgactccgtctggccagacgtcaccgccgcctccccgccgccgcgctaccccggggggctcaaccagcagcacagcgtggagtactggctcacgctcgacctcctctcctcctcgcccccctgcggccgtcactccgcagtgcgggtctccgattcccgcgatgccgacctcgtcttcgtccccttcttcgcgtccctcagctacaatcgccactaccggcccgtgccgcccgagaaggtcagcagggacagggtcctccaggagaagctggtgcggtacctcgcggcgcggccggagtggaggaggtacggtggtgccgaccacgtcatcgtcgcgcaccaccccaacagcttgctgcacgcccgggcggtgctgcaccccgccgtgttcgtgctgtcagacttcgggaggtaccctccgagggtagctagcttggagaaggatgtcattgcgccctacaagcacatggctaagacgtacgccaatgactcggccgggttcgatgaccggccgaccctgttatacttccgtggagcaatttacaggaaggagggagggagcattcgacaggagctatattatatgctcaaagaagaaaaggatgtttacttttcctttggaagtgtccaggaccatggggccagcaaagctagccaaggaatgcactcatcaaaattttgcctaaatattgctggggacaccccttcttccaatcgtctgtttgatgcgatagttacccactgtgtccctgttatcatcagtgacgacattgagctaccttatgaggatgtgttggattattcaaaattctccatctttgtccgttcgtctgatgctgttaagaaaggttacctgatgagactgctcagtggtgtaagcaagcaacaatggacaaagatgtgggataggctcaaagaggtggataaacattttgagtatcagtatccatcacagaaggatgatgcagtccagatgatctggcaagcattgtctagaaaggtgccatcaattaagctgaaggttcacagatctaatagattttcaagatctaacagaggaaaataaacagaaaggggtgtgtctatcttgtctctattggctaatctaatgtaacacatttcactgacacaggctctcagcctttcccagttgcacaaaatagatagattgtaatactcaggttatctttaggaaaggtttgtaccttaagatttgttggttcagttgaagcatatactgtcaagtcaaaggttgttttgtaaggtatgttaaatgtaatcatgaaagaaagacttggttttgctgtttctggaacattgtgggatgaaaccatattcttctgtggcgtagcagattttattttgcctttaatttattcagtctcaattgccatctt

SEQ ID NO: 6496 - DNA, 814 bp, Zea Mays
actaacgacaagcgcatccgacgccctgggcccccaccgccgcacgccgcgcgggcaacgcaccaccgccacgccgcgccgcagcaaaagcgaagccagcgggaatgcacgatcgccgccgccgcggcgcctacttccctgccccgcgtcgctgcggccgtcgccgactcggcttgaggaagcggttgcttgccaatgccaggacatgcagttgagccagggaaaaaaggactgtcaggtgaagtaccaacctacctacctaccttttgactgtaaccgctagtgcgcacttcctttttttttttgcaccccagagaagaagtgctcattcgtccactccagaatctgcactgggtgtacctacaggttatgaaaaaaaaatccctgggtttataaatgctaatctatcacatagttttgtgtgtgtgtgtttttcttcctttgccgaaaggtgattatactattggattgatggacggaggtggcattattctgatgagagaagggaaggcgggcggcggcagcgcagcatggcaattagcaaggctggcgcaagaagatcacggggaaggcaagtttgacaacgggggcatctttttctggggtccccagcaggaagcatatacaggcccaccccttccctagtccctatggcacacacgacgcgatgcatgcatggcatggatgcctggtcccccggcccctcctctttttgaacatcgaattgtggagcgagttttgcagggcgtgtgtatcgaaattcagaaatgccaaacgcactgtaagatatttgaccaccatcaaattagtcatg

SEQ ID NO: 6497 - DNA, 2797 bp, Zea Mays
acacatagccggaagcaaaaccaagggaagggctaaacctcccttggcacaagccctcaaccacctccaccaccacctttaaaagaaggtgctaaagggctgtcctgcagagaaaaagagaggagtgccccccacaaacctttccttgcattccactgaaatcttcctatctgcaaccatgcagttgctcaattctggcctcagctgaagcccaaccatccattgttatataagtcgctgcagcctttgcaatttcccactccttcagccaccatcggtcattgaaggagcttcgtgccaccagagaaggttctgcattggcgttgagatggggaggcattcttgctgctacaagcaaaagttgagaaaggggctctggtcccccgaggaggatgagaaactcatgaaccacataacaaagcatggccatggctgctggagttctattcccaaactcgctgggctccaaaggtgcggaaagagttgtaggctgaggtggataaactatctgaggccagacctcaagagaggggcattctcccaagacgaagaagacctcatcattgagctgcacgctgtccttggaaacaggtggtctcaaattgcagctcagctgccagggaggactgataatgagatcaagaatctatggaactcgtgcatcaagaagaagctcaggcagaaaggcattgatcccaacacccacaagccccttactgaggctgatcgcagcggagcagctcccaccatcagcaccgagagaacctcagggtccagcgaaatcaacccatcaagcgctggtgctctgggaaacttgagccacctcctcagcgagacggctcaatcatcaatgctgatgcccgtgtatgacaagaatcgcgctgaaactccaaacttggcacgccctaaggtgccaccaaaggagttgttcctggagcagcttactgctggacacgagagtccatcaacctgccgctcatcaggccaaactctctatttccctttccaacagcctttaggctacaacagtgagagtggcagtggcgatggggcgaatatgaattcactctggttcaaccagagtgacttcaactgcagcacaatttctacagtgatgccgccagcttcaccatcggccctctctacatcaatggggctgaatcttccacctgataattctcgacatggaggaactggcattggaagtactgcagtagattcattctactgggatggtactaatcctagcagcagtagcagtactgggagcagaggaagcaacagtatgggatttgaaccacagagcacgagctcaattctggagaacagtgtcttccaatggacagacatcggacaagaaaaagatacaagagctcacctggtagaggaacttaagtggcctgacttgctccatggaacctttgccgagacgaccacagccatgcagaaccagagccagacgctctatgatgacgtgatcaaggcagagagccaattcagcatggaagggatatgtgcttcttggttccagaatcagcagccacagcaacagcttcaggcaacaccagacatgtatgacaaggacttgcaaagaatgcaactgtcttttgagaatatctaggcattatgttccacatggaacagagcagatcagcagaagcagaaatttgtaattttcagagattcgtgggcagaactatgctgaattgcttacatagatacattaagttgatacagaaatcatcctccacagctgctcctcagttgaagacctggcaatatcaaggaaaggacagccctggcattagaagtggcagcagaatgcatacaaaagtacgttctagagtctctttttctttatcttgaaaaatgatgtttccttctgtacacaacgactcaacttttgcatatttgagtttttgttcactctctggtggaaattaaataaatataggcagccatgggcaaaactgcatgtgttggtagctctcaccatgcaagtagacccaaacatttcaactgctgccatgcacgtccatgcaaattaattattgcatgttgtattttctttttcttttttttgataagttgccgacaaacgacagttgtatatttgtaagaagaaatttggaatgttgacctgagagctattttcttccccctttcactttcccgtttctgtcgtaaacttttctgtgtggagaacccaagctacttgagcgctttctacttgaatacaggaatggaaaacgattggttgatttgatagggtacaaaggagcaatcattctcaagaagaagtaaacacattcaggaaagaaaaaaggaagaaactattcatgaatatctacctaccatgtagattgggtaatctatgaagcctcaatgtggtgagactcaatatatgatccattgagtttgtgcatcattatttatgtaacatagccatgatgtgttctgtaaatttagtcagtgaaatctcttaaagctttgcactttggctgagttaatattcagctgtcatgggggctgaagctagcatgcttcctgggtggctgggtctattcctcattgtttgtgcaatagtctagggcgagttttgtttacataaaatggtgtatcacccccctcaagctagctatgactgaaaaaacccaaatgagttaaagaacatggtttttcaacatcttcattaaaaggtacattgcctggattttgagaagccttactcgtacacatccctgccttttattttcttatagactttggcaattagtacactaggggatattaaata

SEQ ID NO: 6498 - DNA, 2159 bp, Zea Mays
aattcccatcagggtccgtcacgaaccggtgggcggagtcttccagaggccaatattctgacacagcggaccccgtgggccgtggccgtctcgtttcccgtctcccgcatagaggttcccaaaccattctctttcgctttcgtctccgcaccctagggtttctgtgcctcgccagcgaagcgatgcagccgccgcaccaaccgccgatgaacgggcaacactcccagcctccgccgcaaggacccgtggtgcccatgcctccgcagcagcaggcgcccccgctgccgtactaccagcagcagcaggcgccgcagtactaccaacaggccctcccgcagccgtgggggcagcagcagcagtacgctgcaccgccgccgcagtacccgcctccgcctcagacgcagcattacgcgacaccaccgcagcagtacgcccctctgccgcagcagcagtacgctcctccaccgcagcagcagtacgctccttcgccatatggtaccacgccgggaagcggtgaagtcaggacgctgtggatcggagatcttcagcactggatggacgagaactacctccactacaacgcctttgcggccgtggcccagcagattgcttctgtgaaaattatacggaacaagcaaactgggcactcagaaggctatggttttattgagttttactctcgagctgctgcagaacatactctgatgaacttcaatgggcagatgatgccgaatgttgagatgacttttaagctgaactgggcttctgctagcactggtgataagcgtggagatagtggttctgatcgcacaatatttgttggtgatttggctcatgatgttactgactccatgttggaagatgtgttcagagctaagtacccttcagttagaggagctaatgttgttgttgataggatgactggatggcccaaaggatttggtttcgtgcgttttggagatctgaatgagcaggcacgtgctatgactgagatgaatggaatgttgttatctacaaggcaaatgaggattggtgctgcagctaacaagaagaatagggatgctcagcagacatatgcaactgacggtatgtacttgtcgaacatcttcatataggtttctaaattatttttctctattatttcacacttgcttgtgtaggatcctgcaggggtactgattatgagagcatctaacttctaggatgtcatgccatctgcatttaaggcctggaattgtcttcagatgtctatgtaaccagtgcctcggttaggagcataccagagctctaaaggaaattcttcagagaatgatcctaacaatacaacagtctttgtaggtgggttagattccaatgtaaatgaggagtatctaaggcaaatttttactccgtatggagaaatttcctatgtgaagattcctgtaggcaaacattgtggatttgttcaatttaccagcaggtcatgtgcagaggaagccatccgaatgctgaatgggagtcaggttggtgggcagaaagttcggctttcatggggccgtagtcctcaaaacagacaggcttctcagcatgatgccaacaaccagtataatgggaacagctattatggataccaacagccgggttatgaaggttatggctatggtgcttccagtgcacaagacccaagcatgcaaaactactacggatactctggttgtggtaactatgagcagcagcagccaacacaggaacagcagctgcagcagcctccaccaccacagcactgacgattgcttgcacacctctggagtgctatcggattagagtgatggtggagtcacggggcgctgcaatgagacatcctatatagatatgaaggtcatatagtcgcataggagtggttagactttcttggggaccagtgttaatcgatgatggcactccggatgtttcttctgtttgtcgttgagatcttgactgttgaagtgtgctctgttgatattaatgtcttcgtcagattgttaatttgcttgtttcagatgtcccagaaccatttgtacttagggagtgtttgaatgcactagacctaacagatagttggctaaaaaatttgctagtgaaattagctaaataataaatagctagctaactattagctaatttgctaaaaatagttatta

SEQ ID NO: 6499 - DNA, 2194 bp, Zea Mays
aattcccatcagggtccgtcacgaaccggtgggcggagtcttccagaggccaatattctgacacagcggaccccgtgggccgtggccgtctcgtttcccgtctcccgcatagaggttcccaaaccattctctttcgctttcgtctccgcaccctagggtttctgtgcctcgccagcgaagcgatgcagccgccgcaccaaccgccgatgaacgggcaacactcccagcctccgccgcaaggacccgtggtgcccatgcctccgcagcagcaggcgcccccgctgccgtactaccagcagcagcaggcgccgcagtactaccaacaggccctcccgcagccgtgggggcagcagcagcagtacgctgcaccgccgccgcagtacccgcctccgcctcagacgcagcattacgcgacaccaccgcagcagtacgcccctctgccgcagcagcagtacgctcctccaccgcagcagcagtacgctccttcgccatatggtaccacgccgggaagcggtgaagtcaggacgctgtggatcggagatcttcagcactggatggacgagaactacctccactacaacgcctttgcggccgtggcccagcagattgcttctgtgaaaattatacggaacaagcaaactgggcactcagaaggctatggttttattgagttttactctcgagctgctgcagaacatactctgatgaacttcaatgggcagatgatgccgaatgttgagatgacttttaagctgaactgggcttctgctagcactggtgataagcgtggagatagtggttctgatcgcacaatatttgttggtgatttggctcatgatgttactgactccatgttggaagatgtgttcagagctaagtacccttcagttagaggagctaatgttgttgttgataggatgactggatggcccaaaggatttggtttcgtgcgttttggagatctgaatgagcaggcacgtgctatgactgagatgaatggaatgttgttatctacaaggcaaatgaggattggtgctgcagctaacaagaagaatagggatgctcagcagacatatgcaactgacggatcctgcaggggtactgattatgagagcatctaacttctaggtgcatcactgcatcttgaaaactaaaacccacttacatattctggtttctctttccatttttcttgctggttgatagtgttttcgtaccagttctctttctagtcattccaccgcaacagctcacatagcttctttctgtaaacagtttccttcccgctctttccgttccaagtctaagattgggataacttaacaaagtaattaaaccactgaacaaaatttgtgtttctcaaagcaggatgtcatgccatctgcatttaaggcctggaattgtcttcagatgtctatgtaaccagtgcctcggttaggagcataccagagctctaaaggaaattcttcagagaatgatcctaacaatacaacagtcatgtgcagaggaagccatccgaatgctgaatgggagtcaggttggtgggcagaaagttcggctttcatggggccgtagtcctcaaaacagacaggcttctcagcatgatgccaacaaccagtataatgggaacagctattatggataccaacagccgggttatgaaggttatggctatggtgcttccagtgcacaagacccaagcatgcaaaactactacggatactctggttgtggtaactatgagcagcagcagccaacacaggaacagcagctgcagcagcctccaccaccacagcactgacgattgcttgcacacctctggagtgctatcggattagagtgatggtggagtcacggggcgctgcaatgagacatcctatatagatatgaaggtcatatagtcgcataggagtggttagactttcttggggaccagtgttaatcgatgatggcactccggatgtttcttctgtttgtcgttgagatcttgactgttgaagtgtgctctgttgatattaatgtcttcgtcagattgttaatttgcttgtttcagatgtcccagaaccatttgtacttagggagtgtttgaatgcactagacctaacagatagttggctaaaaaatttgctagtgaaattagctaaataataaatagctagctaactattagctaatttgctaaaaatagttatta

SEQ ID NO: 6500 - DNA, 3147 bp, Zea Mays
aattcccatcagggtccgtcacgaaccggtgggcggagtcttccagaggccaatattctgacacagcggaccccgtgggccgtggccgtctcgtttcccgtctcccgcatagaggttcccaaaccattctctttcgctttcgtctccgcaccctagggtttctgtgcctcgccagcgaagcgatgcagccgccgcaccaaccgccgatgaacgggcaacactcccagcctccgccgcaaggacccgtggtgcccatgcctccgcagcagcaggcgcccccgctgccgtactaccagcagcagcaggcgccgcagtactaccaacaggccctcccgcagccgtgggggcagcagcagcagtacgctgcaccgccgccgcagtacccgcctccgcctcagacgcagcattacgcgacaccaccgcagcagtacgcccctctgccgcagcagcagtacgctcctccaccgcagcagcagtacgctccttcgccatatggtaccacgccgggaagcggtgaagtcaggacgctgtggatcggagatcttcagcactggatggacgagaactacctccactacaacgcctttgcggccgtggcccagcagattgcttctgtgaaaattatacggaacaagcaaactgggcactcagaaggctatggttttattgagttttactctcgagctgctgcagaacatactctgatgaacttcaatgggcagatgatgccgaatgttgagatgacttttaagctgaactgggcttctgctagcactggtgataagcgtggagatagtggttctgatcgcacaatatttgttggtgatttggctcatgatgttactgactccatgttggaagatgtgttcagagctaagtacccttcagttagaggagctaatgttgttgttgataggatgactggatggcccaaaggatttggtttcgtgcgttttggagatctgaatgagcaggcacgtgctatgactgagatgaatggaatgttgttatctacaaggcaaatgaggattggtgctgcagctaacaagaagaatagggatgctcagcagacatatgcaactgacggatgtcatgccatctgcatttaaggcctggaattgtcttcagatgtctatgtaaccagtgcctcggttaggtcagtgttttaatttcatgagattttggttctaaagctctttcactctcaggcatcaacttatctggacttactctccagtcttcaatgctttcagtttatttttttaaaaaatactgcccatcatgttccagtactcgtgatagctaatatgtacaattttatatgttgttgtggtatttatttttatatattccccctttttctcatctctggattggatttcttatatctgcacctaatgtcacctgtaacatgtttgttactccgcattgtactgtatagtgcaggaagcttttagtttcacctgtagcttatctggtctcctcaatgtaccatttttttagtcattccaaattctgttgcggtgcagaaaatatttttttttgttcaactttccactgttgtgcctgcacttcctctggtttattattccatgctgcagattcaattttctttttatttctcattagttttccctgaatgcactttgtagttatgcatttttgtttgttgcccacatattctgcttatctgagtttgggtttggtagttggtatggcttagcaacactgtaaagtttgatttcttatttgaaatattttatcaacagttgatgactcagaataagattaaaaaatcgaaatagttgaactaatatgttctacttcatgcccgtgttagtgcatgaggatatttccaggttgtgattaatacacgcagttgctgctacatagtttttgtcatttaaagatactgggtattgtgtagataatctgagtttatctactgacagtttgactatagtaaaatttcttctgttgcagctaagcagtacatgcagtgaacaactaattgaagcaaggatttcttgtattcttcctctgacctcattggaatgctaaccatttctttatttgttttatttacttacatcattgcaaatgctgttgactattttggatccttactagaaatatgttaagctattacttttgctggccagaatatgggtgtccagtgttccgttgctattattttgggggtctgaattcccagccaatttgccaactttgttgctgatggtttgtcttgccattgcaggagcataccagagctctaaaggaaattcttcagagaatgatcctaacaatacaacagtctttgtaggtgggttagattccaatgtaaatgaggagtatctaaggcaaatttttactccgtatggagaaatttcctatgtgaagattcctgtaggcaaacattgtggatttgttcaatttaccagcaggtcatgtgcagaggaagccatccgaatgctgaatgggagtcaggttggtgggcagaaagttcggctttcatggggccgtagtcctcaaaacagacaggcttctcagcatgatgccaacaaccagtataatgggaacagctattatggataccaacagccgggttatgaaggttatggctatggtgcttccagtgcacaagacccaagcatgcaaaactactacggatactctggttgtggtaactatgagcagcagcagccaacacaggaacagcagctgcagcagcctccaccaccacagcactgacgattgcttgcacacctctggagtgctatcggattagagtgatggtggagtcacggggcgctgcaatgagacatcctatatagatatgaaggtcatatagtcgcataggagtggttagactttcttggggaccagtgttaatcgatgatggcactccggatgtttcttctgtttgtcgttgagatcttgactgttgaagtgtgctctgttgatattaatgtcttcgtcagattgttaatttgcttgtttcagatgtcccagaaccatttgtacttagggagtgtttgaatgcactagacctaacagatagttggctaaaaaatttgctagtgaaattagctaaataataaatagctagctaactattagctaatttgctaaaaatagttatta

SEQ ID NO: 6501 - DNA, 3298 bp, Zea Mays
aattcccatcagggtccgtcacgaaccggtgggcggagtcttccagaggccaatattctgacacagcggaccccgtgggccgtggccgtctcgtttcccgtctcccgcatagaggttcccaaaccattctctttcgctttcgtctccgcaccctagggtttctgtgcctcgccagcgaagcgatgcagccgccgcaccaaccgccgatgaacgggcaacactcccagcctccgccgcaaggacccgtggtgcccatgcctccgcagcagcaggcgcccccgctgccgtactaccagcagcagcaggcgccgcagtactaccaacaggccctcccgcagccgtgggggcagcagcagcagtacgctgcaccgccgccgcagtacccgcctccgcctcagacgcagcattacgcgacaccaccgcagcagtacgcccctctgccgcagcagcagtacgctcctccaccgcagcagcagtacgctccttcgccatatggtaccacgccgggaagcggtgaagtcaggacgctgtggatcggagatcttcagcactggatggacgagaactacctccactacaacgcctttgcggccgtggcccagcagattgcttctgtgaaaattatacggaacaagcaaactgggcactcagaaggctatggttttattgagttttactctcgagctgctgcagaacatactctgatgaacttcaatgggcagatgatgccgaatgttgagatgacttttaagctgaactgggcttctgctagcactggtgataagcgtggagatagtggttctgatcgcacaatatttgttggtgatttggctcatgatgttactgactccatgttggaagatgtgttcagagctaagtacccttcagttagaggagctaatgttgttgttgataggatgactggatggcccaaaggatttggtttcgtgcgttttggagatctgaatgagcaggcacgtgctatgactgagatgaatggaatgttgttatctacaaggcaaatgaggattggtgctgcagctaacaagaagaatagggatgctcagcagacatatgcaactgacggatcctgcaggggtactgattatgagagcatctaacttctaggtgcatcactgcatcttgaaaactaaaacccacttacatattctggtttctctttccatttttcttgctggttgatagtgttttcgtaccagttctctttctagtcattccaccgcaacagctcacatagcttctttctgtaaacagtttccttcccgctctttccgttccaagtctaagattgggataacttaacaaagtaattaaaccactgaacaaaatttgtgtttctcaaagcaggatgtcatgccatctgcatttaaggcctggaattgtcttcagatgtctatgtaaccagtgcctcggttaggtcagtgttttaatttcatgagattttggttctaaagctctttcactctcaggcatcaacttatctggacttactctccagtcttcaatgctttcagtttatttttttaaaaaatactgcccatcatgttccagtactcgtgatagctaatatgtacaattttatatgttgttgtggtatttatttttatatattccccctttttctcatctctggattggatttcttatatctgcacctaatgtcacctgtaacatgtttgttactccgcattgtactgtatagtgcaggaagcttttagtttcacctgtagcttatctggtctcctcaatgtaccatttttttagtcattccaaattctgttgcggtgcagaaaatatttttttttgttcaactttccactgttgtgcctgcacttcctctggtttattattccatgctgcagattcaattttctttttatttctcattagttttccctgaatgcactttgtagttatgcatttttgtttgttgcccacatattctgcttatctgagtttgggtttggtagttggtatggcttagcaacactgtaaagtttgatttcttatttgaaatattttatcaacagttgatgactcagaataagattaaaaaatcgaaatagttgaactaatatgttctacttcatgcccgtgttagtgcatgaggatatttccaggttgtgattaatacacgcagttgctgctacatagtttttgtcatttaaagatactgggtattgtgtagataatctgagtttatctactgacagtttgactatagtaaaatttcttctgttgcagctaagcagtacatgcagtgaacaactaattgaagcaaggatttcttgtattcttcctctgacctcattggaatgctaaccatttctttatttgttttatttacttacatcattgcaaatgctgttgactattttggatccttactagaaatatgttaagctattacttttgctggccagaatatgggtgtccagtgttccgttgctattattttgggggtctgaattcccagccaatttgccaactttgttgctgatggtttgtcttgccattgcaggagcataccagagctctaaaggaaattcttcagagaatgatcctaacaatacaacagtcatgtgcagaggaagccatccgaatgctgaatgggagtcaggttggtgggcagaaagttcggctttcatggggccgtagtcctcaaaacagacaggcttctcagcatgatgccaacaaccagtataatgggaacagctattatggataccaacagccgggttatgaaggttatggctatggtgcttccagtgcacaagacccaagcatgcaaaactactacggatactctggttgtggtaactatgagcagcagcagccaacacaggaacagcagctgcagcagcctccaccaccacagcactgacgattgcttgcacacctctggagtgctatcggattagagtgatggtggagtcacggggcgctgcaatgagacatcctatatagatatgaaggtcatatagtcgcataggagtggttagactttcttggggaccagtgttaatcgatgatggcactccggatgtttcttctgtttgtcgttgagatcttgactgttgaagtgtgctctgttgatattaatgtcttcgtcagattgttaatttgcttgtttcagatgtcccagaaccatttgtacttagggagtgtttgaatgcactagacctaacagatagttggctaaaaaatttgctagtgaaattagctaaataataaatagctagctaactattagctaatttgctaaaaatagttatta

SEQ ID NO: 6502 - DNA, 1499 bp, Zea Mays
cgcgttgctaccaccgcggcttccttctctacccttccctcgcgtcgccatcgcaagagtatctcaactccgcctcgagacctcccccctcgctggtctcagccatggtgaaatattcgacggagccgaccaaccccaccaagtccgctaaggccatgggtcgtgacctacatgttcacttcaagaacacacgtgagacagcttttgcccttaggaagttgtcactcaccaaggccaaaagttaccttgaggatgtgatcgcccacaagcaggccatccctttccgtaggtattgtggtggtgttgggcgtactgctcaggctaagtctcgccactcaaatggtcagggacgctggcctgtcaagtctgctagattcattctagaccttctcaagaatgcagagagcaatgctgaggtgaaaggacttgatgtggataccatctatgtgtctcacattcaagttaatcaggcttagaagcagcgacgcaggacataccatgctcatggacgcatcaaccataacttacatgtcctccccatgccacatcgagctcatcttgtcggagaaggaagagccagtgaagaaagaggctgagtctcagattgcaaccaggaaggcttagagaaggggctctatcttctgtgattggcttagtacaagttttggctgattatttgttgtctcatactgtttacctgagtattgtttgcaagtgctttatcactgtccgaactgtgcatgcaattcactggtctagagaattgtccgtggattgtttcatatttgcgcgtatggctcatgtctgttgctttgctttaatctgtaccgaacattaagtgtagcattaacaatctgaagcgaacattaagagtagggttgtcctgcttctgcaattttagttgtcagtaaaatatctgtttctgaaagcacttgccattcctttttaatatcaggtgagctgaagtcaactaaggtgtatgagaaatgggctaaaaagatctcagggatggagccaccaacaaatccgctagagaggagagcgaacgcagggttgagcggaaaaaacagttcaactccatcctctcgaacatcatgtccaagtgtgactccaaggcgagcagctcagagcccacgaaagaagagtttgagcaagcgcaacagaggctggagagcagaagggccaagaggcgcaagtgatgctgctgccagccttcttgccctatgctgaacattgtctgaaccttttggtgtgacctgaatttaccagcatgcaagtgatggttctaagacccagttttagcgtgtcagagtgtgtgtcatatctcttgtcctctcacggtacactatgttgtatggttatcggttatcaccttgccgagagggaagctctatttgatttgaaagtatcatgacatattttaccgcgacaattatcattacacatttcttcaagttatgttgcaagaataaaaattggcttcagtttcaaaattacta

SEQ ID NO: 6503 - DNA, 2979 bp, Zea Mays
gaagaacactgcagcaagttcttcttaggaacaagtcatgttatcagtagctaccaccaatggcagccaagggaactccatggaaacagtcatggcaacaatggagcgtcaaacagctcgcaggacccagactaatgtgacacagatgatggaatctatttttgccagtgtcagtcttgctaaagatctttctgctaggtgcaaaagcagagcattgcaagtcacggatgatgagatacaaagcacagcacaagacctggagaatgtcttgcagaatatatatgatgatctttgcaggataccagcttcagcatttggcagtagtgcttacatggatgtgcctattaaatcacagccaatgagggattgctgtaaggctgatatacccataaatgtaatgggcaacagacctaggacaaggtctctccgagataatgatactccgaggctggtggactttctcaagggaatgtaccatgaatcgcatgaatttagtgggcagatgttcaacactctcctagaggttacagaatacattgagccactgtatgatgcgttcatctgtgcactaacaaatgagataatgactgatcctgtgatgattgagagtggtgtgacatgtgacaggagagccatagaggagtatattgagaggtttgcagacagttctgaacctgtctattgtcctgtcacaaagatgacaatgcaaagtaagacaatggtgagcaatgcttccctgaagtgtgtaattgaagaatggacaatgagaaatgagatcatgcgtgtcaggattgctcgtactgccctttccctgtcaactacagacacaatggtgcttgaagctatacatgagctaaagttgctggccaagttgagggtgaagaacagggagctgatgcacaagatcggagtcaccaagttcttagcacggttgttggacaaccacaatgaccagattcagtttgaagctctcaagcttttgtgcttgttagctcaagatgaagaaggaaaggatatcatcggaaaaactaaggccattgccaggacaataaaattactgtcaagtaattctactgatgaaaggcatgcagccatctctttcttgctggagctttcggagtcacagttactgttggataatattggatcaacacctggaagcattctgatcctcactacaatgaagcttaacagttcagatgatccaattgctgctgcaagagctggagcagtccttaagaacctggagaagtgtccgaagaacatcaagtacatggctgaaagtggctacttagaacctcttcagagtcatctagtggaaggctcagaagagatacagatggagatggtcggctatctatgtgaactagtccaagagcaggagctcaccattgatatcaatagaagcacctcggaaatcctcgtcaagatggcgctgtccctgtcatgattgaggaactgttcatcagaaaggtcgatgacgagcctgtgaactccatggccaatgccgccactgtccttgctaacattgtcgagtcaggcattgacccagacaccacggtggtgaacaaggaaggccatgtcctcacctcgaagtactccatctacaactttgtgcacatgctcaagtgcttcatgccggacgacctcaacctcagcgtcctccgcatccttctagcgctcaccgcgctcgccaagccactagacactgtggtctcggtcatcagggagaactaccgcggccattctatcatcgagctcatgggctcaccaacggaggtgctcagcctcgccgcgacaaggctgctcatcaccctgtctccacacattggacacaccatcgtagagaggctctgcaagacacaaggacagccacacaagctggtcaaaagcatcagccatgctgggcgcatcacagaacggcaagctacgttggccacgctcctcgcgaagctaccttaccggaacacctccctcaacatcgcgcttgtgaaggatggtgccgtgccagccatgctgagggcgataaaagaggtggagaacggcgctggtagatcaagcaggcaggctgtgccatacatggagggtctcgttggcacgctcgtgcggctcactgcgactctgttcagcccagaagtgttgaaggcggccatggaccacaatctggcctcggtgctcactgagctactcgatggagcagccggaagcgacgaggtgcaacgccttgctgcagtggggctcgagaaccttagttacctatccatcaaactgtcccggccaccgcccgatgagctgcagttcaagaagaagaataccctactgaagctcctgaaggactcaaaggcgcacagcaacaagaagacctcactccaccaggtttgcgtttgcccggtgcaccgaggagtctgttctccagcggcgacattctgcctcctcgaggctggcgccttggagggcctcttgggatgcctcgagaacgacaacatccgggtggtggaggctgccctccgagcgctgtgcactctcctcgacgagagggtggacgtggagaagagcgtagcggcccttgctgagctcgacgttgctcggcgcgtgcttgctgcgctgaggcagcaccggcaaaacgtgctgtggcagaagtgcttctgcgtggtggagaagctcctggaccacggcgacgaccgatgcgtgagggaggtgacaggcgatcggatgctgcccacggcgttagtgagcgccttccacagaggggacgagagcactaagcagacggccgagagcatcctccggagactacacaagatgcctgattactctgcaacctatgtatccatggagttctagtcgttggaatctaaacagtatcgaagtgtgtgcatacactacttttttttacttgcttgtttgaacaaaattacagaacggatcatttttgtgcagcactatgattttcacaacctgaatgttttaacaagtgaa

SEQ ID NO: 6504 - DNA, 1610 bp, Zea Mays
ctgcgtccagctccccccacccagctctccttttccgggtcacgtgcggaagcgtcaactggtcaaacccaccattatcactcaggcggaaacgcgccggagggagggagagaggaggggcgtgggtggctgggccgagcgactcctccttccagtccaccgctataaagccccgcaggcctggcgagtcccgacggttccattactggtccctagcaggaagcaggatggagttggcgctcagcttgggggagaccatggcggatgccgggagggacctcatgctggggcttgggatgggggtcggggtgcggagggaggaggaagcgcagagagggaggagggacagggaggtgaggcgggagctggagttcacggcgaggagcgcccggtcgtcgccggagccggcggtgcgactcaccctcctgcacggcctcggcctcccgtggccgccgccgccgtcgtccgagaccaaccggcacctggaggcgtcggcgcgtggcttcgacgtgaaccgggcgccgtcgctgtccgcggccggtggcgccgcggaggaggacgaggagcaggacgaggcggcggcggcggcggcatcgtcgtcgcccaacaacagcgcgagctccttcccgacggacttctccgcgcagggccaggtggcgcccggcgccgaccgcgcgtgctcccgcgccagcgacgaggacgacggcggctccgcgcgcaagaagctgcgcctctccaaggagcagtccgcgttcctggaggatagcttcaaggagcacgccacgctgaacccggacgaagctgaagcagacggaggtggactgcgagtacctcaagcgatgctgcgagacgctgacggaggagaaccggcggctgcagaaggagctatccgagctccgcgcgctcaagacggtgcaccccttctacatgcacctcccggccaccaccctttccatgtgcccctcctgcgagcgcgtcgcctccaactccgcgccggcgcccgcgtcatcgccgtcccccgctactggcattgcggccccggcaccggagcagaggccctcgtcgttcgcggctctgttctcgtcccctctgaaccgcccgctggccgcccaggcgcaaccgcaaccgcaggcgccggccaactcgtgaggcgctctctactctatctccggcgacgcgaacggaggtggatctggctgtaaatacgatcacctttttttggcttcctttttcttttgttttcacttgatgcggttcttgagattttttttttgtggattgccgatgggttggtttaccggtttattagagcgcatcatctggccgtcggattggactgcggacggccgggtgcagaaaggaagtgctgcgatagagtttattaacctcagtagcatcgatcatgttttgttaccttgctatctatcttggcgtcaatataggccttgaaatccgaagttaccctgatgatgatgaaatgggtggtgtcaccatttaactgtcgaaggaacgctgttggtctccgcagttcgtacgcgcagattagtgaaatcacgacgcccatcgagtgctgctactcctgttctcgccgatcccttgcggcatacgag

SEQ ID NO: 6505 - DNA, 1340 bp, Zea Mays
caccagaggcccaccgtcgcgcccagccccaaatcccaaccctagctccagcctccagccgccgcagctcctctctaggctccactgctccagccgccgcgcctcctgcctggctgcctcttgcctggctgcctcctctgtcctctccacgactccacttctccagtctgagcagtctccagcgaccagaggcagcgccgcagcgcgctcggccgctcgccgttccgcgcggccgcgcctcctctccagcgtcgcgccgcgcctcctctccagcgccagcccgccaccgcggcaccgccaggcgccctgccggccagccggccagccagagccaggcgcgcaacgcgctcgaccgccgaccgccgaccgcacaccgcagcacgggactacgggagcagccgaggcccgaccgcccgagaaattcaagataaaagattttgaagcattttcaagtcttaagaactcggaagataaatttaccttgcatcatcatctcatgaacgctaactttcgaaaattcaaagaaaagatggtcccgaaaaactctccgtcagaggataaagaagaatcagaaaagcatatggaggaactatgctccaaaatcaaggtgggtgatagatgtgaagttgagcctggtgccaagaggggcactgtaaaatttgttggtagagctgaagcccttggacgtggattctgggttggagtgcaatatgatgagccacttgggaagcatgacggcatggtgaaaggcattcgcttctttgagtgccctcaaggtcatggggcaattgtgaggccagagaaagtaaaggttggcgacttcccggagagagacccatttgaagacgaggacgatgacgagatttgagtgcgtgtgcgtttggaaaagcaaggggaatgtccttgttgaattgcattcgaaacgtgtgtaaaatgaattcggagatttgagtgtgcgcgcttgcttgcatcttcttgggcaatcatagtgatcacatttcaaggcatgctgttacatctctactatttaagcgtgagctaataaattttccctccaacgcagagtatccaaaaaatggggtggattcgaatcctgctcacttgtataaagcgcatgacttctaccactataacttatttctgtctgtgttatataaattagagatattttgtgtgtatgatactaataattttaaaaaatataatatcatttaagcaaggtttacttatatatctgtagaaacagttacatatatgtgggttcttctactagtcctctgacccggaggaaaagatggagattttcgccaacttagagcatctctaacaatacctcaaag

SEQ ID NO: 6506 - DNA, 5581 bp, Zea Mays
gggcggcactcgcggcccaccagaggcccaccgtcgcgcccagccccaaatcccaaccctagctccagcctccagccgccgcagctcctctctaggctccactgctccagccgccgcgcctcctgcctggctgcctcttgcctggctgcctcctctgtcctctccacgactccacttctccagtctgagcagtctccagcgaccagaggcagcgccgcagcgcgctcggccgctcgccgttccgcgcggccgcgcctcctctccagcgtcgcgccgcgcctcctctccagcgccagcccgccaccgcggcaccgccaggcgccctgccggccagccggccagccagagccaggcgcgcaacgcgctcgaccgccgaccgccgaccgcacaccgcagcacgggactacgggagcagccgaggcccgaccgcccgagaaattcaagataaaagattttgaagcattttcaagtcttaagaactcggaagataaatttaccttgcatcatcatctcatgaacggtatgtacaagattattgtatttatagaatttgtatcgatttatttttagactacatatttcttgaatgtttaaattatatcttacttcttgtgtcatattaaacatcatttttttgttatagtcttaacttagtaacccctcttgcatcaatcctggatccgccactggcctagaaatgtatcttaggagacgattgctgccatgtgatcttgtcttagatcctacatgaagcgactaagataccgcacactgaaaaaaacaatgtctggtcgagtacctggtctcatccaccttaagcgacgagctgtccttggacaacttcaatcttgtttccatcagtgtcgctcatgggttgcaggctatcatgcatgcctgcattctccagcaccttttggagcataggctgcttgcgagagctcgatgccatgttgcccttgcatccttgtctgactttgatgctgaggtagtatgtaagctccctcaggtcactcatgcggactccctttccttcttgaaggtgtcgatttattctcttgatttccctgtaataatgaggtcgtcgacatatatgccaaccaccagtcttgattgctcgacgttgtgcgtgtatagtccatgtttgcaggtgcttcttcaagatgctcgacaaaaatgcagaagtaatgtttaggtggcttaacaccgtgccaccatacctcgaattgaatggagtcctcgcctccacgctctgagtagacgcccgatttaggatggacacagccatggtgactgcctcccccaaaaactagccggacatcgtcttcgcctcttcatgatgctcctggccatccccatggcggtctggttccacctcttcactacgtcattctgctgaggcgtgtatgacacagtgagatgctctagatcccctcctcgacgcagtagttggcgaacgtccgcacaatgaactcaccaccgcgatttgtgcgtagcgtccccagttttcttgctggatgaaccaccaagaactgtgagtagacggccactaccttccttgctggatgatccaccaagctccattgtgcggagtccagtcaccaccacgagtggcgatgctgaggtcgaggagcgtttcaatggacaacacgatctgttcaaggtcatcaggaacataatgtagcaacttcttcactacctcctcagcgatgtcaactccgactactcgaagttggttcgcgagattcgaagcctgtccggcgaagtcctccaccatctcgcctggcttgaacgcgaggtcgccgaattccctctgaagccggttggcattcgcctccttgactcgctaagtgcccacacaaacaaaattttatggagtcccatgccttccttgttgccttgcgtgcgagctaggctcgcctacatcttcggcggcaccgcgcggagtagcgccgccagtgtgtccctgtcgtcgcggaagacgttcgtccccggctcagtcgcctccaaaaggcactaagcttggagattgacttgcatcacgagtgaccactgagcactgaccactcggcctagttagtcttcctgagcatggggtagaccgccatcgtagaactccgctcgatgagacacgttccatgacgatctccgtggagttgcgccgtccgcgaggaaaaaacctgcgacagcgaccgcctcctcctttctccgcctccatcttcccgttgactgtacaccgacactggttgaacacttttgctccgatactagttgttagaaccgagggctaccccttggctgcactcttgtcaacgttgaggaagatgaacggggattctacaagaacacagtcacccgagaaacatacattagtttttggtatggcaaaaataaaccacatattctgaactctattcacaacaatgtagactgaaacttaacacacgttcacagccacgattgaccactacacatgacgagcgagttacgcctcacacctgtgtgaaccgtgtcatcccatagctcaacgtgccatgcaagacactcaaccaaccttgcatgcccatgcatacaactgactcctaaacacacgcgtgatcgctaacattctggcccaagcacactgaatgaacgaatgaaaaacaaagtaaaactgaactaaggactataacctctgaacatgccagagttattcaacaaatatcaggtggtgtaccactagagttgtaaattctgtctcttcgcctatcgcatccagagccacatgctcttccaggagagcctgaaaaacgttcatgttgtgcttgtaagtgcttgctattgctatttcctctgctctaaatacagactgggttgataaaggaaaatgctaatcacaacattgcttacatcctcagcaatgagtagcacaccatccttatcctgcacaaacatgggacaactagtcggattaaagccatctgtttagactgttgtagctataatccatagagacaaaaacactatagaagcagtagaagccgatacaaattaaagccaagcgaacaagcatgtacaaactatattgcaccagttgaacaagaaccaactaaccttgagtgcgacgaacagaaaaggatggtgtataaatcatattgtgggcaacatcctgcagatacaaagtgtcagcaatcataagcatgccaacgaagacccaagattgattacttgtaaggggtgtttggttctagggactaaagtttagtacatgtcacatcgaatgtttggatgccaaatataagtattaaatatagtctaattataaaaataattatatagataaagactaaaaaagagacaaattttaagaataattaatctatggttaacaaatatttaatgtagtatcacattagcggattttaaagcaccatctatgattaacaaatatttaatctatgattgattatatagataaagactaaaaaagaatgtatgtgattatggaaagcaccacctcttgctgtataacagaatctgaaacggagagggaaagatgcgtgtaaagagattgtgatatttagaagcaacagatggaatgctttgcttgtgttggtcgtcatcgacctagccactgaaatttgtgctcttgaggacttgcaataagcctcaaaaagtgtggttgtgaagctttagggcctgtttggtaatgcagttttaaaataatataattttaaaataacacagcttataattatacatggcacaaatgctacaatattacattaccatagtaaaaccacgctattgtttaaaatcgaaatgtatttagttacttaaaaaaccgaaatatttgcagagaaaacaaaagaaaattaaggcactaagtggagtttccaaaactcaaaaataccatggttttagataaaccatagtatttaaaactgtattttacctgtactaaccaaatattttttggcttccaataacatgatatcattaaatactatagtattattttaaaactgtaaaaataataaacttccgatacatgttaacggggcagagaagcatgcagtcgtgtaagtcctgcgatcctaactgattatgcactccaatgggctgcggagcacaaaggggagaaaaacaaaaacgagtgggaggtggccgtgggccatgttgctgctgctgacgaggcggcgcgacccatagtaaaggcgtacaacagctcacctccctcgtccagctccagccgccgtcaggcttccgacgcaacttctaactccgttcgcctccaggcgacaccatcgcccgctggcacgccgccacagcaggttaacacaatttggcccggagcttagttgaatcctgcttccgccactgcggacaaccatggcgtcgtcgaagctgcagctgcctgctgacgacagcgtcctcctgctcatcacccactccaatctcaccaccttcgcagcggacatccgcgtctcgcaacagaccaccgtggaggcgctcaaggacaagctctggcgcaagaccggcaccgccgtcgcttccatgcgcctccagctccgcgacgactccggcaccaagatcgccgacctcgacgacgacgccgcgccactcgcggcctacgccccctacaacggctaccggatccatgtcgttgatctcgacccttcctcactcacctcagggggttggttggaagacacttcccttgtcgacaagtacacaatgtccgatgaaacatacgataagctcgacactaactttcgaaaattcaaagaaaagatggtcccgaaaaactctccgtcagaggataaagaagaatcagaaaagcatatggaggaactatgctccaaaatcaaggtgggtgatagatgtgaagttgagcctggtgccaagaggggcactgtaaaatttgttggtagagctgaagcccttggacgtggattctgggttggagtgcaatatgatgagccacttgggaagcatgacggcatggtgaaaggcattcgcttctttgagtgccctcaaggtcatggggcaattgtgaggccagagaaagtaaaggttggcgacttcccggagagagacccatttgaagacgaggacgatgacgagatttgagtgcgtgtgcgtttggaaaagcaaggggaatgtccttgttgaattgcattcgaaacgtgtgtaaaatgaattcggagatttgagtgtgcgcgcttgcttgcatcttcttgggcaatcatagtgatcacatttcaaggcatgctgttacatctctactatttaagcgtgagctaataaattttccctccaacgcagagtatccaaaaaatggggtggattcgaatcctgctcacttgtataaagcgcatgacttctaccactataacttatttctgtctgtgttatataaattagagatattttgtgtgtatgatactaataattttaaaaaatataatatcatttaagcaaggtttacttatatatctgtagaaacagttacatatatgtgggttcttctactagtcctctgacccggaggaaaagatggagattttcgccaacttagagcatctctaacaatacctcaaag

SEQ ID NO: 6507 - DNA, 2219 bp, Zea Mays
gctaaaaaaaaaacagaccaaagaagataaaagtagaaagaaataaaatgtttgtggttgactggtccaaggaatccaagtccaattccaatctctctcacacacacattgtcgcctgccttcccttccttccccagttgagttccccccgcggccccgcccccggtccccttccaccgacccaccatgtcggcgatgaggtgaggttgaggccaggtctactctccgcgaccgtcgccgacgccatcgccaacgagcagtttgctccatcttcgccatctcgcacacgaatacaatacactagttttggtagagatggaggacggcggcaaggcgccggccggcctgggcaccctgcgcgcggtgctcgccatcctccagtggtggggcttcaacgtcaccgtcatcatcatgaacaagtggatcttccagatcacggactagagacttggattgggtgggaaacagggtcaaatagacttatagcgtgtttggtctgagaaacgaggtagttatcatcttttcactactcactttttttgtttgtttttggaatggaatgaattgatccatcatttcaatccttgtaggccaataattagtaataatacgagaaatgagttcattccactaaatttgtggaatgaacatatgatgcacccacaccacctcatctgtaatagattggctcttcgaaccaaacaccccattagattgttactacgtactttggtttggttggtggttagtcaagcagggttcagcagctgtctagtccaggagagttgagagttgctgctcttatgcattttttatgtatttctgggtgatagcagattgtgtatatgaacgtgtaaaatactgttagactactgtttagagagtataatttgagataggagatgagatgagtaggacttctgtagatagcctaacaataagaggttacctactcatctcccatcatcttatgggtggtgtcaagactcaagagccgtgcccttttgatataataagtaagttgctctctcttctctgcagaaactggatttcaagttccctctcaccgtgtcctgcgtccacttcatctgctcttccattggagcttacattgcaatccatgtcctcaaggcgaaacccctgattcaagttgaaccggaggaccgctggaaaaggatatttccaatgtccttcgtcttctgcataaacattgtgctgggaaatgtcagcttgcgctacatcccagtctccttcatgcagacaatcaaatctttcactcctgcaaccacagttattctgcagtggctagtctggagcaagcatttcgagtggcgcatatgggcttcgctggtccctatagttggcggaatactcctgacttcggtgacagagcttagcttcaacattttcggtttctgtgctgccatggttggctgcctggctacgtctacaaagaccatcttggcagagtccctactccatggatacaagtttgacagcattaacacggtgtactacatggcaccctttgccaccatgatactggctctaccagcgatggtgcttgaaggaggaggtgtaatgaactggttctacacacatgattccatcgttcctgcgctgactatcatcctaggttcgggggtgcttgcgttctgccttaacttctccatcttctacgtcatccattcaacaacagcagtgacgttcaacgttgcaggcaaccttaaagtcgcggtggcagtgttagtgtcgtggtcgatcttccggaatccaatctctgcaatgaatgcaatcgggtgtggaatcaccctggttggttgcactttctatggctacgtgaggcatctgatctcgcagcggcaggctgcagccccagggagtctaggaacagcgcaagcaaggaatcagacggagatgattccccttgttgtggacgagaagcaagaaaaggtttagcaatggtgctaggccttctcttcacttgttgaagagagaattatatatgtactcgtgcgtgcgtgtgtggtgagggtagtaaactggaacttcgtacaagcatcgtttcctccttccatttgtgacactattcgccagcatcagaatgtgaaattgaattaagcgcacgccaggaggattgggcttggatgctggggcttcactcccggcaactcgccggcgtgggcacaggactcccaggccaccggcggccgactctc

SEQ ID NO: 6508 - DNA, 3921 bp, Zea Mays
caccagtgtcggcgagggctattcagagaccctcctccgcctcagcgtctcagtggccatgtcggatccacccacccaccaccaacgccactagtagcagccgaggagatagctgcgacggcgactcggtttcggcggcggcggcatgaagaacttcctcaggaagctccatatcggcgagggctcgagcgacggagcctcaacgcccccgcccccgccctctcgcaaaggcggtaccggtaccggtggcggtgttggtggggttcatcatcatcaaccgcaccacgatcaaaggcatcagacctcggcggtatccagttggctcgattcggtgcctaccaggcctccgccgccgattcctgtcgaagcggaggaggagatggagcaggagcggaggcggtctcaagaacaggacgaggtggaggagagggtgataagagagtcgtcagaagcggaggagaggaagcgggagagggagaaggaggaagacgacctggaggcgtaccagattcagctggtgctagagatgagcgcgcgggacaatccggaggagatggagatggaggtcgccaagcagcttagtctgggcttctgccctccacagagatcccctgcggaggtcctcgcggtccgataccggaatttcaatgcccttggctatgacgacaaaatattggatggattttatgatctgttttatgttggaaatgggccagcagcagttactatgccctcttttgctgagctacgagtccagccattttcacataaagtcgattgggaagctgtgttggtccacagaggtgaagaccctgagcttatgaaacttcagcaggaggccttaatcatgaatcatgaacttcattcgagaacttcagaatctgtgggcaatgctttggttaagggacttgcaaatctagttgctagacacatgggtggagtgtttgatcctgagcgcatgtcagcgaaataccagaatatgcttagctacttaagaagtgatattggaagtgtaattgtgccacttggccagctaaaaattggtctagctcgtcatcgtgcactgctgtttaaggttttggctgatggccttgatgtaccttgccgtctcctgaaaggaaagcgatacactggatcagatgatggagctttgaacattgtgaaatttaaagacggaagggaatttattgttgatcttgtgtctgatcctggtacacttattccttcagatgtttctgttttgtccacagaattagacaggaatttcgtctctgataatcaacactttggccaagatgataataccaatctgttgggatcttctcttagcggtgtatcgagctcagcgtatggttcttttgagtatgagttacttgaccgaagatccacttcaagcaatgttggtccttctgatactgatggacctacaactaatctgacaagcaatcaacaaaatatgtcctcaaattcattcgataaactatcagttagcacattcacaagtgaaaataggcctgtcagtaaagaatctacaaatccagattacattattgttggaaaaaacaaagaaaaatatactgcggccgttgattcttcatcatcttcaccctctacaccagatatgggcagcgctccagctgtccggagaatgaaagtgaaggacatttcagagtacatgattaatgctgccaaggaaaatccacaattagttcagaaaatccatgaggttttacttgaaaatggtgttatggcaccacctgacctgttttcagaagattcaatggaagaaccaaaggacctcatcgtgtatgacaccaccctgtttcaaagcaaggatgaaatgaaaaggaggatgaatgagcttgggtcaagggaatacacagatcgtggtcatgatccattgttgcctcatcatcctggacatgaactccaaccaaaagtggctcctcaccgagcacctctggagtcacttaagcctgttgagggtttgggcatttaccacccacatgatatcagagatatagcatctccgtttgtttctcagtacgaaccttctgcacctcctcaggaagcttcatcccaacttacaaagcaattgcctgtcacagctgctgctgttgcaactgctgcagtggtggcatcctctatggttgctgcagccgctttatctaccaatgacgtaaactttgacgtgcctgttgctgctgcagccactgtcactgcagctgcagttgttgccacaactgctgctgttagcaagcaatatgagcactcggatcctggcaatcagctgtttagcgtaccaagtacttctcaaggaaataaatcagttgagaaagctggaggtgacctttgggacaaacaccatgttgaaactgatcatggccaagataattgtctggaccaagaagttcctcaggaagccgaacgaacctctgataaatcaaataaatcaagtgggacagaggatgtgaaatctgatcttgctttggacaatgttgcagagtttgagatccaatgggaagaaatttctattggtgaacggattggccttggatcgtttggagaagtttatagaggagaatggcatggaacagaagttgctgtcaagaagtttttgcaacaggatatttcaagtgatgctctggaagagtttagagctgaggtgcgaataatgaagaggttgcgccatcctaatgttgttctcttcatgggtgccatcactcgtgtgcctaatctttctattgtcactgaatttcttccaagaggcagtttgtttcgtttgattcaccgacccaacaaccagttagatgaaaggaagcgcttaagaatggcacttgatgtggctcgtggtatgaattatctgcataattgttcaccagttatagttcatagagatctgaaatccccgaatctactggtggacaagaattgggttgtgaaggtttgcgattttggtttgtcaagaatgaagaacaataccttcctgtcatcaagatcaacagctggaacagtgtatccaaattgcttgaagtgtgtctaactttttgtttttgggagagtgtacaggcacttgcatttgcctcacttgattatattttgttccaatgttgagtcctgtaccatgtaaattaaaattgtttccatttgttctaagtttttttgctgagctcttatatatttagagtttacctgccgggaatacacttttctgatgtgtagttaatattaatacaattgcatcaggtattaataaacttactctatggtgctccttgaatatggaaaagaaatggaattttgaaggtataattttaattgccctagtacaaaggaaagaactcagcctatgttgtctcaacatagcaggtcctgagccccgctgaaggaggagggttgtgataggtttaacaagctaacgttgaacctagccattctagatggaatatatccaaagttttagcctttaataggaatgaatagaaaacaactatccatgtgcctgaagtcctgaaccttaatttgtggctttatgttgggttttaactctagtctatcctaagttgcttgggacaaaagactttgttgttattgtagtacaaaaggaagagtgagaaaggcaggtctagtgcaggggtgagagctgtctcactgaatcaccaaacaccaggtcgtgggttcaaagcagtctatttgcatttgcggaagaaggcttgcctcgatttatcctttccccagactccactcatgtgtgagcctccagcactaggtcttccctagtataaaaaggaagagttttgatgatagttacagggtttagatgaatggcaaaggtctgaagtacatccttactgtaatatattaaaattatccctaggatcgtgtgtttctttcaatttcttgtgaagatgctatagccgt

SEQ ID NO: 6509 - DNA, 1531 bp, Zea Mays
accgttcagactctcaaactccctcgattgtaataacagagaaaaaaaccatccgccggaggccggagggcagattctccaccatcgcctccactccaccctcactacgcgaatccgcggcgaacccccctctcggattccttctctcctccccgccccgatcgcgtcgtccagagaccgccaggctccggcgcccccgcccgcccgggctcgccgggggtcgggatgccctgctgctcgccgtcgctgctcggagtcgggccgcggattggttgtgcgctgattgggtcacttggggcattgttcaatggggttcttgtgatcaacctagtgattggtctatttgctgttgttgcaatcgagagcagcagccagagacttggccggacatatgctgtccttctcttctttgctgtcgtccttgacgttgcttggtttatactcttctcccatgctatctggactattaatcctgatgagaagtatggtgaactttttgttttctcactcagactagcattgtggatgcaaataattgggttttcagttaggtttttgtcttcattcttatggattcaaatgtatagattaggggcttcttccagcacgccaacatattttgaaaccaaccatgaagcaagaattagtttcttaagccctagatctgattcagttagacggagtcctacggcagatgatatattgggaggttcgatctatgatccttcttactactcgtcactgttcgaggatgtccgaaacaatgcatgcaatcatcagggtgataaacaaagtggtagtaatgacagtggttcaacatctgcaggccagacaccacgacttaaatcttttgctaatgatgtggaaggtggactaaaaagaccgttgaactcctagggataaaacaacgggctcatcttgggaacctaaatcctgtagccaccgttctctttgaagcatagaggtttgcacaccgcagcagtttatttctcagaccagcgggaagggggtgtccaacgaaaggagcttggcaaatactgtaacggcgactgcctgtgttgccgagcatccacagcagcatcggtgccattttggagcaccgttcgtactcagcgagcttgagccggatgtttctgcaaatagctgtccaatgttggtgttgcatatcgacctatgccatgcgatatgtttactgcccatcatgtcccatttttcagacctctcttcctgtttcttttaactaccaaggaaaatgaagcaagtagttcgttagttctttagtcacttagttattttctagctgtaggctggcagttgcttctcttctagcattttggtcattgttcatagcatttgtgttgacaaggaacagatctctagatcagtgaaaggaaacaaatgtaagtttcattctgttctagaaagagctgtgatccctattggatgcatgagttttgttagaaatgttgcagggttttcacacgaaattgttctggacccacaagttatacaagtcaaattagtctatata

SEQ ID NO: 6510 - DNA, 2236 bp, Zea Mays
cctccgtcaatccccgctccactgcctctgcttctccgccgcgtcagggtgtaaaactactcgaaccgatcaccgacgcgacgaaccccgaacccgaaccctccaagccggcaggccggagcagagcgcgctccaagctgaatccccccatctcctatcgccgtcgaaagccgcaggtccattataactttttatgaccttgtctgggatggctgttgctttcaaagcaagtacaagttctgtcacacagcaacattggtcaagtccaacaaaggaccagtgtcaatatggtttcactcatttaagcaggcaaaagtgcagaaaaagagcactgtgtgtgacagctatatcagggaagctagacctagatttcactgatccttcttggaaccaaaagtaccaggaagactggaacaggcgttttagtttgccacatattaatgatatatatgatttggaaccaagaagaactacattctctttgaagaaaaacagaattcccctgggtgatggtgatggctcatcaactgatatgtggaacggttatgtaaataagaatgatagagcccttttgaaggtgataaagtatgcatctcctacttctgctggagctgagtgcattgatcctgattgtagctgggtggaacactgggttcatcgtgcaggtcctcgtaaggagatatattacgaacctgaagaagtaaaggctgccattgttacctgtggagggctctgtcctggtctaaatgatgtcattaggcagatagtatttactttggagacttatggggtgaagaatattgttggaatcccatttggttatcgtggattttttgagaaaggcttaaaagaaatgccgtttcctaggagtctctcgtggaggagctaaaactagtgagattgtagatagcatacaagccagaagaattgacatgctatttgtaattggtggaaatggtagccatgcaggagctaatgctattcatgaggagtgtcgaaagagaaaactgaaagtttcagttgtagcagttccaaagacaattgataatgatatactttttatggataagacgtttggttttgatacagctgtagaagaagctcagcgtgctatcaattctgcctatatagaggcacgtagtgcataccacggaattgggttagtaaaattaatgggaagaagtagtggattcatagccatgcatgcttctctttccagtggacagattgatgtttgcctgatacctgaggtatccttcacacttgatggagaacatggtgtcttgcgacaccttgagcatttacttaatacaaagggattttgtgtggtttgtgttgctgaaggtgcagggcaggatttactgcaaaaatcaaatgcaactgacgcttcaggaaatgtgatacttagtgactttggtgtccacatgcagcagaagatcaagaagcatttcaaggacatcggtgttcccgctgatctaaaatacattgatccaacatatatggttcgggcctgccgggcaaatgcatctgatgctattctctgcaccgtacttgggcaaaatgctgtccatggagcatttgctgggttcagtggcatcacgtcaggtgtttgcaacacacattatgtctaccttcccatcacagaggtcattacaacaccaaagcacgtcaaccccaacagcagaatgtggcaccgctgcctcacatccactggccagccagacttccattgactacttcattaacacctgagagcaaggcgccaggagaatatttaatcccacaagggactgctaacaggaaacttgaataaatctggctaacccaaaattttgtgaggctggaggagctcataacgaaattgccagagccaccccctggtcatccagacgttgtaagcatgcataccctttctattggtttgcaatcccaagtgaaattaaaagttagaagttgtttgtgctgcaaacaattcaccataatcccaccagtacaaaactggctccagccttgtgagatgttttattgatgatgtactatgcataataggcaattggatattcttactgggaagtgcagtgatcagagatgagcttaggtgctgttccaatttggttgcagcgttttgatgtttgtggtgttcgtctcgggaggtcaagtattgtgaacttgtaattctcttcttgaaggtatgttacagcaaatagtgctcatgcctatagattagaaaaaaaaa

SEQ ID NO: 6511 - DNA, 2433 bp, Zea Mays
ccgcgtcagaagcaccaaccgagccatggttcacgggctgcgggctgcgggctgcgggctgcggcggccgacgggaccggtgtgagcaggcgaccacgaaggggcccacccgtcggtggctgcctgcccccgctcgtcaacaactaccccgaaagccgccaagcggctgctgcgcaaggtgcgaaaggcaccttccctgcccgattggcgatttaagtggtgggggagggaaggccgatggtcagtgaaagagaggtaggtggccggacggtggtggcatcgccaattcaactccgcatctgaatcggcactcggcagcgcgccagctccatagtgtaggaggagatggcgctcacaagaatcggtcttgctggccttgcggtcatggggcagaaccttgccctcaacattgcagagaaagggttccccatctctgtgtacaacaggacaacctccaaggtggacgagaccgtgcagcgtgccaaggcagaaggaaaccttcccgtctacggcttccatgaccccgcgtcctttgtgaagtccattcagaagccacgggtggtgatcatgctcgtcaaggccggcgcgccagttgaccagaccatcgcgacgctcgcagctcacttggagcagggcgactgcatcatcgatggggggaacgagtggtacgagaacacggagaggagggagaaggccatggaggagcgcggcctcctgtatcttggcatgggtgtctctggaggagaggagggtgcccgcaacggcccgtccttgatgcccggaggctcgttcgaggcttacaagtacgtcgaagacattgtcctcaaggtggctgctcaggtccctgacagtggcccgtgtgtcacgtacattggcaaaggtggatcgggcaactttgtcaagatggttcacaacggaatcgagtatggcgatatgcagctgatttccgaggcatacgacgttctcaagtcggtcggtaagctcaccaacagtgagctgcaccaggtgttctccgagtggaacaagggcgagctcctgagcttcttgatcgagatcacggccgacatctttggcatcaaggacgagcatggcgatggctacctggtggacaaggtccttgacaagaccgggatgaaagggacagggaagtggacggtgcagcaggccgccgagctgtcggtggccgctcctacgatcgaggcgtccttggactcgaggttcctgagcgggctgaaggacgagcgggtggaggcctccaagatcttccagggtgactactactccaccggctcgccggtggacaaggcgcagctggtggaggacgtgaggcaggccctgtacgcgtccaagatctgcagctacgcgcagggcatgaacatcatcaaggccaagagcgcggagaaaggctgggggctcaacctcggcgagctggccaggatctggaagggcgggtgcatcatccgcgccatcttcctggaccgcatcaagaaggcctacgacaggaacccgggcctcgccagcctgctcgtagaccccgagttcgcgcaggagatcatggacaggcaggcggcgtggcgcagggtggtgtgcctcgccatcaacaacggcgtcagcaccccgggaatgtccgctagcctggcctacttcgactcctaccgcagggacaggctgcctgccaacctggtgcaggcccagagggactacttcggggctcacacctacgagagggtcgacatgcctggctctttccacaccgagtggttcaagattgcgcgcaacatctccaacaactgatgagctgctcaacggatggcatgcccggtgttgactactccagtcgaactagcgaaagagttcagcttggtcgccgcagaaaacctccattgcctcgatgtgcgtccacattggagaggtcttcacgaaaggaggaggatgagttgagaagccatcaggtgttgtgattgaaacaaacttggacattggtctaccctcacaagcttttgggtgcagccagcagtgcaatctttgagctagtctccataactttgcttgcatggatgaagcacggtgatcatctcctgtgttaggggtccatgttcctcttctggtgcagccagcagtgttatctttgagctagtctccatagctttacttggcatagatgaagcacgatgatcatccctctgtattagggggtccatgttcctcttctggtgcagccaacagtgttatccttgagctagtcttcatagttttgcttgccgtggatgaagcacgatgatcatctcgatcctgtattaggagtccatgttcctcctccccctccaacgcagaaaatggcccaaaagcgatgtcctggttaatcccgtcgcagcgtgcatcagttgtgggggtctgcatgacaggatggcacctcaacgatccaaatgatcc

SEQ ID NO: 6512 - DNA, 874 bp, Zea Mays
atcgccagcctcgagatcgatctctctcaagggaccttgcttgccgccacccccaccgcagttacagttatagctagggatctgaggactagctgatggacagcaggagggagtcctcggagaccttgaggtatgaagtgactgggataaggccagagtacctgagggacgcaatgccgctcaaggttgcgcagagaagaatccaggaaatcctgtgcaacggggagtcactgtggaagttacgcccaagaagctatggtagggcaaaggtactcgttggtcatggcctcgaccatgaccttgagcgcctagggttagagtacccggcattcatgatcagggatactgcaaaatacccaccactaatgaagactagcaagctgagtaactccctcaagtaccttacacaagcatacctcgggtatgacatccatactggcattcaggacccctacgaggactgcgtcgcaacaatgaggctgtacatcaggatgagatcacaggctcaccagagagattacaactccggctctggcgaggcccagaacaactatccagcctggaggcagagggagctcgacaggatgagcccagaagaactcctggcactttcagcatcagactactactgctggtgcctggattactaaaccgatcggcttataaggaaaataaggcaggcgaacgttgtcggttgacatgttccgtctatggcgatcatctttagatgtacaagtagcttgcggctttgctatattgggggttaattaaagcgtataaacaaaggattctatataaatgtattgatgccttagatctgtataagaagcaatatcatgatttatgatgcatgtggaaagaggattttcctgct

SEQ ID NO: 6513 - DNA, 1497 bp, Zea Mays
atgaaaaatcacgatatcgcatcgcaggaaacacatgctcatccgttcccttactttaagccgacaccgatcgaaggcacacaaacgtactactagtacaaaacacaaacaaataaacagaggaataaaaaaaacgacagaaagcaacgccgaatcccgtacgcgatccaagcaaaccgataaaaaatgaacgaattcaaaccgtagcttaaactattcccatctccctgttccttgtgtcaccctcgggccgaaaacctccccttctgggaagcaccctgctttgaccacgtttggtttttgcccttttggcctttctctatccgtagatcgagccccgtccgtcgtcgtcgcggcggcatataaatagccaagctcagcccagccctcccagtccacacagcaaaaccacccgcgctccgccaatccagagagcgagccagcccgagctcacacagcagcgagctcggtcttctcgccaggacacgaacacgaccccagcaggcggcaggcaagccacgctctctcgacgggcggacgttaatcgagacatggggcgctctccgtgctgcgagaagatggggctgaagaggggtccgtggacggccgaggaggacaggattctggtggcgcacgtcgagcgccacggccacagcaactggcgcgcgctgcccaagcaggcgggcctgctccgctgcggcaagagctgccgcctccgctggatcaactacctgcgccccgacatcaagcgcggcaacttcagccgggaggaggaggacgccatcatacagctccaccaaatgctcggcaacagatggtcgacaatcgctgccaggctgccggggaggacggacaacgagatcaagaacgtctggcacacccacctcaagaagcgcctggagccaaagccagccagccagcaggcgcccaagcgcaagcccacgaagaagcagcagccgcagccggagcccgagcccgtaacgacgctcgaggggccggccggagccgtgccgccggtggcgccggagcggtcactctccacgacgacgtcgaccaccaccagcaccgcggactactcgcccgcctcgtcgctggagaacgcgggcgacagcttcacctcggaggaggactactaccagatcgacgacagcttctggtccgagacgctggccatgacgacgacggtggacagcttcgagtccggggtgcagcaggcggagggcagcttcggcaagtcggcggcggcgccgtcgtcgaccaacgacgacatggacttctggctcaagctgttcatgcaggccagcgacatgcagaatttgccccagattatttaggcgggaaacggacctagacggtttgttatctctcggctgatgatgatattcattgggcgcgcgctcacgattctttgaatcttcgttctgctccgttttcggtggatgtatatatatcccactgaaaccttgtgaagcggaaagcaattgcttcgtaaaaaga

SEQ ID NO: 6514 - DNA, 782 bp, Zea Mays
gttggcatctatcattttgcaaatttgcaccagcaacagaacatgtacatggcgaagacaaatcattaggtggcgacttttttctcaccacggggggtattgccagcaactggttaatgaactgttatggctgaagtgaaccattaatatagagtttgagttattctgtgttgtcacagacaaccgtatttacacacacagtatctcgcccgctcctccaaggctcaatatgactttgtttcacattgtaacatcctcaacaatgattttacttcttacaacaaacactactacggatgtcctgatgataagacattccagcacatggcatctgtgtatagtcggtctcactataacatgtctttgagcaaagaatttgaaggagggataacaaatggagcattctggtactacgtaggttgtgtatttgttggctttgaatcaaacaacatcattgcttgtggtccagattgcaagaacgggactgctaagcaagctaagatttcaatggcctattccttcatacacaggccattgagcgacgaggaacgccgtgtcacttgcaatgaccagagacgggaggtcttcgttgcccaggacatcgctaacaaggaaattgaccgcaccgttgcattcgacaaggtatcttcgaactcaagtcggcatcacagtagaccagaataatacgaaggttggtacagcgccgaaggtgtgagcaggaaagcttcggcgtagcagcaaaaagtgaaaccgacttaaagatgaaaaggctatttagacct

SEQ ID NO: 6515 - DNA, 2264 bp, Zea Mays
cgcggcgacgccctccaacaaaaccgaagaggcgaggaaggaacacatgctctctccgctgttcttgctgagttgttgtggacaaaaagagcacgaaagtgggtagagaaaacggggggcaagccaaccacactcgcagccagcctgcccgctcgcccgcccgccattcttgccgattcgagtcgacgtcacgcctccggcgcccccttcggttgtcacctcgggggtcgcggattggtggaggggaggatttgagcggcgcggccatggatacaacatctagggccgccaagatcccgtcgctccaccagacggagatcaactgggataacctcgacaagaccaagctctacgtggtgggcgcaggcatgttcagcggggtcaccgtggcgctgtaccctgtctcggtggtcaagacccggatgcaggttgcctctggggacgccatggggaggaacgcactggctaccttcaagaacatccttaaggtggacggcgtgccagggctgtaccgggggtttcctactgttatcattggggctgtaccaactaggatcatcttcctcacggcgcttgagacaaccaaagcagcctctctcaagcttgttgagcccttcaagctgtcagagccggtgcaggctgcctttgccaatggccttgccggtctgtcggcatctacatgttcgcaggctatttttgtcccaattgatgtggtatgcctctcatttgcctccgacatgatgttgtacagacaaaagttatcttacagtaagttgctgttaaatgttaattagaattctagactactgtgctcactgttttgtgcattggaatgtttcagatcagccagaaattgatggttcaagggtattctggtaatgtcagatacaaaggtggaatagatgttgctcgcaaggtcataaaggctgatggcattagggggctctacagaggatttggactctctgttatgacctatgcaccatcgagtgctgtgtggtgggcgagttatggttctagccagcgcataatttggagtgcccttggccatttgcataacaaagaagaggctcctagccaattgaaaatagttggtgttcaagcatcaggggggatttttgctggtgctgtgacctcttttgttacgactcccatagatacaatcaagaccaggctgcagctgttccttctgctgacaaaccaggaccagtttgtcatggtttctgttataaggtaaaaaaaaggaaacttccatttggaaaacttgatatctatgacatcattatttatagtaacaaaagttagcacattcagactgagtaaagtatgccaggaatatgtcatgcatttttatgacaaatttcacatatctccaaatgttacatgttaagtttgtagcggtaaactgataatataactaccaaccctgaaagttctcacaaggcacaactctatattttgacagttgtgctttctctccctctgcatttgttactacagatgattacattgaattttgtttcttttcatttaggttatggataatgaaaataagccaaaagctggggaagttgttaaaagattgattgctgaagatggatggaaaggtttgtacagagggttgggtccaagatttttcagctcatcagcttggggtacctcaatgatagtatgctacgagtacctgaagcgcttgtgtgctaaagttgaagaggtctgacttctgttcttactatcctggaagttttgtattagcagaagtgaaataatgctgtatgtcgacaacattgacaccaccggaagcttcagttcttgctgacgtaggtgaaagcattcaacatggatgtttgatggtgtacttcatttgatgctagacaatagtctttacaaactttgcttctctgggctatattctcaaaaaaatggaggggcctatatttttttgctcatatgatgaatatgggttaggcggattattttaggtgagtataaacgatatcagatgtacacacttctcattcttttatacatgaaggctgttttagcgaggctgtatgattatgaccagtctggatgattgagaccagttgtaatgacacggaacgatgtttccgggagatgctgttttgaccttttttttttcctcatgcggtttcagttatctttttgatctgcccttggaatgcaaaaatgctgaacacgttgctgcacccatattttgagaagcaaatcgtaagcaaactggaaaaccgtttctgacagac

SEQ ID NO: 6516 - DNA, 1070 bp, Zea Mays
ccccgtgctgcgcagatagcgtggcgccaaaccagcgccgtccaactgaaccagtggacagggctcgaggaggcagccccgcactacactactcgagggaagcagggaaccgtcgaaccgaggccccgtccgtcccaactcacgtttagcaagaagaaggacggtgccaataaggaggccacagcggccaagccgaagaaggccgcggcgctgccgctgccggagatgatgcaggaggagatcatcccgccgctgaaggccgccttggaggcggaggaggacgtgtcccaggtccagctcgccttcgaaaacaacacgctagagggatccttcataaaggacgacgtcccttattgtttctgggccttctttccaaaaggagacctcacaggacccaagggcttcgcgctatcgtcctacagcaacgaggtgagcaccatcgagccgttcctgatcgacgagaagagggtaacggccaagtacgtggtgttctgggtttacaagaggctggctgggcaaggcatccttccggtctggaaggaagaggagggggaggatcatcaggacgccaagtagaacacacgcaggaggcaggagggtgctgctgtgaacctacacacagtcatcatgtctgaaactgttaaagttcgtctgctaatatatatacagatgctaagagctgctgagacacatgcatttcagcatttggcttctgctgcataggcgcatagccattcgcagtcgcaatcccttcgtaatcttgtgctgcagaagccagtcaaatttgttgaacaatcgaaaccttcgtgggccgggatcgacgacgagtcccgtctgaaagctatggtatctgaatattattatttgttatcgccagtcctgcgtgccgtactctatccgtccagcccttcgccatctgtttagaatagaataccttcatgtaaatcaagagatttcagagattattaatttaagcgaaaactgttatcttattgttcggttgcatggtattctgctccctcacaattttaaatggtaaaaaaaagtaaaaaaatatacataaataaaga

SEQ ID NO: 6517 - DNA, 1095 bp, Zea Mays
gtgctgcgcagatagcgtggcgccaaaccagcgccgtccaactgaaccagtggacagggctcgaggaggcagccccgcactacactactcgagggaagcagggaaccgtcgaaccgaggccccgtccgtcccaactcacgtgtacgtactcctcctgtcctgctgactgatccgcatgctgccggtcgtccaccgccgatcgtgaaacgcaaccgtcgccgaagaaggccgcggcgctgccgctgccggagatgatgcaggaggagatcatcccgccgctgaaggccgccttggaggcggaggaggacgtgtcccaggtccagctcgccttcgaaaacaacacgtagagggatccttcataaaggacgacgtcccttattgtttctgggccttctttccaaaaggagacctcacaggacccaagggcttcgcgctatcgtcctacagcaacgaggtgagcaccatcgagccgttcctgatcgacgagaagagggtaacggccaagtacgtggtgttctgggtttacaagaggctggctgggcaaggcatccttccggtctggaaggaagaggagggggaggatcatcaggacgccaagtagaacacacgcaggaggcaggagggtgctgctgtgaacctacacacagtcatcatgtctgaaactgttaaagttcgtctgctaatatatatacagatgctaagagctgctgagacacatgcatttcagcatttggcttctgctgcataggcgcatagccattcgcagtcgcaatcccttcgtaatcttgtgctgcagaagccagtcaaatttgttgaacaatcgaaaccttcgtgggccgggatcgacgacgagtcccgtctgaaagctatggtatctgaatattattatttgttatcgccagtcctgcgtgccgtactctatccgtccagcccttcgccatctgtttagaatagaataccttcatgtaaatcaagagatttcagagattattaatttaagcgaaaactgttatcttattgttcggttgcatggtattctgctccctcacaattttaaatggtaaaaaaaagtaaaaaaatatacataaataaaga

SEQ ID NO: 6518 - DNA, 1573 bp, Zea Mays
gaacggtggaagagaagtggagcaccagcgaaccgcatatgctcggggttcttcgtcgcgcagccctcgccgcagcgtcatcgccggcggcggacctccgacagtttcagtgtgcttaccatagaagcagtgagagattatcacctatccgagagaagaccaagaagtttcatatggtcttaattgggctattgctggaaaaggtgtcattgtgaaagataaggtcctccataacttggaaacatctgagcttcagaaaggtggcgctacttaccctgactttttgtctggtataccacttcatgttagaggagatgttattggtggtgtccctggtgtttctaaagctcaatttgcaaagcttctaaaactggtgacgttccatctttcatccatctcgtgtctatatgttcaagatggcgccattggttcctcagcagaatgtgatgcaaaggttcgggtcattagtgataatccctctgctgttatgttactgtcgaatgtcctttggaaaataccagatcgtgcgatttcccatgacacatcccctttgactatatatgctaccagttcaataagtaacaacgttaagactgttcttggttctggaacacaatatgctaatggatttgctgtggcggatattgaacgatcatctctaatcctatgcggtaaagcatttgctgattcagctatcgtgaaagatgcacttactgctatgacagccccaatattgtctgcaagaggaggcctccctgttccaggatgtggaaatcatgatgtcctgcgtagaaatccacaatgctctattgtccattgactgtggtgcagtcatatcttccaaggggtctactgtgcttttcccaacaaaggcaagcagggagcagaaactgcttaccaaaccaactgcagtaattatcgtatcatctgatagctctggcgccataccatctgtatgtaagctctctcctggccaggctgcctaccatttcttggctggatatcacgatggaaaatttgtcccagcatacaacagagccccctctcctgctgacccacttgcacttgcaagttctttattctcacatttgaaagaagatgatacaccatcgtatctgatcaacgctaagcactctggaaagtacattgacggcaatgggtttatgaaattattaaagctggcactatctcacgatcttcctgacatcaaaactgaaggctctagagttggggaactcaaggggaagtacaggagctttctatccagcaagtttggccaatgtttacccgaggaattctctttttaggagatacaccctgaggttgcaatgaacatgtatatttactggcataggtttacattttggtttgaaaaggtgtcagtattcccattctgtctcagtttcaatgtaatactctattaccttacattgcatctttccgcctcctggtgtttggatatactgacgtaacgacaatgtagctagtacctacatgcatgaattgtcttgtgcactccgcttcagtcaaattttgttaagcagcagaaaattggaaactctcagtatacatg

SEQ ID NO: 6519 - DNA, 1174 bp, Zea Mays
tttcgacttggtctaaagcgtgttccatgtgccttgagccgataaccacacaggattttatctgtctgcacacgccagctatttaatgtggccatcttgagaactatactagcgactacaccctacaggtgttggtaggctactgcgccgtgtacatcttcatgcagaccttcatgatcccaggaacgatattcatgtcactgcttgctggtgctctgtttgggcagctccggggcgtggccctggtagtcttcgccgccactgctggcgcttcttcgtgctatttcctgtcgaagatgattgggaagccactggtgttcacgctgtggccagataaactcagcttcttccagagacaggttgctaaaagaagagagaagctcttgaattacatgcttttcctcagggtgaccccaacattgccaaataccttcatcaacttggcttcaccgatagtagatgtcccctaccacatattcttactgggaactctcattggccttatcccagcttcttatgtgactgtcagggctggaatcgctcttggagaattaacttcgctaagcgacctttacgacacccagtcgatagcgctgctattcctgatcggtgttgtttcagtcacaccagcattgttgggcaaggacgaggcacaagaaaaaccatcagaaatggctgtaggcgcgtcgtgatcaccaaagcaccgagcacctgtacatatcaacatgcagccatgcagtggcttcattagttcagatcgacgggcccgtgtggctggatgacaaaaacggttcgcatggctactacacagcttggataggccattcagcacattatgattatgaacgattgaatgaatctgggaagcagaatgcccgttccacaagctgctctgatgtgtaaacgagtagtgctgttcggataggcctggcatttagtctaatccctgtttatattgaccagattcattcaatccatattcagtggttcaaagataatgccctgtccagctgctgtgttcctcaatgtctttctccatttctaatttcccttctgtgcctgattgcctactggttcttttgtgatccgcatcacttaggcatttggcaagtgatgatgcataatgccttccggtcggtaggaaacagtagagcttgtttcctccctttccatg

SEQ ID NO: 6520 - DNA, 1332 bp, Zea Mays
gttgggctcttggcctagaaaagcaaagtgagggacgagaaagggagggaagtgtgaaggtaggagagagagagagggagccaagggaagctctcttctttcttcctcctcctcgtcctctcgaattccgtctcttgtctctgtcctcctcgctcggcttccccggttcttgagaggggaaataggaggcggagccgaggagagggatggggagggacgagaggttcccagtgtgggaggccgcgctcggcgctggggtcgccgccgccttcgccgctgggctcgtcggggtttacctttccatgccggactccgactacagcttcctcaagctgccactggccatcttgagaactatactagcgactacaccctacaggtgttgctccggggcgtggccctggtagtcttcgccgccactgctggcgcttcttcgtgctatttcctgtcgaagatgattgggaagccactggtgttcacgctgtggccagataaactcagcttcttccagagacaggttgctaaaagaagagagaagctcttgaattacatgcttttcctcagggtgaccccaacattgccaaataccttcatcaacttggcttcaccgatagtagatgtcccctaccacatattcttactgggaactctcattggccttatcccagcttcttatgtgactgtcagggctggaatcgctcttggagaattaacttcgctaagcgacctttacgacacccagtcgatagcgctgctattcctgatcggtgttgtttcagtcacaccagcattgttgggcaaggacgaggcacaagaaaaaccatcagaaatggctgtaggcgcgtcgtgatcaccaaagcaccgagcacctgtacatatcaacatgcagccatgcagtggcttcattagttcagatcgacgggcccgtgtggctggatgacaaaaacggttcgcatggctactacacagcttggataggccattcagcacattatgattatgaacgattgaatgaatctgggaagcagaatgcccgttccacaagctgctctgatgtgtaaacgagtagtgctgttcggataggcctggcatttagtctaatccctgtttatattgaccagattcattcaatccatattcagtggttcaaagataatgccctgtccagctgctgtgttcctcaatgtctttctccatttctaatttcccttctgtgcctgattgcctactggttcttttgtgatccgcatcacttaggcatttggcaagtgatgatgcataatgccttccggtcggtaggaaacagtagagcttgtttcctccctttccatg

SEQ ID NO: 6521 - DNA, 1693 bp, Zea Mays
ggaacgtgcaagctagaagattgctgctgctggagactggtggtagaaacgagcatccccagccacctagacacgctcctcctactcctagtcaggagaatgagaagacgaagcccaacagacacggacgaccccagaaaaaaccaagacatgatccaactagaaattcaaaaggggcacctgctcctaaagcctggccatcaccatctgcttctggatctcatcatccatcggcagcgcctccccgaccgcatagacactcctccagagagtacagcttggtcgctgcagggagtgcagtttttcttgtcatggctgcagcttgccagcttctgttatgtactgtcgagtcaagaaggtgggcaccgtcaggcggccatgggccacagggttaagcggccagctgcagcgagcattcgtaacaggtgtacctgcgttgaaacgatctgagctggaagcagcctgcgaggacttcagcaacatagttggctctacgcctagctgcatgcatgctgtacaagggtacattatcgagtggagttgaaatagcagttgtgttaacatccgccaaggaatggtcaaaacaatgtgaaacccactacaggaacaaggaagatcaaccttttaccagagcaatggttttcgaatacgcgctatgagaagccgatcaccgattggactgggcggcccggctgaggatatccatgggggtcgcttactgtctggagcacatgcaccagctgaaccacctgttgtgccaaggaaccttgactccagcactatatacctcactgatggcttcgctgcaaaggtctcggacactgccaccaccaagggatcggattccagctcaaccgctgatgacgagctctcctcggtttcaggcatagatgccatggttcatcagtatggcatgctattgctggagagactaaccggaaaagttgcctactccgaagaagacgacgacgacggggtttcactggagcacttggcgtctcgctacttggatgatggcagcatgccccttgcggagctgattgacccgagcctcggttggttccctcaagaagccgcgcacgcactgtgcgaggtcgcaaggtcttgggttgggtggacccagaccccaacaagagaccactgatggtacaggtggctgctaggatgaaggagatcgcaattcgcaaggtcttgcgtggacccagacctcaacaagagatcgaccacggatggtacaggtggctgctaggatgaaggagatcaccgcgctggggccgggcctgagggagcgactcccaaggtgtcgccgctctggtgggcagagctggagatcatgtcatctgactgaaactagcttatgcatgcacttatccattctcaatctcctcccgctgtcactggcaattctttggtttgttgtgttgtggttgcggagcctgaagcaaagttccatcattccttggtatttgaggtgtcattttctttctttcttgatagcattgcgtacgtgtgtatatattataatcatcagcagcagcgttgtttcagcagactgactgtaaaagtgagaaggcagcaaaaagggaatacttatgatcgtgctcaatgccggcgttggaacggcttgatttggtcacagtagtttttttaatgataacatatttggtgttaatgagagtttggtgtatatggt

SEQ ID NO: 6522 - DNA, 1867 bp, Zea Mays
aacgtgcaagctagaagattgctgctgctggagactggtggtagaaacgagcatccccagccacctagacacgctcctcctactcctagtcaggagaatgagaagacgaagcccaacagacacggacgaccccagaaaaaaccaagacatgatccaactagaaattcaaaaggggcacctgctcctaaagcctggccatcaccatctgcttctggatctcatcatccatcggcagcgcctccccgaccgcatagacactcctccagagagtacagcttggtcgctgcagggagtgcagtttttcttgtcatggctgcagcttgccagcttctgttatgtactgtcgagtcaagaaggtgggcaccgtcaggcggccatgggccacagggttaagcggccagctgcagcgagcattcgtaacaggtgtacctgcgttgaaacgatctgagctggaagcagcctgcgaggacttcagcaacatagttggctctacgcctagctgcatgcatgctgtacaagggtacattatcgagtggagttgaaatagcagttgtgttaacatccgccaaggaatggtcaaaacaatgtgaaacccactacaggaacaaggtagcgtaagcatgctactttacctcacatattctcctttgttttgttttgttaaaaaaaaaaaagagaaaagactgcagacttgtaactgaatctccatttgcttgatcacaccacaagtttatctcaagttagccacaagaatttcatgaatctactcggctattgctaggaagatcaaccttttaccagagcaatggttttcgaatacgcgctatgttagagaagccgatcaccgattggactgggcggcccggctgaggatatccatgggggtcgcttactgtctggagcacatgcaccagctgaaccacctgttgtgccaaggaaccttgactccagcactatatacctcactgatggcttcgctgcaaaggtctcggacactgccaccaccaagggatcggattccagctcaaccgctgatgacgagctctcctcggtttcaggcatagatgccatggttcatcagtatggcatgctattgctggagagactaaccggaaaagttgcctactccgaagaagacgacgacgacggggtttcactggagcacttggcgtctcgctacttggatgatggcagcatgccccttgcggagctgattgacccgagcctcggttggttccctcaagaagccgcgcacgcactgtgcgaggtcgcaaggtcttgggttgggtggacccagaccccaacaagagaccactgatggtacaggtggctgctaggatgaaggagatcgcaattcgcaaggtcttgcgtggacccagacctcaacaagagatcgaccacggatggtacaggtggctgctaggatgaaggagatcaccgcgctggggccgggcctgagggagcgactcccaaggtgtcgccgctctggtgggcagagctggagatcatgtcatctgactgaaactagcttatgcatgcacttatccattctcaatctcctcccgctgtcactggcaattctttggtttgttgtgttgtggttgcggagcctgaagcaaagttccatcattccttggtatttgaggtgtcattttctttctttcttgatagcattgcgtacgtgtgtatatattataatcatcagcagcagcgttgtttcagcagactgactgtaaaagtgagaaggcagcaaaaagggaatacttatgatcgtgctcaatgccggcgttggaacggcttgatttggtcacagtagtttttttaatgataacatatttggtgttaatgagagtttggtgtatatggt

SEQ ID NO: 6523 - DNA, 2260 bp, Zea Mays
cgggaaacgtcaaaaaagtcactcgcgactcgcgagttggaactctggcgtccgccatcggcccatcgccactcgtcgtcttcctcgctcgcacacccgtcccatccagtttttaaatggcgacggcgatgatgactatgcgacgcgcggcggcgctcggcgcccgacacatcccgcccgccgccgccttctcccgccacatgagtgcggacgcgagcgccgcgatggagaagatccgcgccgcgggtctgctcaagacgcaggggctcatcgccggacagtgggtcgacgcatacgatggcaagaccatcgaggtgcaaaatccagcaactggtgaggtccttgcaaacgtgtcctttatgggcagcagagaaacatctgatgctattgcttctgctcacagtacattctattgtacgatctaattatttcacacaaggaagagcttgcacttctcatgacactggagcaggggaaacctatgaaagaagcccttggtgaggtcaattatggtgcaagtttcatagaatattttgcagaggaagcaaagcgcatatatgcctgttggggtagttggagctattacaccatggaattttccattagcaatgataacccgaaaggttggaccagctttggcctgtggctgcactgttgttgtcaagccatcagagttcacacctctgacatcattagctgcagcagatcttgctcttcaagctggaataccagcgggtgcactaaatgttgtgatgggcaatgctcctgagataggtgatgcattactgcagagtacacaggtcagaaagattacgttcactggatcaacagctgttggcaaaaaactgatggctgaatctgcaaatactgtgaaaaaggtctctttggaacttggtgggaatgcaccttgcattgtttttgatgatgcagacattgatgttgctgttaaaggcagtcttgctgccaagttccgtaacagtggacagacatgtgtttgtgcaaacaggatattggtgcaagaaggtatctacgagaagtttgcatctgcattcatcaaggctgttcagagtttgaaggttgggaatgggctagaagagagtacatctcagggtcctctgattaacgaagctgctgttcaaaaggtggagaagttcataaatgacgcgacttcaaaggtaatctcaaatcatctaagaatgtgcattttcccttccacaatgggagggttcacaaaaggaaaaaaaggaactggactgatttcctgcttctaggacgtgttggtctatctgcagttctgcactcaggacagaccagtttcttgaatttcttttggctgagatcagatcaacctgaattggttaatatggagcaaatgtcatgctaggtggtaaaagacacagcctggggatgtcattttatgagccaactgtagtagggaatgtcagcaatgatatgcttcttttcagagaagaagtttttggtccagttgcaccccttataccattcaaaactgaggaagaagcagtccatatggccaacgatacaaacgcaggcttagctgcatacatatttaccaagagcatacctcgttcatggcgtgtatccgaatctcttgaatacggcttagttggggtaaacgaggggattatttcaacagaggtggcaccatttggcggagtaaagcagtctggtcttgggagagaaggatcgaagtacggcgtcgacgaatacttggagctcaagtacatctgcatgggcaacttgggttgagtcatgaaatcggcctcaggctagaaacgcatggaagagatgatgaaccgagagaccaagaaggcaggcgtctagctacaagaccggaggaacatggctgaaaggggccggccactggttgtgggggagcagttttcgaataaagcgaataagccgcggaacatgaacaaaagaagccgaaatgagttgtaaatgacgtgaactataaagtatggcttcgcctccggacttttgtatacgtaatcatggcactacttgtctatagtgtctccaaagacgtccatgttacagaataaaagcgtatagggtggatgctacgttacaggctgtcggtggtatgtacacctcgcctgattcctgacgaaataaagctggatactgcattcttgcggctcttgcctgcaggggtaacatggtggttctagtagcttcgccgatctttcaatcaggctgctggtatattgaatgttaccatgcatagttaccagat

SEQ ID NO: 6524 - DNA, 2775 bp, Zea Mays
tctagaaggcggggctctccttctgcagaaaaagagagagaattaaaaaatattcctctacaaataggtaagtgtaactaaggaaagtaatcctctgatcctatcgctaccaccttcaacccggtgtccttctccttcactcctacttggcactttgacagagacaaaaaccaaacccgcggcgcctgtcgtcgctccttcgttctcgccgctgccgcactcccgacggccaccttaacaagcctctggcggaggaccaaatactctcgcgatcgccgtagcgccaccgcgtcgcccaatccgttgggagccgtcgcgcgatgcaggcggacgagcaggcggaggcgccgcgccgcgccaaggaggccggcaacgacgcctaccgcaagtccttgctcgaggaggccgtggagcactacaccctcggcgcgctccttgaccccagtgacatcgccttcctcaccaatcgcgccgccgcctacctccgcatgggcaagtacgaggagtgcgtgagggactgcgatgaggccgtgaagcgcggcagggagctcagctccggcagcgagctgatcgcgaaggcgctgtctcggaaggcgtcggcgctgctcgagctcgcgtgctgcgccgcagactacgcaccggctatcggcgccctcaagctgtcgctggccgaaaattacagcgaggagacgctcgagaagctcaacgacgcggagagcgtgaggaaggaggttgaggaacaggagcgattggatcaggaggccgccaaccaatgccgcgaggaaggcaatgaattttttaggcagaagaaatacaatgaagcagcaatacaatacacacgagctataaaaatgaacccaaaggatccaagagtaagcatattggttgttaccctgattttccttctcaagtaaaggtaattccagaacactagtaaagtagtactatcttcagtcaaatatagatgattttcaggcaagaaaacaagaagattataagccaactgtcccatgtctaaacatcaagtaaatatgactggaggtggtacccttttttttttttgaaatttctaagatttctgataaattgaattttttcattggtaaaacatcattaatgataactcttattttccatgcaccttggctgtaaaaacattctctggagttgactttttttttcctttggcactccttgttgtagtaatttgtttagtttatgactgatcttacaggcatttagcaacagagctcaatgccacatccatctgggagcctttcctcaaggtcttgaggatgccgagaaatgcattgaactagatccaacttttctgaagggctatgtgcgtaaagctaaagtccagttcctgatggaaagttatgaaaatgctttggcaacttacctagagggtctgaagtgtgacccaaataatatggaggttctggatggcttaagaagggtggtggtccaaacactgtacaccagcagaggaggagtggggtgatgacttctgagtgtcaatgcaacaccaaggacattgacgagtcatccgccgagaggctgtacgacgcagtgaagtacaccacggacaacatgatgctgatccaggtcccagtgttaggaacaacgaaggaattctggtgattatctgacaaagcgactaggatcagcagaaaacttgcattgatactgaggagccaccactccgtcggcaagtacctagctgctcctctgcaggtgtccaacatctggattgggagcaatgggagtgtcaagctaaggggggtcagtttcactggtcaaggcttcagcactgagcgtgtgagagatgactacaaacgcatgtccaggatcctgatggcgttaattactctctcgggtggggacagaagcaaattgcctccggactacaaagagttcctcctgctcttggaatcggacacccttacaatggaagatgaattcttgattgtaaacaatgctgcactgctgcccataaaaaaccgcactgaggtctttctgatgctacacgatagaattgtcgattatcttgggagtacggacaaaacgaagaagaagaaaaagaagaggatactctctagtcttccctacaaggaagactggctagatactgccaaggcaaatacaaaaatcaaccagtgggttgccaatgttcagaacgagtacagagcgactccacatgatctgctgcggctcaacagaaatgtaagaagccacatgcatcgctacagcgacggtgacgacatcgaggaagttctgtattgcgaatggcccgagctgctcatggtcatgcagaagatgttgcacttggaaggcgagctcgaaggcactgacattcagaacaagtttggctaggcgtcctacttaagctactgttcttcgatcgagttcaggggccgaaagtttatgctggtggagtgatggtcgatgtaagtttgtcgctctcatcatgaaggtaaagctggatcagctttataaaatgtatgctaaaatgtaaagtaaactttaaaccattctatctgagaaggtcttttcttaatacaataccgggagtatgtctcgtcttgcttgtaaatcgtgcctgggtatctggctgtaggtttgtcttgcttgatcttgtgaggatgctgctcgcgttccttggagatcaagcatgcaaacgtctgtaaacaacatccttctcctcttactgaagataaagctggaccagctttataaaagtattatgaaaaatgttgcattaaaactctaaac

SEQ ID NO: 6525 - DNA, 3325 bp, Zea Mays
tctagaaggcggggctctccttctgcagaaaaagagagagaattaaaaaatattcctctacaaataggtaagtgtaactaaggaaagtaatcctctgatcctatcgctaccaccttcaacccggtgtccttctccttcactcctacttggcactttgacagagacaaaaaccaaacccgcggcgcctgtcgtcgctccttcgttctcgccgctgccgcactcccgacggccaccttaacaagcctctggcggaggaccaaatactctcgcgatcgccgtagcgccaccgcgtcgcccaatccgttgggagccgtcgcgcgatgcaggcggacgagcaggcggaggcgccgcgccgcgccaaggaggccggcaacgacgcctaccgcaagtccttgctcgaggaggccgtggagcactacaccctcggcgcgctccttgaccccagtgacatcgccttcctcaccaatcgcgccgccgcctacctccgcatgggcaagtacgaggagtgcgtgagggactgcgatgaggccgtgaagcgcggcagggagctcagctccggcagcgagctgatcgcgaaggcgctgtctcggaaggcgtcggcgctgctcgagctcgcgtgctgcgccgcagactacgcaccggctatcggcgccctcaagctgtcgctggccgaaaattacagcgaggagacgctcgagaagctcaacgacgcggagagcgtgaggaaggaggttgaggaacaggagcgattggatcaggaggccgccaaccaatgccgcgaggaaggcatttagcaacagagctcaatgccacatccatctgggagcctttcctcaaggtcttgaggatgccgagaaatgcattgaactagatccaacttttctgaagggctatgtgcgtaaagctaaagtccagttcctgatggaaagttatgaaaatgctttggcaacttacctagagggtctgaagtgtgacccaaataatatggaggttctggatggcttaagaagatgtgcagcatgtgttaagaggtctaatgcgggtgatgttgagatcgaggatttgaaatatgttgatattgatgaattgaaatatttctcggtacattttatatgaagtagagcaagagaactacatgatgaagagcaggccgaatggccatcgaaagtcaatcgacctctatcctgcatgccatgccatcatgaacaattggctattcagcttgactgaaggtctcgggtctatatctcctttgtttatcctgtccagtcctaccatccctatccttttctcttccattagctctggcagctttctgcacaagtgacctcggtctcaccgtcagtgcatgatgcaggtctgaatctacatcgatattaacaaaatactgccattaacatacagtgttctccatttccttcccccttttgtgcccataccatactgtgtttgtgcttgttcagacaatgctggctgcagcggctgatggtcttgatttcatgtgtcgcaatttaatttagtaaaacattaaatccttgacagcatattcagaattccacaatctagattgatacttaatcctaagcaaaattttaccttttcaagatttaaggttatgattttattgaagtcgaacccatgtgtgcaaggtcatcctctgacagatcatctagatcgccttatgcgtgcatgacttaatttggggacttagggtagtaatatgagaatttcagcggctcggcctttgacaaccttcctatgacaattgacaagagatttatttccttttaaaaaaaacaaaacactggtctttctttaaaggaaactgatgaggatcctcctggaccaatatgtgttactgagacctgagaagttagtacagttatttccacttgaaatatttcggtttagtgtgcttgattgggtatttttgtcagggtggtggtccaaacactgtacaccagcagaggaggagtggggtgatgacttctgagtgtcaatgcaacaccaaggacattgacgagtcatccgccgagaggctgtacgacgcagtgaagtacaccacggacaacatgatgctgatccaggtcccagtgttaggaacaacgaaggaattctggtgattatctgacaaagcgactaggatcagcagaaaacttgcattgatactgaggagccaccactccgtcggcaagtacctagctgctcctctgcaggtgtccaacatctggattgggagcaatgggagtgtcaagctaaggggggtcagtttcactggtcaaggcttcagcactgagcgtgtgagagatgactacaaacgcatgtccaggatcctgatggcgttaattactctctcgggtggggacagaagcaaattgcctccggactacaaagagttcctcctgctcttggaatcggacacccttacaatggaagatgaattcttgattgtaaacaatgctgcactgctgcccataaaaaaccggtaatgtctttacttattttacctttattttaccacatgctcattttgttacttgtgtccgcacttcacagcactgaggtctttctgatgctacacgatagaattgtcgattatcttgggagtacggacaaaacgaagaagaagaaaaagaagaggatactctctagtcttccctacaaggaagactggctagatactgccaaggcaaatacaaaaatcaaccagtgggttgccaatgttcagaacgagtacagagcgactccacatgatctgctgcggctcaacagaaatgtaagaagccacatgcatcgctacagcgacggtgacgacatcgaggaagttctgtattgcgaatggcccgagctgctcatggtcatgcagaagatgttgcacttggaaggcgagctcgaaggcactgacattcagaacaagtttggctaggcgtcctacttaagctactgttcttcgatcgagttcaggggccgaaagtttatgctggtggagtgatggtcgatgtaagtttgtcgctctcatcatgaaggtaaagctggatcagctttataaaatgtatgctaaaatgtaaagtaaactttaaaccattctatctgagaaggtcttttcttaatacaataccgggagtatgtctcgtcttgcttgtaaatcgtgcctgggtatctggctgtaggtttgtcttgcttgatcttgtgaggatgctgctcgcgttccttggagatcaagcatgcaaacgtctgtaaacaacatccttctcctcttactgaagataaagctggaccagctttataaaagtattatgaaaaatgttgcattaaaactctaaac

SEQ ID NO: 6526 - DNA, 6011 bp, Zea Mays
cttcctccctgcccatccccttcctctcgtaatcccggaaatccgcgggtccctcgcaatccccaaccgcgcgccgccgccgatctcgccgcgacccaggccctagcgcccgatccgtcgccgcgctggcctccccgcgctccgcaaaccctaggggttccgcgcgcgcgggagggatggaggcgctggtggggcgggcggtacggaaggcgttcccggggttcggcacctacgcgggcgtcgttgagtcgtacgaccccggcgcgggctacttccgcgtgctatacgaggacggcgactccgaggaggtcgacgccgacgagatggcccagattctcgtcggacccgcgatgccgcgcgcgcagcagcagcgcacctcgccgcaggatgccgcggggaggcgccccaagaagcgccgccgcgggaacgaggacgacccatccccgacctcgactccagacggcgtcgtgctggccgttgccgccgccgcgggcgaggagaccgagcccgcgacgcccgttatggaggcggtggcggagaagaagccgagggtcagcccgggaccagagtcgtccaggccgctgcggcggagcgcgcgccaggcgaaggcggccgagcacgcggccgagatggaggcggcggtggccgtcgcggctgccgcggaggccgaggaggaggctgctgctgctgcggcggcttcgacgccgcagcagtctgggaggaagcgaccccgcgcgattgggagtgggcggtaccgctcggtgtccagggacttggaggaggccgcccctaagaaaccgctgccaccgccacctaagccggagctgccaccatcgtcgcagggtctggatttaggcggcctccctgttctcgatgtctttcaagtttactcctgcttaaggtcgtttagcaaacagttgttcctcagccccttctcactggagacatttgtggctgcgttgcggagcacctatgtcaacccgttgatcgactgggtgcatttcacgctgctgcgggctctcaagagtcatctggaggactcggccaatgaaggagacccgtcggcggtacactgcattaggaatcttaactgggagctgttagacctagcaacttggccaatctatcttgctgaatacttgctaactaggggctcagaattgaggtatggtatgaagcttacagatttaagtttgctgagtacagagtactataggcagcctgcaggggtaaaactcgagctgctgcgttcactctctgatgatgttctagagatcggggctatacggtcaaggttgtcagagtcagatggaaacgacgagggcttcagaagcactggtgtaagaagaaaaaagaggggcaggggctcttctgctaaggtggcagtgggttcttctcaatttccagaaggatctgctgaagtggatgatggaaacagcgatgaatgttatctttgtggcatggatggcaacttgttatgctgtgatggctgtccagctgcatttcattcgaaatgtgttggggtggtggaggatcttttgcctgaaggtgattggtattgtcctgaatgtttgatacggaaggatggatctagaaatattgcaaatccaatgagaggagcagagattctaggaactgatccacacggtcgactatacttcttcacttgcggctatcttttggtggttgactcatgtgatggttactcaccatgctattattatggtcagatcgatcttcatcatcttgttgcagttttgaactcatgtcatccttcgtacagctcaatgttgaagaacggttgaatggtttgctgagtggcccttggcaaaatccacaatatagcatttgttggcgcaatgcggttctcaaggcttcagatgtgtcatcacttaagcagcctcttctaatgttagagtccagtctgcgacgtgttgccattactacggaatggcagaaagcggcggactctgttgaagttgttggttctgcagctcatattttggtccgctcgtctaataagtctctaagtcatgtaagtgctactgctagaaagccagggagaaagccgtctcctaacggtgaacttaaagttgactctcgtgatgttggtgtttattggtggaggggtggaaaattatctcgccaagtgtttcattggaagaggttgcctcagtcattggtcaacaaagctgctcggcaagctggacgtaggagaattcccacgatttcatacacggatggttcacaatttgcgcggaggttcaaatacatagcctggcgagctgctgtggaaatggcagaaaatgcggcccagctcattttgcagattaaagaacttgaatggaatatcaagtggactgagatactgagcactctcccttctagccttatgaccaaagaaacccagaaaatagctaggcttttcaagaaagttataattcgcaggaaacgcattgaaggaacaaatgttgaatatctgcttgattttggaaagagggagaacattcctcctgttatttctaaacatggaacaaaacttgaggaatcctctagcgagaggaacaggtactggttgagtgaagttcatgtccctttgaatctgttgaaggcttatgaagccaaaacatttgctcgcttactgaaaaagaaagaaactgacgaactatctaagaagactaagaaattgtgtggctcaaaaccagaaatgccaagaaagacaggctttgattacctctttgaaaaagcagaaaaaagatccaccatgccttgtggtcattgtcacaaagaggtgattgcaagtgaagctgttaactgccaatattgtgcagctcttttccatagaaaacatttcaaggtccctagaggtgctacaaatgctgtttatgtttgtaataagtgcttagatgagaaggttctaaaggtggagtctcctcagaaaaagactgcaccaaagaagctgtctcccaaaaagaagcagaagaaacaaaagaaacaatcacgcaagattgagaccaggaggaatcagatagttctgaaatgcaaaacgaaaattggcaaaaagggtaagcgtggccggcccaggaagaacccaacggatctgtcaaagaatgaaccatcaaagatccatgaaagtgaaccatcaaatgtttccaaaaatgaaccagtgaaacgtatatcaaaacgattacatgataaatacatgaaaagtaactcaaatgtatccgagaatgcagctagctctagcaagaggaagaggactgtttcacagtattcatactggttgaatggcctccgatggtcacaaaatccacatgatgaacgagcaagaagtttcaggaaagaaagagtagtttttccatcagaagatgctgaaatttctgaagtcaacccagtatgctgcttgtgtgaaaaatgctataatgaagaggatatctatattgcctgtgaaaaatgtgaagactggttccatggggatatatattctgttaacattgagaatgtgaacaatctcattggtttcaagtgccatagatgccgccggagaagtctacctgtctgcccgtatgcagagactgtaacagttgtcaaaggccagtcagatgaggatcattgcatcaagcttgtagatcaatgtgttggcaagtttgtggaggatgaggatcccaattgtcccaaagatcttggtgctccgggtagtctgcaagagcttcatgatcatgaaattgagcaggggctcaatgttcatattactgagatagaattcagttacgataactgtctagaggagctgaatgatcatggctgttcgaaagagtttgatgctcatagcactgagaaagatctagaggacgataaaagtttgagaaaggtagacatccataatgagttgagggcgcttgacgatcttggctctgagaaagaacctggtgatcattgtaatccgaaagatctcaacagtcacatcaatctgaaagatcctggcaactgtagaagtgacaaagagatgaaggataataattgtctaaatgaactagatggagacaacaattggaaagcactcgacagctataacagttggaaactgctcgacagccataacagtcaagaggagcttgactgtactacaaatagcaagttttctcctaaagaaataccatgtcctatggaacttgacggttttagtagcctgaagcttgtcagtcataacatcttggaagaacttgataatcataactgtctaaaagagaacggtaatgaaaatagttctaaagagctggacaacaatggaagtccaaaagattcaggtgactgtctagcagatcacttcaacagcagtaggatatctggcaatgaggcactggtccttacacctgaaactgattcggtaaatgaatctcttggtttgcaatccaaggatgatcctgggaagtctgttcctactgagcatgagattgatcttcaggtggtggtgactttatagtgtactttggacagtcagaaaccttccagcctcagcatgagtcccattagttccactggtcatttcttgatgctgttctggttgataattttgttgaccttgcctcattgccgtaatctacaataaggaaaaaaagctattctttatttcctttgggaaatattctgatctgactagccaagcgatagaataattaactcttgaggttaagttatattattcttaatagggctgacatagggaatagttagggtttcaatgtttcatttcctttccaagcttcacattgcctgtcagaatatggagtcatgtcacccacgattatgcattgatttggatccctctaagtacaagtgactggtatttggctgccctgcagtaatatatgatgttcaaggtgagtctcaatttcgtgttacatgtatgttcattagaacatttgacatgtttcccttaggccttgttcgtttctatcggattgcacccggaattgttccacctaatcaaagtttatataaattagagaagcaatccggttaggaatcgttccgacccatcaatccgatagaaacgaacaaggccttagtcttttcctattttccctcctgttatgcccaaacttcaaataatcagtactgatggttcgaagcaatttactagtggagtaattgtcagcaacacattacaagtgtgatgcccatattttctttcagctttatcgaccatgttaccagtctatagtaatgacatatggatattaccaactcatcaaatttgcaaaagcacacttcatcaaagtcttctcagttggcactcatcgtgtttgttctccatgtaaacagggagatagcagccacagccgccgcgaagcatgaggaggcaatatattccattccccattgtttcgttttgtgggccccttagatgttgcacaagatggatgtgccaaaacctgatgattcaatgattcattctttcaactttgctcctaacagtgagttgcaatctttatctgtaaaaaatgctccaagggaactcgtctggacagggttaattggattttgtataggtttgcgttatcagccttcctagttacagagttcactctagcatggaatcggtttggacaatgctgttttggtcctctggttacattccgcttcagcgttagattacgatcgattcttcgcggcattgcgcgcgttcttttgataaagagacgctcttctagtcgctccaaaaattctgtaattccatctcgtgtctggaatggtcggccatcgagaagaatggtagaagaacgagcgaggagccaaggaaggagacgagagtacctcagaaaactagttcctacgaaaactcctgtatagttggtgctttatagcatctccaacgacatgacataaaaatgtcctataatttaaaaaagtgtattttattgaatttagggcataaataaaacatcttgctccaacagaaaaccttaaatctagattgtagtgtagcatactggtgtagtatatttgag

SEQ ID NO: 6527 - DNA, 2255 bp, Zea Mays
atcgacctcacggtctcgactctcctcgcagggacacgcacacgtacccacccacctgtgcacacagcgccgtcttctggagcagcgtccgaaagtgtgtggagaacctgcccgatccctcccgccgcctccgacctcaccgtcggcgggcttgttcctggggtctgatcagccatgttcaagaaacctgttgatgtgaaaaccatacagcgcttgtctggggcagacaaaaagaagctaagaagaactgccaagggaaggtttccacaggcttctgatgctgaccttgatgccatccttcctcccaaggctgagataacagttgctaagtacccgaaccatgttcttgtatatggcatagagggagagttcccaatgattttcaacactgacgcaagaggtcatgaactgtttcctacagcatacctccagaagggtttccatcttttgaagctggccaaccatgggcagtaaaagttcctggtaaccctgctgcaattgcggttgggagcacaactatgagtagtactgaagctttgaaggcaggactacgtggcaaggctttaaagattttacattactacagggatatgttatgggattcggctgatggttgttatgtccctaatgaaggattttttgatgacattgttgttgaagatcctaatcctgtttcaacatctcaggctcctgattctgctgaagaacctgaagtcacgaatgatggtagtgtttcggctgaagatgcaggagtcgatatttcagacaatcatggtacaaatcctggcatccagattgaagcagtggaagagataactgatgttgttaacgaactaaaacttcccgaagataaaactactgaacaagcacctgttgaaatggaacatcataatttgagaactgaggaaattgattctctcttggacaaatgccttctgcaagcgctatacacaagcataaaagaaaaagatcttccaatgccaggaagtacactatgggcaaatcacatactaccgaacagacctcctggtgttactattgatataaaaaagtcatcacacaaaaagttgtcgaagtggttacaatcaaaatcttcatctggccttatttcagcaaaggaggacaaatataagaaggaagttgtattgcttgctatcaatcacaagcatccagactacatggcctttagaccggaaaagagggtacaggagcttgttgaacacgaaaaggatgttgctgaaagtagtgtcactaagcaattggaggttgcagagatttataagccaagttctcatgttaaacccatatttgtggctgtcgaagctgacatggagaagtattacagtgcaccagaggcttcagatatagtcttcaggtacgtcgaaaaggaaaaattggttaaacctacagacagggccaaggtgattcttgatgttacattatgtgatgcattgtacaaaggggctatcaaaaagggctcggcatacccaactgaaatccacaagaaagacttaggttcagcattcttaaaccgcatgcaagttcaccacaaggtatcgagaggaactcaggaggtcatacgcaagggtgccataagaactatccagatcatgacagaaagaagacagggcaacaagaagatgactcggctttctgggctcgagtgtttcctgatggatcctgattcattggcttctgagctccagaaaaaatttgcttgcagcaccaccacagcagagcttccaggtaagaaagggcagtacgaggtcttggtacaaggtggagtgattgatgaccttgctaaacaccttgtcgaccattacgatgttcctaaaagatacatcgaggtttatgacaaaacaaagaggtaggaagtgggggctgatcatgtccgtttaggtgttggagcgcttggatggtctacgaaatgatcccaggattgtttcatgatactttttgtcatcacatgtctgagcaatattacgacattgttgatctacgagtaccttacgatatttgttttcgttcctgcctttggttgatggaaaatgctattgtgcttactgaagaaatatggttacaggatggataatgaggtttcctcatgcttttggtgctgcagcttttcatgtccagtctgtcatcttataaagataacaatttgtagttcgtgcgactgatccatgatatgttagcatcattagtaacactcgtgatgtacagtacccgcaaatcataccgctatagtttcggcc

SEQ ID NO: 6528 - DNA, 2322 bp, Zea Mays
acgtacccacccacctgtgcacacagcgccgtcttctggagcagcgtccgaaagtgtgtggagaacctgcccgatccctcccgccgcctccgacctcaccgtcggcgggcttgttcctggggtctgatcagccatgttcaagaaacctgttgatgtgaaaaccatacagcgcttgtctggggcagacaaaaagaagctaagaagaactgccaagggaaggtttccacaggcttctgatgctgaccttgatgccatccttcctcccaaggctgagataacagttgctaagtacccgaaccatgttcttgtatatggcatagagggagagttcccaatgattttcaacactgacgcaagaggtcatgaactgtttcctacagtttatgcgctttggaaggtcccccatctgttgccagcttttacgcttaaaggtggtgaggtttcacgtttcgtgattggtggcgctgatctgatgtttcctggtatcagcatacctccagaagggtttccatcttttgaagctggccaaccatgggcagtaaaagttcctggtaaccctgctgcaattgcggttgggagcacaactatgagtagtactgaagctttgaaggcaggactacgtggcaaggctttaaagattttacattactacagggatatgttatgggattcggctgatggttgttatgtccctaatgaaggattttttgatgacattgttgttgaagatcctaatcctgtttcaacatctcaggctcctgattctgctgaagaacctgaagtcacgaatgatggtagtgtttcggctgaagatgcaggagtcgatatttcagacaatcatggtacaaatcctggcatccagattgaagcagtggaagagataactgatgttgttaacgaactaaaacttcccgaagataaaactactgaacaagcacctgttgaaatggaacatcataatttgagaactgaggaaattgattctctcttggacaaatgccttctgcaagcgctatacacaagcataaaagaaaaagatcttccaatgccaggaagtacactatgggcaaatcacatactaccgaacagacctcctggtgttactattgatataaaaaagtcatcacacaaaaagttgtcgaagtggttacaatcaaaatcttcatctggcctttttcagcaaaggaggacaaatataagaaggaagttgtattgcttgctatcaatcacaagcatccagactacatggcctttagaccggaaaagagggtacaggagcttgttgaacacgaaaaggatgttgctgaaagtagtgtcactaagcaattggaggttgcagagatttataagccaagttctcatgttaaacccatatttgtggctgtcgaagctgacatggagaagtattacagtgcaccagaggcttcagatatagtcttcaggtacgtcgaaaaggaaaaattggttaaacctacagacagggccaaggtgattcttgatgttacattatgtgatgcattgtacaaaggggctatcaaaaagggctcggcatacccaactgaaatccacaagaaagacttaggttcagcattcttaaaccgcatgcaagttcaccacaaggtatcgagaggaactcaggaggtcatacgcaagggtgccataagaactatccagatcatgacagaaagaagacagggcaacaagaagatgactcggctttctgggctcgagtgtttcctgatggatcctgattcattggcttctgagctccagaaaaaatttgcttgcagcaccaccacagcagagcttccaggtaagaaagggcagtacgaggtcttggtacaaggtggagtgattgatgaccttgctaaacaccttgtcgaccattacgatgttcctaaaagatacatcgaggtttatgacaaaacaaagaggtaggaagtgggggctgatcatgtccgtttaggtgttggagcgcttggatggtctacgaaatgatcccaggattgtttcatgatactttttgtcatcacatgtctgagcaatattacgacattgttgatctacgagtaccttacgatatttgttttcgttcctgcctttggttgatggaaaatgctattgtgcttactgaagaaatatggttacaggatggataatgaggtttcctcatgcttttggtgctgcagcttttcatgtccagtctgtcatcttataaagataacaatttgtagttcgtgcgactgatccatgatatgttagcatcattagtaacactcgtgatgtacagtacccgcaaatcataccgctatagtttcggcc

SEQ ID NO: 6529 - DNA, 3204 bp, Zea Mays
cagacggtgaccccactgcgcagtggccagcggagcattaattgcagcggttctccactcacctcacgaaaccagcaaccccagcagcaagcgcagcagacagcagtgcatctgcgccgcgaaccgccgctccagtccaatcaatggacggacacttcccatgatctcgtcgcccacctcctcttccgccgccgccgccgcggcaatgccgactccctcccgcctcctcttccccgtcctggtcctcctcgccgcgtcggccggggcggccacggccgccaccgtgagcgacgacgtgctcgcgctggtcgtcctcaagtcgggcctcttcgacccggcgggccgcctcgcgccctggtccgaggacgccgaccgcgcctgcgcctggccgggggtctcctgcgactcgcgcacggaccgcgtcgccgcgctcgacctccccgccgcgtcgctcgcgggccgcctcccgcgggccgcgctgctccgcctcgacgcgctcgtctcgctcgcgctcccggggaaccgcctctccggcacgctccctgacgcgctgccccctcgcctccgttctctcgacctctcgggcaacgcgatctcgggcggcatccccgcctcgctcgcgtcctgcgagtcgctcgtgtcgctcaacctctctcgcaatcggctcaccggcccggtccccgatggcatctggtcactgccgtcgctcaggtcggtggacctctccgggaacctgctctccgggagcgtacccggcgggttcccgcggagcagctcgctgcgtgaggtggacctgagccgcaacctgctccaaggggagataccggcggacatcggtgaagccgggctgcttaagtcccttgacctcgggcacaactcgttcaccggcgggctgcccgagtcgctgcgtgggctgtccgggctgagttttctcggcgctggtggcaatgacctatcagaggagctccagccgtggattggggaaatggcggcgctggagagactggatttgtctgccaaccgctttaccggcaccatcccggacgccatttcaggctgcaagaacctggtcgaggtcgacctcagccggaacgcgctcactggggagctcccatggtgggtgtttggggtacctctgcagcgcgtctccgtctctggaaatgcactgtcagggtgggtcaaggttccccgtgatgctgctgccaccctggaagccctggacctttcagccaatgctttcactggtgtgatcccgcctgagatttccacccttgcaagattgcagtacctgaatttgtcctcaaattccatgtcggggcagcttcctgcaagcattgggctgatgctgatgcttgaggtgttggacgtgagtgctaacaagttggatggggttgtgccactggagatcggaggtgccgttgcgctccgacagctgctgatgggtaggaattcacttactggatggattccggtgcagattggcacatgcaaatccttgattgctttggatctatcacacaacaaacttgcaggatcaattcctatatccatgggtaatcttactagtcttcaaacagttgatctctcagataacttgctgaacggcagcttaccgatggagctctcaaaacttgacagcctgcgtttcttcaatgtctctcacaattcgctgtcagggagccttcccaatagtcgcttctttgacagcatcccttattctttcctctccgataatgctggcctttgcagttcacagaagaacagttcctgcaatggtgtcatgccaaagccaattgttttcaaccctaattcttcgtcagacccctggatggatgttgccccaagttccccaagcaaccggcaccagaggaagatgatattgagcatctcaacactcatcgcaattgtgggtggagcagttattgttatcggtgtggtcaccataacagtgctcaacctccgtgcccatgcaacagcttcccgctctgcacttcccacttcattgtcagatgattatcatagccaatcagctgaatctccagaaaatgaggccaagtctgggaagctagtcatgtttggcagaggcagctcggattttagtgctgatgggcatgcgttgttgaataaggattgtgaacttgggcgtggaggctttggtactgtttacaaggcagtgctcagagatggccagccagtggccatcaagaagctgacagtttcaagtatggtcaagtcagagcatgacttcaagcagcacgtcaagcttctaggcaaggtgcggcaccataacattgtcaccctcaaaggcttctactggacttcctcactgcagctccttatatatgaattcattcctgctgggagtttgcatcagcacctccatgagtgctcatacgagagctcgctttcatgggtggagaggtttgacataatcgttggcgtggcccgcgcacttgtgcacttgcatcgctacggtataatccactacaatctgaagtccagcaatgtcttgctagacacgaatggtgagcccagggttggtgattatggtcttgtgaacctgctgccgatgctggatcgctatgtgctcagcagtaagatccagagcgtgctgggatacatggcacctgagttcacttgcacaacggtcaaggtcacggagaagtgcgacatatacagcttcggagtgctagtccttgagattttgtcaggcagaaggcccgtagaatatctggaagatagtgtggttgtgctttctgatcttgtcagtgatgcactcgatgatgacaggctggaggactgcatggatccacggctatcaggtgagttctcgatggtggaggccacactgatcatcaagctgggcctggtctgtgcatctcaggtgccttctcaacgaccggacatggctgaggtggtcagtatgcttgagatggtgaggagtcctcagggtaccccagaggatgatctggtttgagatccatttagggtatgtgtattcgttttcggagccattttcgccaatgccctggcacttcacatctcttcatatcttgctgagattcagtacatatgcggcctgtgccctgcccactgccagagtgctcgacccatcgaccgggtccagttggctgtctggtaagacactaggcagtaggcacgtcggggagtttggcccagcgtggagtgctgtcgtggagtgcg

SEQ ID NO: 6530 - DNA, 3213 bp, Zea Mays
ccagcagcaagcgcagcagacagcagtgcatctgcgccgcgaaccgccgctccagtccaatcaatggacggacacttcccatgatctcgtcgcccacctcctcttccgccgccgccgccgcggcaatgccgactccctcccgcctcctcttccccgtcctggtcctcctcgccgcgtcggccggggcggccacggccgccaccgtgagcgacgacgtgctcgcgctggtcgtcctcaagtcgggcctcttcgacccggcgggccgcctcgcgccctggtccgaggacgccgaccgcgcctgcgcctggccgggggtctcctgcgactcgcgcacggaccgcgtcgccgcgctcgacctccccgccgcgtcgctcgcgggccgcctcccgcgggccgcgctgctccgcctcgacgcgctcgtctcgctcgcgctcccggggaaccgcctctccggcacgctccctgacgcgctgccccctcgcctccgttctctcgacctctcgggcaacgcgatctcgggcggcatccccgcctcgctcgcgtcctgcgagtcgctcgtgtcgctcaacctctctcgcaatcggctcaccggcccggtccccgatggcatctggtcactgccgtcgctcaggtcggtggacctctccgggaacctgctctccgggagcgtacccggcgggttcccgcggagcagctcgctgcgtgaggtggacctgagccgcaacctgctccaaggggagataccggcggacatcggtgaagccgggctgcttaagtcccttgacctcgggcacaactcgttcaccggcgggctgcccgagtcgctgcgtgggctgtccgggctgagttttctcggcgctggtggcaatgacctatcagaggagctccagccgtggattggggaaatggcggcgctggagagactggatttgtctgccaaccgctttaccggcaccatcccggacgccatttcaggctgcaagaacctggtcgaggtcgacctcagccggaacgcgctcactggggagctcccatggtgggtgtttggggtacctctgcagcgcgtctccgtctctggaaatgcactgtcagggtgggtcaaggttccccgtgatgctgctgccaccctggaagccctggacctttcagccaatgctttcactggtgtgatcccgcctgagatttccacccttgcaagattgcagtacctgaatttgtcctcaaattccatgtcggggcagcttcctgcaagcattgggctgatgctgatgcttgaggtgttggacgtgagtgctaacaagttggatggggttgtgccactggagatcggaggtgccgttgcgctccgacagctgctgatgggtaggaattcacttactggatggattccggtgcagattggcacatgcaaatccttgattgctttggatctatcacacaacaaacttgcaggatcaattcctatatccatgggtaatcttactagtcttcaaacagttgatctctcagataacttgctgaacggcagcttaccgatggagctctcaaaacttgacagcctgcgtttcttcaatgtctctcacaattcgctgtcagggagccttcccaatagtcgcttctttgacagcatcccttattctttcctctccgataatgctggcctttgcagttcacagaagaacagttcctgcaatggtgtcatgccaaagccaattgttttcaaccctaattcttcgtcagacccctggatggatgttgccccaagttccccaagcaaccggcaccagaggaagatgatattgagcatctcaacactcatcgcaattgtgggtggagcagttattgttatcggtgtggtcaccataacagtgctcaacctccgtgcccatgcaacagcttcccgctctgcacttcccacttcattgtcagatgattatcatagccaatcagctgaatctccagaaaatgaggccaagtctgggaagctagtcatgtttggcagaggcagctcggattttagtgctgatgggcatgcgttgttgaataaggattgtgaacttgggcgtggaggctttggtactgtttacaaggcagtgctcagagatggccagccagtggccatcaagaagctgacagtttcaagtatggtcaagtcagagcatgacttcaagcagcacgtcaagcttctaggcaaggtgcggcaccataacattgtcaccctcaaaggcttctactggacttcctcactgcagctccttatatatgaattcattcctgctgggagtttgcatcagcacctccatgagtgctcatacgagagctcgctttcatgggtggagaggtttgacataatcgttggcgtggcccgcgcacttgtgcacttgcatcgctacggtataatccactacaatctgaagtccagcaatgtcttgctagacacgaatggtgagcccagggttggtgattatggtcttgtgaacctgctgccgatgctggatcgctatgtgctcagcagtaagatccagagcgtgctgggatacatggcacctgagttcacttgcacaacggtcaaggtcacggagaagtgcgacatatacagcttcggagtgctagtccttgagattttgtcaggcagaaggcccgtagaatatctggaagatagtgtggttgtgctttctgatcttgtcagtgatgcactcgatgatgacaggctggaggactgcatggatccacggctatcaggtgagttctcgatggtggaggccacactgatcatcaagctgggcctggtctgtgcatctcaggtgccttctcaacgaccggacatggctgaggtggtcagtatgcttgagatggtgaggagtcctcagggtaccccagaggatgatctggtttgagatccccttaccggagtttctcccttttctcattccttttttccattcgtctttgggtagatacatgttgaggagatggggaaagtgcggtccgaaagtatgttaggtctttgactagtgagtctagtttggttgcaatatttaggcacttctctatctcaggtgtctgaatttttagttgattttagggaacactcttgaataaccaactagtataagaaaattattgtttttatgatttgtgatttttctttgtatcgtaacaaattcaatttttatacttgcctgcctatagaaatgattgttagttatcttt

SEQ ID NO: 6531 - DNA, 938 bp, Zea Mays
ccaagatacaactctcacgggtaacaactaacagcatcagcaagcttgatgcagcaagcaaccagacgacagaaaagctagtctaatgtaatggctaatgccctgggggtgtctttgctccagcaagcagcagcacaccaaaggatggaatatagatgccccggcaagtaactcctggagtcattttggtccagctgggagcagcacaccagaatcttgcaaaggctgtgccagaggagcacaagaggtttctgcatgatttggtttggatacatgaagaggaaaatgtgccagttgatatggatggaggacaaatcatctgcaatctgattgctgtccatgctggcctagagaggaccatagatttgaatgagcaacttagagttttaagaactagagacacaagggtgccaaaggttcaaatgcttagtgggaggcaagatgtttgggacacacccaagggtctggccggcaagcagactattattgtaagtggccaccacgggaagctccacatcgacggcctccgatttataatcgacgaaggtggtggttatgaagacaaacctattgctgcgatagtttttccttcaaagacattgatcagaagtaccgaggaagcgggaaccacatcagagaggtgatctagagttctagacatcgtcaggagcagtgaacacggaggcacagttttttctctcttgaagttactgcttgtagtcatgtactcatgtcaaacgacaataggaataacgtccaaaggcaataagttggtgaaccggacctgcgttttctcaatttagtcactgatgactatatgtctatatatattgtaccttgatgctgtcaatttagacgagaccgtacatcctctttttttagggcaataaactttactccctgtcctcaaatatttgtacacaaagagtggtggtgag

SEQ ID NO: 6532 - DNA, 1097 bp, Zea Mays
aaataataagccctttctcgacctttggggaccaccttcattaccttgcaccaccaatttgagaatatgccggtggaagattgtggtgtgatggcatggcagtgaggcccagccactggaaaattataaaccaaacctgttgagcaaagacactggaaagcacaggcgctggattgattcttcttcctgaccacaaataggacaggctgctggatgaggagtcctctcttggcaagctgatcagcagcagctgtgcaaagcaagccagataatgtaaattttctacacaatatcagaatgcctgcttcaatgagttttatgtttaatacttaacacagaaaaacttgtcaagctattcactgataaagcaagatcttgcaaaggctgtgccagaggagcacaagaggtttctgcatgatttggtttggatacatgaagaggaaaatgtgccagttgatatggatggaggacaaatcatctgcaatctgattgctgtccatgctggcctagagaggaccatagatttgaatgagcaacttagagttttaagaactagagacacaagggtgccaaaggttcaaatgcttagtgggaggcaagatgtttgggacacacccaagggtctggccggcaagcagactattattgtaagtggccaccacgggaagctccacatcgacggcctccgatttataatcgacgaaggtggtggttatgaagacaaacctattgctgcgatagtttttccttcaaagacattgatcagaagtaccgaggaagcgggaaccacatcagagaggtgatctagagttctagacatcgtcaggagcagtgaacacggaggcacagttttttctctcttgaagttactgcttgtagtcatgtactcatgtcaaacgacaataggaataacgtccaaaggcaataagttggtgaaccggacctgcgttttctcaatttagtcactgatgactatatgtctatatatattgtaccttgatgctgtcaatttagacgagaccgtacatcctctttttttagggcaataaactttactccctgtcctcaaatatttgtacacaaagagtggtggtgag

SEQ ID NO: 6533 - DNA, 1983 bp, Zea Mays
actgcttcttccacctccgccgcacacgttgctgccccccattccttccctcccagccagccctgctcgctcccgcgcgcgggctaatacacaatatctggcgccgctcctcctcggcttcggctgcccctcgcgcactcgcttcccgtgggccgcgcgggtgaaggagcgtacgtgcgggtggttgatttgtggctagctggtgcgcgcgggatggcgtcgctcgccgtgtccggcgcgaggctcggggtggtcgtgcgggccggcggctcggcgggatcgggcggggagcgcaggagtggggtggccttgccgtcggtgctcttcaggaggaaggacgccttctctcgtgtcgttctgggctgtgatggtgctcctggaaaagagctgctgatggccggatgtggcagtgatcacttgctttcatccacagagcctgtcgtggatgctctgcagcggtctgaaggattacagcagcgaaaatcgaagtcgtccggggtaacggagaccggaccagacccagcgcggcggcggcggcggacggaggtgtggcgtggcggtcgagcacggcgcaaggatggggagaggcgccgtccaaagtccaggcgagatggaagcggaagggccgaaggggtggggactggggactactctctgcatcgagttggacggcgtggatcaagccactctagaatcgaacgcctccggcgaacagccgtagcggaaacgccgcccgagatgtctgctccctccgccccaccccgcacggtgatctgtgtgggcgacgtccacggctacatcacgaagctggagagcctctggtccaacctccaggccgcactccccgccgacgccttcgccaccgcgctggtcatcttcctcggcgactacaacgaccgcggcccgcacacccgcagggtcctcgacttcctcctcgcgctcccgacgcgctaccccgcgcagcgccacgtcttcctctgcggcaaccacgacctcgccttcgcggcgttcgtcggggcgctgccgccgccgcccgacggctccccgttctcggccacctgggacgagtacatccacaacgaggagcacgaggggtggttccgcgggccgggattcgagggcatgcacgtgcaggggaggcggtggggcggggtcatcaaggagaggtggaaccccaagaagggcctcccgtacaagggctccatctacgacgcgcagcccaccttcgaatcctatggcgtcgcccatggttcctctgatcttgcaaaggctgtgccagaggagcacaagaggtttctgcatgatttggtttggatacatgaagaggaaaatgtgccagttgatatggatggaggacaaatcatctgcaatctgattgctgtccatgctggcctagagaggaccatagatttgaatgagcaacttagagttttaagaactagagacacaagggtgccaaaggttcaaatgcttagtgggaggcaagatgtttgggacacacccaagggtctggccggcaagcagactattattgtaagtggccaccacgggaagctccacatcgacggcctccgatttataatcgacgaaggtggtggttatgaagacaaacctattgctgcgatagtttttccttcaaagacattgatcagaagtaccgaggaagcgggaaccacatcagagaggtgatctagagttctagacatcgtcaggagcagtgaacacggaggcacagttttttctctcttgaagttactgcttgtagtcatgtactcatgtcaaacgacaataggaataacgtccaaaggcaataagttggtgaaccggacctgcgttttctcaatttagtcactgatgactatatgtctatatatattgtaccttgatgctgtcaatttagacgagaccgtacatcctctttttttagggcaataaactttactccctgtcctcaaatatttgtacacaaagagtggtggtgag

SEQ ID NO: 6534 - DNA, 1308 bp, Zea Mays
caaacacacacaacaccagctcatcacatccatctcattctactactgcctcagagaccaagctgctgcaaccggagaaggagatctattctacaaagtgaagtacttagcttgggacatggaaaccgtcgtgggagacctcatggcgaccgagctgaggcttggcctgccgggcaccaagcgccccgccgccgaggaggaggaggcaaacaagcgcgacgcggaggcagcacccccggcggccaaatgctgccggtggtgctcacgcgcgccagctacttgtcaccaactcttgcagggcgcccgtggtcggatggccaccggtgaggtcgtaccggaagagctgcttccagcaggcaaagcagcaggccgtcagcagcagcagcaaggcggccgacaaagaggatgctgcggcgccggcgcccagctgcacggcgtccgcagccgcctcaaacgccaccgccagcgccggggccggctcattcgtcaaggtgagcatggacggcgccccgtacctgcggaagctcgacctgaggatgtacaaggggtaccgggagctccgggaggccctggaggccatgttcgtctcctccggcagcgccaacaacaacaacaacctgtcggagttcgccgtcacctaccaggacaaggacggcgacctcatgctcgtcggagacgtgccgttcgagatgttcgctagcacctgcaggaagctgaggatcatgaagagatctgaagccacaggcctgggatcggcgagacaatgaagaaggtctgacgacgaccgagggcccgacaacgttcatgtcgatctcttctttttttttctttttgccccattattttattttgttcttcttgtccgagagaccccaagccaaaaggatgagcttggtgggtggcgcatcaatctacaaagcgcatgcatatacgcggatgtgtgtgcggctttggttctgtaagacgacgactagtagctaggtcttttttagcagcagcacagaagctaaggagatgcatgctgatgacgagcggttgtttcggcttagctctccgtatgctgtgtttgtacaaaccaaacaatacagttatcttcaccgtcgttgatcccttactaattgcttgtggagatcgaggcgatggtcctcttgagctttcagcttgttcagcgtttcgatgccttcgttttcgtattccgtatgtgtgagttcatggcgttatatatatgacatgtgatcccttactaacagttgggattaaccccaagcaagaagaagtcatgttacgaggcaaagcaataaagggcag
